United States Patent Application Publication US 2011/0183924 A1 - sequence listing, part 15

SEQ ID NO: 36401 - DNA, 1090 bp, Homo sapiens
  misc_feature (1087)..(1087): n is a, c, g, or t
  misc_feature (1089)..(1090): n is a, c, g, or t
aaatcatcggccattggttatcagctcaactctcaacccatttcctctccacttgatcttagccaaaaggccgagaagcgattcccatttcctctcatctttcctgggggaggtgggggaggtatgctgaaaatcccaaccctttaatcctgtggttgcttgctgtggtaaccagcaccccatcttgtggttatctaggggctttccacaaatcacctcattagcataaactccggtgttgtggaaggggcttgttaggaataacagaagtcacttctttcacctttattggcctggagctgctccagagctgtttcaggacaaaagaccaaatattttaacaaaagataagctatgagtgaggaattgtggaagaagaccaaaatatgtatttcttattatatcacaactatactttggtatttctgtgtttttcattttacttctttgagtttagtgagatgtcatgaatttttttttttcagtcaagtttcctgattatattggtcaggtttcttttgactgtaagtgacataatgcattctaaactagctgaagccagaagtggaatttgtggatcaccatattctggcttacataaccagaccaagggaaggacatgggtatgctggcctctggtacaaatgaaaccaggactttttttccatctttccctgtcattggtgccatctttgtttccttgggctactttttgctgttcaacaggaaacaatgtccatcagtagctcctggcctcacattttataacttcatcagtagagagcttcttcccttaattccaatttgaaaatcctggggaaaaaccaagatgggcctggcttggaaacacctgcccaccccagcagccagtggacgacctctgcgatgggcaacaactttcacagaacaggatagttgcaatgagggggagcgcccctcagaggaggtgagggtactgatcagaacaatagctgtccctgcactggggttcagccaaggccccaaaacgctttttcagcataagaattaatactacttttatatgtaatgatagtttttattcctaatcttaccctgaaacgcttgnann

SEQ ID NO: 36402 - DNA, 434 bp, Homo sapiens
ttgaaacagtgttcgtaagatgctggttcctgtctgatttattactgggtccctacacttttccacctagcactgagagacacgttgcaattttttccgtcagttggctactgtgctgatatgcctagattttcttaatgcttttttaatacttttattgtaaaacataaatatcaaaaagccacacaaaacaaatgtacacaacttagtgaattattacaaagcaaacacccatatatatcactagcatttaggtcaagaaatagaactttgccagagggaccaaaattttacatcccatcctgatcacatttccctctgttcctccaaaaataaatgccatcctgactttatagtaattacttccttgcatctctttatggttttattacccaaatgagcagcctgacccactgagttttagtcttacccat

SEQ ID NO: 36403 - DNA, 454 bp, Homo sapiens
aactaacctgcacattgtgcacatgtaccctaaaacttaaagtataataataataaaaaaaactaaaaaaaagagatataattgacaaaaattgtatatattatggtgcgcaatatgttttgatgtatgtatacattgtgaaatgcttgccacaatcaaactaattaacatgtctatcatctcacatagttttgtgtgtgtgtagtgaaaacatttaaaatctactcttagcaacgttcaagtatacagtactttatcattagctataatcaccatgctgtacaatagacttacagaatttattcatcctgtctaactgaaacttttatttttcataattttaaaatcttgttaaaataccgttcactttaaggtctacattgtattctactaatttcatagttttatgtttcacaattgggttttaatccatcaggagttcacctttgtaaaa

SEQ ID NO: 36404 - DNA, 911 bp, Homo sapiens
atacaaattactggtgatttaagatgattcttccaccagaatgccagtggaaatttgtacagtgtaaactgtgaaagtgctaagtagagtgaacttcagaaatattttgagtagccgccatcgaggatggaagggttgcagggcgtgattaaccagcagaaagttatgaggccccctgtgtggctgctgtggcatctccatcctgcctcatcactgggggtcttgcacgtggcagtcacatagtgtgtgttgttcatggggactctgcactgctttcgagagagatgaatgacatgattagctttatagccagtgtgattttgaggtggggtttcgggattgagcataaggtatacaaagtgaaagagagaaaaggggagataaaaaggagaacttgagctctacaatcagaattagcttttttcttcagctcagatgattctcacactggctttaaggttgtgattgttttttaatttcctggcgcttaattgttgcaacagtgtatgtgtcaattttaaaaaaacataggttttctttagttgaaaagttggactctctgctgccctatgtctctgtaatatgaataccacaaaattattgtaccaccatttaatgtagaattgatcaagaatgtgaccaaagtcagtgaatttgatgtctgttcatggataaaattattccctggtaacaagtttatctgcattcttagtaatttgataaagaccatttaaatcagcctgattcctatcgatataaaaatcacaaaaatgtttaagatgcctatttctcctgagaacaggaatgctagctgtcagttttctagttttgctttcataccatggaattccttagaaatctgttttgtgagttctaaatcatgcatattcctgtgttccaggatttctctc

SEQ ID NO: 36405 - DNA, 303 bp, Homo sapiens
gatgtaggtgagaaatttggacctaaataaagaaagactgtaagtgaagacataaagaaaaataaagtttttttccttatttttaattctacatggaaactgtttaaaattatacttttaacagtgtattcagtgccaaaacacatgagtaagtaaaatgaatggcagtaatatcataaggaataggagtgaggaatttggaatactcttataagttatctgtactacatgtgaaatgtcagattttaatttgaaggcaggtttagattagttaaaaatgtgtattacgccgggcgtgatggc

SEQ ID NO: 36406 - DNA, 597 bp, Homo sapiens
  misc_feature (594)..(597): n is a, c, g, or t
cagaaatgaaaagtctgccttatggaagacaaggcaccgacgctttccctgacagcatcatcatcacccaactagggcagctgacccgcgtcttcctcacgacgtggaatggtttgagtcaagggttttcatggccatgagccacgtggaggctgtgctttttgtttcctgtgagaaatcttcaaccagcgccactctcagcctcccctctgccagcgcttctgtggctgcacctgcattcgtgggctgtggctgcgaagcacaggaataattgatggctctggggcactttgctgggctgcttccagaaaagttgacccctccctgcaaaccagcactgcccagcattcttgtcccgccaagcctgactgtgagctgttgtgacgttgccactttgctcggaaaggaccccttaccttttatttcccttgcatttctttcaattctaccattgaccatttctcatacgtgtggtcatcattgtatttcgcccccattttgtgaggtttagtgtattcttaaagtttcctgggttttgatgagagcatattctgtcattatatttaacaggtgttttccccagcttgaaaaaannnn

SEQ ID NO: 36407 - DNA, 363 bp, Homo sapiens
atggtctccttagaaacattagcagactttaaaaaatgaaaatagcccatgttcattgtgaaaaagtgagccatggcctccggggcaccggagccacagagccaccacgctttgcttttgtttctcactcccctactctccccacataggcaccgacgctttccctgacagcatcatcatcacccaactagggcagctgacccgcgtcttcctcacgacgtggaatggtttgagtcaagggttttcatggccatgagccacgtggaggctgtgctttttgtttcctgtgagaaatcttcaaccagcgccactctcagcctcccctctgccagcgcttctgtggctgcacctgcattcgtgggc

SEQ ID NO: 36408 - DNA, 1507 bp, Homo sapiens
  misc_feature (1269)..(1269): n is a, c, g, or t
  misc_feature (1272)..(1273): n is a, c, g, or t
  misc_feature (1278)..(1278): n is a, c, g, or t
  misc_feature (1282)..(1282): n is a, c, g, or t
  misc_feature (1311)..(1311): n is a, c, g, or t
  misc_feature (1316)..(1316): n is a, c, g, or t
  misc_feature (1321)..(1321): n is a, c, g, or t
  misc_feature (1323)..(1323): n is a, c, g, or t
  misc_feature (1331)..(1331): n is a, c, g, or t
  misc_feature (1351)..(1351): n is a, c, g, or t
  misc_feature (1367)..(1367): n is a, c, g, or t
  misc_feature (1379)..(1379): n is a, c, g, or t
  misc_feature (1389)..(1390): n is a, c, g, or t
  misc_feature (1395)..(1395): n is a, c, g, or t
  misc_feature (1416)..(1416): n is a, c, g, or t
  misc_feature (1422)..(1422): n is a, c, g, or t
  misc_feature (1430)..(1431): n is a, c, g, or t
  misc_feature (1435)..(1435): n is a, c, g, or t
  misc_feature (1464)..(1464): n is a, c, g, or t
  misc_feature (1470)..(1470): n is a, c, g, or t
  misc_feature (1475)..(1475): n is a, c, g, or t
ccgaaaaaaaatctatttatatatatatagtccaccctcacctctatctaatctagtggttctccaactttaatgtgctcaggaatcacctggagaatttgtgaatttatgaaaacagtttcctggggcccttcccaaatatgcagattcagtaggagtggcagggcccatgaactcacattctgtgacgttcacacagaggggctggtgctgctggtcaaagatcaccattagagcaatgctggatcatctattcagcctactctccctaactgtttccccgcagaggcttcagggcttttgagggttacttagccaagtcattgcctctgttcccggagccatctgccaatttcaagtgccacatcatctgggtatcatgagagcccatctccatctgccagcctggaagcagccatggcaaatgggatgtgtcccactgcccccgtttggtgccacagttgggtttattctcacagctgcaaacccacgtgctgggctgcacagctgcctgaacgaagctggagcgtgcagaacaaactgcatggaatgtcacgtggggttttccactctcgcccacagtgagttggcaatgcctggccacgtgtgctctgtggtctttgaacttgatctgggaggacagaacttcaaaaggaagatgaaggccccagcaagggaggtattcctgtcttgagcagaaggtaaaggtagaaggtgcagattaggtactgggaatagtcatggtttggtttgaatggagtagaagattccagaggaagagcagtggggcacagtggggagtgaagggggccatggcagtctgatgcagggaagggatacgcccaagatggccaggagagaagagccgaggggcagggtgagcaaaaggtgaataagggctcagacgacatgacggcaccggggatggcaagggctggacgcagcaggaccgtggtctgttctgtgatggattgtcgggagaaacgggagcgtgtgaggaattgaaaaggaggcaacattctgattctgagtctggatgcctgaaaaatagaagtcccagagatcaaaatagtagaggctggaagaaaaatggatggggaagaagtgagcttgaaagaatccttagaagtcactgttatgggcttagttgtatcctcttaaaattcatataatgaagccctaaccctcccagacctcagaatgtgactgaatatggaggaagtgtctttcaagaggtaattaccgcctgtaatcccagtactttgggangcnnaggcnggcngatcacttgaggtcaggagtttgagaccngcctngccancntggtgaanccctgtctctactaaaaatncaaaacaaattagccnggtgttgtggcnggcacctgtnntcccngctacttgggaggctgaggcnggagantcgcttgnncccnggaggtggaggttgcagtgagtggagatngctccnctgcnctccagccagggtgactgagactccacctctg

SEQ ID NO: 36409 - DNA, 381 bp, Homo sapiens
gaataggaatattacctgtctcatggggttgttataagggtgaaatatatgagttcatacatgtaaagcgcttaaaacagtgcctggcacttagcacagcgagggtactgttctccgccatatttgacagggccctagtcactgctttcagttgcattgctccttgcttcaacagccctgattgaatgccttctttagttgcatccacactaaaatagatccttcagttcctagggcacgcacggggcagcagcatcttcagagaacagttctctcttccacgtccacttgaattcttatttcattctccagcctgggcaacagagcgagcccctgccttataaaaagaaaatgtgtgtgtgtgtgtgtgtgtgtgtgtgt

SEQ ID NO: 36410 - DNA, 475 bp, Homo sapiens
gctcattcttgagctgctcctgcatagatctcgtcctgttcaacacaccaaagattgacagctgaactgagagaccatcacccacagacacaactggccactgggtggtgcacaagtcagacagaactgaatagtcctgtgaagactttggacactgaactgactttggaaccagactgcagaatggaggggtgggaacttgtggcttgaacctaatcaggtagattgcctggccaaaatgaaaatacctatcatctccataggatttaatttcattcaatgattttttttttagtaaatttgcaatgttttacagccatccccaaaatctaattccaaaatatctctatcaccccaacaagagactccattcaggttggcagtcacatgcactcccagatttcccctctgcccagcccttggcaatcactagtctactttctgtgtctttgagtttgcctactctggatatttc

SEQ ID NO: 36411 - DNA, 233 bp, Homo sapiens
ccaggaaagaaaagaacatttggcctgtttccggcaactcatctaacttacaaatgggatccccaaatatctcatcataatattgagagtgatcagcttttccatttctggatggaattgagaggtacagaaaaaaaaaacagtaaatagaatgatggtctcttccaaataaccaacatgaagctccttcatttaaaacagggaaaagtacaagaaactccaaagaaagcatg

SEQ ID NO: 36412 - DNA, 260 bp, Homo sapiens
gtgatctgcccacctcggcctccccaagtgctgggattacgggcgtgagccactgcgcccggcctcagaatgcaatttttttaatctttatttttgaatatttgcagtgtactttccatttcagcatccttgtttgtctgttttttgagacaaggtctcactcccattgcccaagctggagtgtggtggtgcagtcacggctcagtccagtttcagcttcctgggttcaggcgatcctcccgcctgggcctcctgagtgg

SEQ ID NO: 36413 - DNA, 829 bp, Homo sapiens
aataatcttagaaaatatgattctttaaacatatgcataccacatctttaaacataaacataccacacagtgcaccatcacttccttaaccattttccaattgttcacttataacatttgcaattttttattataaatcatattgtgatgaatactttcatccataagttttattgcaaggcttattgtttcttctaatgtcttctaatttcaaagaagtggcttactggttcaaacagtgcacatacgtggttttaaggcttttagtatactttaccaaataatctccagaatagctccaacaactcctaccaacagtatgttattgtgcccatagggtggacttgataacagcaaagcaaattcaaccacagatatattagattctcacccatctcaaaactatcacatcagagaagcaaggagacatattattggtgaggaagccaaattcaaattcttttaaaaaatcactcagctttagatcagtaaaataatcaacaaaaatggtcaccgcaaagtctaccgggtttttcaaaaaataaaaagagagaaagagaaaggccaggcgcagtggctcatgcctgtaatcccagcactttgggaggcctaggtgggccaatcactaggtcaggagttcgagaccagcctggccaacatggtgaaatcccatctctactaaaaatacaaaatattagctgggtgtggaggcgggtgcctctaatcccacctactcgggaggctcaggcaggagaatcacttgaactcgggaagtcgaggttgcagtgagccgagatcgcaccactgcgctccagcccaggcgacagtg

SEQ ID NO: 36414 - DNA, 892 bp, Homo sapiens
caagtatatttattttcatacctgttataactgctactggaaaggagaaatactgttgtcttattttccaagagatatacacagccttgttgattttagaatcattaaaatttttaaaattgcagaccatacaaaagtacacaataatgtaggcttgttcctcattccagagattacttcaaaattcgttcaatgaaacctctgcctcccaggctcaaaccatcctcccacctcagcctctcaagtagctgggactacaggcatgtgtcaccacgcctgcctaatttttttgtattttcagtagagacgagttttgcatgttgcccatgctgatctcgaactcgggagcgtgaagtgatggcccacctcagcctccctcaggattacaggtgtgagccaccgtactccgcccatgatgggctttttgtttgttttactgtatgcttttgcttttctccattttcaagattagtgattgtactgttggcatgcctcagaaaatgtttttctttcctttatcttccctcttttcttcaattcttaaaactttctttctttttagaaaacctgtaatgaagcactattctctgggttttcttctctttctgttttactgttgcacagcctagattttatatgaaaggctgggccgggcgtggtagctcacacctgtaaacccagcactttggcaggctgaggcaggcagatcacttgaggtcaggagttcgagaccagcctggctaacgtggtgaaactccatctctactaaaaatatgaaaattaggctgggcctgatggcacacacctgtgatcccagctactcagggaggctgaggtgggagaatcacttgaaccccggggaggcggaggtttgcagtgagccgagatggtg

SEQ ID NO: 36415 - DNA, 420 bp, Homo sapiens
aataacaatagctaacatttgaaatgcatccatgctcttgtataatcagagtcaagtatatttattttcatacctgttataactgctactggaaaggagaaatactgttgtcttattttccaagagatatacacagccttgttgattttagaatcattaaaatttttaaaattgcagaccatacaaaagtacacaataatgtaggcttgttcctcattccagagattacttcaaaattcgttcaacttaaggcctggcaaggtggttcatgcctgtaatcccaacactttgggaggccaaggtgggtggattgcttgagtccaggagttctagaccagcctggacaacatggtgaaacctcggctctactgaaaatacaaaaaactagcagggcatggtggtgtgtgcccgtagtctcaa

SEQ ID NO: 36416 - DNA, 565 bp, Homo sapiens
gctcacctcctgcacacctggaacaccccctgtcacctgtgcaccttaggctttatgtcaagccaggatagaagatggacaggccatggggtacctgcagcagaggatctccacttcagctacctggagggaatccactttcagggttgtcagcctagctattgtcacaagaagtaaattcccctgtccaaccagcccacaaaaccagaacagaactgctctgtgactgtccaggcatacactctgagacctgaggcatgtcttgccccctcacgggtgacttctcaaaaggctttcccctggcagagcatccgttttccttctgttgccaataaaaatccccagctctgttctttctccttcgcatccttctattgcttctgacagagtttgccagttagctgaggtcaggatttcctttttacaaacaacctgttttcagtcagcaaggccagaggtttcttaaattacaaaccctttcatttcttttgccgcaagtcatcctgtcagtttgtataatgacatagaatggagagaaatggagatgtgcagagagacactgaaa

SEQ ID NO: 36417 - DNA, 371 bp, Homo sapiens
caaaactttacaggaagccaatattgtagctgtactcatcttgctgctattgctctagaagaaataataattaataactaatttgtagcagtaggtttaagaggaaaacaaagtgcagctattctgttgagttaaactgtagaaccacttgtgttaacattcaggcaagttggcaatagaattaatatactttcatggaagctgaagaccatgacaaaagtaagtactgaaagagagggccagcctatgtcctctgcatggagaaaggccaaggagagatttttgggctgggccaagacattcctcaagaagtggttttgggtttgacaaagcagacaaatggggcctcaaaaccacaggttctacctaac

SEQ ID NO: 36418 - DNA, 154 bp, Homo sapiens
gtaccttgaataatgagaatagattgtcattgataaagtaattgtgtgcaaaatatgtagagaactcttataactcaataatgaggaaaaaaactcaaaaagtgggcatttggacaaacaccacagaagatttttaaatgacaaaaaaaagaca

SEQ ID NO: 36419 - DNA, 377 bp, Homo sapiens
tttttgttattttaggagtgagtttctaattaattcagtttatatgcatttcctatctaaagtcttttcacattttcaaagctcctgcacgagtgacagaaaaacacaagcttaaaatatctagagaaacagcaccacagaaataggatagatagataattgagaaggcatctgccctctatccagcacagggtcagtactacttctggtacttaccctgctcacatatgaactgactaatatacaagattatctattggagcattatctgcaataccaaaagactggaaataaacaggtgtccatcatcaggggctggttaattactccatgggtagtaaatagttacataatgacatctaatgaatttctcatcc

SEQ ID NO: 36420 - DNA, 348 bp, Homo sapiens
taatttattttataacaatccaaaatgcatgatgtcatgaataggtgctgacaggagagaattggtatacagaatattgagaaaaatgtgctcttgagggataattattcatctaagagagattgtctttttgttgaaatgccaaacatttgcttattttttaaagcacttgggagaatcatatctaagggggtggcatgctgtacttgacttagggaaaaaaggtattcagtgggtttgagagtcaagattaaaacagctgtcaaattaacctgaagagctagtgactgtagcctgccttagaactataaagtagtgaccaccttcccaaatgagactggtttaatt

SEQ ID NO: 36421 - DNA, 646 bp, Homo sapiens
taccatcgtggctcgctgcaacctccgcctcccaggagaattgattgaacctggaggcggaggttgccgtgagctaacattgcgccctacactccagcctgccaacagagcaagactccgtctcaaaaataaaaaaaggatctacttttgagaatactggcattggttgataaaatacagcagaaacttgtgaagaagctattttccatattcacctggcatgtttggagatgattgccatcaactttgtgactgtgaaggagaaaccttctgccacccaaaaactgaaaaatgcctctgcccccgtgggagaactggagccagatgtgatgctggttagtctcctgtattgggcgttcagcatggatgttgcctttttctgacctcaagacaactatccaactttccctgtgtccttcacgatgcaaccactaaagctctactgaagtctctaattctgagaaggcaccttaaaaatttgaatctaataacttgcttggatcatatggctcctaagtggagcagaactcaggtttgcctcattccagaggccacgttcttgactacagcatgcatgcgattataaaacactaccatcgaggatgaaaatctatacccgtaaattttggaaagtaataaaattttg

SEQ ID NO: 36422 - DNA, 568 bp, Homo sapiens
agggaatgcaaatatgttattcataagatgcattgagtattgtaaataaaacaaaccatttttgatttgtttaaattgctcgttacagttctcttgtggggagggactttgtcagtcattttgcatcttaagctagactaaactttttgttgttgttttcctaaaaccataggtgcaagctttgccgctgggaagtcatattgaattaagcacttttgaaaatgtcactgtttgtgacacacaatgttctctacagaaaacttcttctatcttatgtcattttagcagtagatgtaactgcctgccaccaggtgcaatatgtcatttgcatcagccttttcagttaaggaaattaaaacttggcatgcattagttcatatgtatgaggttggctgtgtccccaaacagcaattgcttgtacaagatagaagtttgcttctcagctgggcatggtggctcatgcctgtaatccaagctctttgggaggccaacgcgggaggattgtttgagcccaggagtttgaaaccatcctgagcaatagagagacccccatctcgacaaaaaaaaa

SEQ ID NO: 36423 - DNA, 627 bp, Homo sapiens
agaaaaagtaaagaagagttaaataaatggagaggtatatctctttcatgggtcaattttgttaagattttccccaagttcatttattgattcagtgcaattccaattttaaataaacttaacaagctgattctaaactcatatggaaattcaaaaggcatagaatagctgaaagaactctgataaagaaggataaaatgggagggaaactctgattctaagactttttatagagctacaataatcaaaacagtgtagcattggtgtaaaaatataaaaatcaatggaacagaccagggaatgcagacctggacccatgcatatatggacaagtgatttttgacaaaggtacaaaggcaacaaagtggaaaaaggatagccttctcaacaaatggtgctgaaatcattgcccattttcaaaaaaattaactttgatttatacactccaccacatacgaagtaaactcaaaatggataatatacccaaagataaaggctaaaaccataaaatatctagaagaacacatatgagaaaatttctatgactttgggttaggcaacaatttcttagacatgtcactaaaagcatgattcattagagaaaattttaataaattcgacttcatc

SEQ ID NO: 36424 - DNA, 1068 bp, Homo sapiens
ttatcttatgggttatttagaactgtcatttagttactagatacgtgaggattttccagatacccttccgtttttgctttctaattaagtgatgttcagctttgttactttggtgcataaacatttacaattatgtcttgatgaattgaccccttttccattctgaagttaacccactttgtccctcgtaatagtatttgctctgaaatgtactttggccaatattagtgtaaccactccagctttgtttcgaatagtgttagcatggcatccctttactgtatttgtgtctttgtatttgaaatgagttccttataggcagtatgtagttgggttttgtttttctaatcagatatcataatctctgccttttaattgtggtttgtagaccatttgtatttaatgtgattattgacatgatgagttttaaatctaccatcttgcactttgtttctactttatttttggctttagttgttttttaaaatataatttatgtcttttattaacttactagctataactgtagttattttatttatttatttattttgagacaagctcttgctgtgtttcccaggctggtgtgaagtaaggcaatctgggttcactgcagcttggacctcctgggctcaagcagtctgccccacctcagcttcctgagtagcagggattacaggcacatgccaccacacctggctaatgttttgtgttttttttttttgtagagacaggattttgtcatgttgctcaggctagtctttaactcctgagctcagacgatccaccccgccgtggcctcccgaagtgctgggattacagggatgtgccactgctcctggccagttattttagttgcgttagtatacatctttaactcaaatcagtttgcctttaagtggtattacacatcttcacatacagtctaacaactttatcaaagctccttttttccttctggcctttgtgctgctattgtaatacatttacttctgcatatgttgtaaccctccccacagtgttgtaataatttttactttaagtagtccgttattgttcaaatattta

SEQ ID NO: 36425 - DNA, 350 bp, Homo sapiens
gtagggaataacaatgtatttgaggtcgttgtatccccatatcatagaatctgtatacaaaaatgaacattgaacaagatgggtcatgcctgtaatcccagcactttgggaggccgaggtgggtggatcgcgaggtcaggagtttgagaccagcctggccaacatggcaaaaccccatctccactaaaaatatgagcattagccgggcatggttgtggacgcctgtagtctcaggtacttacttgggaggctgaggcaggagaatcacggaggttgcagtgagccgagatcatgccactgcactccagcctggacgacagaaggagactccttcttaaaaaaagaaaata

SEQ ID NO: 36426 - DNA, 468 bp, Homo sapiens
ttttttttgaggctataatcatttaattatacacaggccacaattgcaggatggaaaggcagtgggcacttggaagtgactacacatggcaataagcagcctatcttctttaccaaccagaagtttcttggggcatgtgatggtaggccagaccctttccaagggaatactactacactaagcctacactgtactgtgagagtcatggtggaacaaggccacagcgagtgggaggaaatgtgatgactcactgtgtcagaattctaaggcccagcatgatcaggatgtaaggctccataatttttcaaaccagaaattatgagaagaacagaattcggcatcagctatggttttttgcttttttttttttttgagacagagtctcactctgttgcccaggctggagtgcagtggcacaatctcgggctcactgcaacctccgcctcctgggtccaagcgattctcctg

SEQ ID NO: 36427 - DNA, 413 bp, Homo sapiens
gaataactcattcttatgaaaagatttagttctcattataatatagttgtaaaaatgtcaatcacttgtaataacttaagtattgaattttaccactgtgcagcatagctatttatttgtgtatgtgggagaagaaaaaagagaatctgaacaaatattgaagaatacaaaaccaaacaatcagatgaaagctgaggtaattaagaactttttttttttgaaatggagtctcactccagcctgggcgacagtgagactctgtctcaaaaaaaaaaaaaaaaaaattagtctggtgtggtggtggtggtgagtgcctctagacctagctttggcagctgaggccggaggatcacttgagcctagaagttcaaggctgcaatgagctatgattgtgccactgcactctggcctgg

SEQ ID NO: 36428 - DNA, 1776 bp, Homo sapiens
atgtccattttacagctagacacaaaatttagtgggtccaaattgttcaatcacttctatgttatttgttcagaatagtggatctttgcttaattcacttctgttttaatcccatcatattcctttaggccaagaaaaggaaagctgatttggattatatttatgcttaatatcaacatggtttataagtggacagaaaaacactcactcacgtattcagccacgtatggtctggagtgctctgtagaacagcccgaagtgtacaccatgtctctgcacttgaagctcatggaatgtgttggaggagactcaagctccatgtgggaacagtgtggcccaagagccagcatggaggagggctgtgtgagcagactgctatagaatgctaaagttataatcctagctggtgtctcgttctgtttaaaaaaatcaaatttctgtatgtaattgacgtattggtccttatagtcagtaccatcaggtcttagattgttaagtcattttgctgccaccagaccagtgagagtcactcacttatttgtaatgattcttgggaagtttagtcaagagaatatccttgaataaagaagtacatgttttaagtattttcatcgtagtctagatgggctgtaaaacccatttccacacgagtataaatttaaaacagaaacatcaaggtgtcagcaatcatgattttgttttgcttgttcacaagtttgaaaaggtgcatgaggcaccaatcagtgacactggaatgctttaaggatggtttgtgactttaccccattgtgccttatcatttgtcagcaaacttactgggccaaacacaaatggctgagacactcctggcccatttcttgtcatcgctgccatccccaaagacagactctgggaaacaacttgggaactgcttcaagtccatgccaggtcatggcttcgtccgcctcccagcatgtacctggacttcctttgggtgccggcttttctgctggactaagagattcatggaaagaaccccagggcaaggtgaggagaagcagctggtacagactgatgacgaaggagaggaccagaaaagctgcttgggtgtggtggaagtttcagtgtaatgtgattcctagtaggcacatctgtgactcccttaaataaaaagggccagagatgaggggacgcctggtgaaaatggtgtttgttgtaacatcttggtatcattgtgggtaagtagaacaaatatttacatctgttatgaaaagctacctttagccgtagataaacattaaaaggaagactcagccccagagtatatttgatctattggttaactcatctgtcagcaaatggttaagtaagtaaaattaatttttccatttggtgtgtatttcacagggtaacaatgaagtgctccaatctgcttgtgagaccagttagattagtagttgcagttgagaccattcctcctgtatgtctttacaagcaaattgaaacgacatgctcttctttgtactatacagaaggacacaccacagatcctctttttaaagcaggtaataaagtagctttttccttttgaaacatcattgtaaaacagtgctttttaaactatccatggtaaaggatgagttttaaaaattctaatcctttgcaggttggtagttttataaatacgataaaaatatagcaccaagattagattgttataaaagtttctaaacactttcagtttctgtacttaatcttgcagtgtggtaataaagacttctacactttagtagcact

SEQ ID NO: 36429 - DNA, 658 bp, Homo sapiens
tcttcattgacctctacagtccctgcctgtttggaaacatctatggttttgtataacccctgtcatttaactgacagtgttagaagatatccccctgatgtgttactgtaaccaagaaagcatgaacgttaccctttctggtgacagcctgccatgggctgctgtggctgatacttatagaattgttgctccaaaattttggctccacttgagctgtccagaagtgtacctgacatttgtgtattaccactcaccttggatctccttactagtgtaattatttccacatcaatccaggactgaaaggaaaaattttttcaccaggattggcagcctgtagctctgtgacctcagtcaacccatcatgttgtgttgtgggcggggggcaagaattctttagagaaccaagttgcgagaaagatttcaatccagtgaaagtaaaaagtaagaagacatttagatagttgctatattttgggaagatgtcaaaacaggtttttagggaggaggtatgaggtgttgtgttgttttgtttgtttttattcagttgtataatgaatataacaaattaagtagccagaaggagctgcatgtaaattagcaccacttttaaatgtcaacaataaatttgaggtgagcttcctgggtgatgccaaca

SEQ ID NO: 36430 - DNA, 939 bp, Homo sapiens
tcttcattgacctctacagtccctgcctgtttggaaacatctatggttttgtataacccctgtcatttaactgacagtgttagaagatatccccctgatgtgttactgtaaccaagaaagcatgaacgttaccctttctggtgacagcctgccatgggctgctgtggctgatacttatagaattgttgctccaaaattttggctccacttgagctgtccagaagtgtacctgacatttgtgtattaccactcaccttggattttcagtgtaatgtgattcctagtaggcacatctgtgactcccttaaataaaaagggccagagatgaggggacgcctggtgaaaatggtgtttgttgtaacatcttggtatcattgtgggtaagtagaacaaatatttacatctgttatgaaaagctacctttagccgtagataaacattaaaaggaagactcagccccagagtatatttgatctattggttaactcatctgtcagcaaatggttaagtaagtaaaattaatttttccatttggtgtgtatttcacagggtaacaatgaagtgctccaatctgcttgtgagaccagttagattagtagttgcagttgagaccattcctcctgtatgtctttacaagcaaattgaaacgacatgctcttctttgtactatacagaaggacacaccacagatcctctttttaaagcaggtaataaagtagctttttccttttgaaacatcattgtaaaacagtgctttttaaactatccatggtaaaggatgagttttaaaaattctaatcctttgcaggttggtagttttataaatacgataaaaatatagcaccaagattagattgttataaaagtttctaaacactttcagtttctgtacttaatcttgcagtgtggtaataaagacttctacactttagtagcact

SEQ ID NO: 36431 - DNA, 561 bp, Homo sapiens
tatttggagatatttaaatgaaatagaaagccatataacatagctataattactacctgtttgctatttttgtttaacttattttgtagcttcctcactggtttgtgttgctaagcaaacgtatacaaacagaaaaagagcttcctaaattgcacatttttgcacctcttgtgcattctgcaagaagacaatgaatccatgtatttctatataagtatcttcttcatttttaacctgttttcatttgtaatgatgctacataattttgtggctccctaatgcaataatgtacagaagataaaaaaatttataattgaacaatttgtctttctgttcgctgaatatattgcaggtcatgctcccatgcccccctttctaagccgatatcaacaagactggaatgtttgtgatatcaggggcaagagttatcatagaacaacaaaatagagtggactcttttagagcatctatatctgcaacctgtaaatggtaaaatgtctgtgtatttttttaaatgtaccttttcaataaaagtacaaaaaataaaatctgtttgtattt

SEQ ID NO: 36432 - DNA, 314 bp, Homo sapiens
tgtcagagatcatggagtattaagatgaatggatctagaaatattgcttctctaacagaagttgaaaccaggaattctattacatagtgtgctgttcaagatcacctggatggttctggaactaaggaaaatccttacagaaatacacagaccatatcttgtcttgtattgccatcattaaaaaaaacccacaaaattcacagttaaaaattactgatagagaacagtaatagttggtaattagtgttatcgagttactattagttatattgttggatttttttaaagcatcaagctattagtttctgtatctg

SEQ ID NO: 36433 - DNA, 505 bp, Homo sapiens
agactcagacgccaaataggaatcttttcagcccttcgacggaggtgttctggcaggatgggcagggtgtgcccctgactggcaacgtgaccacgtcgcagatggccaacgagcagggcttgtttgatgtgcacagcatcctgcgggtggtgctgggtgcaaatggcacctacagctgcctggtgcgcaaccccgtgctgcagcaggatgcgcacagctctgtcaccatcacaccccagagaagccccacaggttgctttgcttaaatgtccccttgggggaggggggttctgcttctgtcggcaggggttgggagctccgaatctggccccaccttcaatctcccagaacagcaagttgcctcctaatgatagggagaaagataacggggaggtggggatgttcactggaggggttgggggcggagaaatcacaggccttcttaaggctctcctgacttcaaggctctggaagcctctgggaagaatggagccacatctgggtc

SEQ ID NO: 36434 - DNA, 2737 bp, Homo sapiens
  misc_feature (146)..(146): n is a, c, g, or t
cggcctcaggacgcaccggagccgcctttccgggcctcaggcggattctccggcgcggccggcccgccctcggactccccgggccgccccggccccattcgggccgggcctcgctgcggcggcgactgagccaggctgggccgcgnccctgagtcccagagtcggcgcggcgcggcaggggcagccttccaccacggggagcccagctgtcagccgcctcacaggaagatgctgcgtcggcggggcagccctggcatgggtgtgcatgtgggtgcagccctgggagcactgtggttctgcctcacaggagccctggaggtccaggtccctgaagacccagtggtggcactggtgggcaccgatgccaccctgtgctgctccttctcccctgagcctggcttcagcctggcacagctcaacctcatctggcagctgacagataccaaacagctggtgcacagctttgctgagggccaggaccagggcagcgcctatgccaaccgcacggccctcttcccggacctgctggcacagggcaacgcatccctgaggctgcagcgcgtgcgtgtggcggacgagggcagcttcacctgcttcgtgagcatccgggatttcggcagcgctgccgtcagcctgcaggtggccgctccctactcgaagcccagcatgaccctggagcccaacaaggacctgcggccaggggacacggtgaccatcacgtgctccagctaccggggctaccctgaggctgaggtgttctggcaggatgggcagggtgtgcccctgactggcaacgtgaccacgtcgcagatggccaacgagcagggcttgtttgatgtgcacagcgtcctgcgggtggtgctgggtgcgaatggcacctacagctgcctggtgcgcaaccccgtgctgcagcaggatgcgcacggctctgtcaccatcacagggcagcctatgacattccccccagaggccctgtgggtgaccgtggggctgtctgtctgtctcattgcactgctggtggccctggctttcgtgtgctggagaaagatcaaacagagctgtgaggaggagaatgcaggagctgaggaccaggatggggagggagaaggctccaagacagccctgcagcctctgaaacactctgacagcaaagaagatgatggacaagaaatagcctgaccatgaggaccagggagctgctacccctccctacagctcctaccctctggctgcaatggggctgcactgtgagccctgcccccaacagatgcatcctgctctgacaggtgggctccttctccaaaggatgcgatacacagaccactgtgcagccttatttctccaatggacatgattcccaagtcatcctgctgccttttttcttatagacacaatgaacagaccacccacaaccttagttctctaagtcatcctgcctgctgccttatttcacagtacatacatttcttagggacacagtacactgaccacatcaccaccctcttcttccagtgctgcgtggaccatctggctgccttttttctccaaaagatgcaatattcagactgactgaccccctgccttatttcaccaaagacacgatgcatagtcaccccggccttgtttctccaatggccgtgatacactagtgatcatgttcagccctgcttccacctgcatagaatcttttcttctcagacagggacagtgcggcctcaacatctcctggagtctagaagctgtttcctttcccctccttcctcctcttgctctagccttaatactggccttttccctccctgccccaagtgaagacagggcactctgcgcccaccacatgcacagctgtgcatggagacctgcaggtgcacgtgctggaacacgtgtggttcccccctggcccagcctcctctgcagtgcccctctcccctgcccatcctccccacggaagcatgtgctggtcacactggttctccaggggtctgtgatggggcccctgggggtcagcttctgtccctctgccttctcacctctttgttcctttcttttcatgtatccattcagttgatgtttattgagcaactacagatgtcagcactgtgttaggtgctgggggccctgcgtgggaagataaagttcctccctcaaggactccccatccagctgggagacagacaactaactacactgcaccctgcggtttgcagggggctcctgcctggctccctgctccacacctcctctgtggctcaaggcttcctggatacctcacccccatcccacccataattcttacccagagcatggggttggggcggaaacctggagagagggacatagcccctcgccacggctagagaatctggtggtgtccaaaatgtctgtccaggtgtgggcaggtgggcaggcaccaaggccctctggacctttcatagcagcagaaaaggcagagcctggggcagggcagggccaggaatgctttggggacaccgaggggactgccccccacccccaccatggtgctattctggggctggggcagtcttttcctggcttgcctctggccagctcctggcctctggtagagtgagacttcagacgttctgatgccttccggatgtcatctctccctgccccaggaatggaagatgtgaggacttctaatttaaatgtgggactcggagggattttgtaaactgggggtatattttggggaaaataaatgtctttgtaaaaa

SEQ ID NO: 36435 - DNA, 3391 bp, Homo sapiens
  misc_feature (146)..(146): n is a, c, g, or t
cggcctcaggacgcaccggagccgcctttccgggcctcaggcggattctccggcgcggccggcccgccctcggactccccgggccgccccggccccattcgggccgggcctcgctgcggcggcgactgagccaggctgggccgcgnccctgagtcccagagtcggcgcggcgcggcaggggcagccttccaccacggggagcccagctgtcagccgcctcacaggaagatgctgcgtcggcggggcagccctggcatgggtgtgcatgtgggtgcagccctgggagcactgtggttctgcctcacaggagccctggaggtccaggtccctgaagacccagtggtggcactggtgggcaccgatgccaccctgtgctgctccttctcccctgagcctggcttcagcctggcacagctcaacctcatctggcagctgacagataccaaacagctggtgcacagctttgctgagggccaggaccagggcagcgcctatgccaaccgcacggccctcttcccggacctgctggcacagggcaacgcatccctgaggctgcagcgcgtgcgtgtggcggacgagggcagcttcacctgcttcgtgagcatccgggatttcggcagcgctgccgtcagcctgcaggtggccgctccctactcgaagcccagcatgaccctggagcccaacaaggacctgcggccaggggacatggtgaccatcacgtgctccagctaccagggctaccctgaggctgaggtgttctggcaggatgggcagggtgtgcccctgactggcaacgtgaccacgtcgcagatggccaacgagcagggcttgtttgatgtgcacagcatcctgcgggtggtgctgggtgcaaatggcacctacagctgcctggtgcgcaaccccgtgctgcagcaggatgcgcacagctctgtcaccatcacaccccagagaagccccacaggagccgtggaggtccaggtccctgaggacccggtggtggccctagtgggcaccgatgccaccctgcgctgctccttctcccccgagcctggcttcagcctggcacagctcaacctcatctggcagctgacagacaccaaacagctggtgcacagtttcaccgaaggccgggaccagggcagcgcctatgccaaccgcacggccctcttcccggacctgctggcacaaggcaatgcatccctgaggctgcagcgcgtgcgtgtggcggacgagggcagcttcacctgcttcgtgagcatccgggatttcggcagcgctgccgtcagcctgcaggtggccgctccctactcgaagcccagcatgaccctggagcccaacaaggacctgcggccaggggacacggtgaccatcacgtgctccagctaccggggctaccctgaggctgaggtgttctggcaggatgggcagggtgtgcccctgactggcaacgtgaccacgtcgcagatggccaacgagcagggcttgtttgatgtgcacagcgtcctgcgggtggtgctgggtgcgaatggcacctacagctgcctggtgcgcaaccccgtgctgcagcaggatgcgcacggctctgtcaccatcacagggcagcctatgacattccccccagaggccctgtgggtgaccgtggggctgtctgtctgtctcattgcactgctggtggccctggctttcgtgtgctggagaaagatcaaacagagctgtgaggaggagaatgcaggagctgaggaccaggatggggagggagaaggctccaagacagccctgcagcctctgaaacactctgacagcaaagaagatgatggacaagaaatagcctgaccatgaggaccagggagctgctacccctccctacagctcctaccctctggctgcaatggggctgcactgtgagccctgcccccaacagatgcatcctgctctgacaggtgggctccttctccaaaggatgcgatacacagaccactgtgcagccttatttctccaatggacatgattcccaagtcatcctgctgccttttttcttatagacacaatgaacagaccacccacaaccttagttctctaagtcatcctgcctgctgccttatttcacagtacatacatttcttagggacacagtacactgaccacatcaccaccctcttcttccagtgctgcgtggaccatctggctgccttttttctccaaaagatgcaatattcagactgactgaccccctgccttatttcaccaaagacacgatgcatagtcaccccggccttgtttctccaatggccgtgatacactagtgatcatgttcagccctgcttccacctgcatagaatcttttcttctcagacagggacagtgcggcctcaacatctcctggagtctagaagctgtttcctttcccctccttcctcctcttgctctagccttaatactggccttttccctccctgccccaagtgaagacagggcactctgcgcccaccacatgcacagctgtgcatggagacctgcaggtgcacgtgctggaacacgtgtggttcccccctggcccagcctcctctgcagtgcccctctcccctgcccatcctccccacggaagcatgtgctggtcacactggttctccaggggtctgtgatggggcccctgggggtcagcttctgtccctctgccttctcacctctttgttcctttcttttcatgtatccattcagttgatgtttattgagcaactacagatgtcagcactgtgttaggtgctgggggccctgcgtgggaagataaagttcctccctcaaggactccccatccagctgggagacagacaactaactacactgcaccctgcggtttgcagggggctcctgcctggctccctgctccacacctcctctgtggctcaaggcttcctggatacctcacccccatcccacccataattcttacccagagcatggggttggggcggaaacctggagagagggacatagcccctcgccacggctagagaatctggtggtgtccaaaatgtctgtccaggtgtgggcaggtgggcaggcaccaaggccctctggacctttcatagcagcagaaaaggcagagcctggggcagggcagggccaggaatgctttggggacaccgaggggactgccccccacccccaccatggtgctattctggggctggggcagtcttttcctggcttgcctctggccagctcctggcctctggtagagtgagacttcagacgttctgatgccttccggatgtcatctctccctgccccaggaatggaagatgtgaggacttctaatttaaatgtgggactcggagggattttgtaaactgggggtatattttggggaaaataaatgtctttgtaaaaa

SEQ ID NO: 36436 - DNA, 2042 bp, Homo sapiens
ctagacgcagtgactcgtattatggtctagctgtttccatgatgtaaacccttcgacggtgttctggcaggatgggcagggtgtgcccctgactggcaacgtgaccacgtcgcagatggccaacgagcagggcttgtttgatgtgcacagcgtcctgcgggtggtgctgggtgcgaatggcacctacagctgcctggtgcgcaaccccgtgctgcagcaggatgcgcacggctctgtcaccatcacagggcagcctatgacattccccccagaggccctgtgggtgaccgtggggctgtctgtctgtctcattgcactgctggtggccctggctttcgtgtgctggagaaagatcaaacagagctgtgaggaggagaatgcaggagctgaggaccaggatggggagggagaaggctccaagacagccctgcagcctctgaaacactctgacagcaaagaagatgatggacaagaaatagcctgaccatgaggaccagggagctgctacccctccctacagctcctaccctctggctgcaatggggctgcactgtgagccctgcccccaacagatgcatcctgctctgacaggtgggctccttctccaaaggatgcgatacacagaccactgtgcagccttatttctccaatggacatgattcccaagtcatcctgctgccttttttcttatagacacaatgaacagaccacccacaaccttagttctctaagtcatcctgcctgctgccttatttcacagtacatacatttcttagggacacagtacactgaccacatcaccaccctcttcttccagtgctgcgtggaccatctggctgccttttttctccaaaagatgcaatattcagactgactgaccccctgccttatttcaccaaagacacgatgcatagtcaccccggccttgtttctccaatggccgtgatacactagtgatcatgttcagccctgcttccacctgcatagaatcttttcttctcagacagggacagtgcggcctcaacatctcctggagtctagaagctgtttcctttcccctccttcctcctcttgctctagccttaatactggccttttccctccctgccccaagtgaagacagggcactctgcgcccaccacatgcacagctgtgcatggagacctgcaggtgcacgtgctggaacacgtgtggttcccccctggcccagcctcctctgcagtgcccctctcccctgcccatcctccccacggaagcatgtgctggtcacactggttctccaggggtctgtgatggggcccctgggggtcagcttctgtccctctgccttctcacctctttgttcctttcttttcatgtatccattcagttgatgtttattgagcaactacagatgtcagcactgtgttaggtgctgggggccctgcgtgggaagataaagttcctccctcaaggactccccatccagctgggagacagacaactaactacactgcaccctgcggtttgcagggggctcctgcctggctccctgctccacacctcctctgtggctcaaggcttcctggatacctcacccccatcccacccataattcttacccagagcatggggttggggcggaaacctggagagagggacatagcccctcgccacggctagagaatctggtggtgtccaaaatgtctgtccaggtgtgggcaggtgggcaggcaccaaggccctctggacctttcatagcagcagaaaaggcagagcctggggcagggcagggccaggaatgctttggggacaccgaggggactgccccccacccccaccatggtgctattctggggctggggcagtcttttcctggcttgcctctggccagctcctggcctctggtagagtgagacttcagacgttctgatgccttccggatgtcatctctccctgccccaggaatggaagatgtgaggacttctaatttaaatgtgggactcggagggattttgtaaactgggggtatattttggggaaaataaatgtctttgtaaaaa

SEQ ID NO: 36437 - DNA, 2710 bp, Homo sapiens
ctggtagctggagcacgtgatggtcaccgtgtcccctggccgcaggtccctgttgggctccagggtcaggaggtgttctggcaggatgggcagggtgtgcccctgactggcaacgtgaccacgtcgcagatggccaacgagcagggcttgtttgatgtgcacagcatcctgcgggtggtgctgggtgcaaatggcacctacagctgcctggtgcgcaaccccgtgctgcagcaggatgcgcacagctctgtcaccatcacaccccagagaagccccacaggagccgtggaggtccaggtccctgaggacccggtggtggccctagtgggcaccgatgccaccctgcgctgctccttctcccccgagcctggcttcagcctggcacagctcaacctcatctggcagctgacagacaccaaacagctggtgcacagtttcaccgaaggccgggaccagggcagcgcctatgccaaccgcacggccctcttcccggacctgctggcacaaggcaatgcatccctgaggctgcagcgcgtgcgtgtggcggacgagggcagcttcacctgcttcgtgagcatccgggatttcggcagcgctgccgtcagcctgcaggtggccgctccctactcgaagcccagcatgaccctggagcccaacaaggacctgcggccaggggacacggtgaccatcacgtgctccagctaccggggctaccctgaggctgaggtgttctggcaggatgggcagggtgtgcccctgactggcaacgtgaccacgtcgcagatggccaacgagcagggcttgtttgatgtgcacagcgtcctgcgggtggtgctgggtgcgaatggcacctacagctgcctggtgcgcaaccccgtgctgcagcaggatgcgcacggctctgtcaccatcacagggcagcctatgacattccccccagaggccctgtgggtgaccgtggggctgtctgtctgtctcattgcactgctggtggccctggctttcgtgtgctggagaaagatcaaacagagctgtgaggaggagaatgcaggagctgaggaccaggatggggagggagaaggctccaagacagccctgcagcctctgaaacactctgacagcaaagaagatgatggacaagaaatagcctgaccatgaggaccagggagctgctacccctccctacagctcctaccctctggctgcaatggggctgcactgtgagccctgcccccaacagatgcatcctgctctgacaggtgggctccttctccaaaggatgcgatacacagaccactgtgcagccttatttctccaatggacatgattcccaagtcatcctgctgccttttttcttatagacacaatgaacagaccacccacaaccttagttctctaagtcatcctgcctgctgccttatttcacagtacatacatttcttagggacacagtacactgaccacatcaccaccctcttcttccagtgctgcgtggaccatctggctgccttttttctccaaaagatgcaatattcagactgactgaccccctgccttatttcaccaaagacacgatgcatagtcaccccggccttgtttctccaatggccgtgatacactagtgatcatgttcagccctgcttccacctgcatagaatcttttcttctcagacagggacagtgcggcctcaacatctcctggagtctagaagctgtttcctttcccctccttcctcctcttgctctagccttaatactggccttttccctccctgccccaagtgaagacagggcactctgcgcccaccacatgcacagctgtgcatggagacctgcaggtgcacgtgctggaacacgtgtggttcccccctggcccagcctcctctgcagtgcccctctcccctgcccatcctccccacggaagcatgtgctggtcacactggttctccaggggtctgtgatggggcccctgggggtcagcttctgtccctctgccttctcacctctttgttcctttcttttcatgtatccattcagttgatgtttattgagcaactacagatgtcagcactgtgttaggtgctgggggccctgcgtgggaagataaagttcctccctcaaggactccccatccagctgggagacagacaactaactacactgcaccctgcggtttgcagggggctcctgcctggctccctgctccacacctcctctgtggctcaaggcttcctggatacctcacccccatcccacccataattcttacccagagcatggggttggggcggaaacctggagagagggacatagcccctcgccacggctagagaatctggtggtgtccaaaatgtctgtccaggtgtgggcaggtgggcaggcaccaaggccctctggacctttcatagcagcagaaaaggcagagcctggggcagggcagggccaggaatgctttggggacaccgaggggactgccccccacccccaccatggtgctattctggggctggggcagtcttttcctggcttgcctctggccagctcctggcctctggtagagtgagacttcagacgttctgatgccttccggatgtcatctctccctgccccaggaatggaagatgtgaggacttctaatttaaatgtgggactcggagggattttgtaaactgggggtatattttggggaaaataaatgtctttgtaaaaa

SEQ ID NO: 36438 - DNA, 2643 bp, Homo sapiens
  misc_feature (146)..(146): n is a, c, g, or t
cggcctcaggacgcaccggagccgcctttccgggcctcaggcggattctccggcgcggccggcccgccctcggactccccgggccgccccggccccattcgggccgggcctcgctgcggcggcgactgagccaggctgggccgcgnccctgagtcccagagtcggcgcggcgcggcaggggcagccttccaccacggggagcccagctgtcagccgcctcacaggaagatgctgcgtcggcggggcagccctggcatgggtgtgcatgtgggtgcagccctgggagcactgtggttctgcctcacaggagccctggaggtccaggtccctgaagacccagtggtggcactggtgggcaccgatgccaccctgtgctgctccttctcccctgagcctggcttcagcctggcacagctcaacctcatctggcagctgacagataccaaacagctggtgcacagctttgctgagggccaggaccagggcagcgcctatgccaaccgcacggccctcttcccggacctgctggcacagggcaacgcatccctgaggctgcagcgcgtgcgtgtggcggacgagggcagcttcacctgcttcgtgagcatccgggatttcggcagcgctgccgtcagcctgcaggtggccgctccctactcgaagcccagcatgaccctggagcccaacaaggacctgcggccaggggacatggtgaccatcacgtgctccagctaccagggctaccctgaggctgaggtgttctggcaggatgggcagggtgtgcccctgactggcaacgtgaccacgtcgcagatggccaacgagcagggcttgtttgatgtgcacagcatcggcagcctatgacattccccccagaggccctgtgggtgaccgtggggctgtctgtctgtctcattgcactgctggtggccctggctttcgtgtgctggagaaagatcaaacagagctgtgaggaggagaatgcaggagctgaggaccaggatggggagggagaaggctccaagacagccctgcagcctctgaaacactctgacagcaaagaagatgatggacaagaaatagcctgaccatgaggaccagggagctgctacccctccctacagctcctaccctctggctgcaatggggctgcactgtgagccctgcccccaacagatgcatcctgctctgacaggtgggctccttctccaaaggatgcgatacacagaccactgtgcagccttatttctccaatggacatgattcccaagtcatcctgctgccttttttcttatagacacaatgaacagaccacccacaaccttagttctctaagtcatcctgcctgctgccttatttcacagtacatacatttcttagggacacagtacactgaccacatcaccaccctcttcttccagtgctgcgtggaccatctggctgccttttttctccaaaagatgcaatattcagactgactgaccccctgccttatttcaccaaagacacgatgcatagtcaccccggccttgtttctccaatggccgtgatacactagtgatcatgttcagccctgcttccacctgcatagaatcttttcttctcagacagggacagtgcggcctcaacatctcctggagtctagaagctgtttcctttcccctccttcctcctcttgctctagccttaatactggccttttccctccctgccccaagtgaagacagggcactctgcgcccaccacatgcacagctgtgcatggagacctgcaggtgcacgtgctggaacacgtgtggttcccccctggcccagcctcctctgcagtgcccctctcccctgcccatcctccccacggaagcatgtgctggtcacactggttctccaggggtctgtgatggggcccctgggggtcagcttctgtccctctgccttctcacctctttgttcctttcttttcatgtatccattcagttgatgtttattgagcaactacagatgtcagcactgtgttaggtgctgggggccctgcgtgggaagataaagttcctccctcaaggactccccatccagctgggagacagacaactaactacactgcaccctgcggtttgcagggggctcctgcctggctccctgctccacacctcctctgtggctcaaggcttcctggatacctcacccccatcccacccataattcttacccagagcatggggttggggcggaaacctggagagagggacatagcccctcgccacggctagagaatctggtggtgtccaaaatgtctgtccaggtgtgggcaggtgggcaggcaccaaggccctctggacctttcatagcagcagaaaaggcagagcctggggcagggcagggccaggaatgctttggggacaccgaggggactgccccccacccccaccatggtgctattctggggctggggcagtcttttcctggcttgcctctggccagctcctggcctctggtagagtgagacttcagacgttctgatgccttccggatgtcatctctccctgccccaggaatggaagatgtgaggacttctaatttaaatgtgggactcggagggattttgtaaactgggggtatattttggggaaaataaatgtctttgtaaaaa

SEQ ID NO: 36439 - DNA, 1867 bp, Homo sapiens
ttggagccaatggtgctgtcctccgggacatggggccaggcatgacagtctcactgttgctacttttcctctcggcagcctatgacattccccccagaggccctgtgggtgaccgtggggctgtctgtctgtctcattgcactgctggtggccctggctttcgtgtgctggagaaagatcaaacagagctgtgaggaggagaatgcaggagctgaggaccaggatggggagggagaaggctccaagacagccctgcagcctctgaaacactctgacagcaaagaagatgatggacaagaaatagcctgaccatgaggaccagggagctgctacccctccctacagctcctaccctctggctgcaatggggctgcactgtgagccctgcccccaacagatgcatcctgctctgacaggtgggctccttctccaaaggatgcgatacacagaccactgtgcagccttatttctccaatggacatgattcccaagtcatcctgctgccttttttcttatagacacaatgaacagaccacccacaaccttagttctctaagtcatcctgcctgctgccttatttcacagtacatacatttcttagggacacagtacactgaccacatcaccaccctcttcttccagtgctgcgtggaccatctggctgccttttttctccaaaagatgcaatattcagactgactgaccccctgccttatttcaccaaagacacgatgcatagtcaccccggccttgtttctccaatggccgtgatacactagtgatcatgttcagccctgcttccacctgcatagaatcttttcttctcagacagggacagtgcggcctcaacatctcctggagtctagaagctgtttcctttcccctccttcctcctcttgctctagccttaatactggccttttccctccctgccccaagtgaagacagggcactctgcgcccaccacatgcacagctgtgcatggagacctgcaggtgcacgtgctggaacacgtgtggttcccccctggcccagcctcctctgcagtgcccctctcccctgcccatcctccccacggaagcatgtgctggtcacactggttctccaggggtctgtgatggggcccctgggggtcagcttctgtccctctgccttctcacctctttgttcctttcttttcatgtatccattcagttgatgtttattgagcaactacagatgtcagcactgtgttaggtgctgggggccctgcgtgggaagataaagttcctccctcaaggactccccatccagctgggagacagacaactaactacactgcaccctgcggtttgcagggggctcctgcctggctccctgctccacacctcctctgtggctcaaggcttcctggatacctcacccccatcccacccataattcttacccagagcatggggttggggcggaaacctggagagagggacatagcccctcgccacggctagagaatctggtggtgtccaaaatgtctgtccaggtgtgggcaggtgggcaggcaccaaggccctctggacctttcatagcagcagaaaaggcagagcctggggcagggcagggccaggaatgctttggggacaccgaggggactgccccccacccccaccatggtgctattctggggctggggcagtcttttcctggcttgcctctggccagctcctggcctctggtagagtgagacttcagacgttctgatgccttccggatgtcatctctccctgccccaggaatggaagatgtgaggacttctaatttaaatgtgggactcggagggattttgtaaactgggggtatattttggggaaaataaatgtctttgtaaaaa

SEQ ID NO: 36440 - DNA, 1940 bp, Homo sapiens
aaggcaacagtccactgaaagagaacaggtatgtacttgagtactccctttgtagagaaagaattttgcccatctcaatggtgtgtagctttcattgatatctaaggcatttggaattacttaggatcttggtgttaaaaaaaaaaaatggcagggttaaattctctttggttctcattctgaatcttaagacttctgtttgtttcttcctggtacccataaccttctcagaacaccgtcgaagagagagatcaaacagagctgtgaggaggagaatgcaggagctgaggaccaggatggggagggagaaggctccaagacagccctgcagcctctgaaacactctgacagcaaagaagatgatggacaagaaatagcctgaccatgaggaccagggagctgctacccctccctacagctcctaccctctggctgcaatggggctgcactgtgagccctgcccccaacagatgcatcctgctctgacaggtgggctccttctccaaaggatgcgatacacagaccactgtgcagccttatttctccaatggacatgattcccaagtcatcctgctgccttttttcttatagacacaatgaacagaccacccacaaccttagttctctaagtcatcctgcctgctgccttatttcacagtacatacatttcttagggacacagtacactgaccacatcaccaccctcttcttccagtgctgcgtggaccatctggctgccttttttctccaaaagatgcaatattcagactgactgaccccctgccttatttcaccaaagacacgatgcatagtcaccccggccttgtttctccaatggccgtgatacactagtgatcatgttcagccctgcttccacctgcatagaatcttttcttctcagacagggacagtgcggcctcaacatctcctggagtctagaagctgtttcctttcccctccttcctcctcttgctctagccttaatactggccttttccctccctgccccaagtgaagacagggcactctgcgcccaccacatgcacagctgtgcatggagacctgcaggtgcacgtgctggaacacgtgtggttcccccctggcccagcctcctctgcagtgcccctctcccctgcccatcctccccacggaagcatgtgctggtcacactggttctccaggggtctgtgatggggcccctgggggtcagcttctgtccctctgccttctcacctctttgttcctttcttttcatgtatccattcagttgatgtttattgagcaactacagatgtcagcactgtgttaggtgctgggggccctgcgtgggaagataaagttcctccctcaaggactccccatccagctgggagacagacaactaactacactgcaccctgcggtttgcagggggctcctgcctggctccctgctccacacctcctctgtggctcaaggcttcctggatacctcacccccatcccacccataattcttacccagagcatggggttggggcggaaacctggagagagggacatagcccctcgccacggctagagaatctggtggtgtccaaaatgtctgtccaggtgtgggcaggtgggcaggcaccaaggccctctggacctttcatagcagcagaaaaggcagagcctggggcagggcagggccaggaatgctttggggacaccgaggggactgccccccacccccaccatggtgctattctggggctggggcagtcttttcctggcttgcctctggccagctcctggcctctggtagagtgagacttcagacgttctgatgccttccggatgtcatctctccctgccccaggaatggaagatgtgaggacttctaatttaaatgtgggactcggagggattttgtaaactgggggtatattttggggaaaataaatgtctttgtaaaaa

SEQ ID NO: 36441 - DNA, 2663 bp, Homo sapiens
  misc_feature (146)..(146): n is a, c, g, or t
cggcctcaggacgcaccggagccgcctttccgggcctcaggcggattctccggcgcggccggcccgccctcggactccccgggccgccccggccccattcgggccgggcctcgctgcggcggcgactgagccaggctgggccgcgnccctgagtcccagagtcggcgcggcgcggcaggggcagccttccaccacggggagcccagctgtcagccgcctcacaggaagatgctgcgtcggcggggcagccctggcatgggtgtgcatgtgggtgcagccctgggagcactgtggttctgcctcacaggagccctggaggtccaggtccctgaagacccagtggtggcactggtgggcaccgatgccaccctgtgctgctccttctcccctgagcctggcttcagcctggcacagctcaacctcatctggcagctgacagataccaaacagctggtgcacagctttgctgagggccaggaccagggcagcgcctatgccaaccgcacggccctcttcccggacctgctggcacagggcaacgcatccctgaggctgcagcgcgtgcgtgtggcggacgagggcagcttcacctgcttcgtgagcatccgggatttcggcagcgctgccgtcagcctgcaggtggccgctccctactcgaagcccagcatgaccctggagcccaacaaggacctgcggccaggggacacggtgaccatcacgtgctccagctaccggggctaccctgaggctgaggtgttctggcaggatgggcagggtgtgcccctgactggcaacgtgaccacgtcgcagatggccaacgagcagggcttgtttgatgtgcacagcgtcctgcgggtggtgctgggtgcgaatggcacctacagctgcctggtgcgcaaccccgtgctgcagcaggatgcgcacggctctgtcaccatcacagggcagcctatgacattccccccagaggccctgtgggtgaccgtggggctgtctgtctgtctcattgcactgctggtggccctggctttcgtgtgctggagaaagatcaaacagagctgtgaggaggagaatgcaggagctgaggaccaggatggggagggagaaggctccaagacagccctgcagcctctgaaacactctgacagcaaagaagatgatggacaagaaatagcctgaccatgaggaccagggagctgctacccctccctacagctcctaccctctggctgcaatggggctgcactgtgagccctgcccccaacagatgcatcctgctctgacaggtgggctccttctccaaaggatgcgatacacagaccactgtgcagccttatttctccaatggacatgattcccaagtcatcctgctgccttttttcttatagacacaatgaacagaccacccacaaccttagttctctaagtcatcctgcctgctgccttatttcacagtacatacatttcttagggacacagtacactgaccacatcaccaccctcttctcttatttcaccaaagacacgatgcatagtcaccccggccttgtttctccaatggccgtgatacactagtgatcatgttcagccctgcttccacctgcatagaatcttttcttctcagacagggacagtgcggcctcaacatctcctggagtctagaagctgtttcctttcccctccttcctcctcttgctctagccttaatactggccttttccctccctgccccaagtgaagacagggcactctgcgcccaccacatgcacagctgtgcatggagacctgcaggtgcacgtgctggaacacgtgtggttcccccctggcccagcctcctctgcagtgcccctctcccctgcccatcctccccacggaagcatgtgctggtcacactggttctccaggggtctgtgatggggcccctgggggtcagcttctgtccctctgccttctcacctctttgttcctttcttttcatgtatccattcagttgatgtttattgagcaactacagatgtcagcactgtgttaggtgctgggggccctgcgtgggaagataaagttcctccctcaaggactccccatccagctgggagacagacaactaactacactgcaccctgcggtttgcagggggctcctgcctggctccctgctccacacctcctctgtggctcaaggcttcctggatacctcacccccatcccacccataattcttacccagagcatggggttggggcggaaacctggagagagggacatagcccctcgccacggctagagaatctggtggtgtccaaaatgtctgtccaggtgtgggcaggtgggcaggcaccaaggccctctggacctttcatagcagcagaaaaggcagagcctggggcagggcagggccaggaatgctttggggacaccgaggggactgccccccacccccaccatggtgctattctggggctggggcagtcttttcctggcttgcctctggccagctcctggcctctggtagagtgagacttcagacgttctgatgccttccggatgtcatctctccctgccccaggaatggaagatgtgaggacttctaatttaaatgtgggactcggagggattttgtaaactgggggtatattttggggaaaataaatgtctttgtaaaaa

SEQ ID NO: 36442 - DNA, 2778 bp, Homo sapiens
  misc_feature (146)..(146): n is a, c, g, or t
cggcctcaggacgcaccggagccgcctttccgggcctcaggcggattctccggcgcggccggcccgccctcggactccccgggccgccccggccccattcgggccgggcctcgctgcggcggcgactgagccaggctgggccgcgnccctgagtcccagagtcggcgcggcgcggcaggggcagccttccaccacggggagcccagctgtcagccgcctcacaggaagatgctgcgtcggcggggcagccctggcatgggtgtgcatgtgggtgcagccctgggagcactgtggttctgcctcacaggagccctggaggtccaggtccctgaagacccagtggtggcactggtgggcaccgatgccaccctgtgctgctccttctcccctgagcctggcttcagcctggcacagctcaacctcatctggcagctgacagataccaaacagctggtgcacagctttgctgagggccaggaccagggcagcgcctatgccaaccgcacggccctcttcccggacctgctggcacagggcaacgcatccctgaggctgcagcgcgtgcgtgtggcggacgagggcagcttcacctgcttcgtgagcatccgggatttcggcagcgctgccgtcagcctgcaggtggccgctccctactcgaagcccagcatgaccctggagcccaacaaggacctgcggccaggggacacggtgaccatcacgtgctccagctaccggggctaccctgaggctgaggtgttctggcaggatgggcagggtgtgcccctgactggcaacgtgaccacgtcgcagatggccaacgagcagggcttgtttgatgtgcacagcgtcctgcgggtggtgctgggtgcgaatggcacctacagctgcctggtgcgcaaccccgtgctgcagcaggatgcgcacggctctgtcaccatcacagggcagcctatgacattccccccagaggccctgtgggtgaccgtggggctgtctgtctgtctcattgcactgctggtggccctggctttcgtgtgctggagaaagatcaaacagagctgtgaggaggagaatgcaggagctgaggaccaggatggggagggagaaggctccaagacagccctgcagcctctgaaacactctgacagcaaagaagatgatggacaagaaatagcctgaccatgaggaccagggagctgctacccctccctacagctcctaccctctggctgcaatggggctgcactgtgagccctgcccccaacagatgcatcctgctctgacaggtgggctccttctccaaaggatgcgatacacagaccactgtgcagccttatttctccaatggacatgattcccaagtcatcctgctgccttttttcttatagacacaatgaacagaccacccacaaccttagttctctaagtcatcctgcctgctgccttatttcacagtacatacatttcttagggacacagtacactgaccacatcaccaccctcttcttccagtgctgcgtggaccatctggctgccttttttctccaaaagatgcaatattcagactgactgaccccctgccttatttcaccaaagacacgatgcatagtcaccccggccttgtttctccaatggccgtgatacactagtgatcatgttcagccctgcttccacctgcatagaatcttttcttctcagacagggacagtgcggcctcaacatctcctggagtctagaagctgtttcctttcccctccttcctcctcttgctctagccttaatactggccttttccctccctgccccaagtgaagacagggcactctgcgcccaccacatgcacagctgtgcatggagacctgcaggtgcacgtgctggaacacgtgtggttcccccctggcccagcctcctctgcagtgcccctctcccctgcccatcctccccacggaagcatgtgctggtcacactggttctccaggggtctgtgatggggcccctgggggtcagcttctgtccctctgccttctcacctctttgttcctttcttttcatgtatccattcagttgatgtttattgagcaactacagatgtcagcactgtgttaggtgctgggggccctgcgtgggaagataaagttcctccctcaaggactccccatccagctgggagacagacaactaactacactgcaccctgcggtttgcagggggctcctgcctggctccctgctccacacctcctctgtggctcaaggcttcctggatacctcacccccatcccacccataattcttacccagagcatggggttggggcggaaacctggagagagggacatagcccctcgccacggctagagaatctggtggtgtccaaaatgtctgtccaggtgtgggcaggtgggcaggcaccaaggccctctggacctttcatagcagcagaaaaggcagagcctggggcagggcagggccaggaatgctttggggacaccgaggggactgccccccacccccaccatggtgctattctggggctggggcagtcttttcctggcttgcctctggccagctcctggcctctggtagagtgagacttcagacgttctgatgccttccggatgtcatctctccctgccccaggaatggaagatgtgaggacttctaatttaaatgtgggactcggagggattttgtaaactgggggtatattttggggaaaataaatgtctttgtaaaaaaaaaaacctcttcacccccatcctctcatcaaaaaaaacaa

SEQ ID NO: 36443 - DNA, 2516 bp, Homo sapiens
  misc_feature (146)..(146): n is a, c, g, or t
cggcctcaggacgcaccggagccgcctttccgggcctcaggcggattctccggcgcggccggcccgccctcggactccccgggccgccccggccccattcgggccgggcctcgctgcggcggcgactgagccaggctgggccgcgnccctgagtcccagagtcggcgcggcgcggcaggggcagccttccaccacggggagcccagctgtcagccgcctcacaggaagatgctgcgtcggcggggcagccctggcatgggtgtgcatgtgggtgcagccctgggagcactgtggttctgcctcacaggagccctggaggtccaggtccctgaagacccagtggtggcactggtgggcaccgatgccaccctgtgctgctccttctcccctgagcctggcttcagcctggcacagctcaacctcatctggcagctgacagataccaaacagctggtgcacagctttgctgagggccaggaccagggcagcgcctatgccaaccgcacggccctcttcccggacctgctggcacagggcaacgcatccctgaggctgcagcgcgtgcgtgtggcggacgagggcagcttcacctgcttcgtgagcatccgggatttcggcagcgctgccgtcagcctgcaggtggccgctccctactcgaagcccagcatgaccctggagcccaacaaggacctgcggccaggggacacggtgaccatcacgtgctccagctaccggggctaccctgaggctgaggtgttctggcaggatgggcagggtgtgcccctgactggcaacgtgaccacgtcgcagatggccaacgagcagggcttgtttgatgtgcacagcgtcctgcgggtggtgctgggtgcgaatggcacctacagctgcctggtgcgcaaccccgtgctgcagcaggatgcgcacggctctgtcaccatcacagggcagcctatgacattccccccagaggccctgtgggtgaccgtggggctgtctgtctgtctcattgcactgctggtggccctggctttcgtgtgctggagaaagatcaaacagagctgtgaggaggagaatgcaggagctgaggaccaggatggggagggagaaggctccaagacagccctgcagcctctgaaacactctgacagcaaagaagatgatggacaagaaatagcctgaccatgaggaccagggagctgctacccctccctacagctcctaccctctggctgcaatggggctgcactgtgagccctgcccccaacagatgcatcctgctctgacagtccagtgctgcgtggaccatctggctgccttttttctccaaaagatgcaatattcagactgactgaccccctgccttatttcaccaaagacacgatgcatagtcaccccggccttgtttctccaatggccgtgatacactagtgatcatgttcagccctgcttccacctgcatagaatcttttcttctcagacagggacagtgcggcctcaacatctcctggagtctagaagctgtttcctttcccctccttcctcctcttgctctagccttaatactggccttttccctccctgccccaagtgaagacagggcactctgcgcccaccacatgcacagctgtgcatggagacctgcaggtgcacgtgctggaacacgtgtggttcccccctggcccagcctcctctgcagtgcccctctcccctgcccatcctccccacggaagcatgtgctggtcacactggttctccaggggtctgtgatggggcccctgggggtcagcttctgtccctctgccttctcacctctttgttcctttcttttcatgtatccattcagttgatgtttattgagcaactacagatgtcagcactgtgttaggtgctgggggccctgcgtgggaagataaagttcctccctcaaggactccccatccagctgggagacagacaactaactacactgcaccctgcggtttgcagggggctcctgcctggctccctgctccacacctcctctgtggctcaaggcttcctggatacctcacccccatcccacccataattcttacccagagcatggggttggggcggaaacctggagagagggacatagcccctcgccacggctagagaatctggtggtgtccaaaatgtctgtccaggtgtgggcaggtgggcaggcaccaaggccctctggacctttcatagcagcagaaaaggcagagcctggggcagggcagggccaggaatgctttggggacaccgaggggactgccccccacccccaccatggtgctattctggggctggggcagtcttttcctggcttgcctctggccagctcctggcctctggtagagtgagacttcagacgttctgatgccttccggatgtcatctctccctgccccaggaatggaagatgtgaggacttctaatttaaatgtgggactcggagggattttgtaaactgggggtatattttggggaaaataaatgtctttgtaaaaa

SEQ ID NO: 36444 - DNA, 2737 bp, Homo sapiens
  misc_feature (146)..(146): n is a, c, g, or t
cggcctcaggacgcaccggagccgcctttccgggcctcaggcggattctccggcgcggccggcccgccctcggactccccgggccgccccggccccattcgggccgggcctcgctgcggcggcgactgagccaggctgggccgcgnccctgagtcccagagtcggcgcggcgcggcaggggcagccttccaccacggggagcccagctgtcagccgcctcacaggaagatgctgcgtcggcggggcagccctggcatgggtgtgcatgtgggtgcagccctgggagcactgtggttctgcctcacaggagccctggaggtccaggtccctgaagacccagtggtggcactggtgggcaccgatgccaccctgtgctgctccttctcccctgagcctggcttcagcctggcacagctcaacctcatctggcagctgacagataccaaacagctggtgcacagctttgctgagggccaggaccagggcagcgcctatgccaaccgcacggccctcttcccggacctgctggcacagggcaacgcatccctgaggctgcagcgcgtgcgtgtggcggacgagggcagcttcacctgcttcgtgagcatccgggatttcggcagcgctgccgtcagcctgcaggtggccgctccctactcgaagcccagcatgaccctggagcccaacaaggacctgcggccaggggacacggtgaccatcacgtgctccagctaccggggctaccctgaggctgaggtgttctggcaggatgggcagggtgtgcccctgactggcaacgtgaccacgtcgcagatggccaacgagcagggcttgtttgatgtgcacagcgtcctgcgggtggtgctgggtgcgaatggcacctacagctgcctggtgcgcaaccccgtgctgcagcaggatgcgcacggctctgtcaccatcacagggcagcctatgacattccccccagaggccctgtgggtgaccgtggggctgtctgtctgtctcattgcactgctggtggccctggctttcgtgtgctggagaaagatcaaacagagctgtgaggaggagaatgcaggagctgaggaccaggatggggagggagaaggctccaagacagccctgcagcctctgaaacactctgacagcaaagaagatgatggacaagaaatagcctgaccatgaggaccagggagctgctacccctccctacagctcctaccctctggctgcaatggggctgcactgtgagccctgcccccaacagatgcatcctgctctgacaggtgggctccttctccaaaggatgcgatacacagaccactgtgcagccttatttctccaatggacatgattcccaagtcatcctgctgccttttttcttatagacacaatgaacagaccacccacaaccttagttctctaagtcatcctgcctgctgccttatttcacagtacatacatttcttagggacacagtacactgaccacatcaccaccctcttcttccagtgctgcgtggaccatctggctgccttttttctccaaaagatgcaatattcagactgactgaccccctgccttatttcaccaaagacacgatgcatagtcaccccggccttgtttctccaatggccgtgatacactagtgatcatgttcagccctgcttccacctgcatagaatcttttcttctcagacagggacagtgcggcctcaacatctcctggagtctagaagctgtttcctttcccctccttcctcctcttgctctagccttaatactggccttttccctccctgccccaagtgaagacagggcactctgcgcccaccacatgcacagctgtgcatggagacctgcaggtgcacgtgctggaacacgtgtggttcccccctggcccagcctcctctgcagtgcccctctcccctgcccatcctccccacggaagcatgtgctggtcacactggttctccaggggtctgtgatggggcccctgggggtcagcttctgtccctctgccttctcacctctttgttcctttcttttcatgtatccattcagttgatgtttattgagcaactacagatgtcagcactgtgttaggtgctgggggccctgcgtgggaagataaagttcctccctcaaggactccccatccagctgggagacagacaactaactacactgcaccctgcggtttgcagggggctcctgcctggctccctgctccacacctcctctgtggctcaaggcttcctggatacctcacccccatcccacccataattcttacccagagcatggggttggggcggaaacctggagagagggacatagcccctcgccacggctagagaatctggtggtgtccaaaatgtctgtccaggtgtgggcaggtgggcaggcaccaaggccctctggacctttcatagcagcagaaaaggcagagcctggggcagggcagggccaggaatgctttggggacaccgaggggactgccccccacccccaccatggtgctattctggggctggggcagtcttttcctggcttgcctctggccagctcctggcctctggtagagtgagacttcagacgttctgatgccttccggatgtcatctctccctgccccaggaatggaagatgtgaggacttctaatttaaatgtgggactcggagggattacatcactggggtatattggaagatttggctgggggggggtgcgtgtt

SEQ ID NO: 36445 - DNA, 2690 bp, Homo sapiens
  misc_feature (146)..(146): n is a, c, g, or t
cggcctcaggacgcaccggagccgcctttccgggcctcaggcggattctccggcgcggccggcccgccctcggactccccgggccgccccggccccattcgggccgggcctcgctgcggcggcgactgagccaggctgggccgcgnccctgagtcccagagtcggcgcggcgcggcaggggcagccttccaccacggggagcccagctgtcagccgcctcacaggaagatgctgcgtcggcggggcagccctggcatgggtgtgcatgtgggtgcagccctgggagcactgtggttctgcctcacaggagccctggaggtccaggtccctgaagacccagtggtggcactggtgggcaccgatgccaccctgtgctgctccttctcccctgagcctggcttcagcctggcacagctcaacctcatctggcagctgacagataccaaacagctggtgcacagctttgctgagggccaggaccagggcagcgcctatgccaaccgcacggccctcttcccggacctgctggcacagggcaacgcatccctgaggctgcagcgcgtgcgtgtggcggacgagggcagcttcacctgcttcgtgagcatccgggatttcggcagcgctgccgtcagcctgcaggtggccgctccctactcgaagcccagcatgaccctggagcccaacaaggacctgcggccaggggacacggtgaccatcacgtgctccagctaccggggctaccctgaggctgaggtgttctggcaggatgggcagggtgtgcccctgactggcaacgtgaccacgtcgcagatggccaacgagcagggcttgtttgatgtgcacagcgtcctgcgggtggtgctgggtgcgaatggcacctacagctgcctggtgcgcaaccccgtgctgcagcaggatgcgcacggctctgtcaccatcacagggcagcctatgacattccccccagaggccctgtgggtgaccgtggggctgtctgtctgtctcattgcactgctggtggccctggctttcgtgtgctggagaaagatcaaacagagctgtgaggaggagaatgcaggagctgaggaccaggatggggagggagaaggctccaagacagccctgcagcctctgaaacactctgacagcaaagaagatgatggacaagaaatagcctgaccatgaggaccagggagctgctacccctccctacagctcctaccctctggctgcaatggggctgcactgtgagccctgcccccaacagatgcatcctgctctgacaggtgggctccttctccaaaggatgcgatacacagaccactgtgcagccttatttctccaatggacatgattcccaagtcatcctgctgccttttttcttatagacacaatgaacagaccacccacaaccttagttctctaagtcatcctgcctgctgccttatttcacagtacatacatttcttagggacacagtacactgaccacatcaccaccctcttcttccagtgctgcgtggaccatctggctgccttttttctccaaaagatgcaatattcagactgactgaccccctgccttatttcaccaaagacacgatgcatagtcaccccggccttgtttctccaatggccgtgatacactagtgatcatgttcagccctgcttccacctgcatagaatcttttcttctcagacagggacagtgcggcctcaacatctcctggagtctagaagctgtttcctttcccctccttcctcctcttgctctagccttaatactggccttttccctccctgccccaagtgaagacagggcactctgcgcccaccacatgcacagctgtgcatggagacctgcaggtgcacgtgctggaacacgtgtggttcccccctggcccagcctcctctgcagtgcccctctcccctgcccatcctccccacggaagcatgtgctggtcacactggttctccaggggtctgtgatggggcccctgggggtcagcttctgtccctctgccttctcacctctttgttcctttcttttcatgtatccattcagttgatgtttattgagcaactacagatgtcagcactgtgttaggtgctgggggccctgcgtgggaagataaagttcctccctcaaggactccccatccagctgggagacagacaactaactacactgcaccctgcggtttgcagggggctcctgcctggctccctgctccacacctcctctgtggctcaaggcttcctggatacctcacccccatcccacccataattcttacccagagcatggggttggggcggaaacctggagagagggacatagcccctcgccacggctagagaatctggtggtgtccaaaatgtctgtccaggtgtgggcaggtgggcaggcaccaaggccctctggacctttcatagcagcagaaaaggcagagcctggggcagggcagggccaggaatgttctggggctggggcagtcttttcctggcttgcctctggccagctcctggcctctggtagagtgagacttcagacgttctgatgccttccggatgtcatctctccctgccccaggaatggaagatgtgaggacttctaatttaaatgtgggactcggagggattttgtaaactgggggtatattttggggaaaataaatgtctttgtaaaaa

SEQ ID NO: 36446 - DNA, 2326 bp, Homo sapiens
  misc_feature (146)..(146): n is a, c, g, or t
cggcctcaggacgcaccggagccgcctttccgggcctcaggcggattctccggcgcggccggcccgccctcggactccccgggccgccccggccccattcgggccgggcctcgctgcggcggcgactgagccaggctgggccgcgnccctgagtcccagagtcggcgcggcgcggcaggggcagccttccaccacggggagcccagctgtcagccgcctcacaggaagatgctgcgtcggcggggcagccctggcatgggtgtgcatgtgggtgcagccctgggagcactgtggttctgcctcacaggagccctggaggtccaggtccctgaagacccagtggtggcactggtgggcaccgatgccaccctgtgctgctccttctcccctgagcctggcttcagcctggcacagctcaacctcatctggcagctgacagataccaaacagctggtgcacagctttgctgagggccaggaccagggcagcgcctatgccaaccgcacggccctcttcccggacctgctggcacagggcaacgcatccctgaggctgcagcgcgtgcgtgtggcggacgagggcagcttcacctgcttcgtgagcatccgggatttcggcagcgctgccgtcagcctgcaggtggccgctccctactcgaagcccagcatgaccctggagcccaacaaggacctgcggccaggggacacggtgaccatcacgtgctccagctaccggggctaccctgaggctgaggtgttctggcaggatgggcagggtgtgcccctgactggcaacgtgaccacgtcgcagatggccaacgagcagggcttgtttgatgtgcacagcgtcctgcgggtggtgctgggtgcgaatggcacctacagctgcctggtgcgcaaccccgtgctgcagcaggatgcgcacggctctgtcaccatcacagggcagcctatgacattccccccagaggccctgtgggtgaccgtggggctgtctgtctgtctcattgcactgctggtggccctggctttcgtgtgctggagaaagatcaaacagagctgtgaggaggagaatgcaggagctgaggaccaggatggggagggagaaggctccaagacagccctgcagcctctgaaacactctgacagcaaagaagatgatggacaagaaatagcctgaccatgaggaccagggagctgctacccctccctacagctccaatggccgtgatacactagtgatcatgttcagccctgcttccacctgcatagaatcttttcttctcagacagggacagtgcggcctcaacatctcctggagtctagaagctgtttcctttcccctccttcctcctcttgctctagccttaatactggccttttccctccctgccccaagtgaagacagggcactctgcgcccaccacatgcacagctgtgcatggagacctgcaggtgcacgtgctggaacacgtgtggttcccccctggcccagcctcctctgcagtgcccctctcccctgcccatcctccccacggaagcatgtgctggtcacactggttctccaggggtctgtgatggggcccctgggggtcagcttctgtccctctgccttctcacctctttgttcctttcttttcatgtatccattcagttgatgtttattgagcaactacagatgtcagcactgtgttaggtgctgggggccctgcgtgggaagataaagttcctccctcaaggactccccatccagctgggagacagacaactaactacactgcaccctgcggtttgcagggggctcctgcctggctccctgctccacacctcctctgtggctcaaggcttcctggatacctcacccccatcccacccataattcttacccagagcatggggttggggcggaaacctggagagagggacatagcccctcgccacggctagagaatctggtggtgtccaaaatgtctgtccaggtgtgggcaggtgggcaggcaccaaggccctctggacctttcatagcagcagaaaaggcagagcctggggcagggcagggccaggaatgctttggggacaccgaggggactgccccccacccccaccatggtgctattctggggctggggcagtcttttcctggcttgcctctggccagctcctggcctctggtagagtgagacttcagacgttctgatgccttccggatgtcatctctccctgccccaggaatggaagatgtgaggacttctaatttaaatgtgggactcggagggattttgtaaactgggggtatattttggggaaaataaatgtctttgtaaaaa

SEQ ID NO: 36447 - DNA, 1739 bp, Homo sapiens
  misc_feature (146)..(146): n is a, c, g, or t
  misc_feature (1709)..(1709): n is a, c, g, or t
cggcctcaggacgcaccggagccgcctttccgggcctcaggcggattctccggcgcggccggcccgccctcggactccccgggccgccccggccccattcgggccgggcctcgctgcggcggcgactgagccaggctgggccgcgnccctgagtcccagagtcggcgcggcgcggcaggggcagccttccaccacggggagcccagctgtcagccgcctcacaggaagatgctgcgtcggcggggcagccctggcatgggtgtgcatgtgggtgcagccctgggagcactgtggttctgcctcacaggagccctggaggtccaggtccctgaagacccagtggtggcactggtgggcaccgatgccaccctgtgctgctccttctcccctgagcctggcttcagcctggcacagctcaacctcatctggcagctgacagataccaaacagctggtgcacagctttgctgagggccaggaccagggcagcgcctatgccaaccgcacggccctcttcccggacctgctggcacagggcaacgcatccctgaggctgcagcgcgtgcgtgtggcggacgagggcagcttcacctgcttcgtgagcatccgggatttcggcagcgctgccgtcagcctgcaggtggccgctccctactcgaagcccagcatgaccctggagcccaacaaggacctgcggccaggggacacggtgaccatcacgtgctccagctaccggggctaccctgaggctgaggtgttctggcaggatgggcagggtgtgcccctgactggcaacgtgaccacgtcgcagatggccaacgagcagggcttgtttgatgtgcacagcgtcctgcgggtggtgctgggtgcgaatggcacctacagctgcctggtgcgcaaccccgtgctgcagcaggatgcgcacggctctgtcaccatcacagggcagcctatgacattccccccagaggccctgtgggtgaccgtggggctgtctgtctgtctcattgcactgctggtggccctggctttcgtgtgctggagaaagatcaaacagagctgtgaggaggagaatgcaggagctgaggaccaggatggggagggagaaggctccaagacagccctgcagcctctgaaacactctgacagcaaagaagatgatggacaagaaatagcctgaccatgaggaccagggagctgctacccctccctacagctcctaccctctggctgcaatggggctgcactgtgagccctgcccccaacagatgcatcctgctctgacaggtgggctccttctccaaaggatgcgatacacagaccactgtgcagccttatttctccaatggacatgattcccaagtcatcctgctgccttttttcttatagacacaatgaacagaccacccacaaccttagttctctaagtcatcctgcctgctgccttatttcacagtacatacatttcttagggacacagtacactgaccacatcaccaccctcttcttccagtgctgcgtggaccatctggctgccttttttctccaaaagatgcaatattcagactgactgaccccctgccttatttcaccaaagacacgatgcatagtcaccccggccttgtttctccaatggccgtgatacactagtgatcatgttcagccctgcttccacctgcatagatttggataaaaatttaaaacaagggnacagtgaggcactaattatccatggagtga

SEQ ID NO: 36448 - DNA, 1648 bp, Homo sapiens
  misc_feature (146)..(146): n is a, c, g, or t
cggcctcaggacgcaccggagccgcctttccgggcctcaggcggattctccggcgcggccggcccgccctcggactccccgggccgccccggccccattcgggccgggcctcgctgcggcggcgactgagccaggctgggccgcgnccctgagtcccagagtcggcgcggcgcggcaggggcagccttccaccacggggagcccagctgtcagccgcctcacaggaagatgctgcgtcggcggggcagccctggcatgggtgtgcatgtgggtgcagccctgggagcactgtggttctgcctcacaggagccctggaggtccaggtccctgaagacccagtggtggcactggtgggcaccgatgccaccctgtgctgctccttctcccctgagcctggcttcagcctggcacagctcaacctcatctggcagctgacagataccaaacagctggtgcacagctttgctgagggccaggaccagggcagcgcctatgccaaccgcacggccctcttcccggacctgctggcacagggcaacgcatccctgaggctgcagcgcgtgcgtgtggcggacgagggcagcttcacctgcttcgtgagcatccgggatttcggcagcgctgccgtcagcctgcaggtggccgctccctactcgaagcccagcatgaccctggagcccaacaaggacctgcggccaggggacacggtgaccatcacgtgctccagctaccggggctaccctgaggctgaggtgttctggcaggatgggcagggtgtgcccctgactggcaacgtgaccacgtcgcagatggccaacgagcagggcttgtttgatgtgcacagcgtcctgcgggtggtgctgggtgcgaatggcacctacagctgcctggtgcgcaaccccgtgctgcagcaggatgcgcacggctctgtcaccatcacagggcagcctatgacattccccccagaggccctgtgggtgaccgtggggctgtctgtctgtctcattgcactgctggtggccctggctttcgtgtgctggagaaagatcaaacagagctgtgaggaggagaatgcaggagctgaggaccaggatggggagggagaaggctccaagacagccctgcagcctctgaaacactctgacagcaaagaagatgatggacaagaaatagcctgaccatgaggaccagggagctgctacccctccctacagctcctaccctctggctgcaatggggctgcactgtgagccctgcccccaacagatgcatcctgctctgacaggtgggctccttctccaaaggatgcgatacacagaccactgtgcagccttatttctccaatggacatgattcccaagtcatcctgctgccttttttcttatagacacaatgaacagaccacccacaaccttagttctctaagtcatcctgcctgctgccttatttcacagtacatacatttcttagggacacagtacactgaccacatcaccaccctcttcttccagtgctgcgtggaccatctggctgccttttttctccaaaagatgcaatatttatgttctgatctgagcaaccatgccattagtttcagacaaagacactttgcatcccagacggggatcctctggaacagctatgtca

SEQ ID NO: 36449 - DNA, 1413 bp, Homo sapiens
  misc_feature (146)..(146): n is a, c, g, or t
cggcctcaggacgcaccggagccgcctttccgggcctcaggcggattctccggcgcggccggcccgccctcggactccccgggccgccccggccccattcgggccgggcctcgctgcggcggcgactgagccaggctgggccgcgnccctgagtcccagagtcggcgcggcgcggcaggggcagccttccaccacggggagcccagctgtcagccgcctcacaggaagatgctgcgtcggcggggcagccctggcatgggtgtgcatgtgggtgcagccctgggagcactgtggttctgcctcacaggagccctggaggtccaggtccctgaagacccagtggtggcactggtgggcaccgatgccaccctgtgctgctccttctcccctgagcctggcttcagcctggcacagctcaacctcatctggcagctgacagataccaaacagctggtgcacagctttgctgagggccaggaccagggcagcgcctatgccaaccgcacggccctcttcccggacctgctggcacagggcaacgcatccctgaggctgcagcgcgtgcgtgtggcggacgagggcagcttcacctgcttcgtgagcatccgggatttcggcagcgctgccgtcagcctgcaggtggccgctccctactcgaagcccagcatgaccctggagcccaacaaggacctgcggccaggggacacggtgaccatcacgtgctccagctaccggggctaccctgaggctgaggtgttctggcaggatgggcagggtgtgcccctgactggcaacgtgaccacgtcgcagatggccaacgagcagggcttgtttgatgtgcacagcgtcctgcgggtggtgctgggtgcgaatggcacctacagctgcctggtgcgcaaccccgtgctgcagcaggatgcgcacggctctgtcaccatcacagggcagcctatgacattccccccagaggccctgtgggtgaccgtggggctgtctgtctgtctcattgcactgctggtggccctggctttcgtgtgctggagaaagatcaaacagagctgtgaggaggagaatgcaggagctgaggaccaggatggggagggagaaggctccaagacagccctgcagcctctgaaacactctgacagcaaagaagatgatggacaagaaatagcctgaccatgaggaccagggagctgctacccctccctacagctcctaccctctggctgcaatggggctgcactgtgagccctgcccccaacagatgcatcctgctctgacaggtgggctccttctccaaaggatgcgatacacagaccactgtgcagccttatttctccaatggacatgattcccaagtctacaagtatgcgtgtgcccaacgcgcgctggagtgtatcctcatagagt

SEQ ID NO: 36450 - DNA, 288 bp, Homo sapiens
agaggagaatgacaagccacagagtggaactgggacctgggactggggcttgggacagcaacatagggccccttcccttgtgctatgaagtggtcccactctgctgacttgtcccgccccttccagccctcactcctccctctgcctgactccctaccccaccacttcccatggttcctccctcaccgtgtgcgccttcctttttttacagccctgcagcctctgaaacactctgacagcaaagaaggtaaagacacctgggcttgaggttgtgtctgtgtatgcaca

SEQ ID NO: 36451 - DNA, 453 bp, Homo sapiens
aaaaaaaagtcagcttggttttgaagagttgctggagaatgtggcctggatgggcaaaccagtttgcttcctaaccctgctccttggtgaggcagcctgccccctcagtctctggccatgctggacaaccacagaggcagtgcccagatgggggagctcttctcctctccccagggacatacagagccccaagaatgggtgagggagagggcaggggaagggcccaagcccttcttcccaagtctccattcagcttcagatgcagagtggggtctgaaagatgagtctttgggatggccctccacatggagacaggaagcccaagggaaggaggagggcccctgccgtgtcactctcagggaaaccagtgtggaggggacactgggaaggctgcctgctggacgagggagttgggccaggccttggagggtggatgggatggacaaacaggag

SEQ ID NO: 36452 - DNA, 2146 bp, Homo sapiens
gggagagggcaggggaagggcccaagcccttcttcccaagtctccattcagcttcagatgcagagtggggtctgaaagatgagtctttgggatggccctccacatggagacaggaagcccaagggaaggaggagggcccctgccgtgtcactctcagggaaaccagtgtggaggggacactgggaaggctgcctgctggacgagggagttgggccaggccttggagggtggatgggatggacaaacaggagatgagaagggaaaagtgttgcacgtagagggagagtggagggaagtgtatcgggctgtgggcctgtgggtactgagagggggctgcgtgaggtggtccccctcaggtgccccggcgtgcctggcacctgcatctgtgtctgggcctccagggccgtggtcagcacgggggctgtccgttgggctgctgtctcacacacactccccacttgaagtctgaccaggtgcttgggcttctggcataatcccaaaaatagatcttctggcatctaatgcttttcccttcccttttttttcttcccatcatgaaatgaagatgatggacaagaaatagcctgaccatgaggaccagggagctgctacccctccctacagctcctaccctctggctgcaatggggctgcactgtgagccctgcccccaacagatgcatcctgctctgacaggtgggctccttctccaaaggatgcgatacacagaccactgtgcagccttatttctccaatggacatgattcccaagtcatcctgctgccttttttcttatagacacaatgaacagaccacccacaaccttagttctctaagtcatcctgcctgctgccttatttcacagtacatacatttcttagggacacagtacactgaccacatcaccaccctcttcttccagtgctgcgtggaccatctggctgccttttttctccaaaagatgcaatattcagactgactgaccccctgccttatttcaccaaagacacgatgcatagtcaccccggccttgtttctccaatggccgtgatacactagtgatcatgttcagccctgcttccacctgcatagaatcttttcttctcagacagggacagtgcggcctcaacatctcctggagtctagaagctgtttcctttcccctccttcctcctcttgctctagccttaatactggccttttccctccctgccccaagtgaagacagggcactctgcgcccaccacatgcacagctgtgcatggagacctgcaggtgcacgtgctggaacacgtgtggttcccccctggcccagcctcctctgcagtgcccctctcccctgcccatcctccccacggaagcatgtgctggtcacactggttctccaggggtctgtgatggggcccctgggggtcagcttctgtccctctgccttctcacctctttgttcctttcttttcatgtatccattcagttgatgtttattgagcaactacagatgtcagcactgtgttaggtgctgggggccctgcgtgggaagataaagttcctccctcaaggactccccatccagctgggagacagacaactaactacactgcaccctgcggtttgcagggggctcctgcctggctccctgctccacacctcctctgtggctcaaggcttcctggatacctcacccccatcccacccataattcttacccagagcatggggttggggcggaaacctggagagagggacatagcccctcgccacggctagagaatctggtggtgtccaaaatgtctgtccaggtgtgggcaggtgggcaggcaccaaggccctctggacctttcatagcagcagaaaaggcagagcctggggcagggcagggccaggaatgctttggggacaccgaggggactgccccccacccccaccatggtgctattctggggctggggcagtcttttcctggcttgcctctggccagctcctggcctctggtagagtgagacttcagacgttctgatgccttccggatgtcatctctccctgccccaggaatggaagatgtgaggacttctaatttaaatgtgggactcggagggattttgtaaactgggggtatattttggggaaaataaatgtctttgtaaaaa

SEQ ID NO: 36453 - DNA, 1619 bp, Homo sapiens
  misc_feature (146)..(146): n is a, c, g, or t
cggcctcaggacgcaccggagccgcctttccgggcctcaggcggattctccggcgcggccggcccgccctcggactccccgggccgccccggccccattcgggccgggcctcgctgcggcggcgactgagccaggctgggccgcgnccctgagtcccagagtcggcgcggcgcggcaggggcagccttccaccacggggagcccagctgtcagccgcctcacaggaagatgctgcgtcggcggggcagccctggcatgggtgtgcatgtgggtgcagccctgggagcactgtggttctgcctcacaggagccctggaggtccaggtccctgaagacccagtggtggcactggtgggcaccgatgccaccctgtgctgctccttctcccctgagcctggcttcagcctggcacagctcaacctcatctggcagctgacagataccaaacagctggtgcacagctttgctgagggccaggaccagggcagcgcctatgccaaccgcacggccctcttcccggacctgctggcacagggcaacgcatccctgaggctgcagcgcgtgcgtgtggcggacgagggcagcttcacctgcttcgtgagcatccgggatttcggcagcgctgccgtcagcctgcaggtggccgctccctactcgaagcccagcatgaccctggagcccaacaaggacctgcggccaggggacacggtgaccatcacgtgctccagctaccggggctaccctgaggctgaggtgttctggcaggatgggcagggtgtgcccctgactggcaacgtgaccacgtcgcagatggccaacgagcagggcttgtttgatgtgcacagcgtcctgcgggtggtgctgggtgcgaatggcacctacagctgcctggtgcgcaaccccgtgctgcagcaggatgcgcacggctctgtcaccatcacagggcagcctatgacattccccccagaggccctgtgggtgaccgtggggctgtctgtctgtctcattgcactgctggtggccctggctttcgtgtgctggagaaagatcaaacagagctgtgaggaggagaatgcaggagctgaggaccaggatggggagggagaaggctccaagacagccctgcagcctctgaaacactctgacagcaaagaagatgatggacaagaaatagcctgaccatgaggaccagggagctgctacccctccctacagctcctaccctctggctgcaatggggctgcactgtgagccctgcccccaacagatgcatcctgctctgacaggtgggctccttctccaaaggatgcgatacacagaccactgtgcagccttatttctccaatggacatgattcccaagtcatcctgctgccttttttcttatagacacaatgaacagaccacccacaaccttagttctctaagtcatcctgcctgctgccttatttcacagtacatacatttcttagggacacagtacactgaccacatcaccaccctcttcttccagtgctgcgtggaccatctggctgccttttttctccaaaagatgcaatattcctctatgctggctctcctctgccctttcttcccgtgctctccgttcctcgtcttcgt

SEQ ID NO: 36454 - DNA, 1462 bp, Homo sapiens
  misc_feature (146)..(146): n is a, c, g, or t
cggcctcaggacgcaccggagccgcctttccgggcctcaggcggattctccggcgcggccggcccgccctcggactccccgggccgccccggccccattcgggccgggcctcgctgcggcggcgactgagccaggctgggccgcgnccctgagtcccagagtcggcgcggcgcggcaggggcagccttccaccacggggagcccagctgtcagccgcctcacaggaagatgctgcgtcggcggggcagccctggcatgggtgtgcatgtgggtgcagccctgggagcactgtggttctgcctcacaggagccctggaggtccaggtccctgaagacccagtggtggcactggtgggcaccgatgccaccctgtgctgctccttctcccctgagcctggcttcagcctggcacagctcaacctcatctggcagctgacagataccaaacagctggtgcacagctttgctgagggccaggaccagggcagcgcctatgccaaccgcacggccctcttcccggacctgctggcacagggcaacgcatccctgaggctgcagcgcgtgcgtgtggcggacgagggcagcttcacctgcttcgtgagcatccgggatttcggcagcgctgccgtcagcctgcaggtggccgctccctactcgaagcccagcatgaccctggagcccaacaaggacctgcggccaggggacacggtgaccatcacgtgctccagctaccggggctaccctgaggctgaggtgttctggcaggatgggcagggtgtgcccctgactggcaacgtgaccacgtcgcagatggccaacgagcagggcttgtttgatgtgcacagcgtcctgcgggtggtgctgggtgcgaatggcacctacagctgcctggtgcgcaaccccgtgctgcagcaggatgcgcacggctctgtcaccatcacagggcagcctatgacattccccccagaggccctgtgggtgaccgtggggctgtctgtctgtctcattgcactgctggtggccctggctttcgtgtgctggagaaagatcaaacagagctgtgaggaggagaatgcaggagctgaggaccaggatggggagggagaaggctccaagacagccctgcagcctctgaaacactctgacagcaaagaagatgatggacaagaaatagcctgaccatgaggaccagggagctgctacccctccctacagctcctaccctctggctgcaatggggctgcactgtgagccctgcccccaacagatgcatcctgctctgacaggtgggctccttctccaaaggatgcgatacacagaccactgtgcagccttatttctccaatggacatgattcccaagtcatcctgctgccttttttcttatagacacaatgaacagaccacctcgaagggtgtctacatcaggagacagctagcaccataatacgagtcacgccgtc

SEQ ID NO: 36455 - DNA, 1948 bp, Homo sapiens
  misc_feature (146)..(146): n is a, c, g, or t
cggcctcaggacgcaccggagccgcctttccgggcctcaggcggattctccggcgcggccggcccgccctcggactccccgggccgccccggccccattcgggccgggcctcgctgcggcggcgactgagccaggctgggccgcgnccctgagtcccagagtcggcgcggcgcggcaggggcagccttccaccacggggagcccagctgtcagccgcctcacaggaagatgctgcgtcggcggggcagccctggcatgggtgtgcatgtgggtgcagccctgggagcactgtggttctgcctcacaggagccctggaggtccaggtccctgaagacccagtggtggcactggtgggcaccgatgccaccctgtgctgctccttctcccctgagcctggcttcagcctggcacagctcaacctcatctggcagctgacagataccaaacagctggtgcacagctttgctgagggccaggaccagggcagcgcctatgccaaccgcacggccctcttcccggacctgctggcacagggcaacgcatccctgaggctgcagcgcgtgcgtgtggcggacgagggcagcttcacctgcttcgtgagcatccgggatttcggcagcgctgccgtcagcctgcaggtggccgctccctactcgaagcccagcatgaccctggagcccaacaaggacctgcggccaggggacatggtgaccatcacgtgctccagctaccagggctaccctgaggctgaggtgttctggcaggatgggcagggtgtgcccctgactggcaacgtgaccacgtcgcagatggccaacgagcagggcttgtttgatgtgcacagcatcctgcgggtggtgctgggtgcaaatggcacctacagctgcctggtgcgcaaccccgtgctgcagcaggatgcgcacagctctgtcaccatcacaccccagagaagccccacaggagccgtggaggtccaggtccctgaggacccggtggtggccctagtgggcaccgatgccaccctgcgctgctccttctcccccgagcctggcttcagcctggcacagctcaacctcatctggcagctgacagacaccaaacagctggtgcacagtttcaccgaaggccgggaccagggcagcgcctatgccaaccgcacggccctcttcccggacctgctggcacaaggcaatgcatccctgaggctgcagcgcgtgcgtgtggcggacgagggcagcttcacctgcttcgtgagcatccgggatttcggcagcgctgccgtcagcctgcaggtggccgctccctactcgaagcccagcatgaccctggagcccaacaaggacctgcggccaggggacacggtgaccatcacgtgctccagctaccggggctaccctgaggctgaggtgttctggcaggatgggcagggtgtgcccctgactggcaacgtgaccacgtcgcagatggccaacgagcagggcttgtttgatgtgcacagcgtcctgcgggtggtgctgggtgcgaatggcacctacagctgcctggtgcgcaaccccgtgctgcagcaggatgcgcacggctctgtcaccatcacagggcagcctatgacattccccccagaggccctgtgggtgaccgtggggctgtctgtctgtctcattgcactgctggtggccctggctttcgtgtgctggagaaagatcaaacagagctgtgaggaggagaatgcaggtgagtgtgtgtgtatgtgtgtgcgtgcgcatgcacacttatgtgtcttggggtatgttgctgtctttgatgtcaatagagtgtcactttctagtgacagaacgagtgtgtgtgtgcagatggggctggatttgtctgtgtgtgaccttgagtctacgtcttgtgtgtgtgaacaagcgtgagcctgtctgtccatgtgcagataccacaggatga

SEQ ID NO: 36456 - DNA, 295 bp, Homo sapiens
agatgcctctaaaagccgcatgtacaaaggaagcccacgtctatcctgtctgtttatatttgcttttcctgttttgtaacctctttgtactttgttcatggtgacttgtaagctaaggggaaggggtgcctagatgcctttgtatctctccatgtcacgcgctcctgggccagccggcctcccttcctctccttgtatgtaatacctttttttcccctttctagcaagtactttcaaaagaactctgtacattttaacataaaaaataaattatgttgagccattttggatgtct

SEQ ID NO: 36457 - DNA, 1496 bp, Homo sapiens
gccatgtcactggctcaggctcagctgctgggtcaccaggagaatggacgcttcctccacctcagctcagagcacagtgatgattcgtgactttcccaatagaacttcaaatctctgaagacggggggtggggggatgtgcttgagtgtttgtactcatggtcttattctcggagtgacaaagctggaacacaatacctctatgcatgaaaaggttgtcacttgtcacaactaacaggctttcacctcatggaaatttttttaccttgtgtacttttcccctggcagtggacatggctgcactcttccaagaagcaagcagctgtcccgtctgctcagactatctggaaaaaccaatgtccctggagtgtggatgcgccgtctgcctcaagtgcattaattcactgcagaaggagccccatggggaggatctgctttgctgttactcttccatggtctctcggaagaacaaaatcaggcgcaatcggcagctagagaggctggcttcccacatcaaggaactggagcccaagctgaagaagattctgcagatgaacccaaggatgcggaagttccaagtggatatgaccttggatgccaacacagccaacaacttcctcctcatttctgacgacctcaggagcgtccgaagtgggcgcatcagacagaatcggcaagaccttgccgagagatttgacgtgtccgtttgcatcctgggctcccctcgctttacctgtggccgccactgctgggaggtggacgtgggaacaagcacagaatgggacctgggagtctgcagagaatctgttcaccgcaaagggaggatccagctgaccacagagcttggattctggactgtgagtttgagggatggaggccgcctctctgccagcaccgtgccgctgactttcctcttcgtagaccgcaagttacagcgagtggggatttttctggatatgggcatgcagaacgtttccttttttgatgctgaaggtggttcccatgtctatacattcaggagcgtatctgctgaggagccactgtgcccatttttggctccttcaattccacctaatggtgatcaaggtgtcttgagcatctgtcctttgatgaactcaggcactactgatgctccagtccgtcctggggaggccaaataagccctcactccaaaaaaacaaaaaacagggtaagaaaattacttgggtgggtagacttaggaacgctctacttcgtaaaagcattatacaaagtcacgggagaaaaatatgggacatttcttgattatacttaatctaatttgattagattatagagtcctaagtattaattattgccaccatcaaactcattgagtcctatggttcacatcttgtttcctatagaaatgtcctgtattctgggatcaatttccaaatgctttacttttttatttctgcaagttcaaattaatgtattatagaagttatgagttaaataaagattggaatatcaaaa

SEQ ID NO: 36458 - DNA, 1394 bp, Homo sapiens
gccctgagaaggagctacatgccacgggctggaggctagagcctgtggcaccatgatttgcctccgatggaggtggctgaattaggcttcccagagactgcagtgtcccaatccaggatctgtctatgtgctgtattgtgtggccactgggactttgcagacatgatggtgataaggagcctgagtggacatggctgcactcttccaagaagcaagcagctgtcccgtctgctcagactatctggaaaaaccaatgtccctggagtgtggatgcgccgtctgcctcaagtgcattaattcactgcagaaggagccccatggggaggatctgctttgctgttactcttccatggtctctcggaagaacaaaatcaggcgcaatcggcagctagagaggctggcttcccacatcaaggaactggagcccaagctgaagaagattctgcagatgaacccaaggatgcggaagttccaagtggatatgaccttggatgccaacacagccaacaacttcctcctcatttctgacgacctcaggagcgtccgaagtgggcgcatcagacagaatcggcaagaccttgccgagagatttgacgtgtccgtttgcatcctgggctcccctcgctttacctgtggccgccactgctgggaggtggacgtgggaacaagcacagaatgggacctgggagtctgcagagaatctgttcaccgcaaagggaggatccagctgaccacagagcttggattctggactgtgagtttgagggatggaggccgcctctctgccagcaccgtgccgctgactttcctcttcgtagaccgcaagttacagcgagtggggatttttctggatatgggcatgcagaacgtttccttttttgatgctgaaggtggttcccatgtctatacattcaggagcgtatctgctgaggagccactgtgcccatttttggctccttcaattccacctaatggtgatcaaggtgtcttgagcatctgtcctttgatgaactcaggcactactgatgctccagtccgtcctggggaggccaaataagccctcactccaaaaaaacaaaaaacagggtaagaaaattacttgggtgggtagacttaggaacgctctacttcgtaaaagcattatacaaagtcacgggagaaaaatatgggacatttcttgattatacttaatctaatttgattagattatagagtcctaagtattaattattgccaccatcaaactcattgagtcctatggttcacatcttgtttcctatagaaatgtcctgtattctgggatcaatttccaaatgctttacttttttatttctgcaagttcaaattaatgtattatagaagttatgagttaaataaagattggaatatcaaaa

SEQ ID NO: 36459 - DNA, 1346 bp, Homo sapiens
gccctgagaaggagctacatgccacgggctggaggctagagcctgtggcaccatgatttgcctccgatggaggtggctgaattaggcttcccagagactgcagtgtcccaatccaggatctgtctatgtgctgtattgtgtggccactgggactttgcagacatgatggtgataaggagcctgagtggacatggctgcactcttccaagaagcaagcagctgtcccgtctgctcagactatctggaaaaaccaatgtccctggagtgtggatgcgccgtctgcctcaagtgcattaattcactgcagaaggagccccatggggaggatctgctttgctgttactcttccatggtctctcggaagaacaaaatcaggcgcaatcggcagctagagaggctggcttcccacatcaaggaactggagcccaagctgaagaagattctgcagatgaacccaaggatgcggaagttccaagtggatatgaccttggatgccaacacagccaacaacttcctcctcatttctgacgacctcaggagcgtccgaagtgggcgcatcagacagaatcggcaagaccttgccgagagatttgacgtgtccgtttgcatcctgggctcccctcgctttacctgtggccgccactgctgggaggtggacgtgggaacaagcacagaatgggacctgggagtctgcagagaatctgttcaccgcaaagggaggatccagctgaccacagagcttggattctggactgtgagtttgagggatggaggccgcctctctgccagcaccgtgccgctgactttcctcttcgtagaccgcaagttacagcgagtggggatttttctggatatgggcatgcagaacgtttccttttttgatgctgaaggtggttcccatgtctatacattcaggagcgtatctgctgaggagccactgtgcccatttttggctccttcaattccacctaatggtgatcaaggtgtcttgagcatctgtcctttgatgaactcaggcactactgatgctccagtccgtcctggggaggccaaataagccctcactccaaaaaaacaaaaaacagggtaagaaaattacttgggtgggtagacttaggaacgctctacttcgtaaaagcattatacaaagtcacgggagaaaaatatgggacatttcttgattatacttaatctaatttgattagattatagagtcacatcttgtttcctatagaaatgtcctgtattctgggatcaatttccaaatgctttacttttttatttctgcaagttcaaattaatgtattatagaagttatgagttaaataaagattggaatatcaaaa

SEQ ID NO: 36460 - DNA, 397 bp, Homo sapiens
gattaatgaaactctgcaatagtggatttcttaagagaaggaactaaaggaagtgagacagttcgttagatgatacttacttacattaaagtaattcccaccaaaaggtaaaacttctgcagtcaagggggaaaaaatgacagctccatctgagatgtataggataacctgtgaaaagaaatgagaaaggattggctatattggagtttatatttttaaaattgtcaattccaggattagataccaagccaaatttgagcatttgtttcccagaaggtgagggcaaaccactgagatctttatttcctttgcagtctgtcccctggggatggtaacagacttgactaatctgcagtctcagaaacgccctgacatcatggaatgtcttggccttatt

SEQ ID NO: 36461 - DNA, 486 bp, Homo sapiens
ttccataatacttgatggagaaagaaatgagcaaaccaaactgggatccttccaatgagcctggggccctttgtgatatagcttctgttaagagaaccgggaagaggggagagagtcactcgaatcctggcattttcactcagtggggcctcctctaccccaacctgaggttttctcctgataaaatctgcttatgaagaatgctaagggtggctatagctcccagggtgaatcctgcaagtgctttggctggcttattaccctcaggttacagtatattatgctttttaagtataacataatgagggctcatacagtgagacaaccccacccagattgtaatcaatgtctgagaatgcatttatttagcacttttgctcctgctcaatatgcatgcaaagatttcaactttccaggaaacctttctcaagctgttctcttttccagcttttgtcttctgtctcccctttcattctccctcatcac

SEQ ID NO: 36462 - DNA, 398 bp, Homo sapiens
ttggcgggtactcagtaaatgatagttgaacaatgaatgaaagaggatggaatctgaagccagacagatcagaatttaccactgtgtgacctcaggcaacttgcttaattaacagttttaaaatttgtaaattggaatagcattacttacttacaagagtgtttttaggattaagttaatgaatggaggggcctgataagtgatgttcctttggattctgattcagtaacataacaaagattggaacatagaatcacagaattacaaagcaactaagagaaaactagcctaatttctgcctggctaagtcctaatcctttggatctcagtttaaaaattatttcttccaagaagtttttcttatctacttcctgtctccattgtcccctgagtaggtt

SEQ ID NO: 36463 - DNA, 142 bp, Homo sapiens
ataataaaataaataaaataaaataaacgttggcttatttcagtgtgaagtaaggcaataaacggagggctaacagttcccttcgtagagctcagacattttaagaagcgaggaggccgcgtcctggaaaccgtgagcaaaa

SEQ ID NO: 36464 - DNA, 559 bp, Homo sapiens
gaataccccatctgtaactctgttctaggtgatgtggtatcagtaccagaatgttgtactgtttctgaaaattattttcagtatagcagttaaggacattaaggcttcaaagccattggtccagttttgataagaaatgaagttggaagttgggtgtagtggctcacacctttaatttcagcactttgggaagggccaaggtaggagaattgcattagcccaggagtttgaaaccagcctgggcaacacagggagacccccatcttctagaaaaataaaaaataaaaacaattagctggggcatggtggcatgtgccctatagtccccaactaagtagttctctgctaagcccgggaagtcaaggctgcagtgagccatgattgcaccactgtgttctagcctggaagacaaagtgagaccctgtctcaaaaaaagtaaaagtaaaaataataataataataataataaagctggaaatcaaggatatattttcatcatctcttcacttgacaccaagacaagtcacaaacctgaagagtattgcctatttattcctat

SEQ ID NO: 36465 - DNA, 264 bp, Homo sapiens
ggttaccgagcccgatcagcagagactctctttagactagattgcattctcaggattctcttacttcgtatctttcaactatccttgttttctatttatatttcagttccagtatcacatttatagccagtaagagatctcatagatcatagagctaaaggtaaaacaatgtaatgtatgtagccatggaagaacctgttcacacctgttcacagagttaccaaacccgtatccaacgttctctctatgaccaggctaaatagg

SEQ ID NO: 36466 - DNA, 474 bp, Homo sapiens
aataaaattaaaatgcatataaatcatcttataaaccaaattcttacagaatatgatagtgtaacatagtttcaaagttaacctctgagacattcattaacaaccagttctagagctgttagtgtctagagctcaagccttctggccacatctgccctcattttcttattgttctgccttctgaaacacttgtccggatcactgactactttttgtagcaccacttccaaattaggcagtgctctggaagggaagctacttcaaacaataaaattgataaatggccagagtctgctattttggtccttattttcattttctccactcagcaactgtccctttcatggttacacttttatttgaaatttgactttgtactacaagtggagatagaaaagcagttgataacttgcaatagataacacctctgaaatcaggaggttaccaaatattaaaaggactttgacttgatta

SEQ ID NO: 36467 - DNA, 234 bp, Homo sapiens
ggaatggcatgggtatgactgaaaagaggcaaaaggaaactttcaatatcccgatccaggtagccattttataggtatatacacatataaaaataaattgtttaattgaacccttaaaatgaatgaattttatggcattcaaattatacttcaataaactgttactgaaactccagctctacatttaagatatgtgcacgtcaggaagtttctgattatatgcattagctcaat

SEQ ID NO: 36468 - DNA, 1259 bp, Homo sapiens
agggaagtgcctgtttatcagctgatacaagatcatctcactgttttacccaccagcatagctaaaattgtgtatctggatgaatgtcaaacacacctttgtcaagagacttggagagagggatgggcgaggtgttgggggacacaggggtgctctagaccctgtgagcactgactctgcccctctctcctcttagctggctccagtgcccagacccaagccccccactgctcaatggacacccccagcccagacccgttgccttcgcctttgcccggggaggaagagaaacctctggccttatctcctcctgttccccggggccgccgaggccgtcgtcctgggggagccacctcctcaaatcggacactcaaggcctccctccctcgcaagcggggccgcccccccaagtcagggcaggagcccccactggtgcaggtgcagggggtgacagccccagtaggcagcagtggcgggagcgacctcctcctgatcgatgatcagggtgtgccctatacggtctctgaaggttcagcggctgggcctgagggctctggccccaggaaggccccacacttctgcccggtgtgcctgcgggccttcccctacctctccgacctggagcgccacagcatctcgcactcagagctgaagccgcaccagtgcaaggtttgcggcaagaccttcaagcgctccagccacctgcggcggcactgcaacatccatgccggcctgcggcccttccgctgcccgctgtgcccccgccgcttccgcgaggcgggcgagctggcgcaccaccaccgcgtgcactcgggggagcgcccgtaccagtgccccatctgccggctgcgctttacagaggccaacacgctccggcgccatgcgaagcgcaagcacccggaggccatgggggtacccctgtgtgcaccagatccagggtctgaaccgccgtgggacgaggagggcatcccggccacagcaggggccgaggaagaggaggagacagaggggaaaggggagccggcctgacccacacccccggccatcgctccctgggccaggtttagagcagggagtttggctggtgctgggcctgagccagggggccgggacacccttgtttccggtggtcttcccgttgtgggagcaggtggagggtggagacctaaactttggggtccagctgccttcagcccccctcccccagactaacagacccttggaggcaggggctgtggaaataaatctctgcctgctgg

SEQ ID NO: 36469 - DNA, 1125 bp, Homo sapiens
gcgccggccccgttgcccccgcgcgcgcgcacactcgcgagccccggcgacatgcaaatgagctggctccagtgcccagacccaagccccccactgctcaatggacacccccagcccagacccgttgccttcgcctttgcccggggaggaagagaaacctctggccttatctcctcctgttccccggggccgccgaggccgtcgtcctgggggagccacctcctcaaatcggacactcaaggcctccctccctcgcaagcggggccgcccccccaagtcagggcaggagcccccactggtgcaggtgcagggggtgacagccccagtaggcagcagtggcgggagcgacctcctcctgatcgatgatcagggtgtgccctatacggtctctgaaggttcagcggctgggcctgagggctctggccccaggaaggccccacacttctgcccggtgtgcctgcgggccttcccctacctctccgacctggagcgccacagcatctcgcactcagagctgaagccgcaccagtgcaaggtttgcggcaagaccttcaagcgctccagccacctgcggcggcactgcaacatccatgccggcctgcggcccttccgctgcccgctgtgcccccgccgcttccgcgaggcgggcgagctggcgcaccaccaccgcgtgcactcgggggagcgcccgtaccagtgccccatctgccggctgcgctttacagaggccaacacgctccggcgccatgcgaagcgcaagcacccggaggccatgggggtacccctgtgtgcaccagatccagggtctgaaccgccgtgggacgaggagggcatcccggccacagcaggggccgaggaagaggaggagacagaggggaaaggggagccggcctgacccacacccccggccatcgctccctgggccaggtttagagcagggagtttggctggtgctgggcctgagccagggggccgggacacccttgtttccggtggtcttcccgttgtgggagcaggtggagggtggagacctaaactttggggtccagctgccttcagcccccctcccccagactaacagacccttggaggcaggggctgtggaaataaatctctgcctgctgg

SEQ ID NO: 36470 - DNA, 439 bp, Homo sapiens
ggagatacatagtaactatttgttgaataaatatctgagtgcaaaattctgcatttaagtaagatgttccctcagtgacttataaaaacccatggttcttttaaaaatccatgtccagcattgtaagaaagtagctaagcttgggtaaattatgatgaaagctctgctgtccttatagcactcagatttactttgaaagggaattgatatcagcgactgggaactgtaaattatctactaattttaggtcattagttgttcttcttgtggaatattaaacaattcccaactaacattttttttaatgttgttctaaaatatatgcctctgcctagccaagtcatttggcggtctttccgtcctgcaaagctgatccatcatctttccagtttaagaaagattttagctgaaaacatgtttagtgtcagtaactcctaaa

SEQ ID NO: 36471 - DNA, 472 bp, Homo sapiens
ggagatacatagtaactatttgttgaataaatatctgagtgcaaaattctgcatttaagtaagatgttccctcagtgacttataaaaacccatggttcttttaaaaatccatgtccagcattgtaagaaagtagctaagcttgggtaaattatgatgaaagctctgctgtccttatagcactcagatttactttgaaagggaattgatatcagcgactgggaactgtaaattatctactaattttaggtcattagttgttcttcttgtggaatattaaacaattcccaactaacattttttttaggagttactgacacttaacatgtttccagctaaaatctttcttaaactggaaagatgatggatcagctttgcaggacggaaagaccgccaaatgacttggctaggcagaggcatatattttagaacaacattaaaaaaaatgttagttgggaattgtctaatattcca

SEQ ID NO: 36472 - DNA, 1263 bp, Homo sapiens
attgcgagacccaatgcatgtatagaggttgtcataaagccaggcttgttaacatgaacatggtacctaaaactttgaccaaacaaaattgtcatttgtagtgaactttttcaaaaaccagaatatggcatttttaagttttgaaaatatattatcatagtcttttgtaaaatatggctttcataatttaggccatacctataatataggtataaaacttctagcaggccttttgtaagcattgatagtagcaacacgtacttcattttcaattcaaaaaggcctataaagttgcttaacaaagcaaacatttcattgatttaaaaactttttattgagcatctagtgtatgtgaagtgcgagctgtacactcctaggttgtggtatacggtagttaatagtccctggcctcacagggtttacgtcctgggggagggatagaatacatttagtaaataaataaatagatgataatttctcctagtgatacgtactatgaagaaaattaaatgtgtgtgtgtgtgtgtgtgtgtgtgtgtgtgtgtagggtggtagcagtaagggatgctgctttagttagagtgatcttggaaggcttatctgaggaggtggtattacaactaagtactcaagaggagttagcagccacacattgcctggaatgataacaaacctgtttctagcagaactagggcaaaggactggagagtagaaacagtgtaatgtgtttgacagcagaaagaaagctggtatggctggagcagagtgagtgagaaaagtgaagctgagaaatgggttcaagatattggcagaggcctggtcatgtaggacttcgtagacaatttagagtttgaattttatttgaatctttgtatcattagaagtattaagaagtgatatgggtcatgtcattaatgcttagcactttgagaagctctccatttgttgctttgtggagaactgcctgttggggaacagcaggagcagaagcagacaggaaaccaattaagaggtaattgcaggccaggcatgatggcttttgcctgtaatcccagcgctttgggtggcccaggtggtcagatcactcgaggtcaggaggtggagaccagcctcgccaacatgatgaaacgccgtctcttctaagaatacaagaaaattagccggtgtggtggcatgtgcctgtaatcccagcaacttgggagcttgggaggccaaggcaggagaattagttgaacccaggaggtggaggttgcaataagccaa

SEQ ID NO: 36473 - DNA, 295 bp, Homo sapiens
gccccgcgcacactggtagtcagcgcacaggacagtctcgtcgttcgagaagcgattcctcgggatacatccagagctttaaaacgatcagacccttcgaccaataatccgactggtaaacatctaaactgaggacatcattttcaatcagagaaagctctgtgcctttctcatgtaactcaaggtggttttgagggagcaaaagattggcaccaacttacacttccagaagagagtggttcaggaaattactatgcttaatagaatattaaactttagaaaaatgaattttatg

SEQ ID NO: 36474 - DNA, 1242 bp, Homo sapiens
atccaaaagttgtcttaccggtgataaaccatgaccatattaacatgtttgggcagcattaaaagatctatggcaacatcaatgtttctctttgagccgactctcagagcagtcatcttttgatttgtcctaactcccacatgatgcagaagagaggctttgccttctgttttctgttcctgcctcacatttctgccccatcccttctttttcatcattgtcggcaatgcttctgcagccgtcctcagttgggactctccacactgggggagccgagaaccctgaagaggctacaaaggggtcataatttaaaattaagtaggagttcccagaatggtgcgaacttgatttgaaccaaataaaccaataataatagctgaaggaggaaggaggaggcaagcacagatgttatcacaggtcttaaaacagtcctaaaggactcttaaccatgtgctgctccatgtgtcatggccctgatgcttccattgaggagcttgttctggtttactgaattttcgttgtcagtctaccgaagctttttctttgtgctcacttggttgttgagcggctgaatcctaaaaggtacatgtactgtacttatcagtatgcagtgattttataaatttgctaatttcagcattctctatgttttgaaaataatattgcttattgaagcaatcatgcttatcaaagacacacatacctggagttaaggtacacgtgccatttgccattagcaaattttttgataggtgcaacactctctaaaactcttgacagattattttactttattttatttttttattttttatttgttttgacacagagtctcactctgtcacccaggctggagtacaatggtgcaaacttggctcactgcagacctccacttcccgggctcaggcgattcttatgcctcagcctcctgagtagctgggattacaggtgtgcaccaccacacccagctaatttttgtgtttctggtagagactgggtttcgctatgttggccaggctggtctcaaactcctggcttcaagtgatccacccgccttgacctcctaacgtgctgggattacaggcgtgagctatcatgctcagccgacagattattttaaattataagtgctaattagtattttgggggaaaatttttatttataaaatgtcaagattatactttagagaatgtttataaaatcataaagaaattatgctgtttttttttcttaaaaaaaaa

SEQ ID NO: 36475 - DNA, 254 bp, Homo sapiens
gctattatattcattttattcatgcccaggacgtgagtcccgatttaagcctttgtccatttgggtaataagaaatcctttatgtgggattacaggcgtgagctatcatgctcagccgacagattattttaaattataagtgctaattagtattttgggggaaaatttttatttataaaatgtcaagattatactttagagaatgtttataaaatcataaagaaattatgctgtttttttttcttaaaaaaaaa

SEQ ID NO: 36476 - DNA, 149 bp, Homo sapiens
tacaatttttaaattttacctgctgaaattttatctccttgtactgagtaagaaaaactattttaaaattctcatgattccaatatttgaaactcctgtggatattattttattatgttgtatctgctggattgttgttttgtttgttt

SEQ ID NO: 36477 - DNA, 409 bp, Homo sapiens
ctttttatttatctctgaattttctttcagtaagtatgacgtcatacttatgatgcatcattttatctgcccaatacactctctcctttgaggtctatcacattcttctggaaaaataaacaaaccaaaaaccttatgcatggatgcatttatttgtctctttgcccctacaccaaagctgctgaatatttagaagattttaaaaccaggcagactagtatcactttattggtctccaattttgaaagaaatgtatattctgaccaggcatctaatgttttcctattcaagtttctcctattctctatagttcttatttcaaacttttctcatgctcttcaaatatcccaaactattcccaaatattccaacataattgacagttaaccctaactcctcctttggagag

SEQ ID NO: 36478 - DNA, 427 bp, Homo sapiens
gatcacacgccactgcactccagcctgggtgacacagtgagactctgtctcaaaaaaaaaaaaaaaggtggttattagttttggggtggtagtcacaaaacacataaccaaaacaatgtgtacttagaaaatctaggccgggcgcggtggctcacgcctgtaatcccagcactttgggaggccgaggcgggcggatcacgaggtcaggagatcgagaccatcccggctaaaacggtgaaaccccgtctctactaaaaatacaaaaaattagccgggcgtagtggcgggcgcctgtagtcccagctacttgggaggctgaggcaggagaatggcgtgaacccgggaggcggagcttgcagtgagccgagatcccgccactgcactccagcctgggcgacagagcgagactccgtctcaaaaaaaaaaa

SEQ ID NO: 36479 - DNA, 473 bp, Homo sapiens
tagcataataattgtcttctaagcctgcactataaagtatttcagtggcctcattattaaaggaccaaggtgcccaaagaaacaaaatttagtaatcataaacaagagacaaacctacttcttttcccccagagttctggccacattgaaataaggtgtttgaatgcttaataagaattattttggcccacacagtggctcatgcctgtaatctcagcactttgggatgccaaggtgagcagatcacttgaggccaggagttcaagaccagcgtggccaacgtggtgaaaccccatctctactaaaaatacaaaaattagcccggtgtggtggtacacgcctatagtcccagctactcgggagactgaggtgggagaatcacttgaacccgggaggccaaggctgcaatatcgagatcacaccactgcactctagcctgggcaacagagtgagagtgagactctttctcggaa

SEQ ID NO: 36480 - DNA, 398 bp, Homo sapiens
gtctcactatgttgttcaggctggtctcaagcttcctggctcaagcaatcctccaaccttggcctcccaaagtgctgggattacaggcattagccactttaataatgctgctatgtggggctttctttctagtcctcagtaggaaaatttctagaaagtgttatattattgccttttactcttatcatgttatataatttgttcaacagtcacagtgtttattagctgctctcctttaaccacaacagatgttacatattgtaccttatcctgcactttaggtctttcttcttaaaaacaaatatgttatttagaaaaatatcaaataataagcattatgtgtaaggccataaaaagcaaaagagcttagccttggtgacagtgtgagacccagtctt

SEQ ID NO: 36481 - DNA, 824 bp, Homo sapiens
gagcaaggggtagaatggcatctaaccagagcaaagccatttctttgagggctcaagccataaacaaatatgctcccctaaacatattcggcttgaaaaagttgttttggggcagctgtggtggtgcacccctgtaatcccagccctttgggagtcagaggcagtcagtcacttgagcccaggagttcaagactagcctgggcaacacggcgaaacctcgtctctacaaaaaatacaaaaattaaccaagcgtggtagtgcacgcctgtattcccagctacttgggaggctgaggtaggaggatggcttgagcctgggaggcagaggttgcagttgagctgagatcgcgccactgcactccagccggggtgacagagccagaccctgtctcaaagcatatttcaaccctaaaactagactcttctgcccacagtgcagtcttctaagggttaccctctggtatatgttcttttgctaaatgaaggcttggagttggagggaagaaggggagatggagtggtgagggcgagtcaaataaaaggatttgagtgtctcgtttttgactaatgaagatgattcaataaacatcctgtaagaagggttcctatgtgcaagttgaggtgctactaagtacattaagacacaattgctgctctcaaggagttagcagctggtctcatgcagggatctcaccacgtggttatgtattttgtttctgatgaggtgcctttcttagcagatgctgccttatttggccactgaaacaatcaaagctaataaatgcttaaagaaaaatatctgacaataaaaaggtttaaatcaaa

SEQ ID NO: 36482 - DNA, 384 bp, Homo sapiens
gcatgtttctctttttttctgaaaaacagaagttagatactgtcactgacatttacatactgatattttaagccaaataaattctaagaaaaaccacaaggctccccaagtctctgagagccaccctgggattttctccaaggacaatgtccccccaccatgatgtgtggagtccctgtgaaggcagaggctccatcgccctacccaggtgcgtgttttcagagtcgtttctgccaggagcgcttggctggtctgctctcaccttcatcatgggtctgtgtctgcagctgaaacagtcactccaggacccacggacaggagtaaatagattagatgttccgctccccgttggcctcttgtgcccaggctggctcactggtttgc

SEQ ID NO: 36483 - DNA, 300 bp, Homo sapiens
ggggagtattttttttatatcattctctgttttgtgctttgttttcttttgcttctttgtgcctgacaaaagtacagacagaatacactaaagataaatgaaggctcccagatgctggcacggtctttaagaaaagttcacattatcttccaacgagtccaattcatctgctctcttttgaaattattcctagaaatgttgtcttcatgaaggaacgaagtcactacagcaacaaaaccatctgatgtgttatgaacatttcagggctgtgtctcagtgggaatatttctaaatacgaca

SEQ ID NO: 36484 - DNA, 2986 bp, Homo sapiens
  misc_feature (759)..(759): n is a, c, g, or t
  misc_feature (2313)..(2313): n is a, c, g, or t
  misc_feature (2546)..(2546): n is a, c, g, or t
  misc_feature (2563)..(2563): n is a, c, g, or t
taagctcagctgccaggattccccacccccagccctgccccatccattccattactattgagttacagtggcacgtggaacagagaaatgaggagctggaatgtgaacagccacagggcttagggaggagagaggacttttcacagacagctttttttttaatgagatggagtctcactgtgtcgcccaggctggagtacagtggcgtgagctggctcactgcaacctctgcctcctggtttcaaatgattctcctgcctcaggctcccaagtagctgggattacaggtactcaccaccatgcccagctaattttttgtatttttagtcgacacggggtttcaccatgttggccaggctggtctcaactcctggcctcaagtgatccacccgcctgggcctcccaaagtgttgggattacaggcgtgagccactgcgcccagccttcagagacagtttcctaacctgaatctttttcatagggcttgaaggctcttatgccaaagaaaacaataaacaactctttaaacaaaaatccaccaacaggatttctccaccagtcaaagaaatagcagcaaagttatacaacagagcgaccacctttgacattttatttttgtggagaaagggcatttgagaacttcattttttgaagtatatttaaaaagtgatgtcctgaggaatttattcagttttttcttttctcttttctcatgttattttcttagccctatgaaatagggttgggctgacgtttccncgttactggaaggcaagtgaactctgcagttaagggtttcttctctgacaatcaccactacagcctccataggctgcacccccgttccagggatacggtcaaagggcacctcgtcctgccttcttgtcttgctgattagtaaatctgacttgcatttcacaacatttaagaaaagaaagttttttttttaagtataaacatttctttttaattgtaaaaagaagttacaagtccatgatgtttcaatgctctaggataattttgaaaacacaggccacatagcatccacccagcttccatgagaccctgacctgcggccgagcaatcccgcagcccctccgtcctcagcggcatgctcgcttggtttctgtcaaatttcggcttcaaaggtgcaccacgggaatctctgccactgcaccaaaacgggcttctgcactcgcatttcggttctatacctgtctcattttcattccacttttaactccgtagctttttacagatcgtgcttctccctcaaatcaatttaatttgcaagtctttaaaacagaacttgtttaacaaacattaaatgattacctcattcattcccatcttgcccaattatgaacattcgtgcagtccttggctactgcccagaaagagctcctgctggcagagctgcccctcccgccagcgggcggaggcctcaccccagcccaggaatcctttggcaatgaacctaattcctcttccgttctttcccatcccatatgctctgacctctaacgctgcctaccccaaagcagcaggaagagaaatgccaggtgccttcctagacaacctgatccctcttttgtctctggcatcccaggaagccaaacccctgaaagagcagccgagcacgggcttcacggagagcaagtctgcacgcaggaagcaagcgtcgcggcagggaccctcagagcccacgtgcatgccagcttcctgccatcaggctttctggggtgctccctgaagtctagggaaggaccaagagaatcccgcaggtgaggaatacagccctgattgcaacttttcgttctggttcatctgggggtggcccagctaagaggagtcctgcagggagggcatggggcccgcttacctgctcaccccgggagggcgtggggccagcttacctgttcaccccgggagggtgtggggctgacttacctcccaaccccagaggccaccctcgcacacgcacacactcccctggggccttcctgggcatctttccacatccgatcaacggatgttcatggaattcatgggaataaatgggggtactttcttttactcaaggacttcaacttcatcagggtttctcgagaatctaagcagccaccctggcaggaggctcgatgtgccccttggctcaggcaggagactcagagggatacgctgcctccaggggcagggacagtggggggtggggttcaggattccaggcaggaccctggaacactggtcgcagattgaaatatgaggaacaaaagcagccattgttaagatgcctatcacatacccacggangcactgagtgtcttctgggaattcctgttgaaccccaccaaagtcccaggtgtcaaggtcacccagccagcagccagtcacacgcaggtgtgtgtggtcccaactcccgggatctcagacactcccttcctactgatggaacatggatgtgtactcagaactcagagaacagaacctgatcgcaggggatctttccaggctgggaacttcactgtcacttttcacagtgagtntaagcaaaagcccattntgagtcctaaagtcaaacctcctgagctccagcagcctgtgagtggtgtctgcacacacagccccgaaggaccctgctcaaaaatgccacggtcgggcctgcaggaaggggagcttattcggaatttctctattcgacttcaaggcagctttaagcagaatctgctgtggatgagcatccactttaaaacacgattaggcattttcaagatgccacctcaaatacggcaactctgcattctcacaagaaccaaggacttttgggtggtgcggccttgtctcctggtgaacactagagggtgcattaggcctaagaatccctcctcccttctgtgttaggattaaacagagctctggctttgaaggtttcaggagtgagagcgaccacgtacgctttaaaaaaaaaaaaaaaaaaaaaaaaaaa

SEQ ID NO: 36485 - DNA, 420 bp, Homo sapiens
tcagcctcctgagtagctgggactacaggcgcgtgccaccatgcctggctaatttttgtatttttagtagagacaaggtttcaccatgttggccaggctggtcttgaaatcctgacctcaggtgacctgcctgcctcggcctcctaaagtgctgggattacaggggtgagccactgcggccagcccctgccagtttttctaagagctgaggacacagagttgaataagacatcatccttgccctgcaagaggtcacaatctgggagtggacagtgataggaaaaactatggtcatttgccatcataatagctaatacttattgaagtcatccaaaatgggagacatggtcctcagtgcttgacatggatcatctaattttaaccttcacaataaccctattaggtgggtgttattatcct

SEQ ID NO: 36486 - DNA, 939 bp, Homo sapiens
ggaccaagttagaaccggagtcctatttggatgatatggtgacttgcagccagatcgtatacaattataatcctgaaaagaccaaaaaggattctggatggagaacagccatttgcccagattattgtcctaacatgtatgaagaaatggaaacattagccagtgtacttcagtcagatattggtcaagacatgcgtgttcataacagcacatttctatggttcatcccttttgtccagtccctcatggatcttaaggatttgggtgtggcttacatagcacaggttgttaatcatctgtactctgaagtcaaagaagtcctcaaccaaacagatgctgtgtgtgacaaagtcactgaattttttcttctaattttggtatcagtgattgaactgcatagaaataaaaaatgtttgcatttgctgtgggtaagttcccagcaatgggtggaagccgtcgtcaaatgtgccaagcttcctaccactgcgtttacacggagttctgagaaatcatctggaaattgctccaaaggaacagcaatgatatcttcactgtcattgcattccatgccatctaactctgtacaacttgcttatgtgcagctgattagaagtctccttaaagaaggttatcagcttgggcagcagtctctttgcaagcgattctgggataagctcaacttattccttagaggaaatttatctctaggttggcagttgactagtcaggaaacccatgagctacaaagttgcttaaagcaaattattagaaacataaaattcaaagcacctccatgtaacacttttgtggatctgacttctgcatgtaaaatctctcctgcatcttataataaagaagaaagtgaacaaatggggaagacgtctagaaaagatatgcattgtttggaagcttccagcccaacattttctaaagaaccaa

SEQ ID NO: 36487 - DNA, 443 bp, Homo sapiens
ctcttagttcagttctcatagtttttggtttgctgtttaggttgagatccatgccatgttcagctctgggatgaagccaggagtttataatcaactttatggattcactttgctgtgagttcctccctctcagcaatttcctttatactttctgctgccgacctcttttcagtccttgagaggaaaagctgggtctttttctactctgctcacttcctgtgattgcacccacatccagggctaagtggtaggagtacagagaggaaaaaaaagttgatggagagaggttgcctactctcttgaaacaacagcttctgggatagtggaggaatgtttccctccctcagagttttaggtacctgtgggcgcctaactgttaactgccaggatccttttcccagtttcttaagcctgaactggagggcttctcctggatctctgca

SEQ ID NO: 36488 - DNA, 457 bp, Homo sapiens
aaaacccgacagtctctgcaagcctgagattgactgttagaggtgtcccacgttgggcatgaatggccttgctcagctactgatggaggctgccctgagaatagcatgaccttggctgaaagctgagatgaaccctgaggggctaacagctggaggctgtcagctaactgtatttcccacttcatagccaatcgcagggagatctgagtagcacatcttcttgtctgccacatacggtaaataatttttagtcaattagttttaatttcaccaaaattgtgccagactagaatatcataaagaattatttactgaactgaagcagacagtatcagtgctcattggctggtccaatgtctcccctactcctcctcaccagggaactgcctcaatcaatgaccaatagaagttgggtaggccaggcatggtggcctttttgaagccacccaggtgggca

SEQ ID NO: 36489 - DNA, 424 bp, Homo sapiens
aagctgatccttcaagtgccacacgatgggtggctctgatactcgcaggctgggcctcccagcatccacggagcctggaaaacggccccaaagaggcaagctgcttttctctcacggtcagtgccatcgtgctttaatcccttcatgactgccgctggcaaggaaaccacataaaccagcttgctagaggcggcgggggtggggaggggtgtagggccctctcgaggtcttcccggctcgtggggagaagtgcaggtgagcagcttcctcaagccttgccctgctcttgccgtgaagcgctgactctcgcctgtcattccagggctgacagctcagagccttgcgatcccagaaggtgtcaccagaggcctagtgtgctgcctcgtgcaacatggagggccttgttttctgggcctgcgaggga

SEQ ID NO: 36490 - DNA, 569 bp, Homo sapiens
tctattattaagaaaatctagacctgaaatgttttctcaactcttattgtactgtgtatatttatattgttgtcgtggcggctgtttttaaagggaaagtgttggttctattaatttgttaagtgtccatccaggtgggcctacctgattccacatatataagtacatatctgcttataaagcgctgtaaatggcagcaaggctgtttttggagaagagtttgggttttcctaccatccctttgaatgctacacatccgtctattttaacccaagtagttcatatttcagatatattttctcctttcatctcctctcactactgcagagtccagtaatacctagcatagggattctgtcctgtgtcaaatggctaaaataaatttttgccccaatagacatgctgcctcattcaaaagagctgccgctgtcatcttgaggttccaggtagtgagagaagaaactcgacctgccagggtcaacagccatgaagaggtggggggagtcatgattcataaacactgaaagaagtcaaggcttttggcagagagtgttgatttagatttttag

SEQ ID NO: 36491 - DNA, 430 bp, Homo sapiens
agaatcagtaaatgttagctggtttcattattcataaaaagaacattacaatgtctatttccaatgatatatattttaaagatatttagttgcaacaatagaaaccacttatcttgctaacttaacttgccaacaatctgctaaattaccttccgtatttcctccacgtgcccattgttcatgggcaataaaaaaggaatttattggaaggacacagaagagcttcagaatcacaggaagagcagaataatgtggctttggaaaatacaggacacaggagagaggctggctaacctcagggtacatgtatacgccatagtgaggggaggcaaggatccctggctgatagtcagccagggggacaagttccctgaaagggaaattgggatgctattttagaagagaagaagaaataagtgcctggtaggaa

SEQ ID NO: 36492 - DNA, 368 bp, Homo sapiens
cttgtaggccatgtcagacctgacacaaaaaaggatcccctcagctaagtctccccattctggggaaaataagaatagaaggaccccaaaggcccttgatactgaggacattaacaatgtatgctgccaccctgccacaaccacagatttctatagcctatgccattgaggtgtctgcagttattgctaacattgaacacagctgaagaagctacacagagactgtaccactacacttacctggacagagtcattgtactcttcctaatcagcacactaagttccaactataggtgaaagtttttctctatgaaaaccactttagaaagttttcaagaggcagttgttgctccagctgcacaaacatc

SEQ ID NO: 36493 - DNA, 501 bp, Homo sapiens
tgattaatatgctttgttaaatcagtattcagaactgtttcttcatttgtaaactgagagaaaatacttaaacctgcacccctcacaaaattgaggatcagataagactatgtgacatttccttggagaagtgctttgcacatatgaggggttagtgttttgtttgctttccagtcatttgctttatgactgtcataggccgggcatgatggttcatgcctgtaatcctaacattttgggaggccgaggcgggcagatcacttgagcccaggagtttgagaccagcgtgggcaacatgctgaaaccctgtctctacagaaaaataaaaatagaaaaaaaattagcccggtgtagtggcacacacctgtagtcccagctgctctggaggctgagatgggaggattgcttgagcccagaagatggagactgtggtgagctgtgcaccactgccctccagcctgggcgacagtaagaccctgtctccaaaatggaaaaaaaaaa

SEQ ID NO: 36494 - DNA, 283 bp, Homo sapiens
gtcacccaggcagctacacggtcgatgcaggtgcacaggcgtgcgcgccattctcccgtgtcacacagcaggacggaataactgcacgcactgggagcgatggatctcgcggtccgggatccgagacgcattcagagaccaaatgtcacctcatccctcctctagccaattcgagcttcctccgcggacccccaccttccatccgaagtggctcggtccttagttgagaggactctgcccagaccctcgcaccagtagagacctctgcccgggcgcctgcaac

SEQ ID NO: 36495 - DNA, 1174 bp, Homo sapiens
gcttctttttgctccaagctattttgtataactctgggttctggtttttctatgcaacattcatgcaaccatctttattttttttctcacttatagtgtggatctttcatagttagaaatgcctcatgcttaactagctgtaagcgtacagataggaattctaaaattaaacaatgtaaggttaattccatttatccatattttgagcaggggtggtttcttagaaattttttttctattcaagagatgcatgtcagcagagtgtgggaggagcaggcaggtttcaggtatacctgtaggaaatgggaaattaaatgtcctgaatagctaggagttgttatagattggcatactgtttcccagaggattagagttcaattaaaaaaaaacaaaacttctgaccactgagaatgtcctgagaccctgtctcagaaaaaaaaaaaaaaacatcaaaaataaaaataactggtgtgactgatgaaattgatttgaaatttagtttaaatagctgcatgtgtctaatggctactgtaacagacagtgcagatttagaaatacattaacatgttgcactggaaaattttaaaattatgcatgtatttaaacgaaatgcctttaaactacttatgttagtttcagcaacttcctcaggaactgaaacagaaataaacaatgtaaaatgcttttagtgaattcttattttcctattactatttttaattttataaaaacacagaaagcattttagtgtaactatgttttctacagagaaacctggctggtgaaaccattggataatttgcaggactattttaatggctgagcagatttttgtttgtttgttttagaaaactatactaaatgggcactgagtttgaaaagatttattagaggccaggcatggtggcttatgcctataatcccagcactttgggagcatgaggcagacggatcacttgtgaccagaagtttgaggccagcctggccaacgtggtgaagccctgtctctactaaaaatacaaaattagctgggcgtggtggcacatgcctgtaatcccagctacttgggaggctgaggcaagagaattgcttgaaactggaaggtagagtttgcagtgagctgagattgtatcactgcactccagcctgggtgacagaacaagactgtctcaaa

SEQ ID NO: 36496 - DNA, 471 bp, Homo sapiens
ctttattctctctcatggttacaggagtttggggagggttaaggtaggtgcttgtggatcagagtctcatgtggttacaggccagatgatcagagggttagggtaggtctggacttgtggggcctctttgtgtctctgtctctgtttgtcttccctcctcctctccttatttcccccctgtccatagtctcagtgctcttccatgtggtccctgtgccagtataggcttcctcacactaccatgacctcaggactcccaagcacagttctgcagaaacatggtgcaagttgcatctcctttgttgcccaagcctcacttttgttggctgcttccctgtgggcttgttacgtgctggctctgttgctagacaggtcagactccctgcaaggtggggcccctcctcacacctctctctccttccccttgacccttcaggtggaagtgcagtaacatctctatccctgtggttt

SEQ ID NO: 36497 - DNA, 804 bp, Homo sapiens
cgcaatggttcatgcctgtaatcccagcactttgggaggccgaggtgggcagatcacgaggtcaggagatggagaccatcctggccaacatgatgaaacccgtcgctactaaaatacaaaaaatgagccgggcatggtggtgtgtgcctgtaatcccagctacgtgggagactgaggcaggggaattgcttgaacccaggaggcagaggttgcagtgagctgagatcgcgccactgcactccaacctagagaaagagcaagactccgtctcaaaacaaaaacaaaaacagactgcaggccagatttggtctacagatggtagtttgccaactgcacctctcatggaatgaaaatcacctgcctgacatttttattcttgttatctcattatgtctacagagcttagatgtcatacagaattgagagcaaagaacaataattccggcccggcgcggtggctcatgcctgtaatcccagcactttgggaggctgaggtgggcagatcacgagatcaggagatcgagaccatcctggctaacacggtgaaaccccatctctactaaaaatacaaaaaattagccgggcgtggtggcgggcacctgtagtcccagctacttgggaggctgaggcaggagaatggcgtgaacccaggaggcggagcttgcagtgagccgagctccagcctgggcaacagagtgagactccatctcaaaagaaaaaaaaaaaggaacaataattcccaaacctggtcactgctgcagtcacctctgttgcagaaaacgcacagttgatttcttactatat

SEQ ID NO: 36498 - DNA, 523 bp, Homo sapiens
ccctgtctccatcttataaggacccttgtatcacattgggcccatcctaataatccaggataatcccctcatttcaaagtcttaatcatatctgcaagtcccttgtaacatgtaaattaacatactgacaagttctggggttcagaatgtgaacacctttaggggacattattgagcttaccacaaaaacaatctgggaacctggaaaggggcagaatgagaagtcacaccctggctcatgtctaagaaaggagaagcaacagttaatgtgttcaattgacaacaaacattggcaacaaagccttctccaagaaaataaagccctcaaaaggagacttataaaaactctttataaggccagaagttattacttcaagcatgtttaataatgtgacacctagctgggtgtagtggcacatgcctataatcccagaactctgggaggctgaggcgggtggatcacttgaactcaggagttagagaccagcctgggcaacatggtgaaaccccatttttaccaaac

SEQ ID NO: 36499 - DNA, 495 bp, Homo sapiens
tttggacagagtccttccactgggctccaacagaccaaagcaaaccagaatagtgtcacttgtgctacctgacatgtgctcaaactgaactttaaaacgggccagttttccaaaaatcaggagatttacagcaaccaactgaaagtgaagtggtgtcattcatctggggtgatacctgaggttcactgcctcatgccaaagaaatcgaggatgcagacacacacagagtgagtttaacaggcgaaagaaagagaataggtctctctcctgcagagagggggattctcgagtaggtcttccggttccatggtgaaatgcacagggttttatagatgatcttgaggaggcagtgtctgatttacatagggcccaaaggttggttggaccaggtgtgtcatttacataacgtgcgaagaagatggctaccccaccctaatcttttattatgcagatatgtgccatattgcctgtttctttactgtacacgtggtgaca

SEQ ID NO: 36500 - DNA, 391 bp, Homo sapiens
accctcaaaccttgttacaatgtgggcatattacccatctgacatgaaaaaaatttaaaaactagacagacgcctgtagtcccagctactctggaggctgagctttgtatttttttgtagacatggggtctctctatattacccaggctggtcttgaaactctgggctcaagcgatccacccacctccacttaccaaagtgttggaattacaggcgtgagccattgcaaccagtcgagtgtttccatttctttccctgatttcaactttattccctttgagaaaggtagagcaacttttactccttacagatggagaaacttgaaggtcaaatgacatactagtagttcattcatattcattgattcaacaaatgcttctcctatgtgaca

SEQ ID NO: 36501 - DNA, 664 bp, Homo sapiens
tttccacatctttttgtttttgagacaaggtctcgctctgtcactcaggctggagtgcagtggtgcagtcttggcccactgcaacatcagcctccagagtagctgggattacaggtgtctgtctagtttttaaatttttttcatgtcagatgggtaatatgcccacattgtaacaaggtttgagggtggcacgtttcacatgttcacatgaacaccaaatcatcacacttatgaactacaaaagagtcgcccaccagcctgggcaacatagcaaatcctcatctttacaaaaaatatataaaatatatatatatatatatatatatatatatatacaggcacacgcctgtagtcccagctactctggaggctgagctttgtatttttttgtagacatggggtctctctatattacccaggctggtcttgaaactctgggctcaagcgatccacccacctccacttaccaaagtgttggaattacaggcgtgagccattgcaaccagtcgagtgtttccatttctttccctgatttcaactttattccctttgagaaaggtagagcaacttttactccttacagatggagaaacttgaaggtcaaatgacatactagtagttcattcatattcattgattcaacaaatgcttctcctatgtgaca

SEQ ID NO: 36502 - DNA, 387 bp, Homo sapiens
ccttttgacagcaggttttttatttggtggtgctatttggttgccattccagtaggtggcacttaagaataagaaccagctcacccttgagtagtctgataatgaatagaggcaactttcctgactggggagatccttttggactgcactgaggtctcttggggaaggggtggtgagggggaagttgcactagcttctcaacctgggccagcaagcatgtaatccacttccctatcacaccctagttgcattgctcatgaccttcagttcttatagacattgccctttgactccctgctgcagtgtgggtgtggactgcaggaatgcccctttgacagctaccaccaaagtgggctcagtgcagagcctcttataccagtccaaagc

SEQ ID NO: 36503 - DNA, 464 bp, Homo sapiens
cagtgacatgttcatagttcactgtggcctcaaactcccgggctcaagcaatcttcctgccttagtctcccaggtagctgggactcaggcatgcagtaccatgcccggctaattattgtattttttgtagagatggggtttcgtcatgttgcccaggctggtctccaactcctgagctcaagcgagctgcctacctcagcctctcaaagtgctggaattataggcacaagccacagtgcctggcctgatgctgaatttagtgcagacacctgatcagcatagcacactatagccccaaactcctgtgcccaagcaatcctcccaccacagcttccggagtagttgggactatgggcgcatatcactgtgcctggcacaattacctttgtgcctccagtctttgtcactcctgctgtcaatgttcctacacatgcagctagaatcatatcttaaaacactgttgg

SEQ ID NO: 36504 - DNA, 442 bp, Homo sapiens
ctgttaatcacctcataacatgtttttgtgagagcctagagaattctttaatctgtagtgagatgagataaatctcccacttcattactgggaagaaaactctgtcagtgttctacccatctacactttgccccctaacttccatcagaaaagttaggccagtggctcgctcccagcctctgaatcacccagacctccttttacattaactggctctgcgtgcaaggggttttacaccactaagttctgtcttgaagggttggtgtgtctagactcatgcccaggtgttctcaccacactagctgtttaggagactgcagagcatggggcataagtcacagtgcagctctgtttccaggtcttaggatgtctctgatatcatcaaagaccaagcagggcctttgatcatcacgtgatctctggtgttatcaaagttccagcc

SEQ ID NO: 36505 - DNA, 1151 bp, Homo sapiens
gattacaggcacacaccacattgcccggctaattttgtatttttagtagatggggtttctccatgttggtcaggctggtctcacactcccgacctcaggtgatctgctcgccttggcctcccaaagtgccgagattacaggcttcagccaccggcgcctggctggttatagctttttaaaacaatttgcttattgtttcttagtttgtagaaagtttctcttggagatttgtgaaggaaatacatgtgatcgcttttgtgatgtgttcagatggaaagaaaatctaactttcataagaaaaattgtatcacactagatgcaggaaaaaaatagatattcgaagaaccacataccagatgcagatgaaatgtaatgtataaagactatttttataatgattttttaaatttagatttttacaatatggattttaaaattttatttcacttttaattgactaattttatacatttataaggtacaatatgttgtttcaatacatgtatacattgcaaaatgatcaaatcaggctaattaacatatctatcaccttacattcttattatttctttgtagtgagaatatctaaaattgaaatacagtcctttttattgtaactgagagaaacaagagcaatgtatatgtggtagaatttaaaagtcatatgtgtatatttatatatgtacatctacgtacaattgcctgtgtacatataattatctgctatatattatgcatatgtaatacatatgcacctgtgtaagttggaattcttatctattctatagaaagaaaagttctacattgaaatatagccaacatccagttaactctgaaaaaaaatcacatcattgcttggctttttctgttgttacttcctgttggcctagtggcaatgattcattataatgcaatgtaattcaatatcacatggtgaatttaaatggctgtataggaaatctgtaacactgttcttgcttaaaaatgtaaaacttcaatagaaggcggttcatcagagaatttggtaacaccaaatagtaaacgctttgatttcagtaatactaagaccctgatagaattaaaatgtgactgaattttacttcttagtaattattttatagctaatatgtaaaaaaaaaaaaaccaccctt

SEQ ID NO: 36506 - DNA, 573 bp, Homo sapiens
cgaaccataagccagagcctctgctgcacacaccaccagcccctgaggtggggatgacaaacataacagagaacggaatggtaaggcgtgagtgcggttctgcaggcttatggtatttctgccatttgagtgcctgcttcccttcctagatgtcttgacctcattgagcagtttattcattgtcatatcccccagtagtgtccacggtgagtgttcaataaatgatatttgttaaccacacagaagtgacagcagcaccatcaagagaacatgtgctttgagctgcttttccaagaatggaaatggatttgctttgatccattcatgtgaccaggggcacgctttgtaagggttaggaacataatacatgaccactgactctttcaggagtgaacaagaggccttgtcctccttggccagccccacatttacttaaaatgatgaaattagggcgcagatgagtccaagaactgaccagggaggcttgagcataggcgagaagtaaaagcagaagaaaacccttaactggttcacccgcagaaacccagactgtacttttagagaagttaaaag

SEQ ID NO: 36507 - DNA, 127 bp, Homo sapiens
aatcttccatgaatctagcagcttaaagagccctccacaggtgcatcatgatatggccagctgtctccagtttgttctcaccatccttatcctagaggcattgaaaatgattccttggaatataggt

SEQ ID NO: 36508 - DNA, 273 bp, Homo sapiens
gtttttactccccattccctcaggagtggttgctgttgttacaatctggaggctcttgcagagctctctgttctatgccattgatatggtttggctgtgtccccacccaaaatctcatattgaattgtaatcctcataatccccataatccccacgtgtctagggagagaccaggtggaggtaattgaatcatgggggcaggtttctcccataccattcttgtgatagtgaattctcatgagagctgatggttttatacgtgtttggtagttc

SEQ ID NO: 36509 - DNA, 642 bp, Homo sapiens
ttgctaaaaaactacaataattaaaacggtaggatttgacataaatataggtaattaaatcaatggaacacaacgtagggtctagatgcgcaagcataaagtcagttgactataaaaaacaaaaattccaagacaattcggtaatgaaagtctgttcagcaaatggtgctgcaatgactggataaacgtatggaaaagggaagcagctcaacacttacctcactacacataacttaactcaaggtggctcacccacctaaatgtaaagctagaagctctagaaacaagcacatctttgccaccttggtgcaaagatttttctagagagaacacacaaaaaagctaaacactaaagaaaaaatggataaattggactttatcaaaatatatcattaaggaaaaaaaaatatttgcaatactatatctgacaagaatttttatccaaaatatatagagtttttacaaatcagtaacaagatgaacagctcaatttaaaaatgggcaaacaagaccaggcacagtggctcatacctgtaatcccagaactttgagaggctgagcgaggcaggaggactgcttgagcccaggagtttgagaccagcctgggcaacatagggaaaccctatttctaccaaaaaaaaa

SEQ ID NO: 36510 - DNA, 443 bp, Homo sapiens
attcgcggccgagtcgacattcaaccctacaagataggtgttatacagattataagagattaatgaatgaaaaccacctaacactgcacctgatgatgcctagtagctgccccaataattagtttccttcccattttccattttatggaatctaatcctgtcttcccaactgtaatgaatttaaggcagagctaatcctttaagaatcctttggccgggcacggtggctcatgcctggcccaagatgattcttagtgttaaggaaaggttgtgaaccactggtctagagcgccacagatccctgagtagccagctctcagcctgtgctctcctgtgtcccagcacctgctgccccagtcatcaggagactcacaggagccccagagggcaaggaggaagagaaggggaaggaaagggagggaggagagggaaggggaggaagc

SEQ ID NO: 36511 - DNA, 516 bp, Homo sapiens
ctttatgacaacagaacctaaagcacctgagcaagtatatttagtaattatttctccagcacttcagaatattgttccaacccttttaccagatgatggagctctgtagtaggtctcgacagcagtacaagaagccctgctatatccttcaacagaccctatggtattacaggaatctgtggtgggaaagaatgctggggatagttgctggtgatcaatctcaataagagaatcacagcatagaccccctaggattctggagaagggccatattatctgtagtaaacaacaatataccattctaaagttcttggctggttgtggtggctcacacctgtaatcccagcactttgggaggccgaagcaggaggatcgcttgagcccaggagttcaagaccagctttggcaacttagagagaactcatctctacaaaaaatacaaaaatattgagtgtagtgatgtgtgtctgtagtcctagctgcttgggaggctgaggtgggaggatcacttgggcc

SEQ ID NO: 36512 - DNA, 1070 bp, Homo sapiens
tccttccacctagaatgccttttccttccttttctcacatagcaatctttgacatatccttgaagactgagctctcccatcagcctgggaggcctggcctgatctggaagacggttcagcacgtctttctctgttgccatagtgcgggatttttgtctattttcagcaggtcgttccagactgcaagcctctggagggcagtgactcgatcccattcagctccatatccccactaccagcatggcatgcattgggggtgtccatacatatacagaacagaaactttcagggtttggccaattttacttttccttagcatgtattatcataaagtgatgtaagtactatatgcctggatttgtcttattactacatctatttgttagtaaaaggaggttacatgtgccctaagtggtttctttgcacttaaatattttttaaattatttggttcttggctgggaacttagtccaatatgtctgctaaagtatttcccatttcttgccacctctacaatagtgccataatttccaagttgatttgacatgtatcatctttattctcacaatcctgagaggtatatagagcaagaattaagttctacatttaacaaaagagaaaacacacagagattgattggctctaggttatatagctaactggtaacaaaccaatttttattaaaattaattttaaaaatttaacttttaaagtttatcttaaatgatgaacatcgcttgtgtttttcttgcatgtagtttctattttaggagaatttgcctaggggtagttctgaaaccaagtaaaagtaattggattatgaaggtcttctaccttaaactagctgtcaactttaaactcaaccatttaataattaaatttaaactttacatttgtttaatttagtaatgtttcttcacattaatcaatttttcaaattaggaaagtaataaatgacaaaaatggaagaacatttattaaagatagaaaaaatgtttaatggtcttgtacatataaatggtgttaatgttttggcttcattttaataaagcttttattaaatagtgaca

SEQ ID NO: 36513 - DNA, 713 bp, Homo sapiens
ctttcttccccccccccgatgtgataattaagagggggttaccgggtggcttgaggggttccacccttcttatattaattgaaacccataggtttgaaggagggaaactcgcctcgggtttcccaataaaagcttttcgaatttcgcgcggctttcggaaaggcccataatttccaagttgatttgacatgtatcatctttattctcacaatcctgagaggtatatagagcaagaattaagttctacatttaacaaaagagaaaacacacagagattgattggctctaggttatatagctaactggtaacaaaccaatttttattaaaattaattttaaaaatttaacttttaaagtttatcttaaatgatgaacatcgcttgtgtttttcttgcatgtagtttctattttaggagaatttgcctaggggtagttctgaaaccaagtaaaagtaattggattatgaaggtcttctaccttaaactagctgtcaactttaaactcaaccatttaataattaaatttaaactttacatttgtttaatttagtaatgtttcttcacattaatcaatttttcaaattaggaaagtaataaatgacaaaaatggaagaacatttattaaagatagaaaaaatgtttaatggtcttgtacatataaatggtgttaatgttttggcttcattttaataaagcttttattaaatagtgaca

SEQ ID NO: 36514 - DNA, 635 bp, Homo sapiens
gaagccaggtcctcagccatggaaggtctggggaaggggcactgctgtcctgattgggacgatggaggcctggaggtgtctggatggtagaagtctttgaggcacagaaagctgccttagcagggaggtgtaagggttcctgggaggaaggtggagagcatgatcctgaggaacagggagtcttgcatcacggcaatggagggactctgattctaagggataaggatgcctgaggtttttccagagagctatggggttccatgggcaggctctgagcctgtgcccgccactaaccccactgaagcccgtcccttcaggctgatgctggtggaggaggagctgcgccgggaccaccccgccatggctgagccgctgccagaacccaagaagaggctgctcgacgctcaggtggaaattacaatgtcatttatcttctccgtgtcccatccccatccatcccactgtctttcgtgcactcactacaccagccacctagccccatcaccatctgtctctcatagtctgctgtttgtccactggctgctcctggcagccccctagtgaccccatcttcatcccatcgtctgtgcctttgtcactcctggcagcgtcagcccaactcctgtgccttccca

SEQ ID NO: 36515 - DNA, 463 bp, Homo sapiens
cccacctagttccaagaacccctgccccttctttgctcactcctattcaagccacgttgttcagcttcctctgcgctcttgggccagagggctagaagctgccgttttctggaatagagcacagggcagtatgatctgtagtttctccaggccctggccggtaccctgaaaacttggggacccatcacctctgttctcttggctccctaattttcctgtctccttggcagctcctgcatagcttcctcttcctgactcttcagatcttgaaggccttccatcctgtaacctccctttgccctcagtatttaagtccagcctccctctggcctccctcccactctggccctcagaccttcccagctgcctgctgcccagcagcaccagcacgaattcccttagcaccagcacgaattcccgtggcaccagcacgaattcccttagcaccagcacgaattccctg

SEQ ID NO: 36516 - DNA, 5888 bp, Homo sapiens
  misc_feature (2365)..(2365): n is a, c, g, or t
gacagcacagaggaggcacaggcaggagcagatggggggcacacatagcacagtgagctgacaccacaatgggaagccaggaccactgaagggtctgacgtctatttaaaaggattctactggctgtccacctcctctgtgctgtcggacagcacagaggagggggtggggggctgaagccctccatcaccaagcagcattctcagacaccatccacattgaaccccacaatgccagcctctgagcggacagtggcctgggtctccaacatgcctcacctgtcggctgacatcgagagtgcccacatcgagcgggaagagtacaagctcaaggagtactcaaaatcgatggatgagagccggctggatagggtgaaggagtacgaggaggagattcactcactgaaagagcggctgcacatgtccaaccggaagctggaagagtatgagcggaggctgctgtcccaggaagaacaaaccagcaaaatcctgatgcagtatcaggcccgactggagcagagtgagaagaggctaaggcagcagcaggcagagaaggattcccagatcaagagcatcattggcaggctgatgctggtggaggaggagctgcgccgggaccaccccgccatggctgagccgctgccagaacccaagaagaggctgctcgacgctcaggagaggcagcttccccccttgggtccaacaaacccgcgtgtgacgctggccccaccgtggaatggcctggcccccccagccccaccacccccaccccggctgcagattacggagaacggcgagttccgaaacaccgcagaccactagcccacccagcatcagagaccttctcttcctttcctgtgcaccccaccctgtaacagcaccaaccaccaggattggacatcaccgaggaacagcgggattgcctccccgaatgcctccctgggaggcacactgattgcccacccccaccactgcaccatttccaggagggagagtggggaccctcagccgcccccttttccttcccattggggtgctgccctctctttgacccccagggacccttgccccaggacaccgcctaccccgtacagaccccttcactccggggtgctatccccatcctctgcctcatcgttcccctgagcactgggggacagaccctcacccccaccctgggggtgtggcacctccaaactttcaacttcagggtgatttttttagcagtaaccagagctgacaatctaactcccctccaccgccccattttggcctcccctgccccccttgttatggggaggggaccccgggtgagggggccctattaccccttgatttctcaggagcgtctgggggggctcagcacgcacaaactccttctccttctaccactcttaaatttactccctccccacccagaacccagatggggtggagggggccaccggggcagggagggggcggcaaggggggaatgggagttgtctccccttctccccacacctgatctgctctcggctggtcccagagcggggtgagggggcttatgcccccccctcccccagtgtgttgggtggggtggaattgaggttagggtgaggggtcagggtttaggagggtgtgtatgttgggaggacaggctagttgatctgtcctactctgacacacagtcccctctgccccttccttctctcttcttggtctctactcccagggggaggggggaacttactctaggaaaagccatgtctctctcccccagggtggggggacctgtgttggaggaggggtgttggggggcccccttccatgactctgtcccctgggggaggtaggacagggctgggcttccctctcatcctccccctcccaatctccttccacctccctccctcccgccagctccacgatttttcggtgtttctctgtacatagttttctggcgggataggggaggtaggatggatggggtttggggtgggtaggccatgggaggggagaagcccctccttggcaccccctcttccctgactgctgtcccctacccagccttgcccccttcatccttttgcgtttggtattgagactctcctagactctactcctctttcttttgtatggacagttccccttcagtcccatccccccaccccactcccagccttatctatcccccctcactgtccccttttctccactcccagccccatttcctttttttctggagtgtgtggtgaaacagaaaaaaacatgtttaataaacggagattgttcttttatcgctgtgccgactttcttaggcagggctctccagacctgtacggtggtaagatctgctttctgaaaggaagctgacagcctgagangaaaaccgtatatccccacctgatgccacactctcctcatagaatgtcactctcccctcccaatgagattttttatattttagagcaggagttttgcaccggccaaacttctccaatctaactctcccctcaccactgtgtcacttagtccgaggccaggaacagcggcgttatctgataaaagagttcatgtatatatccacatttatctcttttaaaaattacctagaaataaggtttctttaattgctggttaaaatgctcccgtgcagaaaacaggaaagaacctgcctggttccttagcaaatctgagttccagtcccaggtccactactattagctgagtgacgcttccagcccgtttcccccgcctggaaactgaggacggcaacccccaccctcgcagggccggtgggaagacacaaagtgatgtgggcaagtgccaggcccacatggtaagtacccaactaatctcgcccctctcaggacctaccgggggcgggtgctacacttaatcaccgggaaacgcagctttccggggcggctgacggcccaccccctccgaccgggctgttctctcccgggccctgcctctcggtcctctgcagcggggaggacttcagcagctccccgggacgcccgttgcgaggacaccctgggcctgtgccctcctactagcaccgccctcctcgtctgcagtagccaatcaacacgaggcttgtaggctgccgttcctcgattggctacggctctagctccgcccgccgcacttggcgacggtgtccggcggggaggcggcggcttccggtctgggacggagctgtagcggcactgtaactgcgagggcagcgccgcgtgtgtaacggcgggggcgtgtcggcgggaaggacaatcgggccgggactcgcggtgtccgggtgaccgcggcttcccgggagcagacctctgtgggcactgtgaggcggaacggagcggcggggcaggagctgttgtgggcagccttcatcccgcgtggagtctacccccaagcccttctcctcttcccaattcttgtcaccttcgaggaggccatggaaaccccaacacctttgccgcctgtacccgcctccccgacctgcaacccagccccacggacaatccagatcgagttcccacagcatagctcgtcgctgctggaatctctgaaccgccacaggctagagggaaagttctgtgatgtgtccctcctggtgcagggccgggaacttagggctcataaagcagtgttagctgctgcctctccttacttccatgacaagctgcttctgggggatgcgcctcgtctcactctaccgagtgtcattgaagccgatgccttcgaggggctgctccagctcatttattcagggcgtctccgcctgccactggatgctcttcctgctcatctccttgtggccagtggccttcaaatgtggcaggtagtagatcagtgctcagaaattcttagagaattagaaacttcaggtggtggaatttcagcccgtggaggaaactcctaccatgcccttctttccactacatcctctacaggaggctggtgcattcgctcttcgcctttccagaccccagtacagtcctctgcttctactgaaagccctgcttccactgagagccctgtgggaggggagggaagtgaactgggagaagtgctgcaaattcaggtggaagaagaagaggaggaggaggaagatgatgatgatgaggaccaggggtcagccacactctctcagactcctcagccccagagagtatcaggggtttttccccgtcctcatggaccccacccactgcccatgactgctactccccgaaagcttccagagggtgagagtgcaccacttgagcttcctgcccctcctgcactgccccccaaaatcttctacattaagcaggaacccttcgagcctaaggaggagatatcaggaagcggaactcagcctggaggagcaaaggaggaaaccaaagtgttttctggaggggacactgaagggaatggggagctagggttcttgttgccttcagggccagggccaacatctgggggagggggtccatcctggaaaccagtggatcttcatgggaatgaaatcctgtcagggggtggaggacctgggggagcaggccaggccgtgcatgggcctgtgaagctaggggggacaccccctgcagatggaaaacgctttggttgcctgtgtgggaagcggtttgcagtgaagccaaagcgtgaccggcacatcatgctgaccttcagccttcggccttttggctgtggcatctgcaacaagcgcttcaagctgaagcaccatctgacagagcacatgaagacccatgctggagccctgcatgcctgtccccactgtggccgtcggttccgagtccatgcctgttttctccgccaccgggacctatgcaagggccagggctgggccactgcccactggacttacaagtgactgctgaggctatacactagcttctagaacaagataaccactgctgctgatggatacttttccctcactgccatggcacaccagtcatggatcttgtaatcatgccaagagaatagatacattatggacctcttgttcttagatatgggcctctcagcctggcagatgtggaaactcaaatttctcgtcccactccaggttttggctagccaaccctgcaggaaagtggtttataggccattcatacttaagttgatcacttgcccatggtggacatttttgtggtggtgatgtccattaaggaaaccagattttcaattatttagtgagagaagagttagagcaaaagacagtggtaaatgttttattccgtctccatgaggaattgaaggagttggtctccacctagagatacatttgatttacagcttaagtaattcagaggctaagctctaagcttttttctctcattgctggaatgatttaagcagaagtccttttgtgtacttttaaaattgtatctttccaggagcccctcagattgtaccttgctttctcaccaatagacaccttcccgacacttttttaatgttgtagctgagcactttaacaagttgagcattccatgtttcattcttagaaccttctttaatagagggtcttccctcaacagcctgtgcctctggtctacctttgaccaccactgataactaatatattggtcacaatgactggaatgtgactagtgatctcaggagatggcactgtcctaaagtgctgtcagggtggcaccactgctctctgaacaacttaccttggtcagagggactcaggtttgggacagcacaagctgaaggctggagagtaacttgcatagtaggaccatacctcttcctttcccatcccacccacatatgatagacagcccctctgttgagatatggaggggacagatactggaatcgggggtgggacttgcagttacttaaaattttttaataaactgtgccctgaaacctaaaaaaacagtg

SEQ ID NO: 36517 - DNA, 2604 bp, Homo sapiens
gacagcacagaggaggcacaggcaggagcagatggggggcacacatagcacagtgagctgacaccacaatgggaagccaggaccactgaagggtctgacgtctatttaaaaggattctactggctgtccacctcctctgtgctgtcggacagcacagaggagggggtggggggctgaagccctccatcaccaagcagcattctcagacaccatccacattgaaccccacaatgccagcctctgagcggacagtggcctgggtctccaacatgcctcacctgtcggctgacatcgagagtgcccacatcgagcgggaagagtacaagctcaaggagtactcaaaatcgatggatgagagccggctggatagggtgaaggagtacgaggaggagattcactcactgaaagagcggctgcacatgtccaaccggaagctggaagagtatgagcggaggctgctgtcccaggaagaacaaaccagcaaaatcctgatgcagtatcaggcccgactggagcagagtgagaagaggctaaggcagcagcaggcagagaaggattcccagatcaagagcatcattggcaggctgatgctggtggaggaggagctgcgccgggaccaccccgccatggctgagccgctgccagaacccaagaagaggctgctcgacgctcaggagaggcagcttccccccttgggtccaacaaacccgcgtgtgacgctggccccaccgtggaatggcctggcccccccagccccaccacccccaccccggctgcagattacggagaacggcgagttccgaaacaccgcagaccactagcccacccagcatcagagaccttctcttcctttcctgtgcaccccaccctgtaacagcaccaaccaccaggattggacatcaccgaggaacagcgggattgcctccccgaatgcctccctgggaggcacactgattgcccacccccaccactgcaccatttccaggagggagagtggggaccctcagccgcccccttttccttcccattggggtgctgccctctctttgacccccagggacccttgccccaggacaccgcctaccccgtacagaccccttcactccggggtgctatccccatcctctgcctcatcgttcccctgagcactgggggacagaccctcacccccaccctgggggtgtggcacctccaaactttcaacttcagggtgatttttttagcagtaaccagagctgacaatctaactcccctccaccgccccattttggcctcccctgccccccttgttatggggaggggaccccgggtgagggggccctattaccccttgatttctcaggagcgtctgggggggctcagcacgcacaaactccttctccttctaccactcttaaatttactccctccccacccagaacccagatggggtggagggggccaccggggcagggagggggcggcaaggggggaatgggagttgtctccccttctccccacacctgatctgctctcggctggtcccagagcggggtgagggggcttatgcccccccctcccccagtgtgttgggtggggtggaattgaggttagggtgaggggtcagggtttaggagggtgtgtatgttgggaggacaggctagttgatctgtcctactctgacacacagtcccctctgccccttccttctctcttcttggtctctactcccagggggaggggggaacttactctaggaaaagccatgtctctctcccccagggtggggggacctgtgttggaggaggggtgttggggggcccccttccatgactctgtcccctgggggaggtaggacagggctgggcttccctctcatcctccccctcccaatctccttccacctccctccctcccgccagctccacgatttttcggtgtttctctgtacatagttttctggcgggataggggaggtaggatggatggggtttggggtgggtaggccatgggaggggagaagcccctccttggcaccccctcttccctgactgctgtcccctacccagccttgcccccttcatccttttgcgtttggtattgagactctcctagactctactcctctttcttttgtatggacagttccccttcagtcccatccccctacacatacacccagccggggccaaatttatacttatataaaagttgtaaatatgtgaaattttatccctgtgccctttccccacctcaggccctacccctggaccctccccaaccttccttctctcttctttggctgttgtaattatctggggtttgtactgtacatatccggggtgtgtgtgtgtgggctgggggcaacccttctgtacagagcttcctggccccctccccccccgcccctctgcttccctccccacccaccacctcaagggtagggagttgctcttcctacctgttttattttgttttctcgttctccctccccaccccactcccagccttatctatcccccctcactgtccccttttctccactcccagccccatttcctttttttctggagtgtgtggtgaaacagaaaaaaacatgtttaataaacggagattgttctttta

SEQ ID NO: 36518 - DNA, 1055 bp, Homo sapiens
gacagcacagaggaggcacaggcaggagcagatggggggcacacatagcacagtgagctgacaccacaatgggaagccaggaccactgaagggtctgacgtctatttaaaaggattctactggctgtccacctcctctgtgctgtcggacagcacagaggagggggtggggggctgaagccctccatcaccaagcagcattctcagacaccatccacattgaaccccacaatgccagcctctgagcggacagtggcctgggtctccaacatgcctcacctgtcggctgacatcgagagtgcccacatcgagcgggaagagtacaagctcaaggagtactcaaaatcgatggatgagagccggctggatagggtgaaggagtacgaggaggagattcactcactgaaagagcggctgcacatgtccaaccggaagctggaagagtatgagcggaggctgctgtcccaggaagaacaaaccagcaaaatcctgatgcagtatcaggcccgactggagcagagtgagaagaggctaaggcagcagcaggcagagaaggattcccagatcaagagcatcattggcaggctgatgctggtggaggaggagctgcgccgggaccaccccgccatggctgagccgctgccagaacccaagaagaggctgctcgacgctcagctcctcatcaggtaattctcctggttccgctttggccacgggcggaggacacagggggaggtgactccggaccactgcaggttggtcgtgaagcccactccctccaacacctccggagcctctcccctctcactgctgccctccacacccagagaacctccacagactccagccctccgacacctgcacagatccatctcccaagacaccacccaaagagagcatttgctgctgcttcccagaactgtccaacaataccttagcaacaccaagagttgggccctagatgggcccagcacattcacaggtcacacccacttccctgcaaaacccaccccctcccagcctcctcctgactctaagccctcctcttcctctaaa

SEQ ID NO: 36519 - DNA, 719 bp, Homo sapiens
cccatccatcccactgtctttcgtgcactcactacaccagccacctagccccatcaccatctgtctctcatagtctgctgtttgtccactggctgctcctggcagccccctagtgaccccatcttcatcccatcgtctgtgcctttgtcactcctggcagcgtcagcccaactcctgtgccttcccatccagtcttcccactcctctctgcatctcaggaccttctctaccagaaccttggtctttctgcccctagaccccacctagttccaagaacccctgccccttctttgctcactcctattcaagccacgttgttcagcttcctctgcgctcttgggccagagggctagaagctgccgttttctggaatagagcacagggcagtatgatctgtagtttctccaggccctggccggtaccctgaaaacttggggacccatcacctctgttctcttggctccctaattttcctgtctccttggcagctcctgcatagcttcctcttcctgactcttcagatcttgaaggccttccatcctgtaacctccctttgccctcagtatttaagtccagcctccctctggcctccctcccactctggccctcagaccttcccagctgcctgctgcccagcctctcttctcacaagccagcttctaggacctcccttctgcacccttaccccttgctttcccaaaattctgctcattttccta

SEQ ID NO: 36520 - DNA, 6493 bp, Homo sapiens
  misc_feature (2719)..(2719): n is a, c, g, or t
gggggccagccgcctccattgcagaggggcaagtctcagcagttgacagtcagcgcagcccagaaaccccggccatccagcgggaatctattgcagtccccagagccaagttatggccccgcccgtccacggcaacagagcctcagcaaggagggcagcattgggggcagcgggggcagcggtggcggagggggtggggggctgaagccctccatcaccaagcagcattctcagacaccatccacattgaaccccacaatgccagcctctgagcggacagtggcctgggtctccaacatgcctcacctgtcggctgacatcgagagtgcccacatcgagcgggaagagtacaagctcaaggagtactcaaaatcgatggatgagagccggctggatagggtgaaggagtacgaggaggagattcactcactgaaagagcggctgcacatgtccaaccggaagctggaagagtatgagcggaggctgctgtcccaggaagaacaaaccagcaaaatcctgatgcagtatcaggcccgactggagcagagtgagaagaggctaaggcagcagcaggcagagaaggattcccagatcaagagcatcattggcaggctgatgctggtggaggaggagctgcgccgggaccaccccgccatggctgagccgctgccagaacccaagaagaggctgctcgacgctcaggagaggcagcttccccccttgggtccaacaaacccgcgtgtgacgctggccccaccgtggaatggcctggcccccccagccccaccacccccaccccggctgcagattacggagaacggcgagttccgaaacaccgcagaccactagcccacccagcatcagagaccttctcttcctttcctgtgcaccccaccctgtaacagcaccaaccaccaggattggacatcaccgaggaacagcgggattgcctccccgaatgcctccctgggaggcacactgattgcccacccccaccactgcaccatttccaggagggagagtggggaccctcagccgcccccttttccttcccattggggtgctgccctctctttgacccccagggacccttgccccaggacaccgcctaccccgtacagaccccttcactccggggtgctatccccatcctctgcctcatcgttcccctgagcactgggggacagaccctcacccccaccctgggggtgtggcacctccaaactttcaacttcagggtgatttttttagcagtaaccagagctgacaatctaactcccctccaccgccccattttggcctcccctgccccccttgttatggggaggggaccccgggtgagggggccctattaccccttgatttctcaggagcgtctgggggggctcagcacgcacaaactccttctccttctaccactcttaaatttactccctccccacccagaacccagatggggtggagggggccaccggggcagggagggggcggcaaggggggaatgggagttgtctccccttctccccacacctgatctgctctcggctggtcccagagcggggtgagggggcttatgcccccccctcccccagtgtgttgggtggggtggaattgaggttagggtgaggggtcagggtttaggagggtgtgtatgttgggaggacaggctagttgatctgtcctactctgacacacagtcccctctgccccttccttctctcttcttggtctctactcccagggggaggggggaacttactctaggaaaagccatgtctctctcccccagggtggggggacctgtgttggaggaggggtgttggggggcccccttccatgactctgtcccctgggggaggtaggacagggctgggcttccctctcatcctccccctcccaatctccttccacctccctccctcccgccagctccacgatttttcggtgtttctctgtacatagttttctggcgggataggggaggtaggatggatggggtttggggtgggtaggccatgggaggggagaagcccctccttggcaccccctcttccctgactgctgtcccctacccagccttgcccccttcatccttttgcgtttggtattgagactctcctagactctactcctctttcttttgtatggacagttccccttcagtcccatccccctacacatacacccagccggggccaaatttatacttatataaaagttgtaaatatgtgaaattttatccctgtgccctttccccacctcaggccctacccctggaccctccccaaccttccttctctcttctttggctgttgtaattatctggggtttgtactgtacatatccggggtgtgtgtgtgtgggctgggggcaacccttctgtacagagcttcctggccccctccccccccgcccctctgcttccctccccacccaccacctcaagggtagggagttgctcttcctacctgttttattttgttttctcgttctccctccccaccccactcccagccttatctatcccccctcactgtccccttttctccactcccagccccatttcctttttttctggagtgtgtggtgaaacagaaaaaaacatgtttaataaacggagattgttcttttatcgctgtgccgactttcttaggcagggctctccagacctgtacggtggtaagatctgctttctgaaaggaagctgacagcctgagangaaaaccgtatatccccacctgatgccacactctcctcatagaatgtcactctcccctcccaatgagattttttatattttagagcaggagttttgcaccggccaaacttctccaatctaactctcccctcaccactgtgtcacttagtccgaggccaggaacagcggcgttatctgataaaagagttcatgtatatatccacatttatctcttttaaaaattacctagaaataaggtttctttaattgctggttaaaatgctcccgtgcagaaaacaggaaagaacctgcctggttccttagcaaatctgagttccagtcccaggtccactactattagctgagtgacgcttccagcccgtttcccccgcctggaaactgaggacggcaacccccaccctcgcagggccggtgggaagacacaaagtgatgtgggcaagtgccaggcccacatggtaagtacccaactaatctcgcccctctcaggacctaccgggggcgggtgctacacttaatcaccgggaaacgcagctttccggggcggctgacggcccaccccctccgaccgggctgttctctcccgggccctgcctctcggtcctctgcagcggggaggacttcagcagctccccgggacgcccgttgcgaggacaccctgggcctgtgccctcctactagcaccgccctcctcgtctgcagtagccaatcaacacgaggcttgtaggctgccgttcctcgattggctacggctctagctccgcccgccgcacttggcgacggtgtccggcggggaggcggcggcttccggtctgggacggagctgtagcggcactgtaactgcgagggcagcgccgcgtgtgtaacggcgggggcgtgtcggcgggaaggacaatcgggccgggactcgcggtgtccgggtgaccgcggcttcccgggagcagacctctgtgggcactgtgaggcggaacggagcggcggggcaggagctgttgtgggcaggtgaaggcaggctggtggctgaaggacctccttcttatcttccacaggggctggaagttaaaacccctgttggtgtttagtggtggtggttgttgttgtttgtttttgctttcttggtgtgcgggactgatttgcagaaaccgccactgacttaaaagtttccagttattgctcgtggggagggggttgtttgagaagatgtggctccctttatccagggcttctgtgacctccatctttttcctctgcagccttcatcccgcgtggagtctacccccaagcccttctcctcttcccaattcttgtcaccttcgaggaggccatggaaaccccaacacctttgccgcctgtacccgcctccccgacctgcaacccagccccacggacaatccagatcgagttcccacagcatagctcgtcgctgctggaatctctgaaccgccacaggctagagggaaagttctgtgatgtgtccctcctggtgcagggccgggaacttagggctcataaagcagtgttagctgctgcctctccttacttccatgacaagctgcttctgggggatgcgcctcgtctcactctaccgagtgtcattgaagccgatgccttcgaggggctgctccagctcatttattcagggcgtctccgcctgccactggatgctcttcctgctcatctccttgtggccagtggccttcaaatgtggcaggtagtagatcagtgctcagaaattcttagagaattagaaacttcaggtggtggaatttcagcccgtggaggaaactcctaccatgcccttctttccactacatcctctacaggaggctggtgcattcgctcttcgcctttccagaccccagtacagtcctctgcttctactgaaagccctgcttccactgagagccctgtgggaggggagggaagtgaactgggagaagtgctgcaaattcaggtggaagaagaagaggaggaggaggaagatgatgatgatgaggaccaggggtcagccacactctctcagactcctcagccccagagagtatcaggggtttttccccgtcctcatggaccccacccactgcccatgactgctactccccgaaagcttccagagggtgagagtgcaccacttgagcttcctgcccctcctgcactgccccccaaaatcttctacattaagcaggaacccttcgagcctaaggaggagatatcaggaagcggaactcagcctggaggagcaaaggaggaaaccaaagtgttttctggaggggacactgaagggaatggggagctagggttcttgttgccttcagggccagggccaacatctgggggagggggtccatcctggaaaccagtggatcttcatgggaatgaaatcctgtcagggggtggaggacctgggggagcaggccaggccgtgcatgggcctgtgaagctaggggggacaccccctgcagatggaaaacgctttggttgcctgtgtgggaagcggtttgcagtgaagccaaagcgtgaccggcacatcatgctgaccttcagccttcggccttttggctgtggcatctgcaacaagcgcttcaagctgaagcaccatctgacagagcacatgaagacccatgctggagccctgcatgcctgtccccactgtggccgtcggttccgagtccatgcctgttttctccgccaccgggacctatgcaagggccagggctgggccactgcccactggacttacaagtgactgctgaggctatacactagcttctagaacaagataaccactgctgctgatggatacttttccctcactgccatggcacaccagtcatggatcttgtaatcatgccaagagaatagatacattatggacctcttgttcttagatatgggcctctcagcctggcagatgtggaaactcaaatttctcgtcccactccaggttttggctagccaaccctgcaggaaagtggtttataggccattcatacttaagttgatcacttgcccatggtggacatttttgtggtggtgatgtccattaaggaaaccagattttcaattatttagtgagagaagagttagagcaaaagacagtggtaaatgttttattccgtctccatgaggaattgaaggagttggtctccacctagagatacatttgatttacagcttaagtaattcagaggctaagctctaagcttttttctctcattgctggaatgatttaagcagaagtccttttgtgtacttttaaaattgtatctttccaggagcccctcagattgtaccttgctttctcaccaatagacaccttcccgacacttttttaatgttgtagctgagcactttaacaagttgagcattccatgtttcattcttagaaccttctttaatagagggtcttccctcaacagcctgtgcctctggtctacctttgaccaccactgataactaatatattggtcacaatgactggaatgtgactagtgatctcaggagatggcactgtcctaaagtgctgtcagggtggcaccactgctctctgaacaacttaccttggtcagagggactcaggtttgggacagcacaagctgaaggctggagagtaacttgcatagtaggaccatacctcttcctttcccatcccacccacatatgatagacagcccctctgttgagatatggaggggacagatactggaatcgggggtgggacttgcagttacttaaaattttttaataaactgtgccctgaaacctaaaaaaacagtg

SEQ ID NO: 36521 - DNA, 6214 bp, Homo sapiens
  misc_feature (2691)..(2691): n is a, c, g, or t
gacagcacagaggaggcacaggcaggagcagatggggggcacacatagcacagtgagctgacaccacaatgggaagccaggaccactgaagggtctgacgtctatttaaaaggattctactggctgtccacctcctctgtgctgtcggacagcacagaggagggggtggggggctgaagccctccatcaccaagcagcattctcagacaccatccacattgaaccccacaatgccagcctctgagcggacagtggcctgggtctccaacatgcctcacctgtcggctgacatcgagagtgcccacatcgagcgggaagagtacaagctcaaggagtactcaaaatcgatggatgagagccggctggatagggtgaaggagtacgaggaggagattcactcactgaaagagcggctgcacatgtccaaccggaagctggaagagtatgagcggaggctgctgtcccaggaagaacaaaccagcaaaatcctgatgcagtatcaggcccgactggagcagagtgagaagaggctaaggcagcagcaggcagagaaggattcccagatcaagagcatcattggcaggctgatgctggtggaggaggagctgcgccgggaccaccccgccatggctgagccgctgccagaacccaagaagaggctgctcgacgctcaggagaggcagcttccccccttgggtccaacaaacccgcgtgtgacgctggccccaccgtggaatggcctggcccccccagccccaccacccccaccccggctgcagattacggagaacggcgagttccgaaacaccgcagaccactagcccacccagcatcagagaccttctcttcctttcctgtgcaccccaccctgtaacagcaccaaccaccaggattggacatcaccgaggaacagcgggattgcctccccgaatgcctccctgggaggcacactgattgcccacccccaccactgcaccatttccaggagggagagtggggaccctcagccgcccccttttccttcccattggggtgctgccctctctttgacccccagggacccttgccccaggacaccgcctaccccgtacagaccccttcactccggggtgctatccccatcctctgcctcatcgttcccctgagcactgggggacagaccctcacccccaccctgggggtgtggcacctccaaactttcaacttcagggtgatttttttagcagtaaccagagctgacaatctaactcccctccaccgccccattttggcctcccctgccccccttgttatggggaggggaccccgggtgagggggccctattaccccttgatttctcaggagcgtctgggggggctcagcacgcacaaactccttctccttctaccactcttaaatttactccctccccacccagaacccagatggggtggagggggccaccggggcagggagggggcggcaaggggggaatgggagttgtctccccttctccccacacctgatctgctctcggctggtcccagagcggggtgagggggcttatgcccccccctcccccagtgtgttgggtggggtggaattgaggttagggtgaggggtcagggtttaggagggtgtgtatgttgggaggacaggctagttgatctgtcctactctgacacacagtcccctctgccccttccttctctcttcttggtctctactcccagggggaggggggaacttactctaggaaaagccatgtctctctcccccagggtggggggacctgtgttggaggaggggtgttggggggcccccttccatgactctgtcccctgggggaggtaggacagggctgggcttccctctcatcctccccctcccaatctccttccacctccctccctcccgccagctccacgatttttcggtgtttctctgtacatagttttctggcgggataggggaggtaggatggatggggtttggggtgggtaggccatgggaggggagaagcccctccttggcaccccctcttccctgactgctgtcccctacccagccttgcccccttcatccttttgcgtttggtattgagactctcctagactctactcctctttcttttgtatggacagttccccttcagtcccatccccctacacatacacccagccggggccaaatttatacttatataaaagttgtaaatatgtgaaattttatccctgtgccctttccccacctcaggccctacccctggaccctccccaaccttccttctctcttctttggctgttgtaattatctggggtttgtactgtacatatccggggtgtgtgtgtgtgggctgggggcaacccttctgtacagagcttcctggccccctccccccccgcccctctgcttccctccccacccaccacctcaagggtagggagttgctcttcctacctgttttattttgttttctcgttctccctccccaccccactcccagccttatctatcccccctcactgtccccttttctccactcccagccccatttcctttttttctggagtgtgtggtgaaacagaaaaaaacatgtttaataaacggagattgttcttttatcgctgtgccgactttcttaggcagggctctccagacctgtacggtggtaagatctgctttctgaaaggaagctgacagcctgagangaaaaccgtatatccccacctgatgccacactctcctcatagaatgtcactctcccctcccaatgagattttttatattttagagcaggagttttgcaccggccaaacttctccaatctaactctcccctcaccactgtgtcacttagtccgaggccaggaacagcggcgttatctgataaaagagttcatgtatatatccacatttatctcttttaaaaattacctagaaataaggtttctttaattgctggttaaaatgctcccgtgcagaaaacaggaaagaacctgcctggttccttagcaaatctgagttccagtcccaggtccactactattagctgagtgacgcttccagcccgtttcccccgcctggaaactgaggacggcaacccccaccctcgcagggccggtgggaagacacaaagtgatgtgggcaagtgccaggcccacatggtaagtacccaactaatctcgcccctctcaggacctaccgggggcgggtgctacacttaatcaccgggaaacgcagctttccggggcggctgacggcccaccccctccgaccgggctgttctctcccgggccctgcctctcggtcctctgcagcggggaggacttcagcagctccccgggacgcccgttgcgaggacaccctgggcctgtgccctcctactagcaccgccctcctcgtctgcagtagccaatcaacacgaggcttgtaggctgccgttcctcgattggctacggctctagctccgcccgccgcacttggcgacggtgtccggcggggaggcggcggcttccggtctgggacggagctgtagcggcactgtaactgcgagggcagcgccgcgtgtgtaacggcgggggcgtgtcggcgggaaggacaatcgggccgggactcgcggtgtccgggtgaccgcggcttcccgggagcagacctctgtgggcactgtgaggcggaacggagcggcggggcaggagctgttgtgggcagccttcatcccgcgtggagtctacccccaagcccttctcctcttcccaattcttgtcaccttcgaggaggccatggaaaccccaacacctttgccgcctgtacccgcctccccgacctgcaacccagccccacggacaatccagatcgagttcccacagcatagctcgtcgctgctggaatctctgaaccgccacaggctagagggaaagttctgtgatgtgtccctcctggtgcagggccgggaacttagggctcataaagcagtgttagctgctgcctctccttacttccatgacaagctgcttctgggggatgcgcctcgtctcactctaccgagtgtcattgaagccgatgccttcgaggggctgctccagctcatttattcagggcgtctccgcctgccactggatgctcttcctgctcatctccttgtggccagtggccttcaaatgtggcaggtagtagatcagtgctcagaaattcttagagaattagaaacttcaggtggtggaatttcagcccgtggaggaaactcctaccatgcccttctttccactacatcctctacaggaggctggtgcattcgctcttcgcctttccagaccccagtacagtcctctgcttctactgaaagccctgcttccactgagagccctgtgggaggggagggaagtgaactgggagaagtgctgcaaattcaggtggaagaagaagaggaggaggaggaagatgatgatgatgaggaccaggggtcagccacactctctcagactcctcagccccagagagtatcaggggtttttccccgtcctcatggaccccacccactgcccatgactgctactccccgaaagcttccagagggtgagagtgcaccacttgagcttcctgcccctcctgcactgccccccaaaatcttctacattaagcaggaacccttcgagcctaaggaggagatatcaggaagcggaactcagcctggaggagcaaaggaggaaaccaaagtgttttctggaggggacactgaagggaatggggagctagggttcttgttgccttcagggccagggccaacatctgggggagggggtccatcctggaaaccagtggatcttcatgggaatgaaatcctgtcagggggtggaggacctgggggagcaggccaggccgtgcatgggcctgtgaagctaggggggacaccccctgcagatggaaaacgctttggttgcctgtgtgggaagcggtttgcagtgaagccaaagcgtgaccggcacatcatgctgaccttcagccttcggccttttggctgtggcatctgcaacaagcgcttcaagctgaagcaccatctgacagagcacatgaagacccatgctggagccctgcatgcctgtccccactgtggccgtcggttccgagtccatgcctgttttctccgccaccgggacctatgcaagggccagggctgggccactgcccactggacttacaagtgactgctgaggctatacactagcttctagaacaagataaccactgctgctgatggatacttttccctcactgccatggcacaccagtcatggatcttgtaatcatgccaagagaatagatacattatggacctcttgttcttagatatgggcctctcagcctggcagatgtggaaactcaaatttctcgtcccactccaggttttggctagccaaccctgcaggaaagtggtttataggccattcatacttaagttgatcacttgcccatggtggacatttttgtggtggtgatgtccattaaggaaaccagattttcaattatttagtgagagaagagttagagcaaaagacagtggtaaatgttttattccgtctccatgaggaattgaaggagttggtctccacctagagatacatttgatttacagcttaagtaattcagaggctaagctctaagcttttttctctcattgctggaatgatttaagcagaagtccttttgtgtacttttaaaattgtatctttccaggagcccctcagattgtaccttgctttctcaccaatagacaccttcccgacacttttttaatgttgtagctgagcactttaacaagttgagcattccatgtttcattcttagaaccttctttaatagagggtcttccctcaacagcctgtgcctctggtctacctttgaccaccactgataactaatatattggtcacaatgactggaatgtgactagtgatctcaggagatggcactgtcctaaagtgctgtcagggtggcaccactgctctctgaacaacttaccttggtcagagggactcaggtttgggacagcacaagctgaaggctggagagtaacttgcatagtaggaccatacctcttcctttcccatcccacccacatatgatagacagcccctctgttgagatatggaggggacagatactggaatcgggggtgggacttgcagttacttaaaattttttaataaactgtgccctgaaacctaaaaaaacagtg

SEQ ID NO: 36522 - DNA, 6295 bp, Homo sapiens
  misc_feature (2691)..(2691): n is a, c, g, or t
gacagcacagaggaggcacaggcaggagcagatggggggcacacatagcacagtgagctgacaccacaatgggaagccaggaccactgaagggtctgacgtctatttaaaaggattctactggctgtccacctcctctgtgctgtcggacagcacagaggagggggtggggggctgaagccctccatcaccaagcagcattctcagacaccatccacattgaaccccacaatgccagcctctgagcggacagtggcctgggtctccaacatgcctcacctgtcggctgacatcgagagtgcccacatcgagcgggaagagtacaagctcaaggagtactcaaaatcgatggatgagagccggctggatagggtgaaggagtacgaggaggagattcactcactgaaagagcggctgcacatgtccaaccggaagctggaagagtatgagcggaggctgctgtcccaggaagaacaaaccagcaaaatcctgatgcagtatcaggcccgactggagcagagtgagaagaggctaaggcagcagcaggcagagaaggattcccagatcaagagcatcattggcaggctgatgctggtggaggaggagctgcgccgggaccaccccgccatggctgagccgctgccagaacccaagaagaggctgctcgacgctcaggagaggcagcttccccccttgggtccaacaaacccgcgtgtgacgctggccccaccgtggaatggcctggcccccccagccccaccacccccaccccggctgcagattacggagaacggcgagttccgaaacaccgcagaccactagcccacccagcatcagagaccttctcttcctttcctgtgcaccccaccctgtaacagcaccaaccaccaggattggacatcaccgaggaacagcgggattgcctccccgaatgcctccctgggaggcacactgattgcccacccccaccactgcaccatttccaggagggagagtggggaccctcagccgcccccttttccttcccattggggtgctgccctctctttgacccccagggacccttgccccaggacaccgcctaccccgtacagaccccttcactccggggtgctatccccatcctctgcctcatcgttcccctgagcactgggggacagaccctcacccccaccctgggggtgtggcacctccaaactttcaacttcagggtgatttttttagcagtaaccagagctgacaatctaactcccctccaccgccccattttggcctcccctgccccccttgttatggggaggggaccccgggtgagggggccctattaccccttgatttctcaggagcgtctgggggggctcagcacgcacaaactccttctccttctaccactcttaaatttactccctccccacccagaacccagatggggtggagggggccaccggggcagggagggggcggcaaggggggaatgggagttgtctccccttctccccacacctgatctgctctcggctggtcccagagcggggtgagggggcttatgcccccccctcccccagtgtgttgggtggggtggaattgaggttagggtgaggggtcagggtttaggagggtgtgtatgttgggaggacaggctagttgatctgtcctactctgacacacagtcccctctgccccttccttctctcttcttggtctctactcccagggggaggggggaacttactctaggaaaagccatgtctctctcccccagggtggggggacctgtgttggaggaggggtgttggggggcccccttccatgactctgtcccctgggggaggtaggacagggctgggcttccctctcatcctccccctcccaatctccttccacctccctccctcccgccagctccacgatttttcggtgtttctctgtacatagttttctggcgggataggggaggtaggatggatggggtttggggtgggtaggccatgggaggggagaagcccctccttggcaccccctcttccctgactgctgtcccctacccagccttgcccccttcatccttttgcgtttggtattgagactctcctagactctactcctctttcttttgtatggacagttccccttcagtcccatccccctacacatacacccagccggggccaaatttatacttatataaaagttgtaaatatgtgaaattttatccctgtgccctttccccacctcaggccctacccctggaccctccccaaccttccttctctcttctttggctgttgtaattatctggggtttgtactgtacatatccggggtgtgtgtgtgtgggctgggggcaacccttctgtacagagcttcctggccccctccccccccgcccctctgcttccctccccacccaccacctcaagggtagggagttgctcttcctacctgttttattttgttttctcgttctccctccccaccccactcccagccttatctatcccccctcactgtccccttttctccactcccagccccatttcctttttttctggagtgtgtggtgaaacagaaaaaaacatgtttaataaacggagattgttcttttatcgctgtgccgactttcttaggcagggctctccagacctgtacggtggtaagatctgctttctgaaaggaagctgacagcctgagangaaaaccgtatatccccacctgatgccacactctcctcatagaatgtcactctcccctcccaatgagattttttatattttagagcaggagttttgcaccggccaaacttctccaatctaactctcccctcaccactgtgtcacttagtccgaggccaggaacagcggcgttatctgataaaagagttcatgtatatatccacatttatctcttttaaaaattacctagaaataaggtttctttaattgctggttaaaatgctcccgtgcagaaaacaggaaagaacctgcctggttccttagcaaatctgagttccagtcccaggtccactactattagctgagtgacgcttccagcccgtttcccccgcctggaaactgaggacggcaacccccaccctcgcagggccggtgggaagacacaaagtgatgtgggcaagtgccaggcccacatggtaagtacccaactaatctcgcccctctcaggacctaccgggggcgggtgctacacttaatcaccgggaaacgcagctttccggggcggctgacggcccaccccctccgaccgggctgttctctcccgggccctgcctctcggtcctctgcagcggggaggacttcagcagctccccgggacgcccgttgcgaggacaccctgggcctgtgccctcctactagcaccgccctcctcgtctgcagtagccaatcaacacgaggcttgtaggctgccgttcctcgattggctacggctctagctccgcccgccgcacttggcgacggtgtccggcggggaggcggcggcttccggtctgggacggagctgtagcggcactgtaactgcgagggcagcgccgcgtgtgtaacggcgggggcgtgtcggcgggaaggacaatcgggccgggactcgcggtgtccgggtgaccgcggcttcccgggagcagacctctgtgggcactgtgaggcggaacggagcggcggggcaggagctgttgtgggcagccttcatcccgcgtggagtctacccccaagcccttctcctcttcccaattcttgtcaccttcgaggaggccatggaaaccccaacacctttgccgcctgtacccgcctccccgacctgcaacccagccccacggacaatccagatcgagttcccacagcatagctcgtcgctgctggaatctctgaaccgccacaggctagagggaaagttctgtgatgtgtccctcctggtgcagggccgggaacttagggctcataaagcagtgttagctgctgcctctccttacttccatgacaagctgcttctgggggatgcgcctcgtctcactctaccgagtgtcattgaagccgatgccttcgaggggctgctccagctcatttattcagggcgtctccgcctgccactggatgctcttcctgctcatctccttgtggccagtggccttcaaatgtggcaggtagtagatcagtgctcagaaattcttagagaattagaaacttcaggtggtggaatttcagcccgtggaggaaactcctaccatgcccttctttccactacatcctctacaggaggctggtgcattcgctcttcgcctttccagaccccagtacagtcctctgcttctactgaaagccctgcttccactgagagccctgtgggaggggagggaagtgaactgggagaagtgctgcaaattcaggtggaagaagaagaggaggaggaggaagatgatgatgatgaggaccaggggtcagccacactctctcagactcctcagccccagagagtatcaggggtttttccccgtcctcatggaccccacccactgcccatgactgctactccccgaaagcttccagagggtgagagtgcaccacttgagcttcctgcccctcctgcactgccccccaaaatcttctacattaagcaggaacccttcgagcctaaggaggagatatcaggaagcggaactcagcctggaggagcaaaggaggaaaccaaagtgttttctggaggggacactgaagggaatggggagctagggttcttgttgccttcagggccagggccaacatctgggggagggggtccatcctggaaaccagtggatcttcatgggaatgaaatcctgtcagggggtggaggacctgggggagcaggccaggccgtgcatgggcctgtgaagctaggggggacaccccctgcagatggaaaacgctttggttgcctgtgtgggaagcggtttgcagtgaagccaaagcgtgaccggcacatcatgctgaccttcagccttcggccttttggctgtggcatctgcaacaagcgcttcaagctgaagcaccatctgacagagcacatgaagacccatgctggagccctgcatgcctgtccccactgtggccgtcggttccgagtccatgcctgttttctccgccaccgggacctatgcaagggccagggctgggccactgcccactggacttacaagtgactgctgaggctatacactagcttctagaacaagataaccactgctgctgatggatacttttccctcactgccatggcacaccagtcatggatcttgtaatcatgccaagagaatagatacattatggacctcttgttcttagatatgggcctctcagcctggcagatgtggaaactcaaatttctcgtcccactccaggttttggctagccaaccctgcaggaaagtggtttataggccattcatacttaagttgatcacttgcccatggtggacatttttgtggtggtgatgtccattaaggaaaccagattttcaattatttagtgagagaagagttagagcaaaagacagtggtaaatgttttattccgtctccatgaggaattgaaggagttggtctccacctagagatacatttgatttacagcttaagtaattcagaggctaagctctaagcttttttctctcattgctggaatgatttaagcagaagtccttttgtgtacttttaaaattgtatctttccaggagcccctcagattgtaccttgctttctcaccaatagacaccttcccgacacttttttaatgttgtagctgagcactttaacaagttgagcattccatgtttcattcttagaaccttctttaatagagggtcttccctcaacagcctgtgcctctggtctacctttgaccaccactgataactaatatattggtcacaatgactggaatgtgactagtgatctcaggagatggcactgtcctaaagtgctgtcagggtggcaccactgctctctgaacaacttaccttggtcagagggactcaggtttgggacagcacaagctgaaggctggagagtaacttgcatagtaggaccatacctcttcctttcccatcccacccacatatgatagacagcccctctgttgagatatggaggggacagatactggaatcgggggtgggcctcgttctctcacaccccactccatcatctccacccctctaaccatataccaccactccctcttacccttcccagccccactctatctctcacccttcatcttctcacaaccattccacttctctatcctctcacccg

SEQ ID NO: 36523 - DNA, 2278 bp, Homo sapiens
gacagcacagaggaggcacaggcaggagcagatggggggcacacatagcacagtgagctgacaccacaatgggaagccaggaccactgaagggtctgacgtctatttaaaaggattctactggctgtccacctcctctgtgctgtcggacagcacagaggagggggtggggggctgaagccctccatcaccaagcagcattctcagacaccatccacattgaaccccacaatgccagcctctgagcggacagtggcctgggtctccaacatgcctcacctgtcggctgacatcgagagtgcccacatcgagcgggaagagtacaagctcaaggagtactcaaaatcgatggatgagagccggctggatagggtgaaggagtacgaggaggagattcactcactgaaagagcggctgcacatgtccaaccggaagctggaagagtatgagcggaggctgctgtcccaggaagaacaaaccagcaaaatcctgatgcagtatcaggcccgactggagcagagtgagaagaggctaaggcagcagcaggcagagaaggattcccagatcaagagcatcattggcaggctgatgctggtggaggaggagctgcgccgggaccaccccgccatggctgagccgctgccagaacccaagaagaggctgctcgacgctcaggagaggcagcttccccccttgggtccaacaaacccgcgtgtgacgctggccccaccgtggaatggcctggcccccccagccccaccacccccaccccggctgcagattacggagaacggcgagttccgaaacaccgcagaccactagcccacccagcatcagagaccttctcttcctttcctgtgcaccccaccctgtaacagcaccaaccaccaggattggacatcaccgaggaacagcgggattgcctccccgaatgcctccctgggaggcacactgattgcccacccccaccactgcaccatttccaggagggagagtggggaccctcagccgcccccttttccttcccattggggtgctgccctctctttgacccccagggacccttgccccaggacaccgcctaccccgtacagaccccttcactccggggtgctatccccatcctctgcctcatcgttcccctgagcactgggggacagaccctcacccccaccctgggggtgtggcacctccaaactttcaacttcagggtgatttttttagcagtaaccagagctgacaatctaactcccctccaccgccccattttggcctcccctgccccccttgttatggggaggggaccccgggtgagggggccctattaccccttgatttctcaggagcgtctgggggggctcagcacgcacaaactccttctccttctaccactcttaaatttactccctccccacccagaacccagatggggtggagggggccaccggggcagggagggggcggcaaggggggaatgggagttgtctccccttctccccacacctgatctgctctcggctggtcccagagcggggtgagggggcttatgcccccccctcccccagtgtgttgggtggggtggaattgaggttagggtgaggggtcagggtttaggagggtgtgtatgttgggaggacaggctagttgatctgtcctactctgacacacagtcccctctgccccttccttctctcttcttggtctctactcccagggggaggggggaacttactctaggaaaagccatgtctctctcccccagggtggggggacctgtgttggaggaggggtgttggggggcccccttccatgactctgtcccctgggggaggtaggacagggctgggcttccctctcatcctccccctcccaatctccttccacctccctccctcccgccagctccacgatttttcggtgtttctctgtacatagttttctggcgggataggggaggtaggatggatggggtttggggtgggtaggccatgggaggggagaagcccctccttggcaccccctcttccctgactgctgtcccctacccagccttgcccccttcatccttttgcgtttggtattgagactctcctagactctactcctctttcttttgtatggacagttccccttcagtcccatccccccaccccactcccagccttatctatcccccctcactgtccccttttctccactcccagccccatttcctttttttctggagtgtgtggtgaaacagaaaaaaacatgtttaataaacggagattgttctttta

SEQ ID NO: 36524 - DNA, 901 bp, Homo sapiens
gacagcacagaggaggcacaggcaggagcagatggggggcacacatagcacagtgagctgacaccacaatgggaagccaggaccactgaagggtctgacgtctatttaaaaggattctactggctgtccacctcctctgtgctgtcggacagcacagaggagggggtggggggctgaagccctccatcaccaagcagcattctcagacaccatccacattgaaccccacaatgccagcctctgagcggacagtggcctgggtctccaacatgcctcacctgtcggctgacatcgagagtgcccacatcgagcgggaagagtacaagctcaaggagtactcaaaatcgatggatgagagccggctggatagggtgaaggagtacgaggaggagattcactcactgaaagagcggctgcacatgtccaaccggaagctggaagagtatgagcggaggctgctgtcccaggaagaacaaaccagcaaaatcctgatgcagtatcaggcccgactggagcagagtgagaagaggctaaggcagcagcaggcagagaaggattcccagatcaagagcatcattggcaggctgatgctggtggaggaggagctgcgccgggaccaccccgccatggctgagccgctgccagaacccaagaagaggctgctcgacgctcaggtggaaattacaatgtcatttatcttctccgtgtcccatccccatccatcccactgtctttcgtgcactcactacaccagccacctagccccatcaccatctgtctctcatagtctgctgtttgtccactggctgctcctggcagccccctagtgaccccatcttcatcccatcgtctgtgcctttgtcactcctggcagcgtcagcccaactcctgtgccttccca

SEQ ID NO: 36525 - DNA, 443 bp, Homo sapiens
tattagtcagaagcatttggtaccttatacactttggatatttttcccctccaaatcacatgttgaaatttgatccccaatattggaggtggggcctggtgggaggtatttgaatcaagagggtggatccctcatgaatggcttggtgccccccttgtggtaattagttctctttagtgagattttattcttttagttaccaggagatttaactcttaaagagtctggcacctcctccctgttgctcctgctccctctctcaccatgtgacacgactgccccctgttcatcttctgccatgagtaaaagcttactgaggcctcaccagaaactaagcagatgctggtgccatgcttatacagcctgcagaaccatgagccaaataaacttcttttccttataaattacccagcctctgatattcctttacacattaagttgtt

SEQ ID NO: 36526 - DNA, 1599 bp, Homo sapiens
  misc_feature (1196)..(1196): n is a, c, g, or t
tccgttgctctgcttgagccagtcctatgtagaaagtggcaaattacacattttttctccccttttagtctctggtggacatcttgtctgtgtcacagtttgatactaccaaattgaaaggattcttcactgcttcagatggggagggtgacagaagctgagctgtttcctgggtcagataatggcctctgtcaaagcaaagaatagttgtagagacacaaactgggcccttgaagctgtgactaacattttggcaacatgcatccctttgccaaataacttcttttcttcttgagtgtgattgttgatctccttctcaaagtaggctcttgttgctactattcttcacacaactcccaagcaaaagttggcagagttccggttgactgactgtgtcttgagggatatgccccggattagagtggatggggcgttccatgtcaaaatgaggttcattggcagatcctgagagctgctttgcaaagaaatagaggcagtactctttactgaatgttcttgcggtcctttatctttcttctaaattcaagtctgttcttattcatctagtgattaaatgcagaatcattgcctttgcctagcttcgtgggcattgtggaagagaagacagtatttccaactttttttttttttttcttttctcacaagccattgagcctgaggaactacaggctaaatttatgagcatttcttgatatctacagagggctactaaaaaaaaaatgctgaatagacctttatggggaacaacaatgttaataggaaaaaaaggtgatatgtttgctaatgtctatgtcagtcttaactctctttaagattttggctcattttggcttaagagcctgcagaagtatgtaagttatcaaataggggagccaggaattggtttcttccttgccatttaagcttggcaaagttagagcaatttggaatggctatccaacaatgtgttctacttagtaaatactctcttgtttttcaggggatagttagctaaaggtagggttatctccaatatgttttgggatggatcgtgaagatcattccctttttattttgagacaggatctctctctcttgcccaggctggagtgtggcggcgtgatctgtagcctcgacctccccaggctcaggctcaggtgttcttcccacttcagcctcctgtgtagctgggactncaggcgcacgccactatgcctcactaatttttattttttgtagagatggggtttcgccatgttgcccagcctggtcttgaacttttgccggcctcccaaagtgctgggattataggtgtgagccaccaggctcagccattataattgattttcaaaaaaaatttagtttcttaagcttcatggattcaaattgagtgccatttggattttgaggcccctcagtggaaataatttgtttttagcaagtaattatgatatttctaaagtgcaaattcactgacctactttctgtgcttctggaaatgctgaatcgaataatctttttttttcctcccaataatccctctgactgtgaaaacattctccatatgtattcagattgggatagttggtaaaaaaaaaa

SEQ ID NO: 36527 - DNA, 1880 bp, Homo sapiens
  misc_feature (1477)..(1477): n is a, c, g, or t
acgcttaagtaggagacctgtctggatggagagacgccacctgagtggtccacacagcctgtggggactggggcttgaggtggggaaccttctgctcaagaaaagcaggataggccaggccatggtggctcacgtctgtaatcccagcactttgggaggcctaggtgggaggatcgcttgagcccagaagttcaagaccagcctgggcaacatacggagacccccatttctaaaaaagttttaaaaattagctgggcatggtagtgtgcatctgtggtcccagctactcaggaggccgaggtgtgaggatcgcttgagccccaggaggtcgaggctgcagtgagctatgattgcatcactgcactccagcccgggcacagagcaagaccctgagaccttgtcagaaagaaagaaagaaagaggagagggagagggagaaagaagggggggggagagagagagagagagagagagatatcaaagaatagttgtagagacacaaactgggcccttgaagctgtgactaacattttggcaacatgcatccctttgccaaataacttcttttcttcttgagtgtgattgttgatctccttctcaaagtaggctcttgttgctactattcttcacacaactcccaagcaaaagttggcagagttccggttgactgactgtgtcttgagggatatgccccggattagagtggatggggcgttccatgtcaaaatgaggttcattggcagatcctgagagctgctttgcaaagaaatagaggcagtactctttactgaatgttcttgcggtcctttatctttcttctaaattcaagtctgttcttattcatctagtgattaaatgcagaatcattgcctttgcctagcttcgtgggcattgtggaagagaagacagtatttccaactttttttttttttttcttttctcacaagccattgagcctgaggaactacaggctaaatttatgagcatttcttgatatctacagagggctactaaaaaaaaaatgctgaatagacctttatggggaacaacaatgttaataggaaaaaaaggtgatatgtttgctaatgtctatgtcagtcttaactctctttaagattttggctcattttggcttaagagcctgcagaagtatgtaagttatcaaataggggagccaggaattggtttcttccttgccatttaagcttggcaaagttagagcaatttggaatggctatccaacaatgtgttctacttagtaaatactctcttgtttttcaggggatagttagctaaaggtagggttatctccaatatgttttgggatggatcgtgaagatcattccctttttattttgagacaggatctctctctcttgcccaggctggagtgtggcggcgtgatctgtagcctcgacctccccaggctcaggctcaggtgttcttcccacttcagcctcctgtgtagctgggactncaggcgcacgccactatgcctcactaatttttattttttgtagagatggggtttcgccatgttgcccagcctggtcttgaacttttgccggcctcccaaagtgctgggattataggtgtgagccaccaggctcagccattataattgattttcaaaaaaaatttagtttcttaagcttcatggattcaaattgagtgccatttggattttgaggcccctcagtggaaataatttgtttttagcaagtaattatgatatttctaaagtgcaaattcactgacctactttctgtgcttctggaaatgctgaatcgaataatctttttttttcctcccaataatccctctgactgtgaaaacattctccatatgtattcagattgggatagttggtaaaaaaaaaa

SEQ ID NO: 36528 - DNA, 732 bp, Homo sapiens
aagctacttacctcttgatagtcacttcaaatcctgcctgcctcctctctgaaatctcttctaaatagattttgaactccttgtacataataggtgctgaaaaattttcattgaaaaaaagtatataaagatattttataaaatataaacaagaagtaaaaagaaaaagaaaaattttgttgcctataataccacaatcctgaggtagccactggtacagtttatcttttctataaatagctgaattattattaagtataattataaagctaaacactgggtgcttaaggcctgcttcctgtaagtcagtgtgatgaaatggaaaaaccctttacttgctagagtttgcagcggtcaataataaagtattaactaacctgagagaattgagaatatgtaactaacctaagaacagctaggtattttacattcagttttgcattcatgtagtattttgaacttgtttaacaaacaaaatttgtgctaaccatgatagcttctattaaaaaaaaaaaattctaacctaccctaaaagctagggctgtatttagaaggcattacttttttcatcctcctctcttgccttaaagagggctctgggccgggtgcagtggctcacgcctgtaatcccagcactttgggaggctgaggcgggcggatcacaaggtcaggagatcaagaccatcctggctaacatggtgaaaccccatctctactaaaaatacaaaaaaa

SEQ ID NO: 36529 - DNA, 6224 bp, Homo sapiens
agcggagctccgctcgcgctctcgccgctcctgccggctcgcccggccccgcgctccgccgtctcctcgccgcccgcccctccgccagccccggggaccgcgcggccgcagcctgagccagggccccctccctcgtcaggaccggggcagcaagcaggccgggggcaggtccgggcacccaccatgcgaggcgagctctggctcctggtgctggtgctcagggaggctgcccgggcgctgagcccccagcccggagcaggtcacgatgagggcccaggctctggatgggctgccaaagggaccgtgcggggctggaaccggagagcccgagagagccctgggcatgtgtcagagccggacaggacccagctgagccaggacctgggtgggggcaccctggccatggacacgctgccagataacaggaccagggtggtggaggacaaccacagctattatgtgtcccgtctctatggccccagcgagccccacagccgggaactgtgggtagatgtggccgaggccaaccggagccaagtgaagatccacacaatactctccaacacccaccggcaggcttcgagagtggtcttgtcctttgatttccctttctacgggcatcctctgcggcagatcaccatagcaactggaggcttcatcttcatgggggacgtgatccatcggatgctcacagctactcagtatgtggcgcccctgatggccaacttcaaccctggctactccgacaactccacagttgtttactttgacaatgggacagtctttgtggttcagtgggaccacgtttatctccaaggctgggaagacaagggcagtttcaccttccaggcagctctgcaccatgacggccgcattgtctttgcctataaagagatccctatgtctgtcccggaaatcagctcctcccagcatcctgtcaaaaccggcctatcggatgccttcatgattctcaatccatccccggatgtgccagaatctcggcgaaggagcatctttgaataccaccgcatagagctggaccccagcaaggtcaccagcatgtcggccgtggagttcaccccattgccgacctgcctgcagcataggagctgtgacgcctgcatgtcctcagacctgaccttcaactgcagctggtgccatgtcctccagagatgctccagtggctttgaccgctatcgccaggagtggatggactatggctgtgcacaggaggcagagggcaggatgtgcgaggacttccaggatgaggaccacgactcagcctcccctgacacttccttcagcccctatgatggagacctcaccactacctcctcctccctcttcatcgacagcctcaccacagaagatgacaccaagttgaatccctatgcaggaggagacggccttcagaacaacctgtcccccaagacaaagggcactcctgtgcacctgggcaccatcgtgggcatcgtgctggcagtcctcctcgtggcggccatcatcctggctggaatttacatcaatggccaccccacatccaatgctgcgctcttcttcatcgagcgtagacctcaccactggccagccatgaagtttcgcagccaccctgaccattccacctatgcggaggtggagccctcgggccatgagaaggagggcttcatggaggctgagcagtgctgagaacaccaagtctcccctttgaagactttgaggccacagaaaagacagttaaagcaaagaagagaagtgacttttcctggcctctcccagcatgccctgggctgagatgagatggtggtttatggctccagagctgctgttcgcttcgtcagcacaccccgaatattgaagagggggccaaaaaacaaccacatggattttttataggaacaacaacctaatctcatcctgttttgatgcaagggttctcttctgtgtcttgtaaccatgaaacagcagaagaactaacataactaactccatttttatttaaggggcctttacctattcctgcacctaggctaggataactttagagcactgacataaaacgcaaaaacaggaatcatgccgtttgcaaaactaactctgggattaaaggggaagcatgtaaacagctaactgtttttgttaaagatttataggaatgaggaggtttggctattgtcacatgacagactgttagccaaggacaaagaagttctgcaaacctcccctggacccttgctggtgtccagatgtctgcggttgtcagccccttcctttcccccgacctaaacataaaagacaaggcaaagcccgcataattttaagacggttctttaggacattagtccaccatcttcttggtttgctggctctccgaaataaagtccctttccttgctccaactccttgtctctcaacgtattggctatgacgcagcaagcagaatgaatttggactcagttacaggctgtcaatggtctgctctgtagcagtctcagagcctccccgacccactacctggagatagccagatagccagatgccctgctcctggccacctttaaagcccctgcatatgacacaggttaactaaagtcaagattggggctgctgcattccaggttccctagactcacaagctggtccttggccaggtgcagtggctcacgcctgtaatcccagcactttgggaggctgaggcaggcggatcacctgaagtcagaagtttgagaccagcctggccaacataattaaaatgtctctactaaaaatacaaaaaattagctgggtgtggtgacgcttgcctgtatcccagctactcaggaagctgagacacgagaatcacttgaacctgggaggcagaggttgcagtgagctcagatagtgccactgcactccagcctgggtgacagagcgagactccgtctcaaaaaaaaaaaaagaaagcagaacctcatggctatagagttggcattttagccccagcttctgtagctctgaaagcctaaagaaggtattctctccatctgttaaacacagtatagtggctctcagcccttggggcatgttatcatgggagggaagtcaaataagaggagagaaaagaactcaagggggaaactgcatttttaggctttgctctcttaccttgccctttctactcagaaccaataacttctgcatcaaaacatgttacagcctgcatcaagggctttaccccaacctgcagcccagccttccctgggtgagcttgctatgcgcagccacatttaccatgtggggctccctattctgatggcctgttcggtgccgggtttactcactgccctgttctgatgtcagtgcctgtacatacctccaaaggcaggacttgcctgataaatatttttcctcctctgaactggattttataggcattaaagacaagtcgggtggctagagggctccttgagacatacctagcagggaactgcaggtggattctgttgagaggcaaagcacctgagtggttgggacacaggcagctggcatgggagggactttttttgagacagggtctcactgtgtcgcccagggcaaggatgcccaaagacaccaggttggagaggcacctgccaactacttgctttccctggagcctgcatgtgcctgtggggtggggaggcgtaggggtctacggctgcctgagatgggtgtgcacagtgtgtgaagtacctacctccttgccttgctggactgtcagccagtcgcagggccggccacaagacccatgtctccatctggtcatactccatagctaccaagttaacctgctctaaactttggagaactggatctgtccaataaacgcttatttggccaagcctgatggctcgtgcctgtactcccagcactttgggaggctgaggtgggagggttgcttgagcccaggggtttgagaccagcttgggcaacaacaacaaaaatgccaggtgtggtggggtgcacctgtagtcccagctactagggaggctgagccaggaggatcacttgagcccgggaggttgaggctgcagtggggggtcataatcatgccactgtactccagcctgggtgacagagtgagaccctgtctccgaaaaaaaaaaaaaaaaaagaacggaaaaagaaatgcttacattgtcagggatcctgtagacaatcattaactctatgagatgcttggttctatttttttgggagactttgtccaagtgttttggcttaagaaatccataggcctctcttggtgacacatctctagtactttttgtcataaacaaacaggccatctgccgccaaatacatccactccccatgccactgacatcctatgggtcagccaggcttgctttgactgaggccgaggcatctggaactttctctgcctgcaggggctagcagcagaggcttcaccgcatcaccaccccttcctccactcctgacattctttcccttcagggatccaaaatggttggccgagctcccagtgggaaaacgtgtgctagagttggggagtgagatgagtggtgctgtccatggaatcaggccacagcaggaactgccccactggccatttgagacacacacaggtggtaaatgctctgctggtgggctgtgcttccctcattcagagagctctgttacagcccactgtgtcctttagaagcttgaaaggaacccaactctttgctgcactgtcctttttcttcctcaaattcagaccctccttccaccggcacccccctactccaccctcagctcttccttgcctggtttatcaagcagagctgaggccccacgtttccaactctgattgtcacttgcatcttcacaaaggataaaccacggagcaactggaaaaccatcagccaagcgttcggatgagtctggttattggtccacccccgaccagattcccttacacttaactcacttctttctttggcaatgaccctcatgacatgtataaatgggtatgactaagaagaggctgtgatctaacatttatttgctgccattttttactctggggagaagcagccccaactcatcactgggaaagaactccccctgcaaaccagctaaatttgataatttaaaccccctgcccctaaaacttctcacagagctggggagttggtggcaactttccaagtcaaggtcttgcttagaaagtccttcactacatggccaggtgcagtggctcacgcctgtagtcccaggtacttgggagcctgaggcaggaggattgcttgagctcaggagttcaaggctgcagagagctatgatcatcccactgcatttgtttaaaaataaatttttaaaatttgtgtgttttatcaggggtctcctgtacagtgtatctgtgtatgtttgtgtgtgtgtttgtatacagccttgtttaatgttttgagcaataagatatgcacacacaggtattttgttgctaaagagattggacaaggttgtagctgtgctcaggcttcagcttggtttgttaaattgagagataaacaatgacaagagctgccagccaaccacactattcaaaaagcaaagtgttcaccactaaagctaaccattcatctggttgcaggcaaggctaaggctctctctcctctagttcctggaacagactcacagattggcatgaagcactgatcaggggctgcactcagactccctggccaagcaaacctacaccagaagagtcagtgtcacagatatgatgcggccaatctctgtctccaaaaacctacctgaacttaatggtagaattcaaagatctggggactgagggcacccagccttctaaaacacaatgtattcatgtgtttagtgtaaactctctgcatggattctcagtgttaataataaaaggaagcattcttttacaactcctgctgtgtgcaaaagaaagtgcaaaggatttggagtggcattccgaagatcaccacacataccttggttctgatggctgctgaactccgacttcttcgctgagacatgactgtgggaacagcctccagctatctgctcatcagaggtgctttcctcaacctcctgcaccacctccaagagaaacagcctaaaaagaaaccccagctgtttacttatattggtctgtaaatccctggaagtaaaccccatgcatttttatctactgtctgaggacatacaataaatctgagaaagtcatatgctgtcac

SEQ ID NO: 36530 - DNA, 2395 bp, Homo sapiens
agcggagctccgctcgcgctctcgccgctcctgccggctcgcccggccccgcgctccgccgtctcctcgccgcccgcccctccgccagccccggggaccgcgcggccgcagcctgagccagggccccctccctcgtcaggaccggggcagcaagcaggccgggggcaggtccgggcacccaccatgcgaggcgagctctggctcctggtgctggtgctcagggaggctgcccgggcgctgagcccccagcccggagcaggtcacgatgagggcccaggctctggatgggctgccaaagggaccgtgcggggctggaaccggagagcccgagagagccctgggcatgtgtcagagccggacaggacccagctgagccaggacctgggtgggggcaccctggccatggacacgctgccagataacaggaccagggtggtggaggacaaccacagctattatgtgtcccgtctctatggccccagcgagccccacagccgggaactgtgggtagatgtggccgaggccaaccggagccaagtgaagatccacacaatactctccaacacccaccggcaggcttcgagagtggtcttgtcctttgatttccctttctacgggcatcctctgcggcagatcaccatagcaactggaggcttcatcttcatgggggacgtgatccatcggatgctcacagctactcagtatgtggcgcccctgatggccaacttcaaccctggctactccgacaactccacagttgtttactttgacaatgggacagtctttgtggttcagtgggaccacgtttatctccaaggctgggaagacaagggcagtttcaccttccaggcagctctgcaccatgacggccgcattgtctttgcctataaagagatccctatgtctgtcccggaaatcagctcctcccagcatcctgtcaaaaccggcctatcggatgccttcatgattctcaatccatccccggatgtgccagaatctcggcgaaggagcatctttgaataccaccgcatagagctggaccccagcaaggtcaccagcatgtcggccgtggagttcaccccattgccgacctgcctgcagcataggagctgtgacgcctgcatgtcctcagacctgaccttcaactgcagctggtgccatgtcctccagagatgctccagtggctttgaccgctatcgccaggagtggatggactatggctgtgcacaggaggcagagggcaggatgtgcgaggacttccaggatgaggaccacgactcagcctcccctgacacttccttcagcccctatgatggagacctcaccactacctcctcctccctcttcatcgacagcctcaccacagaagatgacaccaagttgaatccctatgcaggaggagacggccttcagaacaacctgtcccccaagacaaagggcactcctgtgcacctgggcaccatcgtgggcatcgtgctggcagtcctcctcgtggcggccatcatcctggctggaatttacatcaatggccaccccacatccaatgctgcgctcttcttcatcgagcgtagacctcaccactggccagccatgaagtttcgcagccaccctgaccattccacctatgcggaggtggagccctcgggccatgagaaggagggcttcatggaggctgagcagtgctgagaacaccaagtctcccctttgaagactttgaggccacagaaaagacagttaaagcaaagaagagaagtgacttttcctggcctctcccagcatgccctgggctgagatgagatggtggtttatggctccagagctgctgttcgcttcgtcagcacaccccgaatattgaagagggggccaaaaaacaaccacatggattttttataggaacaacaacctaatctcatcctgttttgatgcaagggttctcttctgtgtcttgtaaccatgaaacagcagaagaactaacataactaactccatttttatttaaggggcctttacctattcctgcacctaggctaggataactttagagcactgacataaaacgcaaaaacaggaatcatgccgtttgcaaaactaactctgggattaaaggggaagcatgtaaacagctaactgtttttgttaaagatttataggaatgaggaggtttggctattgtcacatgacagactgttagccaaggacaaagaagttctgcaaacctcccctggacccttgctggtgtccagatgtctgcggttgtcagccccttcctttcccccgacctaaacataaaagacaaggcaaagcccgcataattttaagacggttctttaggacattagtccaccatcttcttggtttgctggctctccgaaataaagtccctttccttgctcca

SEQ ID NO: 36531 - DNA, 7160 bp, Homo sapiens
cactgacaaaatgacccccattgtgtgacttcagtgagacacattacctgaatgagcaggtgaaagccatcaaagaattgggtgaccacgtgaccaacttgcgcaagatgggagcgcccgaatctggcttggcggaatatctctttgacaagcacaccctgggagacagtgataatgaaagctaagcctcgggctaatttccccatagccgtggggtgacttccctggtcaccaaggcagtgcatgcatgttggggtttcctttaccttttctataagttgtaccaaaacatccacttgcacttcgtgggcagcgctgcccccgaagtgaaatatttcgagagacttctccttccacaccccaggaatatattttcttatactgccagtggggatcttcagctcagagcttcagggaacaacccctgcttccaaacagaccacgaggtaccccagatggaggaatgtgcaaagacgccggggctggagctggaatccgtcccgagacttctcaccttgacctcgaggaaggcaggaggtcggagacagggggtgggcaggctggggaaagaggaaacccgcaggacaagagggttgtggctcgtcacgtggccacttgagggcagcaagtagctgcagctggaggtagctgcctatctgattctgtttgagagtccgccaagttgggatttaaattagacatcaagaagaatttacagaccggccttgccttgttccacggtaaggggacattgggtttagggctggaggaggtagtctctgggactctgggcccggcggaaggaggaaccggcgttctaagagattagagagcctttagttgtttcctttcttaggtgtttttttttcttttcttttcttttttttttttttaacctcagtgccacggaatccgtctcttccagcccacagtgtaccttctcctgtccccgcccatatccctcctcctggaaaatttctccaatggcgctcagcgttcgcacccttcctctccgcggttttctagtccctaggccccagcccactagaagccaggatgccccctcaccccgtctcccactctccagcgccccagctccttgccgtcacaagaacgaagtaggtcaggggagggaagaggcatcttcgtgtcctgacctgattccttgccgtctattaaatatcctacattgcgggtcacgatgagggcccaggctctggatgggctgccaaagggaccgtgcggggctggaaccggagagcccgagagagccctgggcatgtgtcagagccggacaggacccagctgagccaggacctgggtgggggcaccctggccatggacacgctgccagataacaggaccagggtggtggaggacaaccacagctattatgtgtcccgtctctatggccccagcgagccccacagccgggaactgtgggtagatgtggccgaggccaaccggagccaagtgaagatccacacaatactctccaacacccaccggcaggcttcgagagtggtcttgtcctttgatttccctttctacgggcatcctctgcggcagatcaccatagcaactggaggcttcatcttcatgggggacgtgatccatcggatgctcacagctactcagtatgtggcgcccctgatggccaacttcaaccctggctactccgacaactccacagttgtttactttgacaatgggacagtctttgtggttcagtgggaccacgtttatctccaaggctgggaagacaagggcagtttcaccttccaggcagctctgcaccatgacggccgcattgtctttgcctataaagagatccctatgtctgtcccggaaatcagctcctcccagcatcctgtcaaaaccggcctatcggatgccttcatgattctcaatccatccccggatgtgccagaatctcggcgaaggagcatctttgaataccaccgcatagagctggaccccagcaaggtcaccagcatgtcggccgtggagttcaccccattgccgacctgcctgcagcataggagctgtgacgcctgcatgtcctcagacctgaccttcaactgcagctggtgccatgtcctccagagatgctccagtggctttgaccgctatcgccaggagtggatggactatggctgtgcacaggaggcagagggcaggatgtgcgaggacttccaggatgaggaccacgactcagcctcccctgacacttccttcagcccctatgatggagacctcaccactacctcctcctccctcttcatcgacagcctcaccacagaagatgacaccaagttgaatccctatgcaggaggagacggccttcagaacaacctgtcccccaagacaaagggcactcctgtgcacctgggcaccatcgtgggcatcgtgctggcagtcctcctcgtggcggccatcatcctggctggaatttacatcaatggccaccccacatccaatgctgcgctcttcttcatcgagcgtagacctcaccactggccagccatgaagtttcgcagccaccctgaccattccacctatgcggaggtggagccctcgggccatgagaaggagggcttcatggaggctgagcagtgctgagaacaccaagtctcccctttgaagactttgaggccacagaaaagacagttaaagcaaagaagagaagtgacttttcctggcctctcccagcatgccctgggctgagatgagatggtggtttatggctccagagctgctgttcgcttcgtcagcacaccccgaatattgaagagggggccaaaaaacaaccacatggattttttataggaacaacaacctaatctcatcctgttttgatgcaagggttctcttctgtgtcttgtaaccatgaaacagcagaagaactaacataactaactccatttttatttaaggggcctttacctattcctgcacctaggctaggataactttagagcactgacataaaacgcaaaaacaggaatcatgccgtttgcaaaactaactctgggattaaaggggaagcatgtaaacagctaactgtttttgttaaagatttataggaatgaggaggtttggctattgtcacatgacagactgttagccaaggacaaagaagttctgcaaacctcccctggacccttgctggtgtccagatgtctgcggttgtcagccccttcctttcccccgacctaaacataaaagacaaggcaaagcccgcataattttaagacggttctttaggacattagtccaccatcttcttggtttgctggctctccgaaataaagtccctttccttgctccaactccttgtctctcaacgtattggctatgacgcagcaagcagaatgaatttggactcagttacaggctgtcaatggtctgctctgtagcagtctcagagcctccccgacccactacctggagatagccagatagccagatgccctgctcctggccacctttaaagcccctgcatatgacacaggttaactaaagtcaagattggggctgctgcattccaggttccctagactcacaagctggtccttggccaggtgcagtggctcacgcctgtaatcccagcactttgggaggctgaggcaggcggatcacctgaagtcagaagtttgagaccagcctggccaacataattaaaatgtctctactaaaaatacaaaaaattagctgggtgtggtgacgcttgcctgtatcccagctactcaggaagctgagacacgagaatcacttgaacctgggaggcagaggttgcagtgagctcagatagtgccactgcactccagcctgggtgacagagcgagactccgtctcaaaaaaaaaaaaagaaagcagaacctcatggctatagagttggcattttagccccagcttctgtagctctgaaagcctaaagaaggtattctctccatctgttaaacacagtatagtggctctcagcccttggggcatgttatcatgggagggaagtcaaataagaggagagaaaagaactcaagggggaaactgcatttttaggctttgctctcttaccttgccctttctactcagaaccaataacttctgcatcaaaacatgttacagcctgcatcaagggctttaccccaacctgcagcccagccttccctgggtgagcttgctatgcgcagccacatttaccatgtggggctccctattctgatggcctgttcggtgccgggtttactcactgccctgttctgatgtcagtgcctgtacatacctccaaaggcaggacttgcctgataaatatttttcctcctctgaactggattttataggcattaaagacaagtcgggtggctagagggctccttgagacatacctagcagggaactgcaggtggattctgttgagaggcaaagcacctgagtggttgggacacaggcagctggcatgggagggactttttttgagacagggtctcactgtgtcgcccagggcaaggatgcccaaagacaccaggttggagaggcacctgccaactacttgctttccctggagcctgcatgtgcctgtggggtggggaggcgtaggggtctacggctgcctgagatgggtgtgcacagtgtgtgaagtacctacctccttgccttgctggactgtcagccagtcgcagggccggccacaagacccatgtctccatctggtcatactccatagctaccaagttaacctgctctaaactttggagaactggatctgtccaataaacgcttatttggccaagcctgatggctcgtgcctgtactcccagcactttgggaggctgaggtgggagggttgcttgagcccaggggtttgagaccagcttgggcaacaacaacaaaaatgccaggtgtggtggggtgcacctgtagtcccagctactagggaggctgagccaggaggatcacttgagcccgggaggttgaggctgcagtggggggtcataatcatgccactgtactccagcctgggtgacagagtgagaccctgtctccgaaaaaaaaaaaaaaaaaagaacggaaaaagaaatgcttacattgtcagggatcctgtagacaatcattaactctatgagatgcttggttctatttttttgggagactttgtccaagtgttttggcttaagaaatccataggcctctcttggtgacacatctctagtactttttgtcataaacaaacaggccatctgccgccaaatacatccactccccatgccactgacatcctatgggtcagccaggcttgctttgactgaggccgaggcatctggaactttctctgcctgcaggggctagcagcagaggcttcaccgcatcaccaccccttcctccactcctgacattctttcccttcagggatccaaaatggttggccgagctcccagtgggaaaacgtgtgctagagttggggagtgagatgagtggtgctgtccatggaatcaggccacagcaggaactgccccactggccatttgagacacacacaggtggtaaatgctctgctggtgggctgtgcttccctcattcagagagctctgttacagcccactgtgtcctttagaagcttgaaaggaacccaactctttgctgcactgtcctttttcttcctcaaattcagaccctccttccaccggcacccccctactccaccctcagctcttccttgcctggtttatcaagcagagctgaggccccacgtttccaactctgattgtcacttgcatcttcacaaaggataaaccacggagcaactggaaaaccatcagccaagcgttcggatgagtctggttattggtccacccccgaccagattcccttacacttaactcacttctttctttggcaatgaccctcatgacatgtataaatgggtatgactaagaagaggctgtgatctaacatttatttgctgccattttttactctggggagaagcagccccaactcatcactgggaaagaactccccctgcaaaccagctaaatttgataatttaaaccccctgcccctaaaacttctcacagagctggggagttggtggcaactttccaagtcaaggtcttgcttagaaagtccttcactacatggccaggtgcagtggctcacgcctgtagtcccaggtacttgggagcctgaggcaggaggattgcttgagctcaggagttcaaggctgcagagagctatgatcatcccactgcatttgtttaaaaataaatttttaaaatttgtgtgttttatcaggggtctcctgtacagtgtatctgtgtatgtttgtgtgtgtgtttgtatacagccttgtttaatgttttgagcaataagatatgcacacacaggtattttgttgctaaagagattggacaaggttgtagctgtgctcaggcttcagcttggtttgttaaattgagagataaacaatgacaagagctgccagccaaccacactattcaaaaagcaaagtgttcaccactaaagctaaccattcatctggttgcaggcaaggctaaggctctctctcctctagttcctggaacagactcacagattggcatgaagcactgatcaggggctgcactcagactccctggccaagcaaacctacaccagaagagtcagtgtcacagatatgatgcggccaatctctgtctccaaaaacctacctgaacttaatggtagaattcaaagatctggggactgagggcacccagccttctaaaacacaatgtattcatgtgtttagtgtaaactctctgcatggattctcagtgttaataataaaaggaagcattcttttacaactcctgctgtgtgcaaaagaaagtgcaaaggatttggagtggcattccgaagatcaccacacataccttggttctgatggctgctgaactccgacttcttcgctgagacatgactgtgggaacagcctccagctatctgctcatcagaggtgctttcctcaacctcctgcaccacctccaagagaaacagcctaaaaagaaaccccagctgtttacttatattggtctgtaaatccctggaagtaaaccccatgcatttttatctactgtctgaggacatacaataaatctgagaaagtcatatgctgtcac

SEQ ID NO: 36532 - DNA, 6889 bp, Homo sapiens
aacaaacaaaatacacacacacacacacacacacacacacacacacacacacacacaccctgcaggtgattacgatctcaagttctagaggcttacgttaaaatttacacatttgcttctactatttacaagtttatgtttcagcctgagctcttcttgtaagacagaccacgaggtaccccagatggaggaatgtgcaaagacgccggggctggagctggaatccgtcccgagacttctcaccttgacctcgaggaaggcaggaggtcggagacagggggtgggcaggctggggaaagaggaaacccgcaggacaagagggttgtggctcgtcacgtggccacttgagggcagcaagtagctgcagctggaggtagctgcctatctgattctgtttgagagtccgccaagttgggatttaaattagacatcaagaagaatttacagaccggccttgccttgttccacggtaaggggacattgggtttagggctggaggaggtagtctctgggactctgggcccggcggaaggaggaaccggcgttctaagagattagagagcctttagttgtttcctttcttaggtgtttttttttcttttcttttcttttttttttttttaacctcagtgccacggaatccgtctcttccagcccacagtgtaccttctcctgtccccgcccatatccctcctcctggaaaatttctccaatggcgctcagcgttcgcacccttcctctccgcggttttctagtccctaggccccagcccactagaagccaggatgccccctcaccccgtctcccactctccagcgccccagctccttgccgtcacaagaacgaagtaggtcaggggagggaagaggcatcttcgtgtcctgacctgattccttgccgtctattaaatatcctacattgcgggtcacgatgagggcccaggctctggatgggctgccaaagggaccgtgcggggctggaaccggagagcccgagagagccctgggcatgtgtcagagccggacaggacccagctgagccaggacctgggtgggggcaccctggccatggacacgctgccagataacaggaccagggtggtggaggacaaccacagctattatgtgtcccgtctctatggccccagcgagccccacagccgggaactgtgggtagatgtggccgaggccaaccggagccaagtgaagatccacacaatactctccaacacccaccggcaggcttcgagagtggtcttgtcctttgatttccctttctacgggcatcctctgcggcagatcaccatagcaactggaggcttcatcttcatgggggacgtgatccatcggatgctcacagctactcagtatgtggcgcccctgatggccaacttcaaccctggctactccgacaactccacagttgtttactttgacaatgggacagtctttgtggttcagtgggaccacgtttatctccaaggctgggaagacaagggcagtttcaccttccaggcagctctgcaccatgacggccgcattgtctttgcctataaagagatccctatgtctgtcccggaaatcagctcctcccagcatcctgtcaaaaccggcctatcggatgccttcatgattctcaatccatccccggatgtgccagaatctcggcgaaggagcatctttgaataccaccgcatagagctggaccccagcaaggtcaccagcatgtcggccgtggagttcaccccattgccgacctgcctgcagcataggagctgtgacgcctgcatgtcctcagacctgaccttcaactgcagctggtgccatgtcctccagagatgctccagtggctttgaccgctatcgccaggagtggatggactatggctgtgcacaggaggcagagggcaggatgtgcgaggacttccaggatgaggaccacgactcagcctcccctgacacttccttcagcccctatgatggagacctcaccactacctcctcctccctcttcatcgacagcctcaccacagaagatgacaccaagttgaatccctatgcaggaggagacggccttcagaacaacctgtcccccaagacaaagggcactcctgtgcacctgggcaccatcgtgggcatcgtgctggcagtcctcctcgtggcggccatcatcctggctggaatttacatcaatggccaccccacatccaatgctgcgctcttcttcatcgagcgtagacctcaccactggccagccatgaagtttcgcagccaccctgaccattccacctatgcggaggtggagccctcgggccatgagaaggagggcttcatggaggctgagcagtgctgagaacaccaagtctcccctttgaagactttgaggccacagaaaagacagttaaagcaaagaagagaagtgacttttcctggcctctcccagcatgccctgggctgagatgagatggtggtttatggctccagagctgctgttcgcttcgtcagcacaccccgaatattgaagagggggccaaaaaacaaccacatggattttttataggaacaacaacctaatctcatcctgttttgatgcaagggttctcttctgtgtcttgtaaccatgaaacagcagaagaactaacataactaactccatttttatttaaggggcctttacctattcctgcacctaggctaggataactttagagcactgacataaaacgcaaaaacaggaatcatgccgtttgcaaaactaactctgggattaaaggggaagcatgtaaacagctaactgtttttgttaaagatttataggaatgaggaggtttggctattgtcacatgacagactgttagccaaggacaaagaagttctgcaaacctcccctggacccttgctggtgtccagatgtctgcggttgtcagccccttcctttcccccgacctaaacataaaagacaaggcaaagcccgcataattttaagacggttctttaggacattagtccaccatcttcttggtttgctggctctccgaaataaagtccctttccttgctccaactccttgtctctcaacgtattggctatgacgcagcaagcagaatgaatttggactcagttacaggctgtcaatggtctgctctgtagcagtctcagagcctccccgacccactacctggagatagccagatagccagatgccctgctcctggccacctttaaagcccctgcatatgacacaggttaactaaagtcaagattggggctgctgcattccaggttccctagactcacaagctggtccttggccaggtgcagtggctcacgcctgtaatcccagcactttgggaggctgaggcaggcggatcacctgaagtcagaagtttgagaccagcctggccaacataattaaaatgtctctactaaaaatacaaaaaattagctgggtgtggtgacgcttgcctgtatcccagctactcaggaagctgagacacgagaatcacttgaacctgggaggcagaggttgcagtgagctcagatagtgccactgcactccagcctgggtgacagagcgagactccgtctcaaaaaaaaaaaaagaaagcagaacctcatggctatagagttggcattttagccccagcttctgtagctctgaaagcctaaagaaggtattctctccatctgttaaacacagtatagtggctctcagcccttggggcatgttatcatgggagggaagtcaaataagaggagagaaaagaactcaagggggaaactgcatttttaggctttgctctcttaccttgccctttctactcagaaccaataacttctgcatcaaaacatgttacagcctgcatcaagggctttaccccaacctgcagcccagccttccctgggtgagcttgctatgcgcagccacatttaccatgtggggctccctattctgatggcctgttcggtgccgggtttactcactgccctgttctgatgtcagtgcctgtacatacctccaaaggcaggacttgcctgataaatatttttcctcctctgaactggattttataggcattaaagacaagtcgggtggctagagggctccttgagacatacctagcagggaactgcaggtggattctgttgagaggcaaagcacctgagtggttgggacacaggcagctggcatgggagggactttttttgagacagggtctcactgtgtcgcccagggcaaggatgcccaaagacaccaggttggagaggcacctgccaactacttgctttccctggagcctgcatgtgcctgtggggtggggaggcgtaggggtctacggctgcctgagatgggtgtgcacagtgtgtgaagtacctacctccttgccttgctggactgtcagccagtcgcagggccggccacaagacccatgtctccatctggtcatactccatagctaccaagttaacctgctctaaactttggagaactggatctgtccaataaacgcttatttggccaagcctgatggctcgtgcctgtactcccagcactttgggaggctgaggtgggagggttgcttgagcccaggggtttgagaccagcttgggcaacaacaacaaaaatgccaggtgtggtggggtgcacctgtagtcccagctactagggaggctgagccaggaggatcacttgagcccgggaggttgaggctgcagtggggggtcataatcatgccactgtactccagcctgggtgacagagtgagaccctgtctccgaaaaaaaaaaaaaaaaaagaacggaaaaagaaatgcttacattgtcagggatcctgtagacaatcattaactctatgagatgcttggttctatttttttgggagactttgtccaagtgttttggcttaagaaatccataggcctctcttggtgacacatctctagtactttttgtcataaacaaacaggccatctgccgccaaatacatccactccccatgccactgacatcctatgggtcagccaggcttgctttgactgaggccgaggcatctggaactttctctgcctgcaggggctagcagcagaggcttcaccgcatcaccaccccttcctccactcctgacattctttcccttcagggatccaaaatggttggccgagctcccagtgggaaaacgtgtgctagagttggggagtgagatgagtggtgctgtccatggaatcaggccacagcaggaactgccccactggccatttgagacacacacaggtggtaaatgctctgctggtgggctgtgcttccctcattcagagagctctgttacagcccactgtgtcctttagaagcttgaaaggaacccaactctttgctgcactgtcctttttcttcctcaaattcagaccctccttccaccggcacccccctactccaccctcagctcttccttgcctggtttatcaagcagagctgaggccccacgtttccaactctgattgtcacttgcatcttcacaaaggataaaccacggagcaactggaaaaccatcagccaagcgttcggatgagtctggttattggtccacccccgaccagattcccttacacttaactcacttctttctttggcaatgaccctcatgacatgtataaatgggtatgactaagaagaggctgtgatctaacatttatttgctgccattttttactctggggagaagcagccccaactcatcactgggaaagaactccccctgcaaaccagctaaatttgataatttaaaccccctgcccctaaaacttctcacagagctggggagttggtggcaactttccaagtcaaggtcttgcttagaaagtccttcactacatggccaggtgcagtggctcacgcctgtagtcccaggtacttgggagcctgaggcaggaggattgcttgagctcaggagttcaaggctgcagagagctatgatcatcccactgcatttgtttaaaaataaatttttaaaatttgtgtgttttatcaggggtctcctgtacagtgtatctgtgtatgtttgtgtgtgtgtttgtatacagccttgtttaatgttttgagcaataagatatgcacacacaggtattttgttgctaaagagattggacaaggttgtagctgtgctcaggcttcagcttggtttgttaaattgagagataaacaatgacaagagctgccagccaaccacactattcaaaaagcaaagtgttcaccactaaagctaaccattcatctggttgcaggcaaggctaaggctctctctcctctagttcctggaacagactcacagattggcatgaagcactgatcaggggctgcactcagactccctggccaagcaaacctacaccagaagagtcagtgtcacagatatgatgcggccaatctctgtctccaaaaacctacctgaacttaatggtagaattcaaagatctggggactgagggcacccagccttctaaaacacaatgtattcatgtgtttagtgtaaactctctgcatggattctcagtgttaataataaaaggaagcattcttttacaactcctgctgtgtgcaaaagaaagtgcaaaggatttggagtggcattccgaagatcaccacacataccttggttctgatggctgctgaactccgacttcttcgctgagacatgactgtgggaacagcctccagctatctgctcatcagaggtgctttcctcaacctcctgcaccacctccaagagaaacagcctaaaaagaaaccccagctgtttacttatattggtctgtaaatccctggaagtaaaccccatgcatttttatctactgtctgaggacatacaataaatctgagaaagtcatatgctgtcac

SEQ ID NO: 36533 - DNA, 5122 bp, Homo sapiens
cttggctcctcttctcactatcagcagagagctgttactgaacagtgaaaggggaaggcttctttgtcaatcccatcataactctgtccttttggtcctcctgcagatgctccagtggctttgaccgctatcgccaggagtggatggactatggctgtgcacaggaggcagagggcaggatgtgcgaggacttccaggatgaggaccacgactcagcctcccctgacacttccttcagcccctatgatggagacctcaccactacctcctcctccctcttcatcgacagcctcaccacagaaggccttcagaacaacctgtcccccaagacaaagggcactcctgtgcacctgggcaccatcgtgggcatcgtgctggcagtcctcctcgtggcggccatcatcctggctggaatttacatcaatggccaccccacatccaatgctgcgctcttcttcatcgagcgtagacctcaccactggccagccatgaagtttcgcagccaccctgaccattccacctatgcggaggtggagccctcgggccatgagaaggagggcttcatggaggctgagcagtgctgagaacaccaagtctcccctttgaagactttgaggccacagaaaagacagttaaagcaaagaagagaagtgacttttcctggcctctcccagcatgccctgggctgagatgagatggtggtttatggctccagagctgctgttcgcttcgtcagcacaccccgaatattgaagagggggccaaaaaacaaccacatggattttttataggaacaacaacctaatctcatcctgttttgatgcaagggttctcttctgtgtcttgtaaccatgaaacagcagaagaactaacataactaactccatttttatttaaggggcctttacctattcctgcacctaggctaggataactttagagcactgacataaaacgcaaaaacaggaatcatgccgtttgcaaaactaactctgggattaaaggggaagcatgtaaacagctaactgtttttgttaaagatttataggaatgaggaggtttggctattgtcacatgacagactgttagccaaggacaaagaagttctgcaaacctcccctggacccttgctggtgtccagatgtctgcggttgtcagccccttcctttcccccgacctaaacataaaagacaaggcaaagcccgcataattttaagacggttctttaggacattagtccaccatcttcttggtttgctggctctccgaaataaagtccctttccttgctccaactccttgtctctcaacgtattggctatgacgcagcaagcagaatgaatttggactcagttacaggctgtcaatggtctgctctgtagcagtctcagagcctccccgacccactacctggagatagccagatagccagatgccctgctcctggccacctttaaagcccctgcatatgacacaggttaactaaagtcaagattggggctgctgcattccaggttccctagactcacaagctggtccttggccaggtgcagtggctcacgcctgtaatcccagcactttgggaggctgaggcaggcggatcacctgaagtcagaagtttgagaccagcctggccaacataattaaaatgtctctactaaaaatacaaaaaattagctgggtgtggtgacgcttgcctgtatcccagctactcaggaagctgagacacgagaatcacttgaacctgggaggcagaggttgcagtgagctcagatagtgccactgcactccagcctgggtgacagagcgagactccgtctcaaaaaaaaaaaaagaaagcagaacctcatggctatagagttggcattttagccccagcttctgtagctctgaaagcctaaagaaggtattctctccatctgttaaacacagtatagtggctctcagcccttggggcatgttatcatgggagggaagtcaaataagaggagagaaaagaactcaagggggaaactgcatttttaggctttgctctcttaccttgccctttctactcagaaccaataacttctgcatcaaaacatgttacagcctgcatcaagggctttaccccaacctgcagcccagccttccctgggtgagcttgctatgcgcagccacatttaccatgtggggctccctattctgatggcctgttcggtgccgggtttactcactgccctgttctgatgtcagtgcctgtacatacctccaaaggcaggacttgcctgataaatatttttcctcctctgaactggattttataggcattaaagacaagtcgggtggctagagggctccttgagacatacctagcagggaactgcaggtggattctgttgagaggcaaagcacctgagtggttgggacacaggcagctggcatgggagggactttttttgagacagggtctcactgtgtcgcccagggcaaggatgcccaaagacaccaggttggagaggcacctgccaactacttgctttccctggagcctgcatgtgcctgtggggtggggaggcgtaggggtctacggctgcctgagatgggtgtgcacagtgtgtgaagtacctacctccttgccttgctggactgtcagccagtcgcagggccggccacaagacccatgtctccatctggtcatactccatagctaccaagttaacctgctctaaactttggagaactggatctgtccaataaacgcttatttggccaagcctgatggctcgtgcctgtactcccagcactttgggaggctgaggtgggagggttgcttgagcccaggggtttgagaccagcttgggcaacaacaacaaaaatgccaggtgtggtggggtgcacctgtagtcccagctactagggaggctgagccaggaggatcacttgagcccgggaggttgaggctgcagtggggggtcataatcatgccactgtactccagcctgggtgacagagtgagaccctgtctccgaaaaaaaaaaaaaaaaaagaacggaaaaagaaatgcttacattgtcagggatcctgtagacaatcattaactctatgagatgcttggttctatttttttgggagactttgtccaagtgttttggcttaagaaatccataggcctctcttggtgacacatctctagtactttttgtcataaacaaacaggccatctgccgccaaatacatccactccccatgccactgacatcctatgggtcagccaggcttgctttgactgaggccgaggcatctggaactttctctgcctgcaggggctagcagcagaggcttcaccgcatcaccaccccttcctccactcctgacattctttcccttcagggatccaaaatggttggccgagctcccagtgggaaaacgtgtgctagagttggggagtgagatgagtggtgctgtccatggaatcaggccacagcaggaactgccccactggccatttgagacacacacaggtggtaaatgctctgctggtgggctgtgcttccctcattcagagagctctgttacagcccactgtgtcctttagaagcttgaaaggaacccaactctttgctgcactgtcctttttcttcctcaaattcagaccctccttccaccggcacccccctactccaccctcagctcttccttgcctggtttatcaagcagagctgaggccccacgtttccaactctgattgtcacttgcatcttcacaaaggataaaccacggagcaactggaaaaccatcagccaagcgttcggatgagtctggttattggtccacccccgaccagattcccttacacttaactcacttctttctttggcaatgaccctcatgacatgtataaatgggtatgactaagaagaggctgtgatctaacatttatttgctgccattttttactctggggagaagcagccccaactcatcactgggaaagaactccccctgcaaaccagctaaatttgataatttaaaccccctgcccctaaaacttctcacagagctggggagttggtggcaactttccaagtcaaggtcttgcttagaaagtccttcactacatggccaggtgcagtggctcacgcctgtagtcccaggtacttgggagcctgaggcaggaggattgcttgagctcaggagttcaaggctgcagagagctatgatcatcccactgcatttgtttaaaaataaatttttaaaatttgtgtgttttatcaggggtctcctgtacagtgtatctgtgtatgtttgtgtgtgtgtttgtatacagccttgtttaatgttttgagcaataagatatgcacacacaggtattttgttgctaaagagattggacaaggttgtagctgtgctcaggcttcagcttggtttgttaaattgagagataaacaatgacaagagctgccagccaaccacactattcaaaaagcaaagtgttcaccactaaagctaaccattcatctggttgcaggcaaggctaaggctctctctcctctagttcctggaacagactcacagattggcatgaagcactgatcaggggctgcactcagactccctggccaagcaaacctacaccagaagagtcagtgtcacagatatgatgcggccaatctctgtctccaaaaacctacctgaacttaatggtagaattcaaagatctggggactgagggcacccagccttctaaaacacaatgtattcatgtgtttagtgtaaactctctgcatggattctcagtgttaataataaaaggaagcattcttttacaactcctgctgtgtgcaaaagaaagtgcaaaggatttggagtggcattccgaagatcaccacacataccttggttctgatggctgctgaactccgacttcttcgctgagacatgactgtgggaacagcctccagctatctgctcatcagaggtgctttcctcaacctcctgcaccacctccaagagaaacagcctaaaaagaaaccccagctgtttacttatattggtctgtaaatccctggaagtaaaccccatgcatttttatctactgtctgaggacatacaataaatctgagaaagtcatatgctgtcac

SEQ ID NO: 36534 - DNA, 1101 bp, Homo sapiens
  misc_feature (1094)..(1094): n is a, c, g, or t
agcggagctccgctcgcgctctcgccgctcctgccggctcgcccggccccgcgctccgccgtctcctcgccgcccgcccctccgccagccccggggaccgcgcggccgcagcctgagccagggccccctccctcgtcaggaccggggcagcaagcaggccgggggcaggtccgggcacccaccatgcgaggcgagctctggctcctggtgctggtgctcagggaggctgcccgggcgctgagcccccagcccggagcaggtcacgatgagggcccaggctctggatgggctgccaaagggaccgtgcggggctggaaccggagagcccgagagagccctgggcatgtgtcagagccggacaggacccagctgagccaggacctgggtgggggcaccctggccatggacacgctgccagataacaggaccagggtggtggaggacaaccacagctattatgtgtcccgtctctatggccccagcgagccccacagccgggaactgtgggtagatgtggccgaggccaaccggagccaagtgaagatccacacaatactctccaacacccaccggcaggcttcgagagtggtcttgtcctttgatttccctttctacgggcatcctctgcggcagatcaccatagcaactggaggcttcatcttcatgggggacgtgatccatcggatgctcacagctactcagtatgtggcgcccctgatggccaacttcaaccctggctactccgacaactccacagttgtttactttgacaatgggacagtctttgtggttcagtgggaccacgtttatctccaaggctgggaagacaagggcagtttcaccttccaggcagctctgcaccatgacggccgcattgtctttgcctataaagagatccctatgtctgtcccggaaatcagctcctcccagcatcctgtcaaaaccggcctatcggatgccttcatgattctcaatccatccccggatgtgccagcttttcagcagagtctgcaaagcatctttggtgaaaagaaaagtcatgtgcaattagcagcatctggtttgcagaggcactcaaaacacacaggacagtntgatccg

SEQ ID NO: 36535 - DNA, 1395 bp, Homo sapiens
cactgacaaaatgacccccattgtgtgacttcagtgagacacattacctgaatgagcaggtgaaagccatcaaagaattgggtgaccacgtgaccaacttgcgcaagatgggagcgcccgaatctggcttggcggaatatctctttgacaagcacaccctgggagacagtgataatgaaagctaagcctcgggctaatttccccatagccgtggggtgacttccctggtcaccaaggcagtgcatgcatgttggggtttcctttaccttttctataagttgtaccaaaacatccacttgcacttcgtgggcagcgctgcccccgaagtgaaatatttcgagagacttctccttccacaccccaggaatatattttcttatactgccagtggggatcttcagctcagagcttcagggaacaacccctgcttccaaacagaccacgaggtaccccagatggaggaatgtgcaaagacgccggggctggagctggaatccgtcccgagacttctcaccttgacctcgaggaaggcaggaggtcggagacagggggtgggcaggctggggaaagaggaaacccgcaggacaagagggttgtggctcgtcacgtggccacttgagggcagcaagtagctgcagctggaggtagctgcctatctgattctgtttgagagtccgccaagttgggatttaaattagacatcaagaagaatttacagaccggccttgccttgttccacggtcacgatgagggcccaggctctggatgggctgccaaagggaccgtgcggggctggaaccggagagcccgagagagccctgggcatgtgtcagagccggacaggacccagctgagccaggacctgggtgggggcaccctggccatggacacgctgccagataacaggaccagggtggtggtgtgggaagggaccggcagcactggcagtgcctgggagctcgtgggaaatgtggaatgtcggagtcctcagacctgcagaatcagaatccgattcccaggaggacaaccacagctattatgtgtcccgtctctatggccccagcgagccccacagccgggaactgtgggtagatgtggccgaggccaaccggagccaagtgaagatccacacaatactctccaacacccaccggcaggcttcgagagtggtcttgtcctttgatttccctttctacgggcatcctctgcggcagatcaccatagcaactggaggcttcatcttcatgggggacgtgatccatcggatgctcacagctactcagtatgtggcgcccctgatggccaacttcaaccctggctactccgacaactccacagttgtttactttgacaatgggacagtcttagtgggtcagtgggacacgtatatctcca

SEQ ID NO: 36536 - DNA, 1252 bp, Homo sapiens
cactgacaaaatgacccccattgtgtgacttcagtgagacacattacctgaatgagcaggtgaaagccatcaaagaattgggtgaccacgtgaccaacttgcgcaagatgggagcgcccgaatctggcttggcggaatatctctttgacaagcacaccctgggagacagtgataatgaaagctaagcctcgggctaatttccccatagccgtggggtgacttccctggtcaccaaggcagtgcatgcatgttggggtttcctttaccttttctataagttgtaccaaaacatccacttgcacttcgtgggcagcgctgcccccgaagtgaaatatttcgagagacttctccttccacaccccaggaatatattttcttatactgccagtggggatcttcagctcagagcttcagggaacaacccctgcttccaaacagaccacgaggtaccccagatggaggaatgtgcaaagacgccggggctggagctggaatccgtcccgagacttctcaccttgacctcgaggaaggcaggaggtcggagacagggggtgggcaggctggggaaagaggaaacccgcaggacaagagggttgtggctcgtcacgtggccacttgagggcagcaagtagctgcagctggaggtagctgcctatctgattctgtttgagagtccgccaagttgggatttaaattagacatcaagaagaatttacagaccggccttgccttgttccacggtaaggggacattgggtttagggctggaggaggtagtctctgggactctgggcccggcggaaggaggaaccggcgttctaagagattagagagcctttagttgtttcctttcttaggtgtttttttttcttttcttttcttttttttttttttaacctcagtgccacggaatccgtctcttccagcccacagtgtaccttctcctgtccccgcccatatccctcctcctggaaaatttctccaatggcgctcagcgttcgcacccttcctctccgcggttttctagtccctaggccccagcccactagaagccaggatgccccctcaccccgtctcccactctccagcgccccagctccttgccgtcacaagaacgaagtaggtcaggggagggaagaggcatcttcgtgtcctgacctgattccttgccgtctattaaatatcctacattgcgggtatttttattctgtcctggaagaaaaaataaaaagattatctatccccagagcctg

SEQ ID NO: 36537 - DNA, 325 bp, Homo sapiens
tcaagaacatgaatgccttactcataatgattccaactcccacccaacctcttcctgtattggataagtggacccaaaggctctgtcggctttcatctctgagactttgttagaacccaagaccccatggttcgaccttccctgctcccctgcagcccctgtctgccctaatgatctctccacaggccttcagaacaacctgtcccccaagacaaagggcactcctgtgcacctgggcaccatcgtgggcatcgtgctggcagtcctcctcgtggcggccatcatcctggctggaatttacatcaatggccaccccacatccaat

SEQ ID NO: 36538 - DNA, 641 bp, Homo sapiens
agcggagctccgctcgcgctctcgccgctcctgccggctcgcccggccccgcgctccgccgtctcctcgccgcccgcccctccgccagccccggggaccgcgcggccgcagcctgagccagggccccctccctcgtcaggaccggggcagcaagcaggccgggggcaggtccgggcacccaccatgcgaggcgagctctggctcctggtgctggtgctcagggaggctgcccgggcgctgagcccccagcccggagcaggtaggactggcgggagccggcccgggtgggccgggggcggggagggacgggcagtcaggtgtgggcatgggcaggtgtggacggcctggcgatgtccgcgaggggggcattgtccgcaggaggccaggagagctgtgggctgtgggcaggtggatagggaccccactttcccaaacacatagggtgtgtgagtgacggtggagacaccgatgcccggacctctccttctctcctggaaggatactggagggaccttaggagagggggctctatgtggccatgggctctgaaaggggacagcgggagagtcatcaggacccctgatcaccccaggcaaggctgaattctgatgagatgggagcctggggaggcccctgcccca

SEQ ID NO: 36539 - DNA, 7260 bp, Homo sapiens
cactgacaaaatgacccccattgtgtgacttcagtgagacacattacctgaatgagcaggtgaaagccatcaaagaattgggtgaccacgtgaccaacttgcgcaagatgggagcgcccgaatctggcttggcggaatatctctttgacaagcacaccctgggagacagtgataatgaaagctaagcctcgggctaatttccccatagccgtggggtgacttccctggtcaccaaggcagtgcatgcatgttggggtttcctttaccttttctataagttgtaccaaaacatccacttgcacttcgtgggcagcgctgcccccgaagtgaaatatttcgagagacttctccttccacaccccaggaatatattttcttatactgccagtggggatcttcagctcagagcttcagggaacaacccctgcttccaaacagaccacgaggtaccccagatggaggaatgtgcaaagacgccggggctggagctggaatccgtcccgagacttctcaccttgacctcgaggaaggcaggaggtcggagacagggggtgggcaggctggggaaagaggaaacccgcaggacaagagggttgtggctcgtcacgtggccacttgagggcagcaagtagctgcagctggaggtagctgcctatctgattctgtttgagagtccgccaagttgggatttaaattagacatcaagaagaatttacagaccggccttgccttgttccacggtaaggggacattgggtttagggctggaggaggtagtctctgggactctgggcccggcggaaggaggaaccggcgttctaagagattagagagcctttagttgtttcctttcttaggtgtttttttttcttttcttttcttttttttttttttaacctcagtgccacggaatccgtctcttccagcccacagtgtaccttctcctgtccccgcccatatccctcctcctggaaaatttctccaatggcgctcagcgttcgcacccttcctctccgcggttttctagtccctaggccccagcccactagaagccaggatgccccctcaccccgtctcccactctccagcgccccagctccttgccgtcacaagaacgaagtaggtcaggggagggaagaggcatcttcgtgtcctgacctgattccttgccgtctattaaatatcctacattgcgggtcacgatgagggcccaggctctggatgggctgccaaagggaccgtgcggggctggaaccggagagcccgagagagccctgggcatgtgtcagagccggacaggacccagctgagccaggacctgggtgggggcaccctggccatggacacgctgccagataacaggaccagggtggtggtgtgggaagggaccggcagcactggcagtgcctgggagctcgtgggaaatgtggaatgtcggagtcctcagacctgcagaatcagaatccgattcccaggaggacaaccacagctattatgtgtcccgtctctatggccccagcgagccccacagccgggaactgtgggtagatgtggccgaggccaaccggagccaagtgaagatccacacaatactctccaacacccaccggcaggcttcgagagtggtcttgtcctttgatttccctttctacgggcatcctctgcggcagatcaccatagcaactggaggcttcatcttcatgggggacgtgatccatcggatgctcacagctactcagtatgtggcgcccctgatggccaacttcaaccctggctactccgacaactccacagttgtttactttgacaatgggacagtctttgtggttcagtgggaccacgtttatctccaaggctgggaagacaagggcagtttcaccttccaggcagctctgcaccatgacggccgcattgtctttgcctataaagagatccctatgtctgtcccggaaatcagctcctcccagcatcctgtcaaaaccggcctatcggatgccttcatgattctcaatccatccccggatgtgccagaatctcggcgaaggagcatctttgaataccaccgcatagagctggaccccagcaaggtcaccagcatgtcggccgtggagttcaccccattgccgacctgcctgcagcataggagctgtgacgcctgcatgtcctcagacctgaccttcaactgcagctggtgccatgtcctccagagatgctccagtggctttgaccgctatcgccaggagtggatggactatggctgtgcacaggaggcagagggcaggatgtgcgaggacttccaggatgaggaccacgactcagcctcccctgacacttccttcagcccctatgatggagacctcaccactacctcctcctccctcttcatcgacagcctcaccacagaagatgacaccaagttgaatccctatgcaggaggagacggccttcagaacaacctgtcccccaagacaaagggcactcctgtgcacctgggcaccatcgtgggcatcgtgctggcagtcctcctcgtggcggccatcatcctggctggaatttacatcaatggccaccccacatccaatgctgcgctcttcttcatcgagcgtagacctcaccactggccagccatgaagtttcgcagccaccctgaccattccacctatgcggaggtggagccctcgggccatgagaaggagggcttcatggaggctgagcagtgctgagaacaccaagtctcccctttgaagactttgaggccacagaaaagacagttaaagcaaagaagagaagtgacttttcctggcctctcccagcatgccctgggctgagatgagatggtggtttatggctccagagctgctgttcgcttcgtcagcacaccccgaatattgaagagggggccaaaaaacaaccacatggattttttataggaacaacaacctaatctcatcctgttttgatgcaagggttctcttctgtgtcttgtaaccatgaaacagcagaagaactaacataactaactccatttttatttaaggggcctttacctattcctgcacctaggctaggataactttagagcactgacataaaacgcaaaaacaggaatcatgccgtttgcaaaactaactctgggattaaaggggaagcatgtaaacagctaactgtttttgttaaagatttataggaatgaggaggtttggctattgtcacatgacagactgttagccaaggacaaagaagttctgcaaacctcccctggacccttgctggtgtccagatgtctgcggttgtcagccccttcctttcccccgacctaaacataaaagacaaggcaaagcccgcataattttaagacggttctttaggacattagtccaccatcttcttggtttgctggctctccgaaataaagtccctttccttgctccaactccttgtctctcaacgtattggctatgacgcagcaagcagaatgaatttggactcagttacaggctgtcaatggtctgctctgtagcagtctcagagcctccccgacccactacctggagatagccagatagccagatgccctgctcctggccacctttaaagcccctgcatatgacacaggttaactaaagtcaagattggggctgctgcattccaggttccctagactcacaagctggtccttggccaggtgcagtggctcacgcctgtaatcccagcactttgggaggctgaggcaggcggatcacctgaagtcagaagtttgagaccagcctggccaacataattaaaatgtctctactaaaaatacaaaaaattagctgggtgtggtgacgcttgcctgtatcccagctactcaggaagctgagacacgagaatcacttgaacctgggaggcagaggttgcagtgagctcagatagtgccactgcactccagcctgggtgacagagcgagactccgtctcaaaaaaaaaaaaagaaagcagaacctcatggctatagagttggcattttagccccagcttctgtagctctgaaagcctaaagaaggtattctctccatctgttaaacacagtatagtggctctcagcccttggggcatgttatcatgggagggaagtcaaataagaggagagaaaagaactcaagggggaaactgcatttttaggctttgctctcttaccttgccctttctactcagaaccaataacttctgcatcaaaacatgttacagcctgcatcaagggctttaccccaacctgcagcccagccttccctgggtgagcttgctatgcgcagccacatttaccatgtggggctccctattctgatggcctgttcggtgccgggtttactcactgccctgttctgatgtcagtgcctgtacatacctccaaaggcaggacttgcctgataaatatttttcctcctctgaactggattttataggcattaaagacaagtcgggtggctagagggctccttgagacatacctagcagggaactgcaggtggattctgttgagaggcaaagcacctgagtggttgggacacaggcagctggcatgggagggactttttttgagacagggtctcactgtgtcgcccagggcaaggatgcccaaagacaccaggttggagaggcacctgccaactacttgctttccctggagcctgcatgtgcctgtggggtggggaggcgtaggggtctacggctgcctgagatgggtgtgcacagtgtgtgaagtacctacctccttgccttgctggactgtcagccagtcgcagggccggccacaagacccatgtctccatctggtcatactccatagctaccaagttaacctgctctaaactttggagaactggatctgtccaataaacgcttatttggccaagcctgatggctcgtgcctgtactcccagcactttgggaggctgaggtgggagggttgcttgagcccaggggtttgagaccagcttgggcaacaacaacaaaaatgccaggtgtggtggggtgcacctgtagtcccagctactagggaggctgagccaggaggatcacttgagcccgggaggttgaggctgcagtggggggtcataatcatgccactgtactccagcctgggtgacagagtgagaccctgtctccgaaaaaaaaaaaaaaaaaagaacggaaaaagaaatgcttacattgtcagggatcctgtagacaatcattaactctatgagatgcttggttctatttttttgggagactttgtccaagtgttttggcttaagaaatccataggcctctcttggtgacacatctctagtactttttgtcataaacaaacaggccatctgccgccaaatacatccactccccatgccactgacatcctatgggtcagccaggcttgctttgactgaggccgaggcatctggaactttctctgcctgcaggggctagcagcagaggcttcaccgcatcaccaccccttcctccactcctgacattctttcccttcagggatccaaaatggttggccgagctcccagtgggaaaacgtgtgctagagttggggagtgagatgagtggtgctgtccatggaatcaggccacagcaggaactgccccactggccatttgagacacacacaggtggtaaatgctctgctggtgggctgtgcttccctcattcagagagctctgttacagcccactgtgtcctttagaagcttgaaaggaacccaactctttgctgcactgtcctttttcttcctcaaattcagaccctccttccaccggcacccccctactccaccctcagctcttccttgcctggtttatcaagcagagctgaggccccacgtttccaactctgattgtcacttgcatcttcacaaaggataaaccacggagcaactggaaaaccatcagccaagcgttcggatgagtctggttattggtccacccccgaccagattcccttacacttaactcacttctttctttggcaatgaccctcatgacatgtataaatgggtatgactaagaagaggctgtgatctaacatttatttgctgccattttttactctggggagaagcagccccaactcatcactgggaaagaactccccctgcaaaccagctaaatttgataatttaaaccccctgcccctaaaacttctcacagagctggggagttggtggcaactttccaagtcaaggtcttgcttagaaagtccttcactacatggccaggtgcagtggctcacgcctgtagtcccaggtacttgggagcctgaggcaggaggattgcttgagctcaggagttcaaggctgcagagagctatgatcatcccactgcatttgtttaaaaataaatttttaaaatttgtgtgttttatcaggggtctcctgtacagtgtatctgtgtatgtttgtgtgtgtgtttgtatacagccttgtttaatgttttgagcaataagatatgcacacacaggtattttgttgctaaagagattggacaaggttgtagctgtgctcaggcttcagcttggtttgttaaattgagagataaacaatgacaagagctgccagccaaccacactattcaaaaagcaaagtgttcaccactaaagctaaccattcatctggttgcaggcaaggctaaggctctctctcctctagttcctggaacagactcacagattggcatgaagcactgatcaggggctgcactcagactccctggccaagcaaacctacaccagaagagtcagtgtcacagatatgatgcggccaatctctgtctccaaaaacctacctgaacttaatggtagaattcaaagatctggggactgagggcacccagccttctaaaacacaatgtattcatgtgtttagtgtaaactctctgcatggattctcagtgttaataataaaaggaagcattcttttacaactcctgctgtgtgcaaaagaaagtgcaaaggatttggagtggcattccgaagatcaccacacataccttggttctgatggctgctgaactccgacttcttcgctgagacatgactgtgggaacagcctccagctatctgctcatcagaggtgctttcctcaacctcctgcaccacctccaagagaaacagcctaaaaagaaaccccagctgtttacttatattggtctgtaaatccctggaagtaaaccccatgcatttttatctactgtctgaggacatacaataaatctgagaaagtcatatgctgtcac

SEQ ID NO: 36540 - DNA, 1282 bp, Homo sapiens
agcggagctccgctcgcgctctcgccgctcctgccggctcgcccggccccgcgctccgccgtctcctcgccgcccgcccctccgccagccccggggaccgcgcggccgcagcctgagccagggccccctccctcgtcaggaccggggcagcaagcaggccgggggcaggtccgggcacccaccatgcgaggcgagctctggctcctggtgctggtgctcagggaggctgcccgggcgctgagcccccagcccggagcaggtcacgatgagggcccaggctctggatgggctgccaaagggaccgtgcggggctggaaccggagagcccgagagagccctgggcatgtgtcagagccggacaggacccagctgagccaggacctgggtgggggcaccctggccatggacacgctgccagataacaggaccagggtggtggaggacaaccacagctattatgtgtcccgtctctatggccccagcgagccccacagccgggaactgtgggtagatgtggccgaggccaaccggagccaagtgaagatccacacaatactctccaacacccaccggcaggcttcgagagtggtcttgtcctttgatttccctttctacgggcatcctctgcggcagatcaccatagcaactggaggcttcatcttcatgggggacgtgatccatcggatgctcacagctactcagtatgtggcgcccctgatggccaacttcaaccctggctactccgacaactccacagttgtttactttgacaatgggacagtctttgtggttcagtgggaccacgtttatctccaaggctgggaagacaagggcagtttcaccttccaggcagctctgcaccatgacggccgcattgtctttgcctataaagagatccctatgtctgtcccggaaatcagctcctcccagcatcctgtcaaaaccggcctatcggatgccttcatgattctcaatccatccccggatgtgccagaatctcggcgaaggagcatctttgaataccaccgcatagagctggaccccagcaaggtcaccagcatgtcggccgtggagttcaccccattgccgacctgcctgcagcataggagctgtgacgcctgcatgtcctcagacctgaccttcaactgcagctggtgccatgtcctccagaggtccctcaacaaccaggatgaaaacacgtatgtgaattgcctggattctcagcagtgtcacggcagctcagagtcaaggcgaccttgaggatcactggagctcatgcagt

SEQ ID NO: 36541 - DNA, 353 bp, Homo sapiens
ttatttatttatttgtttatttttgagacagagtcttgttttgttgccaggctggagtccaatggcgtgatctcagctcactgcaacctccgcctccttggttcaagcgattctcctgcctcagcctcctgagtagctgggattgcaggctcacaccaccatgcccagctaattttttgtatttttagtagagacaggatttcaccatgttggccaagatggtcttgatctcctgacctcatgatccgcctgcctcggcctcccaaaatgctaggattacaggagtgagccactgcgcctggcccacaatttaaggggcataatctcattgtgatcatgacggccaccatcgc

SEQ ID NO: 36542 - DNA, 468 bp, Homo sapiens
atgatttcttggaaagagagaatatggtgttgagagtcacggtaaatgtaagtctacagagtggccacgtgggtttcagggactcttaaaatgcatgaggttccactgagtccagacaactatctatcttaacggtctggaacaatgaccacccacataagatcaaaaacctgagatctgatccttctagttttgtcaaatggctcagattattttaagcttcctctttagataaaatgcagtttgactcaccggttttttttcttttcataaaggctactgtgagggagtagggcatcctcctgcaacaagcagcggagagagaaatcagtccccagccctgaccctcggatctctggtaaaacactcagtcatgagacacgagacctctggccacatgccctgatccatggactcagacagaaagtcctctcctgcatcttggggtccagaagaggccaggaagca

SEQ ID NO: 36543 - DNA, 320 bp, Homo sapiens
tctttagtcattcatcagatttactaaattcacactatgttcaaggaccttggcttgctgttgacacagggttcacagtggcactgtccctggtcttgaggtgctcacagtctgaaggagagatgtgtacaaataactgtgccctgtggtaaacaccatcagtgtccaacttattgagaaagtgtagaggagagaacaaaaatgtcagactctgcctagagagctcagggaagtcagcccaggctgaaatacagtgatgcagtcatggcttactacagccttggcctcctgggcccaagcaatcctcccacttcagcctt

SEQ ID NO: 36544 - DNA, 405 bp, Homo sapiens
atattatgtgtttttgataaagcagtggtaagggaaagcaaatctgatttattgagatcctttctaatatgtgttggatggatttcagtaagtttcctgataactctgaaagtgagaaaagccgggcgcggtggctcacccttgtaaccccagcactttgggaggctgaggcgggcagatcacgagatcaggagatcgagaccacggtgaaaccccgtctctactaaaagtacaaaaaattagccgggtatggtggcgggcacctgtagtcccagctagaggttgaggcaggagaatggtgtgaacccaggaggcggagcttgcagtgagctgagatcgcgccacttcactctagcctggccaacagagcgagactccgtctcaaaaaaaaaaaaaaatcttaca

SEQ ID NO: 36545 - DNA, 125 bp, Homo sapiens
tatcttatagacactgtgggctgttactgtgcaggcccaagagaaggaaacaagtgagccccgccatccccccctcagaaggctgctgtcacactactgtcaaatctcgctggactttggagagg

SEQ ID NO: 36546 - DNA, 295 bp, Homo sapiens
tgaaaatactgtgaggtttaacaatgaaggcaggtgactggtgaggagagttccagccactggattctccctcagtcccctgtgctgtggcccttggtgacccctagatttcagtgcccctgcctgacactggagtccctctataaagaagcccctttctagctagctagctgttccatcccgcacacccccacagaagccttttgctgccattagtaagcacgcctctattttctcacctgtgattgatcatgcatgattgagttttgtctattaaagcaattgttaagttact

SEQ ID NO: 36547 - DNA, 454 bp, Homo sapiens
gtctcactatgttgcccaggctggtctcaagggatcccctgcctttgcctcccaaagtactgggatcacaggcatgaaccactgcacctggctgagagttagtgtttaataggtgcaaagcttcagttggggaagattaaaaaaaagttctggagatggacggtggtgatgattgcacaacgtgaatctacttcatgccactgggctgcacacttacaaatggttacaatgttagttgcctcacagcctgaacaagtaaaatggaagctgtaattaaccttaaaaatatatatgtgtctgagatataattgtatataagtatatgtatacagacatgtaaactatttgttaaaaaagaaactagaacaaaaatattttacatttacctggaaaatggttaaaatggtaaatgttatagtatgtatattttactacaataaaaatgaataaattt

SEQ ID NO: 36548 - DNA, 382 bp, Homo sapiens
atcagtttcctgcgtcgactgtaagcagttttgataatccttgtcatatgtgattacatttcccccccttcccataacatctcagtgtaattggtttgataaactagacctcagtccggtagtttgcttgcaatatattttcaccttctatctgtgtgactaagatggttttgaatggctttgcatggagaaaatcaggctttgagcaccaggtccttagtttcggaaacaaatcacccagggcaggcagcacaggtctgggagagctgggaatcccagttaagcctcaggagaatcgcttgaacctgggaggcggaggttgcaataagctgagatcgcaccactgcactccagcctcggcaacagagtgagactccgtctc

SEQ ID NO: 36549 - DNA, 368 bp, Homo sapiens
tagctcttgtgtagcctaacatttccgcctgaatgtttgccattttgttctattctgtaacattgtttttgacctctaatttcattttgcaatgatctcagcactgggtttatctttacaaatgaaatggtgagaaacgctttgctgaatcttcacaactggttcaatcacatgggacagtggaatcagagacatgaggttgcgggaaccattatggggttagaatggataagggaaagagaaagaaaaaatagcagaagccatgacttgctcttgtaggtttgctttgtatgacactctttttcttctgtcactgcatcagacagatatgtttagatacaccatgtattaataaatggtttcctcgg

SEQ ID NO: 36550 - DNA, 419 bp, Homo sapiens
gatgagtcacggtaatgaagagacactttgagacactttggacttttttgtaattgtctttactcatttattttctatggaacaaagctcatttcccagccatcaactcaaggtatttggcttcccttagtatggcaaacctaaggcaaaccaaaggaaaaaggttttcgttttttgtttgtaacttccttatagtgtctaatggctcttaaacagttttctctgggtacattttacatgagtacataagtagatgtactatattttactaagtaatgtgcttcggaaaatttttgtgtaaattaatgttttgaaaatgaaaatattgtaaatataagaacatgatatttatagggattataaacacattttttttttttttttgagatagaatttcgctcttgttgcccaggctgagg

SEQ ID NO: 36551 - DNA, 5564 bp, Homo sapiens
tgtccttcctttgagcagccactgagagggagaaggagttgcagagatcaggaaggagaggatttatttccagttttctggcagtttttcctcactctttcggagacctaggatgggttaggagagggcatggcaaaggcagaggtggctctgctagaggaggccgcaggtccgcaggccgaacctggggagccagccatgtctggcctgaggccctgctttgaggagaagataaagccttgaggagccttttgggccgatctgggaacccagcaagactagattagcctgactgatgacagacctgggatgaggatgagggcagttaagtatttgtttaatcttgctttgtcttttcaaacagcgatttagtaatcctgtttgaggctgcagtgtggcaatgctttccagaggatggagtcctttttgtttgttttgaaaaaatagagatggggtttcactatgttgcctaggctggtctcatactcggcctcgagccatcctcctgcctgggcctcccaaagtgttgggattacaggcgtgagccatggtgccagactggagtccttttattaaaattaactgccctgctcagctttctgctgggccaccccagagccaatccttggttcttgggcccaaggctggacccaggggttgcaggaaacagtctgtagcatccaagtggggcctgtcgtacccactccagtgtgtaggtgcagaacgctctttgggggatttctctgctgggccaccttactccagggatccctcagttttcaaaacaaagcaagagggcaaggaagaatggagaaacagctcagtgttgactctcttccccctggtgagtgctgtgctggggcctctgtgcacatcataccacttcccccttgaatcagccccacaaggcagggtgagagatgaggactcagggtgcaaggaggtctcacagcttggaaatggatcaggacagctctgattctccaaggccaaggtcttctctatatcatgaggcagcccaaaaatgtgtttctacacatattctgtgtagaaactcaggccaggctcctatatgctctgggtgacagcgggaaggtgctttccagtgtgtatcagtgtggcccatctgggagtcataatgtcattgcctcttccaaaatatcagcaaagctgaccctagtgcttgtagtgctcaaatgcacctctctgcctttgtgccatagggaaatggatttggtcctgggggtggtgataccaacttctgtctcaattccatgaccctcactcagcacccccaccccaggcctgtgcagaggaggaataaccgtccttgagaaccatccagccctaggtggagaaattagatttatggacttaatcagttcttcttccctgtcagtggtggtgagaatgacatgggggaaattgataagcctcagtcatgttttcctgcgagacaaggcagctttggtagctggtgggactgacgccttcttcacctgtgtcctctgcctctgagtgactataaattgcgaaccccatgaggtggcacctgcagccacagatcgcttaggcaccttgcacagggggccacctaatgaactggctgcaggacggcaatcctgccgtgaagccaggcacctcgggaggggcaaggtggcagaaccgagagagcagatgctccttgctgtttctgtaaggccaccagtggctgggtggcctggccctggtagcaaggtggtaaccgtgtgagtggctgaatcctgcaccacttttcctgagcctccttcctcctggattcctgcaactatattctcactacatggctcaccaccaattcgttctctctgccccaaggaggctggacaagaggctcaggtcagtgcgggtacgcaggaacctatgtctgtaaaatgaaaatgcctgccttcaagggctgtcttgaggttgaaaggagatggtctacatcaagggttaggaagaccacaatgtggctgtgccggccacctccaggctggcttcagtctcccatccccatagtcatacccctgtgaagtcccttcccatactgaatcgggctacctgtgtatcttatagggtgttggaaatgacagattgtgaattccaaggccccataaaagacagcgtgggctgggcgtggtggctcacgcctgtaatcccagcactttgggaggccgagccaagtggatcacttgaggtcaggagttctagaccagcctggccagcatggtgaaaacctatctctactaaaaatacaaaaaaaaaaatttagccaggtgtgttggcacctgtgcctgtagtcccagatacttgggaggctgagccaggagaatcacttgaacctgagaggtggaggtttcagtgagccgagattgtgccactgcactccagctgggtggcagagactctgtctctaaacaaagaaaatgtggtttctgctgtcctttctcttggatcactttctctgggaaaccagccaccatcttgtgaggacactcaagctctctggaaaggttcagaaatgtggtgaggaagtgagacagacctcttgccaaaaaccatgtactaacttatcagtcacgtacatgagttgacttagaaatgactctatcagcctcagccaaaccttcagatgactgcagccctggtcaacatcttgactgtgaccccatggaagaccctgaaacactcagccaagccactctcagcttcctgatccacagaagcagcatgaaataataaatttttcttgttttaaactaagttttgggttaatttgttatacagctgtagataactccaagaataatactccataaatgttgatttcctttctgcggctccactgagtcatctttgttcatgggcaaagctcactgtctctctactggctgcaaaagatgtccatttgttggctctgactcatgcttgtggtcttgttggctcacagcaaggccttttcacagaggatggtggtttgtcacactcagaatccaggtcttacctgctttcctgctccatggaattttgacctgagtttgaaggctgataggggattgatggatgagggagaaagacacagtcagttcttagagcagtagctaatccaggggtttctctggctttgtttgcatgagtagtgatagttggggatgaagcatgggtattcgagatcttttttgtgtgagtatgggaggaaaaattctgttctcttcctcctccatctttattcatctttgtcttccctcggatcagctttaaagacccctgagactctaggactcggtttgcttttttctcaccactgggatccatctcccactagtaggaagaaggatctaagtagttgagctgcataaaggggaagtaaacagccagacaaatgttacattttagagccttgagtgacccagagctttctatcagcttcattgggtgcagggagggtagcgatttctggctgctgtcacctccttgctcatatcaggaagcgctaattttgaggcaaagttcagtgccctctggctcacctagggcccctgttgcctaatttcacgaggccaagagtttgagggtgggttcggggctgcgcagcctggatgccttggtttgcatgcctacagcagctgtgcccgaaagctttttttagagtaaatatgtagcttttgctaggctttttgtgtgccttgttcattcctctatcattttttgtatacctgctatggtgtcaggcactggggatacaaattagccggggactcggacatgtaagcaagtaagcccaacagcagctaacatttatgcagtgctcactgtgtgcttggatgtccagagtgatagagcaggtttagtaagggggacagagggctgagaccagaggcaaggtggagaagggcatttctggaggcagcaatatgagtgcaaaggagacatacacaaggttccctgggggattccaagttgttgctgtcgtggcttcaaatcttactttagggcctactcagatggcatcttgttcatgaagatgtgcctgttttttgttttatttgtccctctccccccaacaaagagtaaactttttttctgaacttctcgaaagtttgctaacatcagctataaaactctctgggcctgggatattttgcggggagcagggaagatctttgattatcattttaacttatttctgttcatttattcaagctttttcttctttcaccaattctcaaaagccccacaccaccctcctgccaaccccacacccctccacttccagtcgctaccttccacccatcattctcacttctaaagccatcaacagaggttttgaacaccactcatgtgccaggtgttgttctaagcacagattcatcagtgagccaaatgaaattccttcctaaaatatgctctttggtggtgctaaatgccaggaagaaaagtaagcaaggggagggaagagagaggtgtggggtggcggggggcgggagcttggataggatggtcagaaaggacctctttgtagaaacttaaataaatttagaaagcaagtcatgtaatatctgggaaagaggaaatagcaggtgcaaagaccctgaggttgaagtgtcctggcaagtttgaggcaagcaaggaaggcagggtggttggaacagaacaagagaagaaacgtggtaggaaatgatggagagtcagggacacgaccttggaggacttgcaggtcatggtaaagacgctggactcgacacgaagtgtgaacagagttcttggaggattctgaggtagagagtagcataatctcatttgtgtttttattctaacatgctcacttgggccaccttgtagaggctagagtgaaaaggagggagactagttagaaattctgtattgctggctgggcgtggtagctcccggcactgtgggaggccaaggccagaggattgcttgagtctagcagtttgagcccagcctaggcaacatagcgagaccctgtctctacaaaaaattttaaaattgcccagggatggtggtgcacacttgtagtcccaactacttgggaggctgaggtgggaggattgcctgagcccaggagtttgaggctccagtgagctgtgattgtgccattgcactccagcctgggtgacagagcgagaccctgtctctaaaaaaaaaagaaaaaaaaagaaattctgtattgcagcagcctaagagagtcattagttaagagatttgtagtaggcattttttagaaagttgcattgagggctaggtacggtggctcatgcctataatcccagcactttgggaggccaaggtgggtagatcatttgaggtcaggagcctggccaacatagcgaaaccccgtctctactaaaaaaattagccgggcggtagtggcatgcgcctgtaatcccagctactcgggaggctgaggcaggagaattgcttgagcctgggaggtggaggttgccagtgagtcgagatcgcgccactgcactccagcagtctgggcgacagagtgagacgctgtttcaaaaaaaaaaaag

SEQ ID NO: 36552 - DNA, 3238 bp, Homo sapiens
tgtccttcctttgagcagccactgagagggagaaggagttgcagagatcaggaaggagaggatttatttccagttttctggcagtttttcctcactctttcggagacctaggatgggttaggagagggcatggcaaaggcagaggtggctctgctagaggaggccgcaggtccgcaggccgaacctggggagccagccatgtctggcctgaggccctgctttgaggagaagataaagccttgaggagccttttgggccgatctgggaacccagcaagactagattagcctgactgatgacagacctgggatgaggatgagggcagttaagtatttgtttaatcttgctttgtcttttcaaacagcgatttagtaatcctgtttgaggctgcagtgtggcaatgctttccagaggatggagtcctttttgtttgttttgaaaaaatagagatggggtttcactatgttgcctaggctggtctcatactcggcctcgagccatcctcctgcctgggcctcccaaagtgttgggattacaggcgtgagccatggtgccagactggagtccttttattaaaattaactgccctgctcagctttctgctgggccaccccagagccaatccttggttcttgggcccaaggctggacccaggggttgcaggaaacagtctgtagcatccaagtggggcctgtcgtacccactccagtgtgtaggtgcagaacgctctttgggggatttctctgctgggccaccttactccagggatccctcagttttcaaaacaaagcaagagggcaaggaagaatggagaaacagctcagtgttgactctcttccccctggtgagtgctgtgctggggcctctgtgcacatcataccacttcccccttgaatcagccccacaaggcagggtgagagatgaggactcagggtgcaaggaggtctcacagcttggaaatggatcaggacagctctgattctccaaggccaaggtcttctctatatcatgaggcagcccaaaaatgtgtttctacacatattctgtgtagaaactcaggccaggctcctatatgctctgggtgacagcgggaaggtgctttccagtgtgtatcagtgtggcccatctgggagtcataatgtcattgcctcttccaaaatatcagcaaagctgaccctagtgcttgtagtgctcaaatgcacctctctgcctttgtgccatagggaaatggatttggtcctgggggtggtgataccaacttctgtctcaattccatgaccctcactcagcacccccaccccaggcctgtgcagaggaggaataaccgtccttgagaaccatccagccctaggtggagaaattagatttatggacttaatcagttcttcttccctgtcagtggtggtgagaatgacatgggggaaattgataagcctcagtcatgttttcctgcgagacaaggcagctttggtagctggtgggactgacgccttcttcacctgtgtcctctgcctctgagtgactataaattgcgaaccccatgaggtggcacctgcagccacagatcgcttaggcaccttgcacagggggccacctaatgaactggctgcaggacggcaatcctgccgtgaagccaggcacctcgggaggggcaaggtggcagaaccgagagagcagatgctccttgctgtttctgtaaggccaccagtggctgggtggcctggccctggtagcaaggtggtaaccgtgtgagtggctgaatcctgcaccacttttcctgagcctccttcctcctggattcctgcaactatattctcactacatggctcaccaccaattcgttctctctgccccaaggaggctggacaagaggctcaggtcagtgcgggtacgcaggaacctatgtctgtaaaatgaaaatgcctgccttcaagggctgtcttgaggttgaaaggagatggtctacatcaagggttaggaagaccacaatgtggctgtgccggccacctccaggctggcttcagtctcccatccccatagtcatacccctgtgaagtcccttcccatactgaatcgggctacctgtgtatcttatagggtgttggaaatgacagattgtgaattccaaggccccataaaagacagcgtgggctgggcgtggtggctcacgcctgtaatcccagcactttgggaggccgagccaagtggatcacttgaggtcaggagttctagaccagcctggccagcatggtgaaaacctatctctactaaaaatacaaaaaaaaaaatttagccaggtgtgttggcacctgtgcctgtagtcccagatacttgggaggctgagccaggagaatcacttgaacctgagaggtggaggtttcagtgagccgagattgtgccactgcactccagctgggtggcagagactctgtctctaaacaaagaaaatgtggtttctgctgtcctttctcttggatcactttctctgggaaaccagccaccatcttgtgaggacactcaagctctctggaaaggttcagaaatgtggtgaggaagtgagacagacctcttgccaaaaaccatgtactaacttatcagtcacgtacatgagttgacttagaaatgactctatcagcctcagccaaaccttcagatgactgcagccctggtcaacatcttgactgtgaccccatggaagaccctgaaacactcagccaagccactctcagcttcctgatccacagaagcagcatgaaataataaatttttcttgttttaaactaagttttgggttaatttgttatacagctgtagataactccaagaataatactccataaatgttgatttcctttctgcggctccactgagtcatctttgttcatgggcaaagctcactgtctctctactggctgcaaaagatgtccatttgttggctctgactcatgcttgtggtcttgttggctcacagcaaggccttttcacagaggatggtggtttgtcacactcagaatccaggtcttacctgctttcctgctccatggaattttgacctgagtttgaaggctgataggggattgatggatgagggagaaagacatgtctttccctgctgctctgttcacagtattagatgggaccagagcacgagcgggtctgtaggccatggcagagtcccccttactcatacacgtggaagttggggatgagtgagaagcacacgagtggcacactgatt

SEQ ID NO: 36553 - DNA, 341 bp, Homo sapiens
acctgtattctctttaaatatgagtatacttctcttccttgatttgttcagttttaaattgtatccaaagactcccacctatattatatggttaatgccataggtaagtctactctgtctccaaaatttattttacttcctggtcccctacccagttggattatatctacatggtcacagcaaataccttttatgttgtcttttattatcctgattccctcactgtttttggttttactgctgtggttgtattagtccattttcatactcctatgaagaaatacctgagactgggtaatttataaagaaaaagaggtttaatggactcacagttccacatg

SEQ ID NO: 36554 - DNA, 359 bp, Homo sapiens
ctttacatttgactctcaaaaatgaacattagagttagcataaaagaggctctctggtcatagaaaattgatctctaggggatgcggtggctgacacctgtaatcccagcacttttggaggccgaggttggaggatcactaggtcaggagttcgagaccaacctggactatatggtgaaaccccgtctctactagaaatacaaaaattagctgggcgtggtggcacacacctgtaatcccagctacttgggaggctgagatggaatctcactctgttaccccggcgggagtgcagtggcacgatcttggctcactgcaacctctgcctcccgggttcaagtgattctcctgcctcagcc

SEQ ID NO: 36555 - DNA, 192 bp, Homo sapiens
ttttttttttttgagacggaccgcatctgtcgcccaggtgggactgcggactgagtggcgcaatctcggctcactgaaaacataccctttcttataagtgtcgactcaccttcaaattttcaattttggcctgcttttggctgcttctcattgtctttaggtagttatttttcatacttgttcagggtttat

SEQ ID NO: 36556 - DNA, 707 bp, Homo sapiens
agagcagagacagcatgcgcacacggtcctgtcctccccacccagaggcacagtcagcttaaggaagcccaggggagagggcaaaaagtgtcggaaggtgtacgggatggagaaccgagacatgtggtgtaccgcctgccgctggaagaaggcctgccagaggttcctcgactgagagacccccaggcagaggggctcagggccctgagccgctcctgccctggcctgccactgcaggtgttggaaagagcttttcctactgaataaaacacagttgaagccaggaaaagccctttcaggaaccttggaggaataacagcaaaaacacagaaaaattgtttaagtcaccacctatgacaaaagaaagttgctcttactgagaacccagcttggagcagctataactagttttttttccttcaaaagaaaagtcaactttttttgctgtatgtctagacttaaaactgtggacttctgtagcaattgaaccaacaaagcccattttacctagaaaggaggcatattttgataagctttctgaattatgccattttcaagatttttttgacacttaaaaaacaagctacaggttattcagtagcatttgtacaaagatcaatacttacttttgttgtgaataatcttttccgtatcttccatttgacttcttggagcagtatatgtcaggatgtgttgcaagacagcgc

SEQ ID NO: 36557 - DNA, 825 bp, Homo sapiens
atcgcttgaacccaggaggcggaggttgcagtgagccaagattgttccattgcactccagcctgggtgacagagtgagactctcgcaaacaaacaaacaaagaaaacaaacagtcctagctaacatgtatcaagaaccactgccctgttactgttcacgaatctgtgcattatgaagacaagatattttaatgcacttttcctacaggtacgaatttctgtgctacataaaagagaatatggtttacaagctgattcttatctagatgaaattggtaaacatattttatataggaattctcttaaaaattttttatccacttctgtttattagcatatatatggctgatgaataggttttaggaatagccccagtaggtgcaaataatttaaattagatgcaacgtataatatttatactccaactgaataaattgactataactcttatggactctgtgccacaacttgtcaagtgtctgaatgaaaagaagaaaaaagaaacacgtattcaaacttactgtttaaagttctttgttcagagccattagcatatttaataggatttgcgagtcctctctcccatatggttgtcttttaataaagattgtaataggcagaggacataatttgcctcaaatagatagctaaacaaagcaaaattaatttatttttctgagtaagttagtgacctgctaacaagttcacagtcccttaactaaaacctttggggctagcaccccagaatcaacacattcaaatttctagtgcaaaataatgaatcttcactaattgaaaaccaaaattagcctcttgtcagttttgg

SEQ ID NO: 36558 - DNA, 1136 bp, Homo sapiens
ttcattgtgtcattgaaactatagctgactggtatgtatactaagtgttcgttgatctaaaccagatataagtcattgacttttctgaaacttagttgtgtcagagatgaaccacctgctcactgaaccgtcttagtaaccagtgatgaagcatataattctaatgttggcaataggacattgctaacagtgcgtttaactgcaatattttaactacagtaatttttctgtttatttctctatccactcagtagaatttgtggttgaattccaccttcgctgccatagttttttaccacattcctaatggttttcaacctctatactgtagtagaaaattcatctaactactgaatttaattttagcataatactggatcaaattgtttgaattttcattcctgtcatttttgatttttaaaaaatgaaacaaaactaaacaacaaaaccctaggaaaagaatggcttctttccaactagtcaattaaaacgtccagtatctccccaaataaagccttaggtttcttttaacctcttaatggttaattgaaaagagtacagaaactattcaaaatacttatccaatcaatgggggggaaaagctatgtctttcaggggacagtagagtgatgagaattttttagaaaacactattatccatcaaacttaaaagcatttggacctgatatttaaagataatgaagttttccacatattgaagtattcaagacatcttccatccacaaaaatttatctttaagttttgtaaatatcaagtaagtatagatgatatttattttatatattcctatggaaaaaatgctactttaatgttctgacatttgtgattatttgccagtctttactttttaacttattaaaaagttaaatacttattaaggtttctctatgtaaaacaatttaaattgtcttttgatttttagggaaatatctaaacgtgggaaatttccaacgcaaccttaatattaggttgtgttatttatagagctaaagttaatgcatttttgaatttctcaggagcactgcaaggcaaaaaaatactccaaataaaaatgatatatgtaagttggcaatgtcttcagtcacaataaaaaaaatttttagcaaacagctgc

SEQ ID NO: 36559 - DNA, 280 bp, Homo sapiens
aaggcagcaaggatgtgtgatgaggataaggaggtcatcaagctatcacagaaagcctcgtatgctggtgggaaggagtgtgggtcatgggaaaatgtgaagcaaggtgtcaactaaattggtacatgaagcttagttgagacaattagcaactcctccgtgaccctctgtctggggaggggagagggtgagtgctgtaatgccaaaacccctcttccagacagagccgcaagcatataagaccttgtaaattaatcatcatgggtccacattttagtta

SEQ ID NO: 36560 - DNA, 333 bp, Homo sapiens
gcccaagaatctacctgcctggatccattaacaccagtgccagcgtatctgccttggggccaaaggacacacaggctcagaccactgctgccaccactggggcctgaagactggcccacctggtatttcaatttctggcaaaacttaaccagtctgcactaaaaaccacactctaatctaccaacgaaaccagataccaatgactctatggccaaaagaaatgatagagactatgctactgcttgcatccagaaccaaagccaagtgtcctctccaaccatcaccatagatacatcttcaggaaaatgttcttccactacaaaccaaattcaa

SEQ ID NO: 36561 - DNA, 390 bp, Homo sapiens
catgatactcccttatggagaaacttaaggttggattaaactatcctagtcagcaattaaacactttctccaaagtcattgtgctacgagactctaattttacttccttagaagagcaaaaaggagtgaggaacattgaccttgagcccaggcgttctggcctagtggtctgccttcatcagagctggttgctcctgctgtaggttcaaggtcaatgaactctgactattgctttcagcttgccattggagagctgtatcctccctttgataaaatcttcttggctgacttattttcagcttgaacattctgctctatctgctccaggaagacagatctgcttttggtgccctgcccatgacttacatatcttccacttagttacaagac

SEQ ID NO: 36562 - DNA, 1036 bp, Homo sapiens
gttttcattaatgtttgtgttctcatttgatctttataactaccctgtgaaataggtacttaggacaaacattgatcacccctcattttaaagatggaaaacctgaggctcagaaaaatgaagctcacaaattatgtcttatgactccaaactcctgctggtttttttttatttgtctgaaaactgactgatgtgatcttatttggacaaaggagtgttgttggaaatatcagtcacgtgaattaattaacaatttcttccttcctagcgagagtaggaccatggagtagagcagatatattagtccattccatgtggaaatccggcctgtagttgtatattcgtatagctatatgttggtaggatggacctacatggtttaatgaaagtggaaggaaaatctattttcagtcagatcctatagatatttcataaggaattagaacttagttacttaaaaattatattctagaggtttataaagcaaacatttattatattcatttacctttttaaaaaattttaagcaaagcccatactcctgttttggggatatctgaaagagagagcatttacaactttagaattacagattcatgagggatctgattttattttctttttcaactttaatttttgattcagtgggtacacatacaggttttattacctgagtatattgtgtgatgctgaggtttggtgtacagataaagcgatctgattttatactcttatgcagtggatctaccactactacaatgactgctacagggctgctaatgtttctgaatattgtctaagtacttctagaaataggaaagaagatcacagaatcataaattcttctatcttaaaggagccttcaggataattattattttacaaaaaaatgcagctaggctattgtatacatcaaacaggctgttttttctcatggtgaactgaatctgcttcagtggaactttccccattctgtctgaggtctccctttggacacaatgtagaataaatctattgctctcctgcaaaaaaatag

SEQ ID NO: 36563 - DNA, 982 bp, Homo sapiens
gttttcattaatgtttgtgttctcatttgatctttataactaccctgtgaaataggtacttaggacaaacattgatcacccctcattttaaagatggaaaacctgaggctcagaaaaatgaagctcacaaattatgtcttatgactccaaactcctgctggtttttttttatttgtctgaaaactgactgatgtgatcttatttggacaaaggagtgttgttggaaatatcagtcacgtgaattaattaacaatttcttccttcctagcgagagtaggaccatggagtagagcagatatattagtccattccatgtggaaatccggcctgtagttgtatattcgtatagctatatgttggtaggatggacctacatggtttaatgaaagtggaaggaaaatctattttcagtcagatcctatagatatttcataaggaattagaacttagttacttaaaaattatattctagaggtttataaagcaaacatttattatattcatttacctttttaaaattacaactttagaattacagattcatgagggatctgattttattttctttttcaactttaatttttgattcagtgggtacacatacaggttttattacctgagtatattgtgtgatgctgaggtttggtgtacagataaagcgatctgattttatactcttatgcagtggatctaccactactacaatgactgctacagggctgctaatgtttctgaatattgtctaagtacttctagaaataggaaagaagatcacagaatcataaattcttctatcttaaaggagccttcaggataattattattttacaaaaaaatgcagctaggctattgtatacatcaaacaggctgttttttctcatggtgaactgaatctgcttcagtggaactttccccattctgtctgaggtctccctttggacacaatgtagaataaatctattgctctcctgcaaaaaaatag

SEQ ID NO: 36564 - DNA, 360 bp, Homo sapiens
acagacaaggaaactgaggctcagagaggttgagtaacagacagcaaggtgggaagctgagatgtgaatgggcttgagttggataccattcagttatgtcaggactttggaaccctgagtgatgggccctagtcccaaggcttggatctttgtcatggtcctaccgatgtcccttaacttttgcctcaagaccagttgtctaatgcatcatgctgcattgtggcttttcaaaagagatgaacatgttaataggcactgtcttaacaaaattccatcgactgggtggcttaaacaaccggaatttatttctcacaattctggagactggaagtccaagatcaaggttctggtagggtcaga

SEQ ID NO: 36565 - DNA, 2213 bp, Homo sapiens
ggaaacatgatccagctgaaggactgattgcaggaaaacttggcagctccccaaccttggtggcccagggagtgtgaggctgcagcctcagaaggtgtgagcagtggccacgagaggcaggctggctgggacatgaggttggcagagggcaggcaagctggcccttggtgggcctcgtcctgagcactcggaggcactcctatgcttggaaagctcgctatgctgctgtgggtccagcaggcgctgctcgccttgctcctccccacactcctggcacagggagaagccaggaggagccgaaacaccaccaggcccgctctgctgaggctgtcggattaccttttgaccaactacaggaagggtgtgcgccccgtgagggactggaggaagccaaccaccgtatccattgacgtcattgtctatgccatcctcaacgtggatgagaagaatcaggtgctgaccacctacatctggtaccggcagtactggactgatgagtttctccagtggaaccctgaggactttgacaacatcaccaagttgtccatccccacggacagcatctgggtcccggacattctcatcaatgagttcgtggatgtggggaagtctccaaatatcccgtacgtgtatattcggcatcaaggcgaagttcagaactacaagccccttcaggtggtgactgcctgtagcctcgacatctacaacttccccttcgatgtccagaactgctcgctgaccttcaccagttggctgcacaccatccaggacatcaacatctctttgtggcgcttgccagaaaaggtgaaatccgacaggagtgtcttcatgaaccagggagagtgggagttgctgggggtgctgccctactttcgggagttcagcatggaaagcagtaactactatgcagaaatgaagttctatgtggtcatccgccggcggcccctcttctatgtggtcagcctgctactgcccagcatcttcctcatggtcatggacatcgtgggcttctacctgccccccaacagtggcgagagggtctctttcaagattacactcctcctgggctactcggtcttcctgatcatcgtttctgacacgctgccggccactgccatcggcactcctctcattggtgtctactttgtggtgtgcatggctctgctggtgataagtttggccgagaccatcttcattgtgcggctggtgcacaagcaagacctgcagcagcccgtgcctgcttggctgcgtcacctggttctggagagaatcgcctggctactttgcctgagggagcagtcaacttcccagaggcccccagccacctcccaagccaccaagactgatgactgctcagccatgggaaaccactgcagccacatgggaggaccccaggacttcgagaagagcccgagggacagatgtagccctcccccaccacctcgggaggcctcgctggcggtgtgtgggctgctgcaggagctgtcctccatccggcaattcctggaaaagcgggatgagatccgagaggtggcccgagactggctgcgcgtgggctccgtgctggacaagctgctattccacatttacctgctagcggtgctggcctacagcatcaccctggttatgctctggtccatctggcagtacgcttgagtgggtacagcccagtggaggagggggtacagtcctggttaggtggggacagaggatttctgcttaggcccctcaggacccagggaatgccagggacattttcaagacacagacaaagtcccgtgccctgtttccaatgccaattcatctcagcaatcacaagccaaggtctgaacccttccaccaaaaactgggtgttcaaggcccttacacccttgtcccacccccagcagctcaccatggctttaaaacatgctctcttagatcaggagaaactcgggcactccctaagtccactctagttgtggacttttccccattgaccctcacctgaataagggactttggaattctgcttctctttcacaactttgcttttaggttgaaggcaaaaccaactctctactacacaggcctgataactctgtacgaggcttctctaacccctagtgtcttttttttcttcacctcacttgtggcagcttccctgaacactcatcccccatcagatgatgggagtgggaagaataaaatgcagtgaaaccctaaaaaaaaaa

SEQ ID NO: 36566 - DNA, 2309 bp, Homo sapiens
ggaaacatgatccagctgaaggactgattgcaggaaaacttggcagctccccaaccttggtggcccagggagtgtgaggctgcagcctcagaaggtgtgagcagtggccacgagaggcaggctggctgggacatgaggttggcagagggcaggcaagctggcccttggtgggcctcgtcctgagcactcggaggcactcctatgcttggaaagctcgctatgctgctgtgggtccagcaggcgctgctcgccttgctcctccccacactcctggcacagggagaagccaggaggagccgaaacaccaccaggcccgctctgctgaggctgtcggattaccttttgaccaactacaggaagggtgtgcgccccgtgagggactggaggaagccaaccaccgtatccattgacgtcattgtctatgccatcctcaacgtggatgagaagaatcaggtgctgaccacctacatctggtaccggcagtactggactgatgagtttctccagtggaaccctgaggactttgacaacatcaccaagttgtccatccccacggacagcatctgggtcccggacattctcatcaatgagttcgtggatgtggggaagtctccaaatatcccgtacgtgtatattcggcatcaaggcgaagttcagaactacaagccccttcaggtggtgactgcctgtagcctcgacatctacaacttccccttcgatgtccagaactgctcgctgaccttcaccagttggctgcacaccatccaggacatcaacatctctttgtggcgcttgccagaaaaggtgaaatccgacaggagtgtcttcatgaaccagggagagtgggagttgctgggggtgctgccctactttcgggagttcagcatggaaagcagtaactactatgcagaaatgaagttctatgtggtcatccgccggcggcccctcttctatgtggtcagcctgctactgcccagcatcttcctcatggtcatggacatcgtgggcttctacctgccccccaacagtggcgagagggtctctttcaagattacactcctcctgggctactcggtcttcctgatcatcgtttctgacacgctgccggccactgccatcggcactcctctcattggtaaggcccctcctggcagcagagctcagtctggtgagaaacccgccccctcccacctcctgcatgtgtctcttgcctctgccctgggctgcacaggtgtctactttgtggtgtgcatggctctgctggtgataagtttggccgagaccatcttcattgtgcggctggtgcacaagcaagacctgcagcagcccgtgcctgcttggctgcgtcacctggttctggagagaatcgcctggctactttgcctgagggagcagtcaacttcccagaggcccccagccacctcccaagccaccaagactgatgactgctcagccatgggaaaccactgcagccacatgggaggaccccaggacttcgagaagagcccgagggacagatgtagccctcccccaccacctcgggaggcctcgctggcggtgtgtgggctgctgcaggagctgtcctccatccggcaattcctggaaaagcgggatgagatccgagaggtggcccgagactggctgcgcgtgggctccgtgctggacaagctgctattccacatttacctgctagcggtgctggcctacagcatcaccctggttatgctctggtccatctggcagtacgcttgagtgggtacagcccagtggaggagggggtacagtcctggttaggtggggacagaggatttctgcttaggcccctcaggacccagggaatgccagggacattttcaagacacagacaaagtcccgtgccctgtttccaatgccaattcatctcagcaatcacaagccaaggtctgaacccttccaccaaaaactgggtgttcaaggcccttacacccttgtcccacccccagcagctcaccatggctttaaaacatgctctcttagatcaggagaaactcgggcactccctaagtccactctagttgtggacttttccccattgaccctcacctgaataagggactttggaattctgcttctctttcacaactttgcttttaggttgaaggcaaaaccaactctctactacacaggcctgataactctgtacgaggcttctctaacccctagtgtcttttttttcttcacctcacttgtggcagcttccctgaacactcatcccccatcagatgatgggagtgggaagaataaaatgcagtgaaaccctaaaaaaaaaa

SEQ ID NO: 36567 - DNA, 2052 bp, Homo sapiens
ggaaacatgatccagctgaaggactgattgcaggaaaacttggcagctccccaaccttggtggcccagggagtgtgaggctgcagcctcagaaggtgtgagcagtggccacgagaggcaggctggctgggacatgaggttggcagagggcaggcaagctggcccttggtgggcctcgtcctgagcactcggaggcactcctatgcttggaaagctcgctatgctgctgtgggtccagcaggcgctgctcgccttgctcctccccacactcctggcacagggagaagccaggaggagccgaaacaccaccaggcccgctctgctgaggctgtcggattaccttttgaccaactacaggaagggtgtgcgccccgtgagggactggaggaagccaaccaccgtatccattgacgtcattgtctatgccatcctcaacgtggatgagaagaatcaggtgctgaccacctacatctggtaccggcagtactggactgatgagtttctccagtggaaccctgaggactttgacaacatcaccaagttgtccatccccacggacagcatctgggtcccggacattctcatcaatgagttcgtggatgtggggaagtctccaaatatcccgtacgtgtatattcggcatcaaggcgaagttcagaactacaagccccttcaggtggtgactgcctgtagcctcgacatctacaacttccccttcgatgtccagaactgctcgctgaccttcaccagttggctgcacaccagtggtcatccgccggcggcccctcttctatgtggtcagcctgctactgcccagcatcttcctcatggtcatggacatcgtgggcttctacctgccccccaacagtggcgagagggtctctttcaagattacactcctcctgggctactcggtcttcctgatcatcgtttctgacacgctgccggccactgccatcggcactcctctcattggtgtctactttgtggtgtgcatggctctgctggtgataagtttggccgagaccatcttcattgtgcggctggtgcacaagcaagacctgcagcagcccgtgcctgcttggctgcgtcacctggttctggagagaatcgcctggctactttgcctgagggagcagtcaacttcccagaggcccccagccacctcccaagccaccaagactgatgactgctcagccatgggaaaccactgcagccacatgggaggaccccaggacttcgagaagagcccgagggacagatgtagccctcccccaccacctcgggaggcctcgctggcggtgtgtgggctgctgcaggagctgtcctccatccggcaattcctggaaaagcgggatgagatccgagaggtggcccgagactggctgcgcgtgggctccgtgctggacaagctgctattccacatttacctgctagcggtgctggcctacagcatcaccctggttatgctctggtccatctggcagtacgcttgagtgggtacagcccagtggaggagggggtacagtcctggttaggtggggacagaggatttctgcttaggcccctcaggacccagggaatgccagggacattttcaagacacagacaaagtcccgtgccctgtttccaatgccaattcatctcagcaatcacaagccaaggtctgaacccttccaccaaaaactgggtgttcaaggcccttacacccttgtcccacccccagcagctcaccatggctttaaaacatgctctcttagatcaggagaaactcgggcactccctaagtccactctagttgtggacttttccccattgaccctcacctgaataagggactttggaattctgcttctctttcacaactttgcttttaggttgaaggcaaaaccaactctctactacacaggcctgataactctgtacgaggcttctctaacccctagtgtcttttttttcttcacctcacttgtggcagcttccctgaacactcatcccccatcagatgatgggagtgggaagaataaaatgcagtgaaaccctaaaaaaaaaa

SEQ ID NO: 36568 - DNA, 1945 bp, Homo sapiens
ggaaacatgatccagctgaaggactgattgcaggaaaacttggcagctccccaaccttggtggcccagggagtgtgaggctgcagcctcagaaggtgtgagcagtggccacgagaggcaggctggctgggacatgaggttggcagagggcaggcaagctggcccttggtgggcctcgtcctgagcactcggaggcactcctatgcttggaaagctcgctatgctgctgtgggtccagcaggcgctgctcgccttgctcctccccacactcctggcacagggagaagccaggaggagccgaaacaccaccaggcccgctctgctgaggctgtcggattaccttttgaccaactacaggaagggtgtgcgccccgtgagggactggaggaagccaaccaccgtatccattgacgtcattgtctatgccatcctcaacgtggatgagaagaatcaggtgctgaccacctacatctggtaccggcagtactggactgatgagtttctccagtggaaccctgaggactttgacaacatcaccaagttgtccatccccacggacagcatctgggtcccggacattctcatcaatgagttcgtggatgtggggaagtctccaaatatcccgtacgtgtatattcggcatcaaggcgaagttcagaactacaagccccttcaggtggtgactgcctgtagcctcgacatctacaacttccccttcgatgtccagaactgctcgctgaccttcaccagttggctgcacaccatccaggacatcaacatctctttgtggcgcttgccagaaaaggtgaaatccgacaggagtgtcttcatgaaccagggagagtgggagttgctgggggtgctgccctactttcgggagttcagcatggaaagcagtaactactatgcagaaatgaagttctatgtggtcatccgccggcggcccctcttctatgtggtcagcctgctactgcccagcatcttcctcatggtcatggacatcgtgggcttctacctgccccccaacagtggcgagagggtctctttcaagattacactcctcctgggctactcggtcttcctgatcatcgtttctgacacgctgccggccactgccatcggcactcctctcattggtgtctactttgtggtgtgcatggctctgctggtgataagtttggccgagaccatcttcattgtgcggtgctgcaggagctgtcctccatccggcaattcctggaaaagcgggatgagatccgagaggtggcccgagactggctgcgcgtgggctccgtgctggacaagctgctattccacatttacctgctagcggtgctggcctacagcatcaccctggttatgctctggtccatctggcagtacgcttgagtgggtacagcccagtggaggagggggtacagtcctggttaggtggggacagaggatttctgcttaggcccctcaggacccagggaatgccagggacattttcaagacacagacaaagtcccgtgccctgtttccaatgccaattcatctcagcaatcacaagccaaggtctgaacccttccaccaaaaactgggtgttcaaggcccttacacccttgtcccacccccagcagctcaccatggctttaaaacatgctctcttagatcaggagaaactcgggcactccctaagtccactctagttgtggacttttccccattgaccctcacctgaataagggactttggaattctgcttctctttcacaactttgcttttaggttgaaggcaaaaccaactctctactacacaggcctgataactctgtacgaggcttctctaacccctagtgtcttttttttcttcacctcacttgtggcagcttccctgaacactcatcccccatcagatgatgggagtgggaagaataaaatgcagtgaaaccctaaaaaaaaaa

SEQ ID NO: 36569 - DNA, 1897 bp, Homo sapiens
gggactctcagttactgctgagggaattgggcgccactgacaccagcttctcccaggaagatgcccacctgttgcctgggcactgagggtgaagtctgcctgagttgcaggcgaccctcactggagatggagggggctgcctgtgaccatccctgctcctcccctagtactggactgatgagtttctccagtggaaccctgaggactttgacaacatcaccaagttgtccatccccacggacagcatctgggtcccggacattctcatcaatgagttcgtggatgtggggaagtctccaaatatcccgtacgtgtatattcggcatcaaggcgaagttcagaactacaagccccttcaggtggtgactgcctgtagcctcgacatctacaacttccccttcgatgtccagaactgctcgctgaccttcaccagttggctgcacaccatccaggacatcaacatctctttgtggcgcttgccagaaaaggtgaaatccgacaggagtgtcttcatgaaccagggagagtgggagttgctgggggtgctgccctactttcgggagttcagcatggaaagcagtaactactatgcagaaatgaagttctatgtggtcatccgccggcggcccctcttctatgtggtcagcctgctactgcccagcatcttcctcatggtcatggacatcgtgggcttctacctgccccccaacagtggcgagagggtctctttcaagattacactcctcctgggctactcggtcttcctgatcatcgtttctgacacgctgccggccactgccatcggcactcctctcattggtgtctactttgtggtgtgcatggctctgctggtgataagtttggccgagaccatcttcattgtgcggctggtgcacaagcaagacctgcagcagcccgtgcctgcttggctgcgtcacctggttctggagagaatcgcctggctactttgcctgagggagcagtcaacttcccagaggcccccagccacctcccaagccaccaagactgatgactgctcagccatgggaaaccactgcagccacatgggaggaccccaggacttcgagaagagcccgagggacagatgtagccctcccccaccacctcgggaggcctcgctggcggtgtgtgggctgctgcaggagctgtcctccatccggcaattcctggaaaagcgggatgagatccgagaggtggcccgagactggctgcgcgtgggctccgtgctggacaagctgctattccacatttacctgctagcggtgctggcctacagcatcaccctggttatgctctggtccatctggcagtacgcttgagtgggtacagcccagtggaggagggggtacagtcctggttaggtggggacagaggatttctgcttaggcccctcaggacccagggaatgccagggacattttcaagacacagacaaagtcccgtgccctgtttccaatgccaattcatctcagcaatcacaagccaaggtctgaacccttccaccaaaaactgggtgttcaaggcccttacacccttgtcccacccccagcagctcaccatggctttaaaacatgctctcttagatcaggagaaactcgggcactccctaagtccactctagttgtggacttttccccattgaccctcacctgaataagggactttggaattctgcttctctttcacaactttgcttttaggttgaaggcaaaaccaactctctactacacaggcctgataactctgtacgaggcttctctaacccctagtgtcttttttttcttcacctcacttgtggcagcttccctgaacactcatcccccatcagatgatgggagtgggaagaataaaatgcagtgaaaccctaaaaaaaaaa

SEQ ID NO: 36570 - DNA, 1990 bp, Homo sapiens
acttgctcttccaagccagatctctgctttcctgtcaatgaatgcataggtcctttctacaagccaggaggagccgaaacaccaccaggcccgctctgctgaggctgtcggattaccttttgaccaactacaggaagggtgtgcgccccgtgagggactggaggaagccaaccaccgtatccattgacgtcattgtctatgccatcctcaacgtggatgagaagaatcaggtgctgaccacctacatctggtaccggcagtactggactgatgagtttctccagtggaaccctgaggactttgacaacatcaccaagttgtccatccccacggacagcatctgggtcccggacattctcatcaatgagttcgtggatgtggggaagtctccaaatatcccgtacgtgtatattcggcatcaaggcgaagttcagaactacaagccccttcaggtggtgactgcctgtagcctcgacatctacaacttccccttcgatgtccagaactgctcgctgaccttcaccagttggctgcacaccatccaggacatcaacatctctttgtggcgcttgccagaaaaggtgaaatccgacaggagtgtcttcatgaaccagggagagtgggagttgctgggggtgctgccctactttcgggagttcagcatggaaagcagtaactactatgcagaaatgaagttctatgtggtcatccgccggcggcccctcttctatgtggtcagcctgctactgcccagcatcttcctcatggtcatggacatcgtgggcttctacctgccccccaacagtggcgagagggtctctttcaagattacactcctcctgggctactcggtcttcctgatcatcgtttctgacacgctgccggccactgccatcggcactcctctcattggtgtctactttgtggtgtgcatggctctgctggtgataagtttggccgagaccatcttcattgtgcggctggtgcacaagcaagacctgcagcagcccgtgcctgcttggctgcgtcacctggttctggagagaatcgcctggctactttgcctgagggagcagtcaacttcccagaggcccccagccacctcccaagccaccaagactgatgactgctcagccatgggaaaccactgcagccacatgggaggaccccaggacttcgagaagagcccgagggacagatgtagccctcccccaccacctcgggaggcctcgctggcggtgtgtgggctgctgcaggagctgtcctccatccggcaattcctggaaaagcgggatgagatccgagaggtggcccgagactggctgcgcgtgggctccgtgctggacaagctgctattccacatttacctgctagcggtgctggcctacagcatcaccctggttatgctctggtccatctggcagtacgcttgagtgggtacagcccagtggaggagggggtacagtcctggttaggtggggacagaggatttctgcttaggcccctcaggacccagggaatgccagggacattttcaagacacagacaaagtcccgtgccctgtttccaatgccaattcatctcagcaatcacaagccaaggtctgaacccttccaccaaaaactgggtgttcaaggcccttacacccttgtcccacccccagcagctcaccatggctttaaaacatgctctcttagatcaggagaaactcgggcactccctaagtccactctagttgtggacttttccccattgaccctcacctgaataagggactttggaattctgcttctctttcacaactttgcttttaggttgaaggcaaaaccaactctctactacacaggcctgataactctgtacgaggcttctctaacccctagtgtcttttttttcttcacctcacttgtggcagcttccctgaacactcatcccccatcagatgatgggagtgggaagaataaaatgcagtgaaaccctaaaaaaaaaa

SEQ ID NO: 36571 - DNA, 1718 bp, Homo sapiens
ggaaacatgatccagctgaaggactgattgcaggaaaacttggcagctccccaaccttggtggcccagggagtgtgaggctgcagcctcagaaggtgtgagcagtggccacgagaggcaggctggctgggacatgaggttggcagagggcaggcaagctggcccttggtgggcctcgtcctgagcactcggaggcactcctatgcttggaaagctcgctatgctgctgtgggtccagcaggcgctgctcgccttgctcctccccacactcctggcacagggagaagccaggaggagccgaaacaccaccaggcccgctctgctgaggctgtcggattaccttttgaccaactacaggaagggtgtgcgccccgtgagggactggaggaagccaaccaccgtatccattgacgtcattgtctatgccatcctcaacgtggatgagaagaatcaggtgctgaccacctacatctggtaccggcagtactggactgatgagtttctccagtggaaccctgaggactttgacaacatcaccaagttgtccatccccacggacagcatctgggtcccggacattctcatcaatgagttcgtggatgtggggaagtctccaaatatcccgtacgtgtatattcggcatcaaggcgaagttcagaactacaagccccttcaggtggtgactgcctgtagcctcgacatctacaacttccccttcgatgtccagaactgctcgctgaccttcaccagttggctgcacaccatccaggacatcaacatctctttgtggcgcttgccagaaaaggtgaaatccgacaggagtgtcttcatgaaccagggagagtgggagttgctgggggtgctgccctactttcgggagttcagcatggaaagcagtaactactatgcagaaatgaagttctatgtggtcatccgccggcggcccctcttctatgtggtcagcctgctactgcccagcatcttcctcatggtcatggacatcgtgggcttctacctgccccccaacagtggcgagagggtctctttcaagattacactcctcctgggctactcggtcttcctgatcatcgtttctgacacgctgccggccactgccatcggcactcctctcattggtaaggcccctcctggcagcagagctcagtctggtgagaaacccgccccctcccacctcctgcatgtgtctcttgcctctgccctgggctgcacaggtgtctactttgtggtgtgcatggctctgctggtgataagtttggccgagaccatcttcattgtgcggctggtgcacaagcaagacctgcagcagcccgtgcctgcttggctgcgtcacctggttctggagagaatcgcctggctactttgcctgagggagcagtcaacttcccagaggcccccagccacctcccaagccaccaagactgatgactgctcagtccactctagttgtggacttttccccattgaccctcacctgaataagggactttggaattctgcttctctttcacaactttgcttttaggttgaaggcaaaaccaactctctactacacaggcctgataactctgtacgaggcttctctaacccctagtgtcttttttttcttcacctcacttgtggcagcttccctgaacactcatcccccatcagatgatgggagtgggaagaataaaatgcagtgaaaccctaaaaaaaaaa

SEQ ID NO: 36572 - DNA, 446 bp, Homo sapiens
gaagaggtggggggactctcagttactgctgagggaattgggcgccactgacaccagcttctcccaggaagatgcccacctgttgcctgggcactgagggtgaagtctgcctgagttgcaggcgaccctcactggagatggagggggctgcctgtgaccatccctgctcctcccctagtactggactgatgagtttctccagtggaaccctgaggactttgacaacatcaccaagttgtccatccccacggacagcatctgggtcccggacattctcatcaatgagttgtgagtaccgttatccattgtgaggtggctgggtggcttaggagctggagaagcccggggacagagagacaagattgtcactgttgcatttgagatgtcccaccaggaattgcagactgtagataaagctggtgtgagtccaaattccctttgtcttc

SEQ ID NO: 36573 - DNA, 699 bp, Homo sapiens
gaaaaggcaattgtaagcattgagattacacagatgttgaaactatccagcaagaatcataaagcagctattatacaaatgccctgattttaaagcaagtatgaatgctcgaaacaaatgacaaagtggaaagtcacagcagagaaatagaaaatgtaaggaagaaccaaatggaaattttaaaactgaaaaatacaataaccagtttttaaaaattactagattcagagggaaagaccaacaactcagaaaaaatgggcaaaggatatgaagagtttacggaaaaggaaatgtagataactcttacccatataaaaatatgttcagcctcactcatattaagaaaaatcaaaattgaaattacactgagacactggcttttcacctgtcagaatggcaaaatctcaaagtgtgaatatacgctatgagaatgtggaaaattctcatagattgcttgtgggcatctagaacaatttggttgaatcactaaaatccacatgccatttggccctgcaattctacttttagaaatttatcatataggaaacctgcatatgagtgaaatgacatacgtggagtgttactcctggctgcattgttggtaatcacaaagaacactagaaaaaacttaatgtccatcaataagatgctgattaaattaattattatacgtcatacaatggaaagttagaaaaccgt

SEQ ID NO: 36574 - DNA, 376 bp, Homo sapiens
catgtggtatagtttcactatctgcccaggtggctttggctcaagtggcatggctggtgcttgtccccatcagagcctcaagtgcctatggcatgctacccgtgcccttgcctgctcatctgtaatgtccccatagtgcctatgacactttcttcttcttgggatatgcatcacctgcttgcctggtagccaattacatagatgtcatggaagccctggatgtcagccgtctaatgtccactaatactcagcaaatcctaccatggggctgtgtgtgtgtctgttctcaaagaaatggcttctttgtacatggtggctaccattatctaggctttgagctgataaaaattgttgaacctgatcatatgacaaagtt

SEQ ID NO: 36575 - DNA, 272 bp, Homo sapiens
actctgccaacataaagtgatttagaaatgttaatatattttaccaagccagagtttctagcatatgtattttaagccgtcataaaacatatacctgtcatgttaaggaatgtgcccacggcaagtatcaaagacctgctgtgggaggctgaggagtgtgttttgctatgttgcagggttataacctgacaacctccatgaggcatgagtactggcagggagtggtttataaatattgaagctattttatttattactttaagaattcctac

SEQ ID NO: 36576 - DNA, 1654 bp, Homo sapiens
agatggtactacgtgtgcatgtgccaccatgcctggctaatttatttttaagatggagtcttgctatgttgcccaggctggttttgagctcctggcctcaagcaatcttcctgagacaggaatcccaaagtgctgggattacaggtgtgagccactgtgcccagccaaatattagaacttttaaattcatttagtatgtaagcttactgccaagcatgaaagaatcactttgaaggccagtaatgttttaaaggtctggaagattctcttgagggctaggaagcattatgtgctaggttcttgaaccaggagaaaaggggtatcactaagaagaagggaaggaatcctggtatgcaaaatagcttgggcgctatccttgcacatttgacaagtttagtgaagtactattgaactgttcagtaaagtatctgttgcctatagataaaatgtcttttgtagatacttatatatctacctacctatagatatctatatatctgtatctatatatcccttaaagctaagctaatttccttaaccttttctctgttgatatttgtttggtagcctttatctgattctagttaataactcgtaccctgtcatttttttaaaaataccctttgtttttgtaatgtgttctttcattcttcttcccaattcagttttggtacgttcctgttacgtaaatctaatctggtgagcagagactttcttaggattatgccacttggtgaggcaatcacagggtcttagccctgaaggcgcccatactgactttatcagtttattctagggagatcaggtttggggcactaacttaatactaacaaactcctaagattaatttaattttatttatttgtttgagacggagtcacccagggtggagtgcagtggcgtgatcttggctcactgcaacctctgcctccctggttcaaacgattcttgtgcctcagcctcctgaggctgggactacaggcgcatgtcaccacgtctggcttatttttgtagttttagtagagacaaggtttcaccatgttggccgggctggtcttgaactacctcaggtcccaccttggcctcctaaaatgctagaattacacagacgggagctaccatgcctagccaaaactcctaagatttacttacttacttactttatttatttatttgagacggagtctcgctctgtcccctaggctggaatgcagtggtgtaatctcagctcactgcaacatctgcctcctgggttcacctgtctctgcctctcagatagctgggattgcaggtgcatgccaccatgcccgactaatttttgtatttttagtagagatggggtttcaccatgttggccaggctggtctcgcactcctgacctcaagtgatccacccgcctcggccccccagaatgctgggattacaggtgtgagccactgtgcccggccctaagattaattttcaaacaatgtgcatcagtatgttagaaatacctagtgttagccgggtgtggttgtgtgtgcctatagtcccaactactctggaggctgacttgggaggattgcttgaggccaggagttcaggggcgcagtgaactatgattacaccactgccccaacctgggtgacagtgggagaccctgtcttaaaaaaaa

SEQ ID NO: 36577 - DNA, 609 bp, Homo sapiens
aaacaccatgtattgtatgattccattgatataaaataaccacagtaggcaagtctgcagagacagaaagtagattagtggttgcctagggctggtaggaaggcaggaaagtgttgcagggtgacaggtgtgagggcaggacagtaacagggggaggaatggaaatgaccactaatgggcttacagtttctttttggtgtgatgaaaatgttctaaaatttattttgctgaaggttgcacaactctgtgaatatactaaaagctattcaattgtacactttaaataggtgacttgtctggtatgtgaagtatatctcaacaaagatgttattttaagaattaacaaggatgggcatgatggcccatacctataatcccagcagtttgggaggccgaggtgggagaatcacttgatcccaggagtttgagaccagcctgggcaacatagcaagattttgtctccacataaaagaaaaatttagccagttgtagtggtacacacctgcagtcccagctactcaggaggcttatatggaaggatcacatgaacccaggaggttgaggctccagtgagccatgattgtgccaccgcacttcagcttgggtgac

SEQ ID NO: 36578 - DNA, 2628 bp, Homo sapiens
gcagtcagttggtctgggcactgcagcaggctcggctctgtcccagcacttgtctgggagaaaagtggtgttactcacccagggagagtctctctttctaccttccttctttctcgatctccttgtgtgcttttgtgtttctttatttcttttccttttttttcttttttttttttttgttacttaattatattcctaatcctggatgaagttgctggattctgcagcacaagtcttcatgaacaagcagcaccgctcagagatttcacggcattcaaaggtcacagaactgccactatggttaaatgtcttgtttaatggttgagaggtgtggcgaaatcttgtttgagaaccccgatcagaatgccaaatgtgtttgcatgctgggagatatacgactaaggggtcagacgggggttcgtgctgaacgccgtggctcctacccattcattgacttccgcctacttaacagtacaacatactcaggggagattggcaccaagaaaaaggtgaaaagactattaagctttcaaagatacttccatgcatcaaggctgcttcgtggaattataccacaagcccctctgcacctgctggatgaagactaccttggacaagcaaggcatatgctctccaaagtgggaatgtgggattttgacattttcttgtttgatcgcttgacaaatggaaacagcctggtaacactgttgtgccacctcttcaatacccatggactcattcaccatttcaagttagatatggtgaccttacaccgatttttagtcatggttcaagaagattaccacagccaaaacccgtatcacaatgctgttcacgcagccgacgtcacccaggccatgcactgctacctgaaagagccaaagcttgccagcttcctcacgcctctggacatcatgcttggactgctggctgcagcagcacacgatgtggaccacccaggggtgaaccagccatttttgataaaaactaaccaccatcttgcaaacctatatcagaatatgtctgtgctggagaatcatcactggcgatctacaattggcatgcttcgagaatcaaggcttcttgctcatttgccaaaggaaatgacacaggatattgaacagcagctgggctccttgatcttggcaacagacatcaacaggcagaatgaatttttgaccagattgaaagctcacctccacaataaagacttaagactggaggatgcacaggacaggcactttatgcttcagatcgccttgaagtgtgctgacatttgcaatccttgtagaatctgggagatgagcaagcagtggagtgaaagggtctgtgaagaattctacaggcaaggtgaacttgaacagaaatttgaactggaaatcagtcctctttgtaatcaacagaaagattccatccctagtatacaaattggtttcatgagctacatcgtggagccgctcttccgggaatgggcccatttcacgggtaacagcaccctgtcggagaacatgctgggccacctcgcacacaacaaggcccagtggaagagcctgttgcccaggcagcacagaagcaggggcagcagtggcagcgggcctgaccacgaccacgcaggccaagggactgagagcgaggagcaggaaggcgacagcccctaggggccggcccaacttagacgcggctctcctccggcagggcccccagagggcagaagcagcgtggaggggccctcacgcagcagcccagccactttctgagtgttgtcctggggctctttggaacgccatcttcctcccacttacctgcctcccctccttttcgcaaatgtacagaagccatttgtcacctcagcattcgctgccgaaatgagcaactccattcagtaacgtgggagctgatcccacgggcaggctctccctgctccaggagaagactaggaggaagaatgaggtgctcctgccgtgtccgccttgttccgggtcgcactggaacaggcagcaattcctaagtccggagcgtttgagcgtttgctatctgactgctgatctgcgtgacagaaacaccagcatatttgcaacgccaaggatattggtcttaagtgcaagagcacaaatgagagtgtgagagaaagtaccttctattttaataataatattattataaaaataataaatctttttaacttttatattttatgcactagacaatggatctgcaactttggactaaggtcattcaatgtacccaaacttgaacagggggttcattgttttgctattgactttattatgccactttggggcagagacttggcatcttcgcagtttaagaaaccacgtttcctatccaatccgaagggaaggtgctgtacagttcattcctttgcaccattagccaatctgtcttttatggattctgtgacatgtttatattcacccatgtacattttctgtaaataccaaacgctactgattcccatgccaaaatacatgagtattatgggattgctacctgtataaacaatggcactgtgaaaatactgttagttttaatacaagagaatgcatttgtaaatatggtatagagtttattaatatactattgtttgcagataaaggccttaacttt

SEQ ID NO: 36579 - DNA, 1431 bp, Homo sapiens
cagttctcagcttggtgaggctccaaaagagaatatgtcagatgtattcctacttccaaacctgtcttactttggtttgatggtacacatagggcttttgaacagtctatttttaatgtatatgaggtcaaatcaaggaaggcaattgctggggacaagaaaagtagaggtaggaaagaagacactattttagctaatggggtttcttgggactaaaaaatggctttgtttaaattataattatataataatttaaataaatgagattggaggtattcttagtagttctgagttgatagtttacattacaattaggtcttgaagaagagctcacagagaaaaaactaccaaatatccaatgggtaagcccatgatgtagccactagtacaataaaaatctgaagtaaaatgaggcataaacttgatgcagctgcctccctcattcaactggggagttcttgagttcctcatttgttggtaaaaagaaaaagaatgtgaaaatgtctctttttttcttggctattagtggctgtcttgcaatatttcaataggagtccaattactagttaaaacactggcggggtgcggtggctcacgcctgtaatcctagcactttgggaggccaagttgggcagatcacaagttcaagagatcgagaccattctggccaacatggtgaaaccccgtctctactaaaaatacaaaaattagctgggcatggcagtgcgtgcctgcaatcccagctactcaggaagctgaggcaggagaatcgcttgaacctgggaggtggaagttgtagtgaactgagatcgcaccactgcactccagcctggcaacagagctagaatccgtctcaaacaaacaaacaaaaaatcccacagctattggatcatccacagattttttctttacaatcttgttctccttgtccatggaccatcaatagttgacttgccaggtttaattctttcattgcttgagaagaaaggaatcaaaggactgtgtgtagtaagctgacggtaaagttaagattaaattaagacagagagagaatacatatcactgccaggcctgataggaaaaatctgctcttccttttaataacagtgatgaattgtcaggaccttatttaggaaaccctgacctacccataactccctgctaggctaagtagaaaccaggttatttctccctgcttatggctccccgcaaagggacttgcagcgtgtcctgcaactttgtcttcagatagtgcttcctacaaaactaggtcttgttttgtaatcttttctcgtgttgaatcagatctgcttacttatttaggtttggttatgagcttgtatctcactgtatttctcatgctttgttcttttaaacaaatcctttaaactgtgtcattttgtatacacatgtgaggtttgaaaaaaaaaa

SEQ ID NO: 36580 - DNA, 898 bp, Homo sapiens
  misc_feature (1)..(1): n is a, c, g, or t
nttttaacgcctcaaaagttttcgtagcccagggtaaaatcacaggtgtaaactcagatattttttgtccaaatggcccttcccagttatatgtttatgagacaggggttcgacacacaagtcttgtacttaagcgcaaggggctttctaaattaccaccggttcaggcatatgctctccaaagtgggaatgtgggattttgacattttcttgtttgatcgcttgacaaatggaaacagcctggtaacactgttgtgccacctcttcaatacccatggactcattcaccatttcaagttagatatggtgaccttacaccgatttttagtcatggttcaagaagattaccacagccaaaacccgtatcacaatgctgttcacgcagccgacgtcacccaggccatgcactgctacctgaaagagccaaagcttgccagcttcctcacgcctctggacatcatgcttggactgctggctgcagcagcacacgatgtggaccacccaggggtgaaccagccatttttgataaaaactaaccaccatcttgcaaacctatatcaggtaagggagcccaacctggagccagccacagtatggtcaatcgccttaggcccggtgctcaagcctgaatcttgcccatggagaaagccttgttttagggtcctagaagttcaaagacgaatgaaacacaatctctgccctcaaaaatttgttcaaactcagatgctcaaaatgagcaaaatccaagcaaacttaatcccagtttgaaagaggtttgaggaattagctcatgtcgatacaattgttttttaaaatctctaaagagtaaatacttgtgctgttctttgtatccaaagaccttactagaataaagtgagccgctgtttttcttttccca

SEQ ID NO: 36581 - DNA, 2773 bp, Homo sapiens
gcagtcagttggtctgggcactgcagcaggctcggctctgtcccagcacttgtctgggagaaaagtggtgttactcacccagggagagtctctctttctaccttccttctttctcgatctccttgtgtgcttttgtgtttctttatttcttttccttttttttcttttttttttttttgttacttaattatattcctaatcctggatgaagttgctggattctgcagcacaagtcttcatgaacaagcagcaccgctcagagatttcacggcattcaaaggtcacagaactgccactatggttaaatgtcttgtttaatggttgagaggtgtggcgaaatcttgtttgagaaccccgatcagaatgccaaatgtgtttgcatgctgggagatatacgactaaggggtcagacgggggttcgtgctgaacgccgtggctcctacccattcattgacttccgcctacttaacagtacaacatactcaggggagattggcaccaagaaaaaggtgaaaagactattaagctttcaaagatacttccatgcatcaaggctgcttcgtggaattataccacaagcccctctgcacctgctggatgaagactaccttggacaagcaaggcatatgctctccaaagtgggaatgtgggattttgacattttcttgtttgatcgcttgacaaatggaaacagcctggtaacactgttgtgccacctcttcaatacccatggactcattcaccatttcaagttagatatggtgaccttacaccgatttttagtcatggttcaagaagattaccacagccaaaacccgtatcacaatgctgttcacgcagccgacgtcacccaggccatgcactgctacctgaaagagccaaagcttgccagcttcctcacgcctctggacatcatgcttggactgctggctgcagcagcacacgatgtggaccacccaggggtgaaccagccatttttgataaaaactaaccaccatcttgcaaacctatatcagaatatgtctgtgctggagaatcatcactggcgatctacaattggcatgcttcgagaatcaaggcttcttgctcatttgccaaaggaaatgacacaggatattgaacagcagctgggctccttgatcttggcaacagacatcaacaggcagaatgaatttttgaccagattgaaagctcacctccacaataaagacttaagactggaggatgcacaggacaggcactttatgcttcagatcgccttgaagtgtgctgacatttgcaatccttgtagaatctgggagatgagcaagcagtggagtgaaagggtctgtgaagaattctacaggcaaggtgaacttgaacagaaatttgaactggaaatcagtcctctttgtaatcaacagaaagattccatccctagtatacaaattggtttcatgagctacatcgtggagccgctcttccgggaatgggcccatttcacgggtaacagcaccctgtcggagaacatgctgggccacctcgcacacaacaaggcccagtggaagagcctgttgcccaggcagcacagaagcaggggcagcagtggcagcgggcctgaccacgaccacgcaggccaagggactgagagcgaggagcaggaaggcgacagcccctaggggccggcccaacttagacgcggctctcctccggcagggcccccagagggcagaagcagcgtggaggggccctcacgcagcagcccagccactttctgagtgttgtcctggggctctttggaacgccatcttcctcccacttacctgcctcccctccttttcgcaaatgtacagaagccatttgtcacctcagcattcgctgccgaaatgagcaactccattcagtaacgtgggagctgatcccacgggcaggctctccctgctccaggagaagactaggaggaagaatgaggtgctcctgccgtgtccgccttgttccgggtcgcactggaacaggcagcaattcctaagtccggagcgtttgagcgtttgctatctgactgctgatctgcgtgacagaaacaccagcatatttgcaacgccaaggatattggtcttaagtgcaagagcacaaatgagagtgtgagagaaagtaccttctattttaataataatattattataaaaataataaatctttttaacttttatattttatgcactagacaatggatctgcaactttggactaaggtcattcaatgtacccaaacttgaacagggggttcattgttttgctattgactttattatgccactttggggcagagacttggcatcttcgcagtttaagaaaccacgtttcctatccaatccgaagggaaggtgctgtacagttcattcctttgcaccattagccaatctgtcttttatggattctgtgacatgtttatattcacccatgtacattttctgtaaataccaaacgctactgattcccatgccaaaatacatgagtattatgggattgctacctgtataaacaatggcactgtgaaaatactgttagttttaatacaagagaatgcatttgtaaatatggtatagagtttattaatatactattgtttgcagataaaggccttaactttaaacatctttcatcttctgaaagctgcccaacttaaatcctcatagatgtctttctcaactgccttcccatgttcatctgtatgttttccagctaaggtcacaaaccaaaactgaataaagtctttgaggaaacattttggaaac

SEQ ID NO: 36582 - DNA, 1290 bp, Homo sapiens
  misc_feature (1)..(1): n is a, c, g, or t
nttttaacgcctcaaaagttttcgtagcccagggtaaaatcacaggtgtaaactcagatattttttgtccaaatggcccttcccagttatatgtttatgagacaggggttcgacacacaagtcttgtacttaagcgcaaggggctttctaaattaccaccggttcaggcatatgctctccaaagtgggaatgtgggattttgacattttcttgtttgatcgcttgacaaatggaaacagcctggtaacactgttgtgccacctcttcaatacccatggactcattcaccatttcaagttagatatggtgaccttacaccgatttttagtcatggttcaagaagattaccacagccaaaacccgtatcacaatgctgttcacgcagccgacgtcacccaggccatgcactgctacctgaaagagccaaagcttgccagcttcctcacgcctctggacatcatgcttggactgctggctgcagcagcacacgatgtggaccacccaggggtgaaccagccatttttgataaaaactaaccaccatcttgcaaacctatatcagaatatgtctgtgctggagaatcatcactggcgatctacaattggcatgcttcgagaatcaaggagaatcgcttgaacctgggaggtggaagttgtagtgaactgagatcgcaccactgcactccagcctggcaacagagctagaatccgtctcaaacaaacaaacaaaaaatcccacagctattggatcatccacagattttttctttacaatcttgttctccttgtccatggaccatcaatagttgacttgccaggtttaattctttcattgcttgagaagaaaggaatcaaaggactgtgtgtagtaagctgacggtaaagttaagattaaattaagacagagagagaatacatatcactgccaggcctgataggaaaaatctgctcttccttttaataacagtgatgaattgtcaggaccttatttaggaaaccctgacctacccataactccctgctaggctaagtagaaaccaggttatttctccctgcttatggctccccgcaaagggacttgcagcgtgtcctgcaactttgtcttcagatagtgcttcctacaaaactaggtcttgttttgtaatcttttctcgtgttgaatcagatctgcttacttatttaggtttggttatgagcttgtatctcactgtatttctcatgctttgttcttttaaacaaatcctttaaactgtgtcattttgtatacacatgtgaggtttgaaaaaaaaaa

SEQ ID NO: 36583 - DNA, 430 bp, Homo sapiens
gtactttacaaacaaatacctccaaacactttgggattgaggctttttacagatggagagcagggcccagggaagaagcgatttgcccaaggtcacggctgaatcagaggcacagctggaaacactactcatgaatactggctcctggagtcggagctcatcaacaccagcctgccacctcccacacacaccaaaacaaaaccccaaagccggaaaacagcagcaggaagaaaagtcacctgccctccacagcccagggtgtccacactgacaatttgctgtacacattggaagctgggtgtgcaggtcagatatctctacagattgccattgctggacccaggagaatcagtcattaatgaaagctgaaagtgcactctgcatatttgggcagatcagctttccatcctgaacccccaggtgtatatgt

SEQ ID NO: 36584 - DNA, 355 bp, Homo sapiens
agctaaacaattttatgattctttgaccctaattcttagtctcaatgtcaataaagtggttcagatgagagggaagagttcaaacataagcaaacaagaagcctacgcatgccattttgcagaagcagatatttcagaaggaaaaggtttagccatttggttatttcttctggtccccccggggtggaggaaaaggatagggtagtttaatgacatggaccaatgaatggctgagaccatcccatctgtatttgttgactaagtgatgtggtgagcaagtggatgctacagatgaggatacatagcattatcctgccctcagagcgctttcaggcaagttagagatgcattcatg

SEQ ID NO: 36585 - DNA, 365 bp, Homo sapiens
ccaatttctgagctcagtgatacaacctgaagccttactttgtggcagaagcaacaagaccaacatctctgattttcagctctttggagcagcccccacctccttctaagggtggacttagccaggattccctaccagtccctcctccctactcttttttcccctattggccaatggtcccctactcagctaactggcagttcttccctctgtggagttgggttggtccctgatactggtctttgcaccaggaatttcagattgtcttggatgtcaatagttttcagtgccataaagaaaacaagctaaaagaatggagtttgtgttttcagtaagcaagaatcctcttaaagctgggcatggta

SEQ ID NO: 36586 - DNA, 457 bp, Homo sapiens
gcccagacgaggaggggcttaggcgtccacatccctggcttcgaaggagccagacgtttggatataatggaagagcgtgtcaggagtggcttccgttcctgtctccttcagcatcctgatggcgtacactgtggctctggctaactcctacggacgcctcatctctgagctcaaacgtcagagagagacggaggcgcagaataaagtcttcctggcacggcgcgctgtggcgctgacctccaccaaaccggctctttgacccccgcagcccacgtcccgctttcagaccccaggcccattgtaagcctaggtcacaacatctgtaaactaggagaactggagaagactccacgcccttccagctttggtatctggagatttccagggcccctcgccgccacgtccctgactctcgggtgatcttccttgtatcaataaatacagccgaggttgctga

SEQ ID NO: 36587 - DNA, 1422 bp, Homo sapiens
gtccacgtgcggctgcgccagcgcatcatcttgtacgaattaaaggtggagctggaggagacagtggtgcggcgccaggctgcggtgcggacgctgggccagcaagccagggtttggttggtgcgggtgctgctcaacctgctggtggtcgcgctcctgggggcagccttctatggcgtctactgggctacggggtgcaccgtggagctgcaggagatgccccttgtccaggagttgccactgctgaagcttcttggggtgaattaccttccgtccatcttcatcgctggggtcaattttgtgctgccgcccgtgttcaagctcattgctccactggagggctacactcggagtcgccagatcgtttttatcctgctcaggaccgtgtttcttcgcctcgcctccctggtggtcctgctcttctctctctggaatcagatcacttgtgggggcgactccgaggctgaggactgcaaaacctgtggctacaattacaaacaacttccgtgctgggagactgtcctgggccaggaaatgtacaaacttctgctctttgatctgctgactgtcttggcagtcgcgctgctcatccagtttcctagaaagctcctctgtggcctctgtcctggggcgctgggtcgtctggcggggacccaagagttccaggtgcccgacgaggtgctggggctcatctacgcgcagacggtggtctgggtggggagttttttctgccctttactgcccctgcttaacacggtcaagttcctgctgcttttctacctgaagaagcttaccctcttctccacctgctccccggctgcccgcaccttccgggcctccgcggcgaatttctttttccccttggtccttctcctgggtctggccatctccagcgttcccctgctttacagcatcttcctgatcccgccttctaagctgtgtggtccattccgggggcagtcgtccatctgggcccagatccctgagtctatttccagcctccctgagaccacccagaatttcctcttcttcctggggacccaggcttttgctgtgccccttctgctgatctccagcatcctgatggcgtacactgtggctctggctaactcctacggacgcctcatctctgagctcaaacgtcagagagagacggaggcgcagaataaagtcttcctggcacggcgcgctgtggcgctgacctccaccaaaccggctctttgacccccgcagcccacgtcccgctttcagaccccaggcccattgtaagcctaggtcacaacatctgtaaactaggagaactggagaagactccacgcccttccagctttggtatctggagatttccagggcccctcgccgccacgtccctgactctcgggtgatcttccttgtatcaataaatacagccgaggttgctga

SEQ ID NO: 36588 - DNA, 1487 bp, Homo sapiens
gtccacgtgcggctgcgccagcgcatcatcttgtacgaattaaaggtggagctggaggagacagtggtgcggcgccaggctgcggtgcggacgctgggccagcaagccagggtttggttggtgcgggtgctgctcaacctgctggtggtcgcgctcctgggggcagccttctatggcgtctactgggctacggggtgcaccgtggagctgcaggagatgccccttgtccaggagttgccactgctgaagcttcttggggtgaattaccttccgtccatcttcatcgctggggtcaattttgtgctgccgcccgtgttcaagctcattgctccactggagggctacactcggagtcgccagatcgtttttatcctgctcaggaccgtgtttcttcgcctcgcctccctggtggtcctgctcttctctctctggaatcagatcacttgtgggggcgactccgaggctgaggactgcaaaacctgtggctacaattacaaacaacttccgtgctgggagactgtcctgggccaggaaatgtacaaacttctgctctttgatctgctgactgtcttggcagtcgcgctgctcatccagtttcctagaaagctcctctgtggcctctgtcctggggcgctgggtcgtctggcggggacccaagagttccaggtgcccgacgaggtgctggggctcatctacgcgcagacggtggtctgggtggggagttttttctgccctttactgcccctgcttaacacggtcaagttcctgctgcttttctacctgaagaagcttaccctcttctccacctgctccccggctgcccgcaccttccgggcctccgcggcgaatttctttttccccttggtccttctcctgggtctggccatctccagcgttcccctgctttacagcatcttcctgatcccgccttctaagctgtgtggtccattccgggggcagtcgtccatctgggcccagatccctgagtctatttccagcctccctgagaccacccagaatttcctcttcttcctggggacccaggcttttgctgtgccccttctgctgatctccaggagccagacgtttggatataatggaagagcgtgtcaggagtggcttccgttcctgtctccttcagcatcctgatggcgtacactgtggctctggctaactcctacggacgcctcatctctgagctcaaacgtcagagagagacggaggcgcagaataaagtcttcctggcacggcgcgctgtggcgctgacctccaccaaaccggctctttgacccccgcagcccacgtcccgctttcagaccccaggcccattgtaagcctaggtcacaacatctgtaaactaggagaactggagaagactccacgcccttccagctttggtatctggagatttccagggcccctcgccgccacgtccctgactctcgggtgatcttccttgtatcaataaatacagccgaggttgctga

SEQ ID NO: 36589 - DNA, 456 bp, Homo sapiens
gaaggaaagatggagctgggtgggtccagactcttggtttgggcggagaggggagcttggggtgctggaacactctcccaagggtatgaaagtttgaaaaacgaggacccccagagaaagtattgacagggtctcataggcttgcgatgtggagactcggacgcgtgggcctccaggtgcccgggtcccgagttctttctgatatatttcttccttcttcagtgctgggagactgtcctgggccaggaaatgtacaaacttctgctctttgatctgctgactgtcttggcagtcgcgctgctcatccagtttcctagaaagtgagagccccgccccttgctgtggccccgcccctctaggacgaggccgtgccccatcgcgctgttcttttcaccgcgcacctttttaccattcccgcctctgcctgctccctttgcttgccctaggtccgcagat

SEQ ID NO: 36590 - DNA, 1948 bp, Homo sapiens
gtccacgtgcggctgcgccagcgcatcatcttgtacgaattaaaggtggagctggaggagacagtggtgcggcgccaggctgcggtgcggacgctgggccagcaagccagggtttggttggtgcgggtgctgctcaacctgctggtggtcgcgctcctgggggcagccttctatggcgtctactgggctacggggtgcaccgtggagctgcaggagatgccccttgtccaggagttgccactgctgaagcttcttggggtgaattaccttccgtccatcttcatcgctggggtcaattttgtgctgccgcccgtgttcaagctcattgctccactggagggctacactcggagtcgccagatcgtttttatcctgctcaggaccgtgtttcttcgcctcgcctccctggtggtcctgctcttctctctctggaatcagatcacttgtgggggcgactccgaggctgaggactgcaaaacctgtggctacaattacaaacaacttccgtgctgggagactgtcctgggccaggaaatgtacaaacttctgctctttgatctgctgactgtcttggcagtcgcgctgctcatccagtttcctagaaagctcctctgtggcctctgtcctggggcgctgggtcgtctggcggggacccaagagttccaggtgcccgacgaggtgctggggctcatctacgcgcagacggtggtctgggtggggagttttttctgccctttactgcccctgcttaacacggtcaagttcctgctgcttttctacctgaagaagcttaccctcttctccacctgctccccggctgcccgcaccttccgggcctccgcggcgaatttctttttccccttggtccttctcctgggtctggccatctccagcgttcccctgctttacagcatcttcctgatcccgccttctaagctgtgtggtccattccgggggcagtcgtccatctgggcccagatccctgagtctatttccagcctccctgagaccacccagaatttcctcttcttcctggggacccaggcttttgctgtgccccttctgctgatctccagcatcctgatggcgtacactgtggctctggctaactcctacggacgcctcatctctgagctcaaacgtcagagagagacggaggcgcagaataaagtcttcctggcacggcgcgctgtggcgctgacctccaccaaaccggctctttgacccccgcagcccacgtcccgctttcagaccccaggcccattgtaagcctaggtcacaacatctgtaaactaggagaactggagaagactccacgcccttccagctttggtatctggagatttccagggcccctcgccgccacgtccctgactctcgggtgatcttccttgtatcaataaatacagccgaggttgctgaaaaaaaaaaaaaaaaaaaaaaaaaaaaaaaaaaaagaaaaaaaaacaaaaaaacaacgaaaaaaagaaacaaccgaagcagaacaagagacgcagaaccaacagaaaaagacgaacagggggtcagaggaaacaaaacaggcgcgagaagacaacagcgacacagcgctgaccgcaccgacgagacacaccacggggggggaaaacaggcagcaggcgaaggcaaaaaaccagaggggagcataagaaaaagacgaacaaaagatgcaacagcggcacggcagagtacccagccgcccccgtgcgtccgcccacagggagggtaatagacaaggcctcgtgcgaacaacacggacacagcggagggagatgcatcacgagccaagcagcggagacagaaacacacagccgagacgggggagcaataaagggggggggaccatattcgagaaacaacgcaccggacaatccggggcacccccatgggtggggcgagcccacaaggagtgagcgacccggaagccctg

SEQ ID NO: 36591 - DNA, 1442 bp, Homo sapiens
gtccacgtgcggctgcgccagcgcatcatcttgtacgaattaaaggtggagctggaggagacagtggtgcggcgccaggctgcggtgcggacgctgggccagcaagccagggtttggttggtgcgggtgctgctcaacctgctggtggtcgcgctcctgggggcagccttctatggcgtctactgggctacggggtgcaccgtggagctgcaggagatgccccttgtccaggagttgccactgctgaagcttcttggggtgaattaccttccgtccatcttcatcgctggggtcaattttgtgctgccgcccgtgttcaagctcattgctccactggagggctacactcggagtcgccagatcgtttttatcctgctcaggaccgtgtttcttcgcctcgcctccctggtggtcctgctcttctctctctggaatcagatcacttgtgggggcgactccgaggctgaggactgcaaaacctgtggctacaattacaaacaacttccgtgctgggagactgtcctgggccaggaaatgtacaaacttctgctctttgatctgctgactgtcttggcagtcgcgctgctcatccagtttcctagaaagctcctctgtggcctctgtcctggggcgctgggtcgtctggcggggacccaagagttccaggtgcccgacgaggtgctggggctcatctacgcgcagacggtggtctgggtggggagttttttctgccctttactgcccctgcttaacacggtcaagttcctgctgcttttctacctgaagaagcttaccctcttctccacctgctccccggctgcccgcaccttccgggcctccgcggcgaatttctttttccccttggtccttctcctgggtctggccatctccagcgttcccctgctttacagcatcttcctgatcccgccttctaagctgtgtggtccattccgggggcagtcgtccatctgggcccagatccctgagtctatttccagcctccctgagaccacccagaatttcctcttcttcctggggacccaggcttttgctgtgccccttctgctgatctccagcatcctgatggcgtacactgtggctctggctaactcctacggacgcctcatctctgagctcaaacgtcagagagagacggaggcgcagaataaagtcttcctggcacggcgcgctgtggcgctgacctccaccaaaccggctctttgacccccgcagcccacgtcccgctttcagaccccaggcccattgtaagcctaggtcacaacatctgtaaactaggagaactggagaagactccacgcccttccagctttggtatctggagatttccagggcccctcgccgccacgtccctgactctcgggtgatcttccttgtatcaataaatacagccgaggttgctgagcgcgctttgaaaaaaacgt

SEQ ID NO: 36592 - DNA, 343 bp, Homo sapiens
gctcaacctgctggtggtcgcgctcctgggggcagccttctatggcgtctactgggctacggggtgcaccgtggagctgcaggtgcggacggtcttggaagaggaagccagggggtcctggaacctacatttccaacggtggagggaggggacggaagtttgggatgccagagatcttagagaggaagtatgggagagggtatgttcggaccctggacttagggattttaaaggaaaaagagaggctgggcgcggtggcttacacctgtaatcccagcactttgggaggctgaggcgggcggatcacgatgtcaggagttccagaccagcctgaccaacatgg

SEQ ID NO: 36593 - DNA, 812 bp, Homo sapiens
tcttagaccttgcttcactcaacccaggagatttatgatcctgagttgttcagtgacaaaaaataccatttatcttgaacaaaatggggcactgactgttgaatttgacctgagctttgtaatcctggaaaaaggttaaggttaataaatccccttccctggctgggtggggtggctcacatctgtaatcccagcactttgggaggctgaggctagtggatcacctgatatcaggagttggagaccagcctgaccaacatggtgaaaccctgcctctactaaaaatacaaaaactagcagggtgtggtggcacatgcctgtggccccaggtacccaggaggctgaagcacgaggatcggttgaacctgggaggcggaggttgtggtgagccaagatcgcgccactgtactccagcctgggcaacagagtgagactctgtctcaaaaaaaagaaaaaaaagaaattcccctaccctttgtgttccggaaatgggcttattgcaaagaaccacacttccccctaggatttagataagattcacagatgtccctcttgttcacctatgccaaggccagaccctccaggttcccattgtctgcctcataaagactagttgaattgcttatgtccatggaatcaaaactgtaacagagtgctagttaatccaactttgattaagtttctccccttcccccaggctcctaaattttggctgcccctcagtctaaaagtccttccctaaatgcctctcccaaaaataggctcacctcaggataaaacattgtctgatctgctaaccagtcatgctaccc

SEQ ID NO: 36594 - DNA, 297 bp, Homo sapiens
tcttcttataaatcctccccatagggccattgcatgtgctgatctcactgcccagtacattcttgaccctgtcctctcccccttcttctagttaaattagctcatgtccctttctcagaaaagcccccttgacctttatgattcatcagagcttatgatttttttactgaaccctgaaaatctcctccccacaactctcaatgcaactatacattcattgacatgattacctgactgatgtttctcctccattagactgaatgcttcaataaacctatcaaaggaccaagagctttg

SEQ ID NO: 36595 - DNA, 532 bp, Homo sapiens
ctcccaaagtgctgggattacaggcatgagccaccgcactcggccaaagcacacctcttaaaaatgtttcaaacgtgttccttcctctcttggaccacatctgtagttcaggcttcagcatccctcccctagacaacttcacttccttcataagtggtcttccaacttgtccctcttaactccatcctccacagggtagccagcacgatctttccaaaaagcaaatctaaaactttcaatagctcctactgcccagagacacctagggtctgtgtggacactagttcattcgtcatctggtttcactttcatggctgagctaaatgtttcactaggtggtgatttgttcttggcaacaagatgatcttttgcaaatgagagtctcactgaccttgcagaagtgaaagtttactatacctttataaacagccttggctaatgtactagcatgactgctaaaagagcagtgactggaattttcatagtaaacaatgcagcatctcctaccctaatttccccagcaccaggggcc

SEQ ID NO: 36596 - DNA, 329 bp, Homo sapiens
ctgacattttatctggccaattctgtgttgttgggggctgtcctgtgcattgttggatgtttagcagcgtcactggcttctacctactagatgctgggagctcaagttgtgacaatcaaaaatgtctccagacattgctgagttgacccagttgagaacatgcaagtcattctctgagcgtgtaattgccttgtttttcagtgaaggccttggatagagtgaaaggcctcctgaccctgctgatagggagacaaactgccggcaaatgggagcctgggggatgggcagaggggtctggctacaggcacaggcattccctgagccttgtt

SEQ ID NO: 36597 - DNA, 373 bp, Homo sapiens
aaaaattttctacatacttttcttaccttgagttaaatgccctgcatatttaatcaggaaagtcctaaaagaatgtatgcatcctagaaattgctttcctaagtctcatttaaaattgacattgagttaatatattctctgttgagttgtagtaaatttgggcatttaggatgagcctattaaataggcctgggtagagggtaagctatggaatagaagtggggatataggatttatctaataaattttaactgaaagaatatttaagagttagataaaagggtgggcatggtggctcatgcctataatgccagcgctttgggaggccaagcccggtggatcacctgagatcaggagttcaaaaccagcctgg

SEQ ID NO: 36598 - DNA, 90 bp, Homo sapiens
ctttgacacaagtcaatacaagtctattccagcaccagacagtgaaatgcagacatcagcacatagttccatagtcaaggagactaagcg

SEQ ID NO: 36599 - DNA, 352 bp, Homo sapiens
gcaggcacccccacctagatgctgctgtggggcccacacagagtttgctcctgccggtggccaaaagcactcactttggctcctgcactgattcacctgcatgcttcctcccacaagcaggggactgcagcaggtcccagtgagtgaagtttgatcctaccgtgctgcagtgccgattccagcacagtgcactccagttcctgcctcatttgcttgcatgctcgctcctgcaaggagttgagagtggcaggctgaataaacgaggcacccgtcacaagtcccacaaaggggtcagggaaacatcctgcttcagttccatcaaaggcaatttaaaagcttatgcaaaaaaaaa

SEQ ID NO: 36600 - DNA, 413 bp, Homo sapiens
gtttgaggaaattattgctctattatagcagcaaaacaagacttcagggattttagtcatcttgcatttaatccagtgaaatttcatgtgtttcctataatgaatagagaatgaagagacatagaagctgtaaacaaagaaggttgccaagtaatttagttactaagaaggaacagcttgtcagataaaagtgtatttagctgttttagatgtgtgcacatacatatttttatcagtagtttcatacttcaaaaaatcacatcttaaaatagtattgctatttatttccatgcttagtgtttgaccctcatataataaaatttttaattacactttttttcactcataattctataatgcactttctaatgtttaccacactaccgtcaccaccactcccctccctcaagaag

SEQ ID NO: 36601 - DNA, 522 bp, Homo sapiens
ccctccccatgtggcctcatttaaccttaattacctttctccaaatacactcacattctgagatactgggcgttaggacttccacatacgaatttggtggtggagggagagcgatacaattcagtccataacaccctcctttcaggtgccaaagatataatagtccttagtctcaaggaggcctcaaagatttttgtatgagttgatgatgcttcacagagaaaagattctatcaagcagaggctgcactgaggctcatgcctgtaatcccagtactttgggaggtcaaggagggtggatcactggaggtcaggagtttgagaccagcctggccaacacaaagaaaccctgtctctactaaaaatagaaaaaattagccaggcgtggtggtgggggactgtaatcccagctactcaggaggctgaggcaggataattgcttgaacccgggaggcagaggttagaatgagctgagctcgtgcagttgcactcaagcctgggcgacagaataagattccatctc

SEQ ID NO: 36602 - DNA, 468 bp, Homo sapiens
tactccccaactacttgaggggctgaggtgggaggatcgctggagcccaagaggctgcagtgagccaagatcacaccactgcactccagcctgggtgacaaagtaagacctgtctcaaggaaaaaaaaaagaaaaaatttttaaagaaaaactccctgagcctcagtttcctcctgtgtacaccgagggtggtataagtacttatctcaggggttgtcatgaggattaaccgagttgacctgtgtggattgctcagcccagtgcctggcacataatgtttcataaacacaagtagtgagtaagtatttctcatgattgttcttgttaaacagatactgaacatttgctccaaatcatgccctgaactgaaggctagagacagggagggatgaatgacaaacactgaacacacaagttataatcaagacaggtgatcttactcacattgcttcacctgactagcctaaa

SEQ ID NO: 36603 - DNA, 950 bp, Homo sapiens
gtacctgggactatgggtgcatcccaccgcaccccgctgttagctgataatcctgcaggtcagaagtctagacaggcttgcctgggccctctgcttagtgtctcctgaggtcaaagtgaaggcattggccaaactgggctcctcccggaagcactggagaagaatctgcctccaggcccattcatgttgtcgtattgtcagcaaaatccagttcctgtggttgtgggcctgaggtctccatttccttgctagctgtctgctaggagttgctctctgttcctcaaggccattggtatttcttctcacatggcccctccacctttaaaccagtaatggcatggtgagtccttactcttcaattctctctgacttcctcttcagccaccagccagagaaaactgctattaaagggttcacctgtttgggtcagcccacctggataatctctgaattgtaaggtcagctgacttggggctttaattatacctgcaaaatcactttataacagttcctaaatttgtgtttaaatgaataatcagtggatggaaatccagggggaggagtatgaatgtctttagaattctgcctaccatttcttgtattagcatggaaatgactccaaatctgtagggactttaggcatacactactgcacctggcttgctggatggagtgtcttcaagcaaatatcagacatattgttgtacttgtatctcttattctatttatttatttattttgtagagatgaggtctcgctatgttgcctaggctggtgtcatgaactgacctcaagcaatcctcctgccacggcctctcaaagtgttgggattacaggcatgagccattgtgcctgaccaacagtaattctttaatgtcatttaattctcagtctatgttcagttatcttgagttatctcaaaagtgttttttacagttagttggcttaaa

SEQ ID NO: 36604 - DNA, 304 bp, Homo sapiens
tatgtctcaaaatggcagaaattacacctcggtgccaagcagtagttcctgatcttttaaaattcaaatctattttacagtaataaataatgttatgatcccctctaaggaactaaagtcattatgttatttctgcaaagtagttaggaaataaagaaattattttaggtttttaaaaatcaacttaatgccaggtgcagtggctcatgcctataactgtagcactttgggaggccaaggtgagagattgcttgaggtcaggagttcaagaccagcctgggcaacatagcgagacctcatctct

SEQ ID NO: 36605 - DNA, 533 bp, Homo sapiens
gcctactactactaaattcgcggccgcgtcgacattaattagtttttgcctgtctttagagaagcagatcattgatcattgtgaatttgtactgcaaatactgtatagattattagctcacctgacaattatagttggaccccttctaataagatgatgcaaaaggcctgtccaagtattagcagttgctattattgctgagcacagaaactctgcatgagtgccccttattttaaaaacagcccaatggctgggcacagtggcttacacctataatcccagcactttgggaggccaagacaggcagattaattgaggccaggagtttgagaccagcttggccaacatggtaaaaccctgtctctaccaaaaatacaaaaatcagccaggcatagtggcacatgcctgtaatcccagctatatgggaagctgaggtgtgagaatcgtgtgaacccagcaagtggaggctgcagtgagccaagaacacgccactgccctccagcctgggcaacagagcaagactctgtctcaga

SEQ ID NO: 36606 - DNA, 385 bp, Homo sapiens
actctttgtatctgcgcttctgtttctcttgccacctactctctcctccctttctcagcctccctgtctgctgtctgggtgctcttctctgcagcttcctcacccttcatatatagtcccttgtcacattggttcctggctctggctacccactacttcctcccctttgccacttctccccagtgttcatgtacacctttcagccacatcattctcctggctgcttcctgctcatgcctgtcaaggtcacctgcatgccactgcttttgctttgtcctggccttttcccttcaccctttacttagccctttcccactgcctttaggtatagaggaagcattaattagtttttgcctgtctttagagaagcagatcattgatcatt

SEQ ID NO: 36607 - DNA, 259 bp, Homo sapiens
taaatgctcctggacttagtacaaccccctacgcgcagggcctaaaagagctaaatcaaggcatcatttccttactgctgccatcatctgacatgggaggaggggaccagagtcaaacagcggaggtgggaatgacacaggaagatccagagacacgtggaagactccgagagctgcaagaaatgacatctgggaggccaggcatggtggctcatgactgtgatctcagaacttacggaaggcaaggcggacggatcac

SEQ ID NO: 36608 - DNA, 283 bp, Homo sapiens
tgtagaaatgaggggggtttgcctgtttcccaggctggtctccaactcttaggctcatgcagtcttcctgccttggcctcccaaaatgctgggattacaggcgatagtcactgtgcctggcccagtctgagtttttgtcatgatgtgtgttgacttttgtgagatgtattttctgcatctattgagatataagctttttgtccgttatttcttaatatattgaattatactggctgatttttgagtattaaactattgttattctcttggaataaactctgtc

SEQ ID NO: 36609 - DNA, 308 bp, Homo sapiens
gctattctctgagatactctctgatccttgtctgtgttgaattttctttctctctgatgtctactccatagactgccagaaaaacctgttgatcaaacaaagctgtttattagcttattacagtaagagaaaacccactttgactgtgtcttagtaatatctcacaagggagaagtcaggagaggatattcataaagttttaggacctgggctaggtgattttgaggttggtcttgcgtggtagaaaactggttgttattgaacaaagttcattacttaagagttttggattggcagccttaagacag

SEQ ID NO: 36610 - DNA, 411 bp, Homo sapiens
cacacagctgggattcaaacccaggtctgtctggctgtctccctcacagggtggcatgcagcctggctgcaggcagcttgcccatctacctgaggctttggctgtgcgtctgtgatgtggtttcaggcccgagcaccatgtctgctgtgtgtctagctgggctctccctctgtcttggaccctgtctcttctgcagggcgacagggctcgggcctccctcagaagcacccccacctctgttgcaggtgctttctgcacgtcttttctccctcactatagagtacgttcttggaagtcaaaacctgtgtctactccacctctctcccctgcagctaggcccacccagcacagggcctgggacagatggggccccaatcaatattttctgagtaaacacatgaatgggcaaga

SEQ ID NO: 36611 - DNA, 355 bp, Homo sapiens
ggctcatggtgtgaactagcaagaaaaagaaaacacactgaaaactgacatttccaacaagtataaaatgtttaaagaaatgcaggggagagaccatttagaaaagcctcagatggcagccatcatctcataaccagctgttttaaaaattcttatgacacactgagaacctgaaaaattccactgtacttcattttttcccttttactatatcaaagtatgggtacataagctgcctagcaaaacaatccaaggagctctatcttgtggaaaaagtagctagtatagatcagctattgtagttactagatactggatgtcttccagaagagatgaaaaaaataacaattctatt

SEQ ID NO: 36612 - DNA, 372 bp, Homo sapiens
gaaattaaactttactaatactgaaaatatggattgaggctgccatatcgtgtctgttttatgtcagacagccccacatcatgtacactcaagccaggtcaggtgaggatggagggactttgcacttttcagaggatccaagtgccctcagcttgcttcttcacttcctgcatattgtctcatgttgcccttcactcagcatgtgacatgaatttattgattttattctcttccttactctgacagaatggacaagcaacttaaaagtattcctctccaagaattgcgtgaaccgggaggcggagcttgcagtgagccgagatcgcaccactgcactccagcctgggagacagagccagactccgtctaaaa

SEQ ID NO: 36613 - DNA, 147 bp, Homo sapiens
aatattgattttaaggtaatcacagctgagatgtagttcatatttctaataattttctcagcaatactgttttatttctcacctagaagtaaaagcatgtgtaaatgtattaaaattgtatattttggtggtatggtttctatattt

SEQ ID NO: 36614 - DNA, 444 bp, Homo sapiens
ccaagaactgggaaaaaatttgtatgcaacagcagttgtggttacccacgcctaaaaataatgcctaaatgccttaaagtcattttaaataatgtgattataggcattctttctggtagataatatggatgtttgactcatttcttattcttatttctttgattcttgaagagatatgaatgaacacaagaggcacattttctgaagcagagccctagaattcctctcacatactactctcatcatgataaaaaagaaatcactactgatggatgactcctgtactctgtgagacatcaagccctattagtcactcatttatgccatttaaatgctggattttgttttcagtgctgcaggcccattaccaaagagggcccagctgttacttttttgctttggggacattctctgcaaattcaatgggttttgcttcaattcaga

SEQ ID NO: 36615 - DNA, 376 bp, Homo sapiens
tgtgccaccagctgccccctcctctagcatcctcatgcccgacattgagcaactgtgtgcttcaggcatggtgctgggtgctggggaggcaaagatggtcaagatagagttcctcttctggattatgtcacaggggagaaagacaagtccatttattcatgcacgcatttaaaagtgaagcaccaatcatattcaggcctcggatgcagagcaaataaacgacccgctccagcaacttgggacaagtgcttggtcagcacacaggacctccatggtagcacaagggagagagtgagggcatgatcctgccccagctgcctggaggctgcacccccagagaagcatgttcaaagcacagagctccttcccactcccc

SEQ ID NO: 36616 - DNA, 4191 bp, Homo sapiens
ttgattctgggcactgaaagcagtacttggctgcagacactcgtttcaaacaggccccatttttccatctctgctgctgttattaggggagcccttagactctcttgcagcgccggaataggcgctcaagacgtgtgttaatattgcaacagcaaatataatgaatctgcagttggggacgctgaggccggagtggtggatgaaaggtggccggagccttttccacgggtccaaaccacctgttacaggagaaggcgagcggcctcgctaagcaactggacgttccgcgggcggggcgggggcggggccggggcccgagtccgctcggaaactttcgctgtgggcgagccggacccgccttctggcccctcgggcccaaccacgcagggggagtgccgggccgcagctaggcgaggcgcaccgtgattggcggagatgtggagtgattggcggctacaccggccactcagcaggccgagctggcgccgcatccggggggccgcgtctggagtggagggaggccgaaggccccgcccctgccccgccccctcgtgcagaaggccgcgctagccggctcttcagcagcgagtgcagattgctcccccgcggccgcagatctcccgtttgcgccgcgttcagctgctcccgaacaacttttctgccggcccagaggccccagggcgtcgcagcgccgcgtgcggcccactcacgggccggcaggatggactccaacactgctccgctgggcccctcctgcccacagcccccgccagcaccgcagccccaggcgcgttcccgactcaatgccacagcctcgttggagcaggagaggagcgaaaggccccgagcacccggaccccaggctggccctggccctggtgttagagacgcagcggcccccgctgaaccccaggcccagcataccaggagccgggaaagagcagacggcaccgggcctacaaagggagacatggaaatcccctttgaagaagtcctggagagggccaaggccggggaccccaaggcacagactgaggtggggaagcactacctgcagttggccggcgacacggatgaagaactcaacagctgcaccgctgtggactggctggtcctcgccgcgaagcagggccgtcgcgaggctgtgaagctgcttcgccggtgcttggcggacagaagaggcatcacgtccgagaacgaacgggaggtgaggcagctctcctccgagaccgacctggagagggccgtgcgcaaggcagccctggtcatgtactggaagctcaaccccaagaagaagaagcaggtggccgtggcggagctgctggagaatgtcggccaggtcaacgagcacgatggaggggcgcagccaggccccgtgcccaagtccctgcagaagcagaggcggatgctggagcgcctggtcagcagcgagtccaagaactacatcgcgctggatgactttgtggagatcactaagaagtacgccaagggcgtcatccccagcagcctgttcctgcaggacgacgaagatgatgacgagctggcggggaagagccctgaggacctgccactgcgtctgaaggtggtcaagtaccccctgcacgccatcatggagatcaaggagtacctgattgacatggcctccagggcaggcatgcactggctgtccaccatcatccccacgcaccacatcaacgcgctcatcttcttcttcatcatcagcaacctcaccatcgacttcttcgccttcttcatcccgctggtcatcttctacctgtccttcatctccatggtgatctgcaccctcaaggtgttccaggacagcaaggcctgggagaacttccgcaccctcaccgacctgctgctgcgcttcgagcccaacctggatgtggagcaggccgaggttaacttcggctggaaccacctggagccctatgcccatttcctgctctctgtcttcttcgtcatcttctccttccccatcgccagcaaggactgcatcccctgctcggagctggctgtcatcaccggcttctttaccgtgaccagctacctgagcctgagcacccatgcagagccctacacgcgcagggccctggccaccgaggtcaccgccggcctgctatcgctgctgccctccatgcccttgaattggccctacctgaaggtccttggccagaccttcatcaccgtgcctgtcggccacctggtcgtcctcaatgtcagcgtcccgtgcctgctctatgtctacctgctctatctcttcttccgcatggcacagctgaggaatttcaagggcacctactgctaccttgtgccctacctggtgtgcttcatgtggtgtgagctctccgtggtcatcctgctggagtccaccggcctggggctgctccgcgcctccatcggctacttcctcttcctctttgccctccccatcctggtggccggcctggccctggtgggcgtgctgcagttcgcccggtggttcacgtctctggagctcaccaagatcgcagtcaccgtggcggtctgtagtgtgcccctgctgttgcgctggtggaccaaggccagcttctctgtggtggggatggtgaagtccctgacgcggagctccatggtcaagctcatcctggtgtggctcacggccatcgtgctgttctgctggttctatgtgtaccgctcagagggcatgaaggtctacaactccacactgacctggcagcagtatggtgcgctgtgcgggccacgcgcctggaaggagaccaacatggcgcgcacccagatcctctgcagccacctggagggccacagggtcacgtggaccggccgcttcaagtacgtccgcgtgactgacatcgacaacagcgccgagtctgccatcaacatgctcccgttcttcatcggcgactggatgcgctgcctctacggcgaggcctaccctgcctgcagccctggcaacacctccacggccgaggaggagctctgtcgccttaagctgctggccaagcacccctgccacatcaagaagttcgaccgctacaagtttgagattaccgtgggcatgccattcagcagcggcgctgacggctcgcgcagccgcgaggaggacgacgtcaccaaggacatcgtgctgcgggccagcagcgagttcaaaagcgtgctgctcagcctgcgccagggcagcctcatcgagttcagcaccatcctggagggccgcctgggcagcaagtggcctgtcttcgagctcaaggccatcagctgcctcaactgcatggcccagctctcgcccaccaggcggcacgtgaagatcgagcacgactggcgcagcaccgtgcatggcgccgtgaagttcgccttcgacttctttttcttcccattcctgtcggcggcctgaggatggtccgccacgaggagcttccagtgcatgttgccatgaggcccttccccagtgtggccccagcccgacaggcatgcaccagtgccgtctgtgcccacgtgtgcagactgtggctgcagagaccttgcgaccatgtgtagattgcatggaccccgacaaagggaaggctgctgtgtagctctgtccactctgaataccaagtgtgttgggaattgcatgccatctccaccctgagcctgacctttctgagtgacatgggtgtgccaggctagactaggaggttccggtgtctggaaaagcactttacagatgagattccctctcctcccccaccttcaagcaccctgttccctctttctttcttttgtgttggatttgtttaaaaaccaaataagcatctgtgtaacctccacagtagcatttcttatttgtttggtcactgctacaccttagcagctcttcccctttcctgggggatgtgcacggcagcttgagcctgtcacgtggtcaaggcccggccccatcagaggctgggggaggcggcacattggcagtgtgtcacactgagctgggcaccacaggctgcctcatgaccctcctctccagcaggtagtgggtgaatgtgtgaaggtcttgcctgaatccatcaggacttgggaaacagagaaccctgtgggggtggctgtgggggaggtccctgccagtgtttagaagagcctgactgtgttcagtgccttggagcagaaagccagggtcctgagtggctgaaataaaagcctctggtggaacctgca

SEQ ID NO: 36617 - DNA, 630 bp, Homo sapiens
gcagagagggacacttggggtgggggacagcacacccaggggccgggggccagggtggaggctggcacttggcaaacctgcccccttcctcctcacccagcctggtcctcaaccctcaggccgcccagggaagggtttcctccacctgaacccactcagctcctttcttagcttggccccacgccaccgtccccagcccattgctctgtgtgagggtggcagtggggctgcagtgtggggcgcccatgctgttttctctcatgcttcagccaagaactacatcgcgctggatgactttgtggagatcactaagaagtacgccaagggcgtcatccccagcagcctgttcctgcaggacgacgaagatgatgacgagctggcggggaagagccctgaggacctgccactgcgtctgaaggtggtcaagtaccccctgcacgccatcatggagatcaaggagtacctgattgacatggcctccagggcaggcatgcactggctgtccaccatcatccccacgcaccacatcaacgcgctcatcttcttcttcatcatcagcaaccgcatcacccgttcacgggtgatgcggttgcgcttatagaagtaggagcaggtggtggatcttaggaa

SEQ ID NO: 36618 - DNA, 273 bp, Homo sapiens
gcggccgcttactactactactactactaaattcgcggccgcgtcgactgggcaccacaggctgcctcatgaccctcctctccagcaggtagtgggtgaatgtgtgaaggtcttgcctgaatccatcaggacttgggaaacagagaaccctgtgggggtggctgtgggggaggtccctgccagtgtttagaagagcctgactgtgttcagtgccttggagcagaaagccagggtcctgagtggctgaaataaaagcctctggtggaacctgca

SEQ ID NO: 36619 - DNA, 4336 bp, Homo sapiens
ttgattctgggcactgaaagcagtacttggctgcagacactcgtttcaaacaggccccatttttccatctctgctgctgttattaggggagcccttagactctcttgcagcgccggaataggcgctcaagacgtgtgttaatattgcaacagcaaatataatgaatctgcagttggggacgctgaggccggagtggtggatgaaaggtggccggagccttttccacgggtccaaaccacctgttacaggagaaggcgagcggcctcgctaagcaactggacgttccgcgggcggggcgggggcggggccggggcccgagtccgctcggaaactttcgctgtgggcgagccggacccgccttctggcccctcgggcccaaccacgcagggggagtgccgggccgcagctaggcgaggcgcaccgtgattggcggagatgtggagtgattggcggctacaccggccactcagcaggccgagctggcgccgcatccggggggccgcgtctggagtggagggaggccgaaggccccgcccctgccccgccccctcgtgcagaaggccgcgctagccggctcttcagcagcgagtgcagattgctcccccgcggccgcagatctcccgtttgcgccgcgttcagctgctcccgaacaacttttctgccggcccagaggccccagggcgtcgcagcgccgcgtgcggcccactcacgggccggcaggatggactccaacactgctccgctgggcccctcctgcccacagcccccgccagcaccgcagccccaggcgcgttcccgactcaatgccacagcctcgttggagcaggagaggagcgaaaggccccgagcacccggaccccaggctggccctggccctggtgttagagacgcagcggcccccgctgaaccccaggcccagcataccaggagccgggaaagagcagacggcaccgggcctacaaagggagacatggaaatcccctttgaagaagtcctggagagggccaaggccggggaccccaaggcacagactgaggtggggaagcactacctgcagttggccggcgacacggatgaagaactcaacagctgcaccgctgtggactggctggtcctcgccgcgaagcagggccgtcgcgaggctgtgaagctgcttcgccggtgcttggcggacagaagaggcatcacgtccgagaacgaacgggaggtgaggcagctctcctccgagaccgacctggagagggccgtgcgcaaggcagccctggtcatgtactggaagctcaaccccaagaagaagaagcaggtggccgtggcggagctgctggagaatgtcggccaggtcaacgagcacgatggaggggcgcagccaggccccgtgcccaagtccctgcagaagcagaggcggatgctggagcgcctggtcagcagcgagtccaagaactacatcgcgctggatgactttgtggagatcactaagaagtacgccaagggcgtcatccccagcagcctgttcctgcaggacgacgaagatgatgacgagctggcggggaagagccctgaggacctgccactgcgtctgaaggtggtcaagtaccccctgcacgccatcatggagatcaaggagtacctgattgacatggcctccagggcaggcatgcactggctgtccaccatcatccccacgcaccacatcaacgcgctcatcttcttcttcatcatcagcaacctcaccatcgacttcttcgccttcttcatcccgctggtcatcttctacctgtccttcatctccatggtgatctgcaccctcaaggtgttccaggacagcaaggcctgggagaacttccgcaccctcaccgacctgctgctgcgcttcgagcccaacctggatgtggagcaggccgaggttaacttcggctggaaccacctggagccctatgcccatttcctgctctctgtcttcttcgtcatcttctccttccccatcgccagcaaggactgcatcccctgctcggagctggctgtcatcaccggcttctttaccgtgaccagctacctgagcctgagcacccatgcagagccctacacgcgcagggccctggccaccgaggtcaccgccggcctgctatcgctgctgccctccatgcccttgaattggccctacctgaaggtccttggccagaccttcatcaccgtgcctgtcggccacctggtcgtcctcaatgtcagcgtcccgtgcctgctctatgtctacctgctctatctcttcttccgcatggcacagctgaggaatttcaagggcacctactgctaccttgtgccctacctggtgtgcttcatgtggtgtgagctctccgtggtcatcctgctggagtccaccggcctggggctgctccgcgcctccatcggctacttcctcttcctctttgccctccccatcctggtggccggcctggccctggtgggcgtgctgcagttcgcccggtggttcacgtctctggagctcaccaagatcgcagtcaccgtggcggtctgtagtgtgcccctgctgttgcgctggtggaccaaggccagcttctctgtggtggggatggtgaagtccctgacgcggagctccatggtcaagctcatcctggtgtggctcacggccatcgtgctgttctgctggttctatgtgtaccgctcagagggcatgaaggtctacaactccacactgacctggcagcagtatggtgcgctgtgcgggccacgcgcctggaaggagaccaacatggcgcgcacccagatcctctgcagccacctggagggccacagggtcacgtggaccggccgcttcaagtacgtccgcgtgactgacatcgacaacagcgccgagtctgccatcaacatgctcccgttcttcatcggcgactggatgcgctgcctctacggcgaggcctaccctgcctgcagccctggcaacacctccacggccgaggaggagctctgtcgccttaagctgctggccaagcacccctgccacatcaagaagttcgaccgctacaagtttgagattaccgtgggcatgccattcagcagcggcgctgacggctcgcgcagccgcgaggaggacgacgtcaccaaggacatcgtgctgcgggccagcagcgagttcaaaagcgtgctgctcagcctgcgccagggcagcctcatcgagttcagcaccatcctggagggccgcctgggcagcaagtggcctgtcttcgagctcaaggccatcagctgcctcaactgcatggcccagctctcgcccaccaggcggcacgtgaagatcgagcacgactggcgcagcaccgtgcatggcgccgtgaagttcgccttcgacttctttttcttcccattcctgtcggcggcctgaggatggtccgccacgaggagcttccagtgcatgttgccatgaggcccttccccagtgtggccccagcccgacaggcatgcaccagtgccgtctgtgcccacgtgtgcagactgtggctgcagagaccttgcgaccatgtgtagattgcatggaccccgacaaagggaaggctgctgtgtagctctgtccactctgaataccaagtgtgttgggaattgcatgccatctccaccctgagcctgacctttctgagtgacatgggtgtgccaggctagactaggaggttccggtgtctggaaaagcactttacagatgagattccctctcctcccccaccttcaagcaccctgttccctctttctttcttttgtgttggatttgtttaaaaaccaaataagcatctgtgtaacctccacagtagcatttcttatttgtttggtcactgctacaccttagcagctcttcccctttcctgggggatgtgcacggcagcttgagcctgtcacgtggtcaaggcccggccccatcagaggctgggggaggcggcacattggcagtgtgtcacactgagctgggcaccacaggctgcctcatgaccctcctctccagcaggtagtgggtgaatgtgtgaaggtcttgcctgaatccatcaggacttgggaaacagagaaccctgtgggggtggctgtgggggaggtccctgccagtgtttagaagagcctgactgtgttcagtgccttggagcagaaagccagggtcctgagtggctgaaataaaagcctctggtggaacctgcaaagaaccagcagcacaaaagcaagcagcagcaagacacaccaaacgcacaacagcaagccacacacagacacacagacacacagaaacacacacgaccccacgcgaccgcccccagccgccgcagaggagagacaacgacaacag

SEQ ID NO: 36620 - DNA, 3027 bp, Homo sapiens
gcagagagggacacttggggtgggggacagcacacccaggggccgggggccagggtggaggctggcacttggcaaacctgcccccttcctcctcacccagcctggtcctcaaccctcaggccgcccagggaagggtttcctccacctgaacccactcagctcctttcttagcttggccccacgccaccgtccccagcccattgctctgtgtgagggtggcagtggggctgcagtgtggggcgcccatgctgttttctctcatgcttcagccaagaactacatcgcgctggatgactttgtggagatcactaagaagtacgccaagggcgtcatccccagcagcctgttcctgcaggacgacgaagatgatgacgagctggcggggaagagccctgaggacctgccactgcgtctgaaggtggtcaagtaccccctgcacgccatcatggagatcaaggagtacctgattgacatggcctccagggcaggcatgcactggctgtccaccatcatccccacgcaccacatcaacgcgctcatcttcttcttcatcatcagcaacctcaccatcgacttcttcgccttcttcatcccgctggtcatcttctacctgtccttcatctccatggtgatctgcaccctcaaggtgttccaggacagcaaggcctgggagaacttccgcaccctcaccgacctgctgctgcgcttcgagcccaacctggatgtggagcaggccgaggttaacttcggctggaaccacctggagccctatgcccatttcctgctctctgtcttcttcgtcatcttctccttccccatcgccagcaaggactgcatcccctgctcggagctggctgtcatcaccggcttctttaccgtgaccagctacctgagcctgagcacccatgcagagccctacacgcgcagggccctggccaccgaggtcaccgccggcctgctatcgctgctgccctccatgcccttgaattggccctacctgaaggtccttggccagaccttcatcaccgtgcctgtcggccacctggtcgtcctcaatgtcagcgtcccgtgcctgctctatgtctacctgctctatctcttcttccgcatggcacagctgaggaatttcaagggcacctactgctaccttgtgccctacctggtgtgcttcatgtggtgtgagctctccgtggtcatcctgctggagtccaccggcctggggctgctccgcgcctccatcggctacttcctcttcctctttgccctccccatcctggtggccggcctggccctggtgggcgtgctgcagttcgcccggtggttcacgtctctggagctcaccaagatcgcagtcaccgtggcggtctgtagtgtgcccctgctgttgcgctggtggaccaaggccagcttctctgtggtggggatggtgaagtccctgacgcggagctccatggtcaagctcatcctggtgtggctcacggccatcgtgctgttctgctggttctatgtgtaccgctcagagggcatgaaggtctacaactccacactgacctggcagcagtatggtgcgctgtgcgggccacgcgcctggaaggagaccaacatggcgcgcacccagatcctctgcagccacctggagggccacagggtcacgtggaccggccgcttcaagtacgtccgcgtgactgacatcgacaacagcgccgagtctgccatcaacatgctcccgttcttcatcggcgactggatgcgctgcctctacggcgaggcctaccctgcctgcagccctggcaacacctccacggccgaggaggagctctgtcgccttaagctgctggccaagcacccctgccacatcaagaagttcgaccgctacaagtttgagattaccgtgggcatgccattcagcagcggcgctgacggctcgcgcagccgcgaggaggacgacgtcaccaaggacatcgtgctgcgggccagcagcgagttcaaaagcgtgctgctcagcctgcgccagggcagcctcatcgagttcagcaccatcctggagggccgcctgggcagcaagtggcctgtcttcgagctcaaggccatcagctgcctcaactgcatggcccagctctcgcccaccaggcggcacgtgaagatcgagcacgactggcgcagcaccgtgcatggcgccgtgaagttcgccttcgacttctttttcttcccattcctgtcggcggcctgaggatggtccgccacgaggagcttccagtgcatgttgccatgaggcccttccccagtgtggccccagcccgacaggcatgcaccagtgccgtctgtgcccacgtgtgcagactgtggctgcagagaccttgcgaccatgtgtagattgcatggaccccgacaaagggaaggctgctgtgtagctctgtccactctgaataccaagtgtgttgggaattgcatgccatctccaccctgagcctgacctttctgagtgacatgggtgtgccaggctagactaggaggttccggtgtctggaaaagcactttacagatgagattccctctcctcccccaccttcaagcaccctgttccctctttctttcttttgtgttggatttgtttaaaaaccaaataagcatctgtgtaacctccacagtagcatttcttatttgtttggtcactgctacaccttagcagctcttcccctttcctgggggatgtgcacggcagcttgagcctgtcacgtggtcaaggcccggccccatcagaggctgggggaggcggcacattggcagtgtgtcacactgagctgggcaccacaggctgcctcatgaccctcctctccagcaggtagtgggtgaatgtgtgaaggtcttgcctgaatccatcaggacttgggaaacagagaaccctgtgggggtggctgtgggggaggtccctgccagtgtttagaagagcctgactgtgttcagtgccttggagcagaaagccagggtcctgagtggctgaaataaaagcctctggtggaacctgca

SEQ ID NO: 36621 - DNA, 1819 bp, Homo sapiens
aacggtacaatagagcaaatgacaggccggtggtgaatcggacgaggctctttgccctccccatcctggtggccggcctggccctggtgggcgtgctgcagttcgcccggtggttcacgtctctggagctcaccaagatcgcagtcaccgtggcggtctgtagtgtgcccctgctgttgcgctggtggaccaaggccagcttctctgtggtggggatggtgaagtccctgacgcggagctccatggtcaagctcatcctggtgtggctcacggccatcgtgctgttctgctggttctatgtgtaccgctcagagggcatgaaggtctacaactccacactgacctggcagcagtatggtgcgctgtgcgggccacgcgcctggaaggagaccaacatggcgcgcacccagatcctctgcagccacctggagggccacagggtcacgtggaccggccgcttcaagtacgtccgcgtgactgacatcgacaacagcgccgagtctgccatcaacatgctcccgttcttcatcggcgactggatgcgctgcctctacggcgaggcctaccctgcctgcagccctggcaacacctccacggccgaggaggagctctgtcgccttaagctgctggccaagcacccctgccacatcaagaagttcgaccgctacaagtttgagattaccgtgggcatgccattcagcagcggcgctgacggctcgcgcagccgcgaggaggacgacgtcaccaaggacatcgtgctgcgggccagcagcgagttcaaaagcgtgctgctcagcctgcgccagggcagcctcatcgagttcagcaccatcctggagggccgcctgggcagcaagtggcctgtcttcgagctcaaggccatcagctgcctcaactgcatggcccagctctcgcccaccaggcggcacgtgaagatcgagcacgactggcgcagcaccgtgcatggcgccgtgaagttcgccttcgacttctttttcttcccattcctgtcggcggcctgaggatggtccgccacgaggagcttccagtgcatgttgccatgaggcccttccccagtgtggccccagcccgacaggcatgcaccagtgccgtctgtgcccacgtgtgcagactgtggctgcagagaccttgcgaccatgtgtagattgcatggaccccgacaaagggaaggctgctgtgtagctctgtccactctgaataccaagtgtgttgggaattgcatgccatctccaccctgagcctgacctttctgagtgacatgggtgtgccaggctagactaggaggttccggtgtctggaaaagcactttacagatgagattccctctcctcccccaccttcaagcaccctgttccctctttctttcttttgtgttggatttgtttaaaaaccaaataagcatctgtgtaacctccacagtagcatttcttatttgtttggtcactgctacaccttagcagctcttcccctttcctgggggatgtgcacggcagcttgagcctgtcacgtggtcaaggcccggccccatcagaggctgggggaggcggcacattggcagtgtgtcacactgagctgggcaccacaggctgcctcatgaccctcctctccagcaggtagtgggtgaatgtgtgaaggtcttgcctgaatccatcaggacttgggaaacagagaaccctgtgggggtggctgtgggggaggtccctgccagtgtttagaagagcctgactgtgttcagtgccttggagcagaaagccagggtcctgagtggctgaaataaaagcctctggtggaacctgca

SEQ ID NO: 36622 - DNA, 1661 bp, Homo sapiens
caacatgtgcaatagcagggcacactacagaccaaggccagcttctctgtggtggggatggtgaagtccctgacgcggagctccatggtcaagctcatcctggtgtggctcacggccatcgtgctgttctgctggttctatgtgtaccgctcagagggcatgaaggtctacaactccacactgacctggcagcagtatggtgcgctgtgcgggccacgcgcctggaaggagaccaacatggcgcgcacccagatcctctgcagccacctggagggccacagggtcacgtggaccggccgcttcaagtacgtccgcgtgactgacatcgacaacagcgccgagtctgccatcaacatgctcccgttcttcatcggcgactggatgcgctgcctctacggcgaggcctaccctgcctgcagccctggcaacacctccacggccgaggaggagctctgtcgccttaagctgctggccaagcacccctgccacatcaagaagttcgaccgctacaagtttgagattaccgtgggcatgccattcagcagcggcgctgacggctcgcgcagccgcgaggaggacgacgtcaccaaggacatcgtgctgcgggccagcagcgagttcaaaagcgtgctgctcagcctgcgccagggcagcctcatcgagttcagcaccatcctggagggccgcctgggcagcaagtggcctgtcttcgagctcaaggccatcagctgcctcaactgcatggcccagctctcgcccaccaggcggcacgtgaagatcgagcacgactggcgcagcaccgtgcatggcgccgtgaagttcgccttcgacttctttttcttcccattcctgtcggcggcctgaggatggtccgccacgaggagcttccagtgcatgttgccatgaggcccttccccagtgtggccccagcccgacaggcatgcaccagtgccgtctgtgcccacgtgtgcagactgtggctgcagagaccttgcgaccatgtgtagattgcatggaccccgacaaagggaaggctgctgtgtagctctgtccactctgaataccaagtgtgttgggaattgcatgccatctccaccctgagcctgacctttctgagtgacatgggtgtgccaggctagactaggaggttccggtgtctggaaaagcactttacagatgagattccctctcctcccccaccttcaagcaccctgttccctctttctttcttttgtgttggatttgtttaaaaaccaaataagcatctgtgtaacctccacagtagcatttcttatttgtttggtcactgctacaccttagcagctcttcccctttcctgggggatgtgcacggcagcttgagcctgtcacgtggtcaaggcccggccccatcagaggctgggggaggcggcacattggcagtgtgtcacactgagctgggcaccacaggctgcctcatgaccctcctctccagcaggtagtgggtgaatgtgtgaaggtcttgcctgaatccatcaggacttgggaaacagagaaccctgtgggggtggctgtgggggaggtccctgccagtgtttagaagagcctgactgtgttcagtgccttggagcagaaagccagggtcctgagtggctgaaataaaagcctctggtggaacctgca

SEQ ID NO: 36623 - DNA, 3941 bp, Homo sapiens
ttgattctgggcactgaaagcagtacttggctgcagacactcgtttcaaacaggccccatttttccatctctgctgctgttattaggggagcccttagactctcttgcagcgccggaataggcgctcaagacgtgtgttaatattgcaacagcaaatataatgaatctgcagttggggacgctgaggccggagtggtggatgaaaggtggccggagccttttccacgggtccaaaccacctgttacaggagaaggcgagcggcctcgctaagcaactggacgttccgcgggcggggcgggggcggggccggggcccgagtccgctcggaaactttcgctgtgggcgagccggacccgccttctggcccctcgggcccaaccacgcagggggagtgccgggccgcagctaggcgaggcgcaccgtgattggcggagatgtggagtgattggcggctacaccggccactcagcaggccgagctggcgccgcatccggggggccgcgtctggagtggagggaggccgaaggccccgcccctgccccgccccctcgtgcagaaggccgcgctagccggctcttcagcagcgagtgcagattgctcccccgcggccgcagatctcccgtttgcgccgcgttcagctgctcccgaacaacttttctgccggcccagaggccccagggcgtcgcagcgccgcgtgcggcccactcacgggccggcaggatggactccaacactgctccgctgggcccctcctgcccacagcccccgccagcaccgcagccccaggcgcgttcccgactcaatgccacagcctcgttggagcaggagaggagcgaaaggccccgagcacccggaccccaggctggccctggccctggtgttagagacgcagcggcccccgctgaaccccaggcccagcataccaggagccgggaaagagcagacggcaccgggcctacaaagggagacatggaaatcccctttgaagaagtcctggagagggccaaggccggggaccccaaggcacagactgaggtggggaagcactacctgcagttggccggcgacacggatgaagaactcaacagctgcaccgctgtggactggctggtcctcgccgcgaagcagggccgtcgcgaggctgtgaagctgcttcgccggtgcttggcggacagaagaggcatcacgtccgagaacgaacgggaggtgaggcagctctcctccgagaccgacctggagagggccgtgcgcaaggcagccctggtcatgtactggaagctcaaccccaagaagaagaagcaggtggccgtggcggagctgctggagaatgtcggccaggtcaacgagcacgatggaggggcgcagccaggccccgtgcccaagtccctgcagaagcagaggcggatgctggagcgcctggtcagcagcgagtccaagaactacatcgcgctggatgactttgtggagatcactaagaagtacgccaagggcgtcatccccagcagcctgttcctgcaggacgacgaagatgatgacgagctggcggggaagagccctgaggacctgccactgcgtctgaaggtggtcaagtaccccctgcacgccatcatggagatcaaggagtacctgattgacatggcctccagggcaggcatgcactggctgtccaccatcatccccacgcaccacatcaacgcgctcatcttcttcttcatcatcagcaacctcaccatcgacttcttcgccttcttcatcccgctggtcatcttctacctgtccttcatctccatggtgatctgcaccctcaaggtgttccaggacagcaaggcctgggagaacttccgcaccctcaccgacctgctgctgcgcttcgagcccaacctggatgtggagcaggccgaggttaacttcggctggaaccacctggagccctatgcccatttcctgctctctgtcttcttcgtcatcttctccttccccatcgccagcaaggactgcatcccctgctcggagctggctgtcatcaccggcttctttaccgtgaccagctacctgagcctgagcacccatgcagagccctacacgcgcagggccctggccaccgaggtcaccgccggcctgctatcgctgctgccctccatgcccttgaattggccctacctgaaggtccttggccagaccttcatcaccgtgcctgtcggccacctggtcgtcctcaatgtcagcgtcccgtgcctgctctatgtctacctgctctatctcttcttccgcatggcacagctgaggaatttcaagggcacctactgctaccttgtgccctacctggtgtgcttcatgtggtgtgagctctccgtggtcatcctgctggagtccaccggcctggggctgctccgcgcctccatcggctacttcctcttcctctttgccctccccatcctggtggccggcctggccctggtgggcgtgctgcagttcgcccggtggttcacgtctctggagctcaccaagatcgcagtcaccgtggcggtctgtagtgtgcccctgctgttgcgctggtggaccaaggccagcttctctgtggtggggatggtgaagtccctgacgcggagctccatggtcaagctcatcctggtgtggctcacggccatcgtgctgttctgctggttctatgtgtaccgctcagagggcatgaaggtctacaactccacactgacctggcagcagtatggtgcgctgtgcgggccacgcgcctggaaggagaccaacatggcgcgcacccagatcctctgcagccacctggagggccacagggtcacgtggaccggccgcttcaagtacgtccgcgtgactgacatcgacaacagcgccgagtctgccatcaacatgctcccgttcttcatcggcgactggatgcgctgcctctacggcgaggcctaccctgcctgcagccctggcaacacctccacggccgaggaggagctctgtcgccttaagctgctggccaagcacccctgccacatcaagaagttcgaccgctacaagtttgagattaccgtgggcatgccattcagcagcggcgctgacggctcgcgcagccgcgaggaggacgacgtcaccaaggacatcgtgctgcgggccagcagcgagttcaaaagcgtgctgctcagcctgcgccagggcagcctcatcgagttcagcaccatcctggagggccgcctgggcagcaagtggcctgtcttcgagctcaaggccatcagctgcctcaactgcatggcccagctctcgcccaccaggcggcacgtgaagatcgagcacgactggcgcagcaccgtgcatggcgccgtgaagttcgccttcgacttctttttcttcccattcctgtcggcggcctgaggatggtccgccacgaggagcttccagtgcatgttgccatgaggcccttccccagtgtggccccagcccgacaggcatgcaccagtgccgtctgtgcccacgtgtgcagactgtggctgcagagaccttgcgaccatgtgtagattgcatggaccccgacaaagggaaggctgctgtgtagctctgtccactctgaataccaagtgtgttgggaattgcatgccatctccaccctgagcctgacctttctgagtgacatgggtgtgccaggctagactaggaggttccggtgtctggaaaagcactttacagatgagattccctctcctcccccaccttcaagcacccctcctctccagcaggtagtgggtgaatgtgtgaaggtcttgcctgaatccatcaggacttgggaaacagagaaccctgtgggggtggctgtgggggaggtccctgccagtgtttagaagagcctgactgtgttcagtgccttggagcagaaagccagggtcctgagtggctgaaataaaagcctctggtggaacctgca

SEQ ID NO: 36624 - DNA, 1794 bp, Homo sapiens
ttgattctgggcactgaaagcagtacttggctgcagacactcgtttcaaacaggccccatttttccatctctgctgctgttattaggggagcccttagactctcttgcagcgccggaataggcgctcaagacgtgtgttaatattgcaacagcaaatataatgaatctgcagttggggacgctgaggccggagtggtggatgaaaggtggccggagccttttccacgggtccaaaccacctgttacaggagaaggcgagcggcctcgctaagcaactggacgttccgcgggcggggcgggggcggggccggggcccgagtccgctcggaaactttcgctgtgggcgagccggacccgccttctggcccctcgggcccaaccacgcagggggagtgccgggccgcagctaggcgaggcgcaccgtgattggcggagatgtggagtgattggcggctacaccggccactcagcaggccgagctggcgccgcatccggggggccgcgtctggagtggagggaggccgaaggccccgcccctgccccgccccctcgtgcagaaggccgcgctagccggctcttcagcagcgagtgcagattgctcccccgcggccgcagatctcccgtttgcgccgcgttcagctgctcccgaacaacttttctgccggcccagaggccccagggcgtcgcagcgccgcgtgcggcccactcacgggccggcaggatggactccaacactgctccgctgggcccctcctgcccacagcccccgccagcaccgcagccccaggcgcgttcccgactcaatgccacagcctcgttggagcaggagaggagcgaaaggccccgagcacccggaccccaggctggccctggccctggtgttagagacgcagcggcccccgctgaaccccaggcccagcataccaggagccgggaaagagcagacggcaccgggcctacaaagggagacatggaaatcccctttgaagaagtcctggagagggccaaggccggggaccccaaggcacagactgaggtggggaagcactacctgcagttggccggcgacacggatgaagaactcaacagctgcaccgctgtggactggctggtcctcgccgcgaagcagggccgtcgcgaggctgtgaagctgcttcgccggtgcttggcggacagaagaggcatcacgtccgagaacgaacgggaggtgaggcagctctcctccgagaccgacctggagagggccgtgcgcaaggcagccctggtcatgtactggaagctcaaccccaagaagaagaagcaggtggccgtggcggagctgctggagaatgtcggccaggtcaacgagcacgatggaggggcgcagccaggccccgtgcccaagtccctgcagaagcagaggcggatgctggagcgcctggtcagcagcgagtccaagaactacatcgcgctggatgactttgtggagatcactaagaagtacgccaagggcgtcatccccagcagcctgttcctgcaggacgacgaagatgatgacgagctggcggggaagagccctgaggacctgccactgcgtctgaaggtggtcaagtaccccctgcacgccatcatggagatcaaggagtacctgattgacatggcctccagggcaggcatgcactggctgtccaccatcatccccacgcaccacatcaacgcgctcatcttcttcttcatcatcagcaaccgcatcacccgttcacgggtgatgcggttgcgcttatagaagtaggagcaggtggtggatcttaggaa

SEQ ID NO: 36625 - DNA, 1255 bp, Homo sapiens
atcaatattattgcagaccaggactctgcttatatgccttgctaacaaagatttctttcacagaggcttttctcctctcaagacttaaagtaagaattacattttattaagtcagttaaatgcaccatggcttcatatagtaatataaaaaaactctttgaagtgagaaatattatatcctaaaacctctaaaccacaaacattcaattgaaagagttctgttgaaggataatgacatactgactgcttacagaccaagttgcttgcattttgtatgtttagccctcctttgccactgcttttagagccttggaaggctaagtgtgatagtaatgctagctctaatgcatatttaaaggagactgcctcgcttttagaagacatctggtctgctctctgcatgaggcacagcagtaaagctctttgattcccagaatcaagaactctccccttcagactattaccgaatgcaaggtggttaattgaaggccactaattgatgctcaaatagaaggatattgactatattggaacagatggagtctctactacaaaagtctttgggtatttgtttcttacatagaaaatgctaacatgaatagaaagatactggtgcaagaccattcccgggaaagtagacatacttacatttttttccttttctgctcatttgaatgaactcaattttatgttaaattgttatatcagagtgacaaataagtgctatggcttgatagaagtgaagctcttcacatatattcaaaatacatatcacaaactttggtaaataggatagtaatctgaagaacttttgccctttttaccccatttactgtaactcttgtttctaggtaatcgttctctctcaacaaacttctcaagcgtctgtgtaacaagccacatgttctaacaaattgtctccatcgcacttcaacagccaggtccctattttttataacgtattaaccttattattttcttattattttaaaagaatctatgcacattagcaaaatttaaaagatagagaaaaatataaacagaaaaaattatgtttacttctaccaccctaaatcaactattatcaattttatacatattttactccatcttttttcaaagtttcttacattttccaatgtcattaaaattctctgtgaatgtaaattttaaaaactgtacctactgttttttggaaatctgtaacaagctatgtgtaatcattcttctaatattaaacatattgtgtccagaa

SEQ ID NO: 36626 - DNA, 1201 bp, Homo sapiens
atcaatattattgcagaccaggactctgcttatatgccttgctaacaaagatttctttcacagaggcttttctcctctcaagacttaaagtaagaattacattttattaagtcagttaaatgcaccatggcttcatatagtaatataaaaaaactctttgaagtgagaaatattatatcctaaaacctctaaaccacaaacattcaattgaaagagttctgttgaaggataatgacatactgactgcttacagaccaagttgcttgcattttgtatgtttagccctcctttgccactgcttttagagccttggaaggctaagtgtgatagtaatgctagctctaatgcatatttaaaggagactgcctcgcttttagaagacatctggtctgctctctgcatgaggcacagcagtaaagctctttgattcccagaatcaagaactctccccttcagactattaccgaatgcaaggtggttaattgaaggccactaattgatgctcaaatagaaggatattgactatattggaacagatggagtctctactacaaaagtctttgggtatttgtttcttacatagaaaatgctaacatgaatagaaagatactggtgcaagaccattcccgggaaagtagacatacttacatttttttccttttctgctcatttgaatgaactcaattttatgttaaattgttatatcagagtgacaaataagtgctatggcttgatagaagtgaagctcttcacatatattccctttttaccccatttactgtaactcttgtttctaggtaatcgttctctctcaacaaacttctcaagcgtctgtgtaacaagccacatgttctaacaaattgtctccatcgcacttcaacagccaggtccctattttttataacgtattaaccttattattttcttattattttaaaagaatctatgcacattagcaaaatttaaaagatagagaaaaatataaacagaaaaaattatgtttacttctaccaccctaaatcaactattatcaattttatacatattttactccatcttttttcaaagtttcttacattttccaatgtcattaaaattctctgtgaatgtaaattttaaaaactgtacctactgttttttggaaatctgtaacaagctatgtgtaatcattcttctaatattaaacatattgtgtccagaa

SEQ ID NO: 36627 - DNA, 811 bp, Homo sapiens
atcaatattattgcagaccaggactctgcttatatgccttgctaacaaagatttctttcacagaggcttttctcctctcaagacttaaagtaagaattacattttattaagtcagttaaatgcaccatggcttcatatagtaatataaaaaaactctttgaagtgagaaatattatatcctaaaacctctaaaccacaaacattcaattgaaagagttctgttgaaggataatgacatactgactgcttacagaccaagttgcttgcattttgtatgtttagccctcctttgccactgcttttagagccttggaaggctaagtgtgatagtaatgctagctctaatgcatatttaaaggagactgcctcgcttttagaagacatctggtctgctctctgcatgaggcacagcagtaaagctctttgattcccagaatcaagaactctccccttcagactattaccgaatgcaaggtggttaattgaaggccactaattgatgctcaaatagaaggatattgactatattggaacagatggagtctctactacaaaagtctttgggtatttgtttcttacatagaaaatgctaacatgaatagaaagatactggtgcaagaccattcccgggaaagtagacatacttacatttttttccttttctgctcatttgaatgaactcaattttatgttaaattgttatatcagattactatcctatttaccaaagtttgtgatatgtattttgaatatatgtgaagagcttcacttctatcaagccatagcacttatttgtcactctgagtcgccc

SEQ ID NO: 36628 - DNA, 397 bp, Homo sapiens
gagctacttcatccaagcctttcctcactcttttattattgcaagaaaataattattaacattctgtacctactacgtgcctacactgcactaatacatttgagggatgaaagatgaatcagataaagatgctaaatccacagagcttgagataaattaatacaaatgaacccacagaaatgagaagaacaaaatattcaccagtcacaggaaattctttctagaaaaagttcaaattgtatgcaactaaagtaggccctgaccaagcctgtatttcctgattccgattcaattttcttctagcttctatttctattttcttaacatgatttggaaaactcttgaaatacctctgttagaaatgatcgttgtggaaatgattattgtttctgaaaat

SEQ ID NO: 36629 - DNA, 410 bp, Homo sapiens
caagggagcatggtttgtcaagacttggcactctgtgattgccgttagaaagcctgccccggaggccgggcacggtggctcacacctgtaatcccagcactttgggaggccgaggcaggtggatcacgaggtcaggagtttaagaccagcctggacaagatggtgaaaccccatctctactaaaaatacaaaaattagccgggaatggtggctagtgcctgtgatcctttcatatttattcaactgttctcttacaaatgaacagctacttgggaggctgaggcagagaattgcttgaacccgggaagcagaggttgcagtgagccaagattgcaccactgcactctagcctgggcagcagagcaagactccgtctcaaaaaaaaaaaaaaaaaaaaaagcctgccccag

SEQ ID NO: 36630 - DNA, 326 bp, Homo sapiens
tggcttagataacccaggaataatttataaaggagagagagacaaatgtggaacatctaggaggggccagaatgaggctagaagggggtcagatagggagaagaaacagtaaagtatgatggcagaaccctctgcaagagaaagcatttgttggctgtgtcaattattatgtggataaaattaaattggaaaaaagtatctacatttgttaattagcaagcttttcgtaacctttaagagtacagtttcatcagtggtggaggcggaagccagatttgcagtgggcgaccaggaaatttagctatgaaagggaggaggaaggcaca

SEQ ID NO: 36631 - DNA, 147 bp, Homo sapiens
actgacaaaatacgttcctctcattgagattacatagttattgcagttaataatggtggttattcgttctgatttctcttagagatatgagatttttataaagaaaaactcgctgacataacaccccaagaatatcagaattcagta

SEQ ID NO: 36632 - DNA, 239 bp, Homo sapiens
gagaccgagtttcaccatgttgcccagggtgatctcaaactcctaagctcaggcaatccatcctccttggcctcccaaagtgctgggattacaggcatgagccaccgcgcctggccccactttacttttacaaaaaaaaagccacaaatctaaaatactacatatttatgcctcttaaaaattttaggcattcagtataagttgcctatttcttctactcctgagttcagaagcagttg

SEQ ID NO: 36633 - DNA, 394 bp, Homo sapiens
  misc_feature (24)..(24): n is a, c, g, or t
atttttctgtgtgcatcagccatntacaaaaatttgtcctagtgcagttgatgttaatgattcaattggttaaagagctcttggacagatttctttactataattatttttctcttcattattaagtatctttatgctgctgatgtgcatgtaaaccatcacatttaatctggcagctgcctttctttcttaggttttctgtgcgtatatctgccttaggaaaatgaaagctgtcatccctttttacaggccagaaaaactgggaaaaacacaggctcacccacctactagatgtttgacaaaatactcttcttggggcccaaaaacattggacattattggtgagctttttagaaatttagaatatcagactgttccagatcttctgaaaaaa

SEQ ID NO: 36634 - DNA, 851 bp, Homo sapiens
tttttttttttgggagacggagtctcgctctgtagcccaggctgtagtgcagtggtatgatcttgctcactgcaacctccacctcctgggttcaagggattatcctgcctcagcctcccaagaagctaagactacaggcgtacactaccacgcccggctaatttttatatttttagtagaaacagggtttcaccatgttggccgggctggtcttgaactcctgacttcaagtgatgcacccgcctcagcctcccagagtgctgggattacaggcatgagcaaccattcctggtccaactcaagtcttttacctctattttacacagcacagttattgaactttcgtgagcttaagagaatcataaaatttcatttggttcatccaagatcaagtttcaggttcacaaaattgagttacttcctttaaatcgggggtgtccaatctcttggcttccctgggccacactggaagaagaagaattgtcttggccacataagatacactaacactaatgatagctgatgagctttaaaaaacaaatgcgaaaggatctcataatgttttaagaaagtttacgaatttgtgttggggcgcattcagagctgtcctgggctgcctacagcctgcagtctgtgggttggacaggcttgctttagatggtcttgggactctcaaactcatactcagcattgcaactcagttcagaagacaaacatgtgaagggaacgtcattttcaaactgatcatggtgaggatttttatgaaactgtcccaacaaacttttaggattccatttatgcaagtaatactatgattccccaactccacccccaagtgttaatgctggagg

SEQ ID NO: 36635 - DNA, 780 bp, Homo sapiens
gaactcccaggaatatcagtaatagggaaaaggcaaagttcatgatgaaatcctttgctaacattcagtataaaagtattaataaattaatcaacaggtctacatagatatggcagttactgtattttcaaattatttaccacgcctaaaagtatctgtgtttcaactgtcattggttatatacttcctctatgaaattcactagtatgaggaagaaactagcaaagggacaaagaggaatgtcactgtgccaagagccagagtacttcccctccatcccggggctggtcacctcctgttctgtcaccagttgccctgggtatgtccctggttatcagtctttgcacccagttaagatgtatccccattctctttctctcttgacgatgtcagagtcttggatacataccctgccccaacagctctgttttttttcctgtatctccccaccagtgtgtgcttaccaacctttcttatccccatccagaggacaaacttggctagcacaccatctacttggtatataagtcctgttacatgccagagttagcaaataaaaataagggacacccccttaaattcaaatttcagataaattgtttttttttttttttagaatgtgccatgcaatatgtgggacatatttatactaaaaatccattcattgcagagcacagttggttctcgcctgtaatcccagcattttgagaggtcagggtgggcggatctgttgaacccaggagtttgagaccaccttgggcaacatggcaaaatcctatc

SEQ ID NO: 36636 - DNA, 410 bp, Homo sapiens
ggtaagtggtaaatcagttcctgtgacctttcttttccatactgccccagaacgtctgtatgaatttttcttcctcaactaccatactgttattgcctttacttttgtggtctctagagtcataggggatgttgatagaagggtactggcaggaaagggagacacactgggagcgccttattttgcattttcttagtgtcgtctttgactaaggaggaagggtcagcaatgaatggtgcctttaacctttcccatgcactgcaccaatgcactgaaggtgagggagctccttgtgctccagggggatgcctgagattcatgcataccataaagttggccttcgtgtcccctttctttagttggagccatattggaagcccactgtcaggaaaacggtctcatggcctgag

SEQ ID NO: 36637 - DNA, 315 bp, Homo sapiens
gcggtgttgttcatgtggatggtgacaagacctactgctggacagacacaggtgctgcctttggactttccagtgcctcagcatcagcctggggatcacgttctcatcaaagaggggaaagaagggaaactcgagccagcccgggaaggaccctaccttgtgctgctaaccactgagactgctgttcgtaaggttggaaagagatggacacatcacacatgagtcaagcaagcaccattatcctcagaatcatgggccattgttcctggatcaagccctaccaaattaaagctaaggaaagcttagtctatctat

SEQ ID NO: 36638 - DNA, 385 bp, Homo sapiens
aaaaacacacacacacatacacgcgtgattacatagatgatgatgactttccattgcatcacatcaggagacacataatgtcatttttgtcccattattagtgttgctaaccacttgtttaagatgtcaagtctctccatcataaagttacctttaaatggtatagtacttgaagacagtgtaaatatcctattcctcaaaagccttttgccatggatgatccttgcctaaatcagttatattggtgtttgctaattagtgattttctaacaatgtatttattagtttatgtttttcgagcaacaagaactctagcgcccccccctgcccgtgctgcgtcatgcttctgtgtatataaaggcctttatttatctctcaaaaaaaa

SEQ ID NO: 36639 - DNA, 537 bp, Homo sapiens
gctagtttatgatggtctcagttatcacagtagatacagagctgagtttacccacaagatcttaatttaggaacactttgaaaccctgtaaccctgctgggtgctctctcctctcactccaccaaggcagcgcacagaaacatacatggggctgtggtaggatgaataatggtcccccaagatgtccacctcctttagcaaaaggggctttgcaaatgagattgaggatcttcagatagggagattaatctggatgatcagaatataccctaagtgcaatcatcagtgttcttataatagggaggcagagggagagctgaccacagtaggagatgtaatgacaaaagcaagaggttggagtgatatgaagaagggctgcaagtcaaggaatgcaggtggcttctagaagttagaaaaagcaagaaaatgtattctcccctgaagcctccagaaggaacagccctgccaacaccttgatttcagatttaatctccagagctgtaagagaataaatcagtattttaaaccaataaggtt

SEQ ID NO: 36640 - DNA, 422 bp, Homo sapiens
  misc_feature (278)..(278): n is a, c, g, or t
aggtagggctggaagaagcagccatacacaggtgtttgctcattcaccagtgcctggctttgtcctggcactagatccctcagagtcggccctgcgcctaataaattaacagatacaatagcatgtgatgaggaccacacgggaagccatggcagcggctaccgcccagccagcgcttccatttctcatttctaaatcctaccctaatctgtcaggggagagtcgctgacggtgaagaaccggtctaaggagttgaaccaggtccccacagacctacngctaccactgccatcgccatccaccgcatctcaccaacaagactgtggctcctagttgatgttggactcaccttcggaggtatccgagcttggacacagcccctggacaagttgatccagacaagctggccgtcccccaaggag

SEQ ID NO: 36641 - DNA, 441 bp, Homo sapiens
aataattttttaaaaattagagagctcttctttcttccacaatgacatttgttaacagattccctctttgataatacacaatgttggatcatgaaacagagtaaacaaacaggtcattgtttaaaataatgtacactgtgttcaaaggactgtgagtttttgttttgagttatataattttcgttctagaatacagtacataatgtattttaacttgatatgacacaaagatgtttattttagatatattacgtttgtgatactctttagattacttttacagatttgtgtattttgacctatgtgtggtagagcaagtttttttaatttgacaaaaattttttaataagttttgaatttatgtatttagaacaaatttattatcctatagttatgtgcacatagacacaaacacaggaaatcagtgtttaagtaattgtg

SEQ ID NO: 36642 - DNA, 312 bp, Homo sapiens
tgtccatggggtggagtccatgcagtgactggagaaggtgctagtttgcgtctttttaattgtcttagagagctgagagatatatgttaactctgagaagaaagactgatcagcttctaagagagctaatttgaagctgctggccttctgtagacagcaccttgggtttaattgcattgtggttactagtgattatgataaatagtacatagtcactggattttaaaattggccatatagttgtagttttatatttatttttatttttgaaatgggagtctcactgttgctccagccaggggcaacagaggc

SEQ ID NO: 36643 - DNA, 465 bp, Homo sapiens
tgcagtcattcatttgtcctccctgaaggcagcttacattgctggatttttagatgtcctagtagatttttatacttcatttgatcaagcttgttgtgatttccaagtcttttttagcatcctgatttttggtgctaagctacattaaaatttaccaacatgtagatctttcagttttgccttctaaaatgcatcatttgggcctggtgcagtggctcatgcctgtaatcccagcactttgggaggccgaggtgggtggatcacttgaggccaggagttcaaaatcagcctggccaacatggggaaaccccacttctacttaaaaatacaaacattagccaggcatggtggtacaagcctgtaatactagctacttgggaggttgaggtgggaggttgaggctgtagtgagccatgatcatgccactgcactccagcctgggagacagagccagaccctgtctta

SEQ ID NO: 36644 - DNA, 501 bp, Homo sapiens
ggatgtctctctgtaaaggtcaaattttcaggacagacctcaaattgatgagtggtgtgtatgctgagagaagacgcagacttgagacattcaaagcagacaggacatcaagagcaaaggccctgaggcttcagcaaatttagtatattggatgtaacagcaggagggcccatgtgggtaagctgaggacatcaaggtgagaatatcaaggtgggtagggaccagatcaggtaagatcttgtgagcccttgtaaggacttttaatttatgcaaagagcaatagaacatgatataatatctaagagtgatgaggatataaaagaaacaagactagccacatacaagttgataattgttggagacagtggtgggctcatgataaaaatctccacttttaggctgggcacagtggctcacgcctgtaatcccaacactttgggaggccaaggcgagtggatcacctgaggtcgggagttcgagaccagcctggccaacatggcg

SEQ ID NO: 36645 - DNA, 447 bp, Homo sapiens
gaaaaaggctgggcatacacaggggcagaaaaacagccccaggctaggaggacctggaaaatgtaactgaaaaactattcttcaaagccagttgtgaacagcagcaaccccatccaggaagactacatggttacacttggcaggctgtgcggaacagatgaggcagtgtgacacagtcaagtcacccacaagaacgtggcatttttgtggtgtttgaaacatttcagctagataagcctaaattggcttcctttatagcaaaactacctgccactcattatattcatgccaatatcaggttcctcatggggcatgctatgacatatttacccccagaccaactcaggatttaaaaggaagatgagatatttataggctaggaattctctaatggacacgctaatgaacaaataaatgtgaaaccatctcctaaagatcaaggatacc

SEQ ID NO: 36646 - DNA, 942 bp, Homo sapiens
ataatattgattggttacaaaagtggctgccggaaacctctccaacctctcctgaggactcacaacttctttatagatgagaattacgaaagagtctctaaagctgtctcaaaaacaggctggtgttgaaacatacatatcgaaaggtctcgagaaattcaattatattttgctgccctgaggattttcactccacttgtggaaacaaatgataatgttgcttcagacccacctctccacctcttgttccaaacagtactccatttccaaatgagctgccatcaagccaaagtaacaactttctcccaaaatgtttaaagtggtggaaaatcccctcaaagctggatcaaactgtgtgtttaagaacagctccaaaagggactcttctgttgacaggggatatttttctttagatgtaagaaatattctgagcctcgagcctaggaaggaggccaacagcagctctccagccgggatcccgcccctttcgaaagccatcaccactacaggaaccctgggtaaagtagtagccttctttttttctctctctagtttttgaaactgtaatgacagaagacatttcagggttgttgtggggattttttccccccagttctaaaatggtcattgatagtgtcgatcttacctaactctcctcctatttaaaatttctgtggatctaccagataacctaaagtgggcatggattatttattatggctcctttaatgcccaaatagcaatcagtctaaaaccttaaaacaaaaacaaaaacaaaaacaaaaatcaaggagagaccagccacctcctgaaaaataggaataatagtatcagccactgacccatggataatgttgttgaaagcctgattaaagtatttttttctaaaaagaaaactcttcctgaattaagaaaataaaaatgggactttaaaaaaaaacg

SEQ ID NO: 36647 - DNA, 294 bp, Homo sapiens
actgtagtagaacaccagcaaaaaatctagaagaaatgaagtgatagtcaccactcgacaaacctcatcgtcatggttgacttggacaagaattatcaacggatgttaaaaactactgggtgagagttttggtgaggaatggaatataatctatactacataatctcaaagtatctccccacaaagtacttatcagttacaaggggtgaggggaaatgcagaggggaataatacccttactgcagggaaactgggtagacagcatcttaacttagtgatcaaagttaacatcac

SEQ ID NO: 36648 - DNA, 758 bp, Homo sapiens
cctataccgcgggaaagatcactgagctggaacggaagctaaccttcgaacagcagcgtcggattagtgggaaagatgtatgttgaggcaaaagatcaaaatggaaaacaaggaacagatggatattactcacttggatggtcacaaggtacatatttcccgggataagatcaccaggccaggagcgaagctatggaagaaaggggaagggctccccaactttgacaacaacaatatcaagggctctttgataatcacttttgatgtggattttccaaaagaacagttaacagaggaagcgagagaaggtatcaaacagctactgaaacaagggtcagtgcagaaggtatacaatggactgcaaggatattgagagtgaataaaattggactttgtttaaaataagtgaataagcgatatttattatctgcaaggtttttttgtgtgtgtttttgtttttattttcaatatgcaagttaggcttaatttttttatctaatgatcatcatgaaatgaataagagggcttaagaatttgtccatttgcattcggaaaagaatgaccagcaaaaggtttactaatacctctccctttggggatttaatgtctggtgctgccgcctgagtttcaagaattaaagctgcaagaggactccaggagcaaaagaaacacaatatagagggttggagttgttagcaatttcattcaaaatgccaactggagaagtctgtttttaaatacattttgttgttattttt

SEQ ID NO: 36649 - DNA, 1154 bp, Homo sapiens
gtgctgactaaggatccccagcttacccttactggagaaggtgagcctcacgtggatggggagcctggagatttacggttccgaatcaaagttgtcaagcacccaatatttgaaaggagaggagatgatttgtacacaaatgtgacaatctcattagttgagtcactggttggctttgagatggatattactcacttggatggtcacaaggtacatatttcccgggataagatcaccaggccaggagcgaagctatggaagaaaggggaagggctccccaactttgacaacaacaatatcaagggctctttgataatcacttttgatgtggattttccaaaagaacagttaacagaggaagcgagagaaggtatcaaacagctactgaaacaagggtcagtgcagaaggtatacaatggactgcaaggatattgagagtgaataaaattggactttgtttaaaataagtgaataagcgatatttattatctgcaaggtttttttgtgtgtgtttttgtttttattttcaatatgcaagttaggcttaatttttttatctaatgatcatcatgaaatgaataagagggcttaagaatttgtccatttgcattcggaaaagaatgaccagcaaaaggtttactaatacctctccctttggggatttaatgtctggtgctgccgcctgagtttcaagaattaaagctgcaagaggactccaggagcaaaagaaacacaatatagagggttggagttgttagcaatttcattcaaaatgccaactggagaagtctgtttttaaatacattttgttgttatttttttcatgactcctgtttcttctgtgagctatttgggttgtcctcccatcaagcaagatggatgcacacgcatgcaaaagagtgatatagatccagtccccatgcccaattacacatacggcatctgctagaaaggagcttggaagaaactgaatggttgattggggtccatgaatgaaggttacacaaagatctaattgtccttgaagtatattttctctcatttaatttgggaataataatctgatatggacactttactgtttagaaagcacctttcatgtatataatttcagttgacctcatggttagaaagcctttggtttgtttaggaac

SEQ ID NO: 36650 - DNA, 461 bp, Homo sapiens
gtgctgactaaggatccccagcttacccttactggagaaggtgagcctcacgtggatggggagcctggagatttacggttccgaatcaaagttgtcaagcacccaatatttgaaaggagaggagatgatttgtacacaaatgtgacaatctcattagttgagtcactggttggctttgagatggatattactcacttggatggtcacaaggtacatatttcccgggataagatcaccaggccaggagcgaagctatggaagaaaggggaagggctccccaactttgacaacaacaatatcaagggctctttgataatcacttttgatgtggattttccaaaagaacagttaacagaggaagcgagagaaggtatcaaacagctactgaaacaagggtcagtgcagaaggtatacaatggactgcaaggatattgagagtgaataaaattggactttgttta

SEQ ID NO: 36651 - DNA, 757 bp, Homo sapiens
accgagacctggcggaccccgttgctagagcggcagattgcggctcaagcgtctgagaaaatctaggctggggtcgagagtccgcaacagtggcacctggagccagacccaccgctttctggtgtcgcgcctttcaacccgggggggtaggaagctttctgttgctccgcataactgtggtcagctaatagctgctggtaagatcagcacgctttcatcagaaatgctactaatactaatggcagtttgcatttatagagcacttactatggtctcagcactgtgtaaagcaactttatgtgtatttcctaagtcttgtcaagagccctttaagtacattcgttttactgatgaagaaactagggcctagaaaggtgaaaataacacaaccctaaggtcacacaagagatggagccaagattcaagcccagggcgtctgaagcaagactggcactccctgccgcccctcggtgtcagctccttaactctgttagcttcctgccgtgtttccaccttcatgaagctttttcagattaccgggcagaagccatcactccttcctttaaacttccatttcagatttctggacatttcctgctttttttagttcctttatggcctctctaggtgtgatagatacaaaggtaaattagaccgtaaaatgcaatttagttcctcttttgtgtggccattgtccctactgggtatcttcctgaaagcaggggcttcaaatttacacatacctgggttaggatcc

SEQ ID NO: 36652 - DNA, 2412 bp, Homo sapiens
  misc_feature (418)..(418): n is a, c, g, or t
accgagacctggcggaccccgttgctagagcggcagattgcggctcaagcgtctgagaaaatctaggctggggtcgagagtccgcaacagtggcacctggagccagacccaccgctttctggtgtcgcgcctttcaacccgggggggtaggaagctttctgttgctccgcataactgtggtcagctaatagctgctgcctttccgagacagttgtcttatggagttgcttggagaacgtaaaataagaggcctaagcaatgcgtctgatgtacacctgtcgtggaataactgttcccgctctagtagttctcacgctcattcttccgctgtacctctgctccctcattcggagcgtagctgggtatgaatgaaattccgggcttgtagcacagagaaaacttctctcccacaattggnttggtgctggggaggaagctcctgattggtggaaagtccgaggaagtgggcaagccggagggatttcgtgtacctcaggtgccctcactctgaccggccccctatcattacgtaattttctacgactcgcggtagctcaggcagagcgggttcctgcagcggcgcgaccctctgacgtctccgcttctaattggtcaagagctgcgactgcagttctgaagcctaactggttgcccgtgccgcctcggaggtgaagtgtactgcgctgattggcttccaggcgccggccgcgtgtgatgtcccgggcaacgattggctctcgcctaccgggggcttctctcaccgggactcgggactcccgggaagtggaccggcagaagagggggctagctagctgtctctgcggaccagggagacccccgcgcccccccggtgtgaggcggcctcacagggccgggtgggctggcgagccgacgcggcggcggaggaggctgtgaggagtgtgtggaacaggacccgggacagaggaaccatggctccgcagaacctgagcaccttttgcctgttgctgctatacctcatcggggcggtgattgccggacgagatttctataagatcttgggggtgcctcgaagtgcctctataaaggatattaaaaaggcctataggaaactagccctgcagcttcatcccgaccggaaccctgatgatccacaagcccaggagaaattccaggatctgggtgctgcttatgaggttctgtcagatagtgagaaacggaaacagtacgatacttatggtgaagaaggattaaaagatggtcatcagagctcccatggagacattttttcacacttctttggggattttggtttcatgtttggaggaacccctcgtcagcaagacagaaatattccaagaggaagtgatattattgtagatctagaagtcactttggaagaagtatatgcaggaaattttgtggaagtagttagaaacaaacctgtggcaaggcaggctcctggcaaacggaagtgcaattgtcggcaagagatgcggaccacccagctgggccctgggcgcttccaaatgacccaggaggtggtctgcgacgaatgccctaatgtcaaactagtgaatgaagaacgaacgctggaagtagaaatagagcctggggtgagagacggcatggagtacccctttattggagaaggtgagcctcacgtggatggggagcctggagatttacggttccgaatcaaagttgtcaagcacccaatatttgaaaggagaggagatgatttgtacacaaatgtgacaatctcattagttgagtcactggttggctttgagatggatattactcacttggatggtcacaaggtacatatttcccgggataagatcaccaggccaggagcgaagctatggaagaaaggggaagggctccccaactttgacaacaacaatatcaagggctctttgataatcacttttgatgtggattttccaaaagaacagttaacagaggaagcgagagaaggtatcaaacagctactgaaacaagggtcagtgcagaaggtatacaatggactgcaaggatattgagagtgaataaaattggactttgtttaaaataagtgaataagcgatatttattatctgcaaggtttttttgtgtgtgtttttgtttttattttcaatatgcaagttaggcttaatttttttatctaatgatcatcatgaaatgaataagagggcttaagaatttgtccatttgcattcggaaaagaatgaccagcaaaaggtttactaatacctctccctttggggatttaatgtctggtgctgccgcctgagtttcaagaattaaagctgcaagaggactccaggagcaaaagaaacacaatatagagggttggagttgttagcaatttcattcaaaatgccaactggagaagtctgtttttaaatacattttgttgttattttt

SEQ ID NO: 36653 - DNA, 2746 bp, Homo sapiens
  misc_feature (418)..(418): n is a, c, g, or t
accgagacctggcggaccccgttgctagagcggcagattgcggctcaagcgtctgagaaaatctaggctggggtcgagagtccgcaacagtggcacctggagccagacccaccgctttctggtgtcgcgcctttcaacccgggggggtaggaagctttctgttgctccgcataactgtggtcagctaatagctgctgcctttccgagacagttgtcttatggagttgcttggagaacgtaaaataagaggcctaagcaatgcgtctgatgtacacctgtcgtggaataactgttcccgctctagtagttctcacgctcattcttccgctgtacctctgctccctcattcggagcgtagctgggtatgaatgaaattccgggcttgtagcacagagaaaacttctctcccacaattggnttggtgctggggaggaagctcctgattggtggaaagtccgaggaagtgggcaagccggagggatttcgtgtacctcaggtgccctcactctgaccggccccctatcattacgtaattttctacgactcgcggtagctcaggcagagcgggttcctgcagcggcgcgaccctctgacgtctccgcttctaattggtcaagagctgcgactgcagttctgaagcctaactggttgcccgtgccgcctcggaggtgaagtgtactgcgctgattggcttccaggcgccggccgcgtgtgatgtcccgggcaacgattggctctcgcctaccgggggcttctctcaccgggactcgggactcccgggaagtggaccggcagaagagggggctagctagctgtctctgcggaccagggagacccccgcgcccccccggtgtgaggcggcctcacagggccgggtgggctggcgagccgacgcggcggcggaggaggctgtgaggagtgtgtggaacaggacccgggacagaggaaccatggctccgcagaacctgagcaccttttgcctgttgctgctatacctcatcggggcggtgattgccggacgagatttctataagatcttgggggtgcctcgaagtgcctctataaaggatattaaaaaggcctataggaaactagccctgcagcttcatcccgaccggaaccctgatgatccacaagcccaggagaaattccaggatctgggtgctgcttatgaggttctgtcagatagtgagaaacggaaacagtacgatacttatggtgaagaaggattaaaagatggtcatcagagctcccatggagacattttttcacacttctttggggattttggtttcatgtttggaggaacccctcgtcagcaagacagaaatattccaagaggaagtgatattattgtagatctagaagtcactttggaagaagtatatgcaggaaattttgtggaagtagttagaaacaaacctgtggcaaggcaggctcctggcaaacggaagtgcaattgtcggcaagagatgcggaccacccagctgggccctgggcgcttccaaatgacccaggaggtggtctgcgacgaatgccctaatgtcaaactagtgaatgaagaacgaacgctggaagtagaaatagagcctggggtgagagacggcatggagtacccctttattggagaaggtgagcctcacgtggatggggagcctggagatttacggttccgaatcaaagttgtcaagcacccaatatttgaaaggagaggagatgatttgtacacaaatgtgacaatctcattagttgagtcactggttggctttgagatggatattactcacttggatggtcacaaggtacatatttcccgggataagatcaccaggccaggagcgaagctatggaagaaaggggaagggctccccaactttgacaacaacaatatcaagggctctttgataatcacttttgatgtggattttccaaaagaacagttaacagaggaagcgagagaaggtatcaaacagctactgaaacaagggtcagtgcagaaggtatacaatggactgcaaggatattgagagtgaataaaattggactttgtttaaaataagtgaataagcgatatttattatctgcaaggtttttttgtgtgtgtttttgtttttattttcaatatgcaagttaggcttaatttttttatctaatgatcatcatgaaatgaataagagggcttaagaatttgtccatttgcattcggaaaagaatgaccagcaaaaggtttactaatacctctccctttggggatttaatgtctggtgctgccgcctgagtttcaagaattaaagctgcaagaggactccaggagcaaaagaaacacaatatagagggttggagttgttagcaatttcattcaaaatgccaactggagaagtctgtttttaaatacattttgttgttatttttttcatgactcctgtttcttctgtgagctatttgggttgtcctcccatcaagcaagatggatgcacacgcatgcaaaagagtgatatagatccagtccccatgcccaattacacatacggcatctgctagaaaggagcttggaagaaactgaatggttgattggggtccatgaatgaaggttacacaaagatctaattgtccttgaagtatattttctctcatttaatttgggaataataatctgatatggacactttactgtttagaaagcacctttcatgtatataatttcagttgacctcatggttagaaagcctttggtttgtttaggaac

SEQ ID NO: 36654 - DNA, 2053 bp, Homo sapiens
  misc_feature (418)..(418): n is a, c, g, or t
accgagacctggcggaccccgttgctagagcggcagattgcggctcaagcgtctgagaaaatctaggctggggtcgagagtccgcaacagtggcacctggagccagacccaccgctttctggtgtcgcgcctttcaacccgggggggtaggaagctttctgttgctccgcataactgtggtcagctaatagctgctgcctttccgagacagttgtcttatggagttgcttggagaacgtaaaataagaggcctaagcaatgcgtctgatgtacacctgtcgtggaataactgttcccgctctagtagttctcacgctcattcttccgctgtacctctgctccctcattcggagcgtagctgggtatgaatgaaattccgggcttgtagcacagagaaaacttctctcccacaattggnttggtgctggggaggaagctcctgattggtggaaagtccgaggaagtgggcaagccggagggatttcgtgtacctcaggtgccctcactctgaccggccccctatcattacgtaattttctacgactcgcggtagctcaggcagagcgggttcctgcagcggcgcgaccctctgacgtctccgcttctaattggtcaagagctgcgactgcagttctgaagcctaactggttgcccgtgccgcctcggaggtgaagtgtactgcgctgattggcttccaggcgccggccgcgtgtgatgtcccgggcaacgattggctctcgcctaccgggggcttctctcaccgggactcgggactcccgggaagtggaccggcagaagagggggctagctagctgtctctgcggaccagggagacccccgcgcccccccggtgtgaggcggcctcacagggccgggtgggctggcgagccgacgcggcggcggaggaggctgtgaggagtgtgtggaacaggacccgggacagaggaaccatggctccgcagaacctgagcaccttttgcctgttgctgctatacctcatcggggcggtgattgccggacgagatttctataagatcttgggggtgcctcgaagtgcctctataaaggatattaaaaaggcctataggaaactagccctgcagcttcatcccgaccggaaccctgatgatccacaagcccaggagaaattccaggatctgggtgctgcttatgaggttctgtcagatagtgagaaacggaaacagtacgatacttatggtgaagaaggattaaaagatggtcatcagagctcccatggagacattttttcacacttctttggggattttggtttcatgtttggaggaacccctcgtcagcaagacagaaatattccaagaggaagtgatattattgtagatctagaagtcactttggaagaagtatatgcaggaaattttgtggaagtagttagaaacaaacctgtggcaaggcaggctcctggcaaacggaagtgcaattgtcggcaagagatgcggaccacccagctgggccctgggcgcttccaaatgacccaggaggtggtctgcgacgaatgccctaatgtcaaactagtgaatgaagaacgaacgctggaagtagaaatagagcctggggtgagagacggcatggagtacccctttattggagaaggtgagcctcacgtggatggggagcctggagatttacggttccgaatcaaagttgtcaagcacccaatatttgaaaggagaggagatgatttgtacacaaatgtgacaatctcattagttgagtcactggttggctttgagatggatattactcacttggatggtcacaaggtacatatttcccgggataagatcaccaggccaggagcgaagctatggaagaaaggggaagggctccccaactttgacaacaacaatatcaagggctctttgataatcacttttgatgtggattttccaaaagaacagttaacagaggaagcgagagaaggtatcaaacagctactgaaacaagggtcagtgcagaaggtatacaatggactgcaaggatattgagagtgaataaaattggactttgttta

SEQ ID NO: 36655 - DNA, 2481 bp, Homo sapiens
  misc_feature (418)..(418): n is a, c, g, or t
  misc_feature (2183)..(2184): n is a, c, g, or t
  misc_feature (2203)..(2203): n is a, c, g, or t
accgagacctggcggaccccgttgctagagcggcagattgcggctcaagcgtctgagaaaatctaggctggggtcgagagtccgcaacagtggcacctggagccagacccaccgctttctggtgtcgcgcctttcaacccgggggggtaggaagctttctgttgctccgcataactgtggtcagctaatagctgctgcctttccgagacagttgtcttatggagttgcttggagaacgtaaaataagaggcctaagcaatgcgtctgatgtacacctgtcgtggaataactgttcccgctctagtagttctcacgctcattcttccgctgtacctctgctccctcattcggagcgtagctgggtatgaatgaaattccgggcttgtagcacagagaaaacttctctcccacaattggnttggtgctggggaggaagctcctgattggtggaaagtccgaggaagtgggcaagccggagggatttcgtgtacctcaggtgccctcactctgaccggccccctatcattacgtaattttctacgactcgcggtagctcaggcagagcgggttcctgcagcggcgcgaccctctgacgtctccgcttctaattggtcaagagctgcgactgcagttctgaagcctaactggttgcccgtgccgcctcggaggtgaagtgtactgcgctgattggcttccaggcgccggccgcgtgtgatgtcccgggcaacgattggctctcgcctaccgggggcttctctcaccgggactcgggactcccgggaagtggaccggcagaagagggggctagctagctgtctctgcggaccagggagacccccgcgcccccccggtgtgaggcggcctcacagggccgggtgggctggcgagccgacgcggcggcggaggaggctgtgaggagtgtgtggaacaggacccgggacagaggaaccatggctccgcagaacctgagcaccttttgcctgttgctgctatacctcatcggggcggtgattgccggacgagatttctataagatcttgggggtgcctcgaagtgcctctataaaggatattaaaaaggcctataggaaactagccctgcagcttcatcccgaccggaaccctgatgatccacaagcccaggagaaattccaggatctgggtgctgcttatgaggttctgtcagatagtgagaaacggaaacagtacgatacttatggtgaagaaggattaaaagatggtcatcagagctcccatggagacattttttcacacttctttggggattttggtttcatgtttggaggaacccctcgtcagcaagacagaaatattccaagaggaagtgatattattgtagatctagaagtcactttggaagaagtatatgcaggaaattttgtggaagtagttagaaacaaacctgtggcaaggcaggctcctggcaaacggaagtgcaattgtcggcaagagatgcggaccacccagctgggccctgggcgcttccaaatgacccaggaggtggtctgcgacgaatgccctaatgtcaaactagtgaatgaagaacgaacgctggaagtagaaatagagcctggggtgagagacggcatggagtacccctttattggagaaggtgagcctcacgtggatggggagcctggagatttacggttccgaatcaaagttgtcaagcacccaatatttgaaaggagaggagatgatttgtacacaaatgtgacaatctcattagttgagtcactggttggctttgagatggatattactcacttggatggtcacaaggtacatatttcccgggataagatcaccaggccaggagcgaagctatggaagaaaggggaagggctccccaactttgacaacaacaatatcaagggctctttgataatcacttttgatgtggattttccaaaagaacagttaacagaggaagcgagagaaggtatcaaacagctactgaaacaagggtcagtgcagaaggtatacaatggactgcaaggatattgagagtgaataaaattggactttgtttaaaataagtgaataagcgatatttattatctgcaaggtttttttgtgtgtgtttttgtttttattttcaatatgcaagttaggcttaataaatgacccaggaggtggtctgcgacgaatgccctaatgtcnnactagtgaatgaagaacgnacgctggaagtagaaatagagcctggggtgagagacggcatggagtacccctttattggagaaggtgagcctcacgtggatggggagcctggagatttacggttccgaatcacagttgtcaagcaccctatatttgaaaggagaggagatgatttgtacacaaatgtgagcgattctcattagctgagtcaccgggctctggctattgagatgtgataggtcatcactgtgtatcctgaacttgtacatacggcctgggccaggctatacaatctgct

SEQ ID NO: 36656 - DNA, 2354 bp, Homo sapiens
  misc_feature (418)..(418): n is a, c, g, or t
accgagacctggcggaccccgttgctagagcggcagattgcggctcaagcgtctgagaaaatctaggctggggtcgagagtccgcaacagtggcacctggagccagacccaccgctttctggtgtcgcgcctttcaacccgggggggtaggaagctttctgttgctccgcataactgtggtcagctaatagctgctgcctttccgagacagttgtcttatggagttgcttggagaacgtaaaataagaggcctaagcaatgcgtctgatgtacacctgtcgtggaataactgttcccgctctagtagttctcacgctcattcttccgctgtacctctgctccctcattcggagcgtagctgggtatgaatgaaattccgggcttgtagcacagagaaaacttctctcccacaattggnttggtgctggggaggaagctcctgattggtggaaagtccgaggaagtgggcaagccggagggatttcgtgtacctcaggtgccctcactctgaccggccccctatcattacgtaattttctacgactcgcggtagctcaggcagagcgggttcctgcagcggcgcgaccctctgacgtctccgcttctaattggtcaagagctgcgactgcagttctgaagcctaactggttgcccgtgccgcctcggaggtgaagtgtactgcgctgattggcttccaggcgccggccgcgtgtgatgtcccgggcaacgattggctctcgcctaccgggggcttctctcaccgggactcgggactcccgggaagtggaccggcagaagagggggctagctagctgtctctgcggaccagggagacccccgcgcccccccggtgtgaggcggcctcacagggccgggtgggctggcgagccgacgcggcggcggaggaggctgtgaggagtgtgtggaacaggacccgggacagaggaaccatggctccgcagaacctgagcaccttttgcctgttgctgctatacctcatcggggcggtgattgccggacgagatttctataagatcttgggggtgcctcgaagtgcctctataaaggatattaaaaaggcctataggaaactagccctgcagcttcatcccgaccggaaccctgatgatccacaagcccaggagaaattccaggatctgggtgctgcttatgaggttctgtcagatagtgagaaacggaaacagtacgatacttatggtgaagaaggattaaaagatggtcatcagagctcccatggagacattttttcacacttctttggggattttggtttcatgtttggaggaacccctcgtcagcaagacagaaatattccaagaggaagtgatattattgtagatctagaagtcactttggaagaagtatatgcaggaaattttgtggaagtagttagaaacaaacctgtggcaaggcaggctcctggcaaacggaagtgcaattgtcggcaagagatgcggaccacccagctgggccctgggcgcttccaaatgacccaggaggtggtctgcgacgaatgccctaatgtcaaactagtgaatgaagaacgaacgctggaagtagaaatagagcctggggtgagagacggcatggagtacccctttattggagaaggcacccaatatttgaaaggagaggagatgatttgtacacaaatgtgacaatctcattagttgagtcactggttggctttgagatggatattactcacttggatggtcacaaggtacatatttcccgggataagatcaccaggccaggagcgaagctatggaagaaaggggaagggctccccaactttgacaacaacaatatcaagggctctttgataatcacttttgatgtggattttccaaaagaacagttaacagaggaagcgagagaaggtatcaaacagctactgaaacaagggtcagtgcagaaggtatacaatggactgcaaggatattgagagtgaataaaattggactttgtttaaaataagtgaataagcgatatttattatctgcaaggtttttttgtgtgtgtttttgtttttattttcaatatgcaagttaggcttaatttttttatctaatgatcatcatgaaatgaataagagggcttaagaatttgtccatttgcattcggaaaagaatgaccagcaaaaggtttactaatacctctccctttggggatttaatgtctggtgctgccgcctgagtttcaagaattaaagctgcaagaggactccaggagcaaaagaaacacaatatagagggttggagttgttagcaatttcattcaaaatgccaactggagaagtctgtttttaaatacattttgttgttattttt

SEQ ID NO: 36657 - DNA, 2428 bp, Homo sapiens
  misc_feature (418)..(418): n is a, c, g, or t
  misc_feature (1691)..(1691): n is a, c, g, or t
  misc_feature (1726)..(1727): n is a, c, g, or t
  misc_feature (1731)..(1731): n is a, c, g, or t
  misc_feature (1744)..(1744): n is a, c, g, or t
  misc_feature (1751)..(1751): n is a, c, g, or t
  misc_feature (1763)..(1763): n is a, c, g, or t
  misc_feature (1767)..(1767): n is a, c, g, or t
  misc_feature (1769)..(1769): n is a, c, g, or t
  misc_feature (1786)..(1786): n is a, c, g, or t
  misc_feature (1788)..(1789): n is a, c, g, or t
  misc_feature (1791)..(1792): n is a, c, g, or t
  misc_feature (1794)..(1794): n is a, c, g, or t
  misc_feature (1801)..(1801): n is a, c, g, or t
  misc_feature (1805)..(1805): n is a, c, g, or t
  misc_feature (1807)..(1807): n is a, c, g, or t
  misc_feature (1809)..(1809): n is a, c, g, or t
  misc_feature (1816)..(1819): n is a, c, g, or t
  misc_feature (1821)..(1821): n is a, c, g, or t
  misc_feature (1823)..(1823): n is a, c, g, or t
  misc_feature (1832)..(1833): n is a, c, g, or t
  misc_feature (1835)..(1835): n is a, c, g, or t
  misc_feature (1837)..(1838): n is a, c, g, or t
  misc_feature (1840)..(1840): n is a, c, g, or t
  misc_feature (1853)..(1853): n is a, c, g, or t
  misc_feature (1858)..(1858): n is a, c, g, or t
  misc_feature (1860)..(1860): n is a, c, g, or t
  misc_feature (1868)..(1868): n is a, c, g, or t
  misc_feature (1870)..(1870): n is a, c, g, or t
  misc_feature (1872)..(1874): n is a, c, g, or t
  misc_feature (1888)..(1889): n is a, c, g, or t
  misc_feature (1897)..(1897): n is a, c, g, or t
  misc_feature (1900)..(1901): n is a, c, g, or t
  misc_feature (1903)..(1903): n is a, c, g, or t
  misc_feature (1906)..(1906): n is a, c, g, or t
  misc_feature (1920)..(1921): n is a, c, g, or t
  misc_feature (1924)..(1924): n is a, c, g, or t
  misc_feature (1933)..(1933): n is a, c, g, or t
  misc_feature (1937)..(1938): n is a, c, g, or t
  misc_feature (1940)..(1940): n is a, c, g, or t
  misc_feature (1947)..(1947): n is a, c, g, or t
  misc_feature (1952)..(1952): n is a, c, g, or t
  misc_feature (1955)..(1955): n is a, c, g, or t
  misc_feature (1959)..(1959): n is a, c, g, or t
  misc_feature (1962)..(1964): n is a, c, g, or t
  misc_feature (1968)..(1968): n is a, c, g, or t
  misc_feature (1972)..(1972): n is a, c, g, or t
  misc_feature (1974)..(1974): n is a, c, g, or t
  misc_feature (1977)..(1978): n is a, c, g, or t
  misc_feature (1980)..(1980): n is a, c, g, or t
  misc_feature (1985)..(1985): n is a, c, g, or t
  misc_feature (1988)..(1988): n is a, c, g, or t
  misc_feature (1997)..(1997): n is a, c, g, or t
  misc_feature (2000)..(2000): n is a, c, g, or t
  misc_feature (2003)..(2003): n is a, c, g, or t
  misc_feature (2010)..(2010): n is a, c, g, or t
  misc_feature (2013)..(2013): n is a, c, g, or t
accgagacctggcggaccccgttgctagagcggcagattgcggctcaagcgtctgagaaaatctaggctggggtcgagagtccgcaacagtggcacctggagccagacccaccgctttctggtgtcgcgcctttcaacccgggggggtaggaagctttctgttgctccgcataactgtggtcagctaatagctgctgcctttccgagacagttgtcttatggagttgcttggagaacgtaaaataagaggcctaagcaatgcgtctgatgtacacctgtcgtggaataactgttcccgctctagtagttctcacgctcattcttccgctgtacctctgctccctcattcggagcgtagctgggtatgaatgaaattccgggcttgtagcacagagaaaacttctctcccacaattggnttggtgctggggaggaagctcctgattggtggaaagtccgaggaagtgggcaagccggagggatttcgtgtacctcaggtgccctcactctgaccggccccctatcattacgtaattttctacgactcgcggtagctcaggcagagcgggttcctgcagcggcgcgaccctctgacgtctccgcttctaattggtcaagagctgcgactgcagttctgaagcctaactggttgcccgtgccgcctcggaggtgaagtgtactgcgctgattggcttccaggcgccggccgcgtgtgatgtcccgggcaacgattggctctcgcctaccgggggcttctctcaccgggactcgggactcccgggaagtggaccggcagaagagggggctagctagctgtctctgcggaccagggagacccccgcgcccccccggtgtgaggcggcctcacagggccgggtgggctggcgagccgacgcggcggcggaggaggctgtgaggagtgtgtggaacaggacccgggacagaggaaccatggctccgcagaacctgagcaccttttgcctgttgctgctatacctcatcggggcggtgattgccggacgagatttctataagatcttgggggtgcctcgaagtgcctctataaaggatattaaaaaggcctataggaaactagccctgcagcttcatcccgaccggaaccctgatgatccacaagcccaggagaaattccaggatctgggtgctgcttatgaggttctgtcagatagtgagaaacggaaacagtacgatacttatggtgaagaaggattaaaagatggtcatcagagctcccatggagacattttttcacacttctttggggattttggtttcatgtttggaggaacccctcgtcagcaagacagaaatattccaagaggaagtgatattattgtagatctagaagtcactttggaagaagtatatgcaggaaattttgtggaagtagttagaaacaaacctgtggcaaggcaggctcctggcaaacggaagtgcaattgtcggcaagagatgcggaccacccagctgggccctgggcgcttccaaatgacccaggaggtggtctgcgacgaatgccctaatgtcaaactagtgaatgaagaacgaacgctggaagtagaaatagagcctggggtgagagacggcatggagtacccctttattggagaaggccctcactgtggatgggggagccctggagattttacggttcccgaatgcaaaaggttntcaaagcaccccaaatattttgaaaaggagaggcnnaccncccgccacacacnaccgccncacaccccattncccnanccaccccccccccctcncnngnncnccacccncccncncngctcccnnnncncnccccccccnncncnncnccccccccccccnccccncnccatggancnannnccaagccccccccnnccttcacnacnncnatnccaagggccccccnncanccacccccnatgnncnccccccnaaagnacncctnacnnnccancccncncanncncccanacncccactganacnagncccaccnccnaaggtatacaatggactgcaaggatattgagagtgaataaaattggactttgtttaaaataagtgaataagcgatatttattatctgcaaggtttttttgtgtgtgtttttgtttttattttcaatatgcaagttaggcttaatttttttatctaatgatcatcatgaaatgaataagagggcttaagaatttgtccatttgcattcggaaaagaatgaccagcaaaaggtttactaatacctctccctttggggatttaatgtctggtgctgccgcctgagtttcaagaattaaagctgcaagaggactccaggagcaaaagaaacacaatatagagggttggagttgttagcaatttcattcaaaatgccaactggagaagtctgtttttaaatacattttgttgttattttt

SEQ ID NO: 36658 - DNA, 1968 bp, Homo sapiens
  misc_feature (418)..(418): n is a, c, g, or t
  misc_feature (1837)..(1838): n is a, c, g, or t
accgagacctggcggaccccgttgctagagcggcagattgcggctcaagcgtctgagaaaatctaggctggggtcgagagtccgcaacagtggcacctggagccagacccaccgctttctggtgtcgcgcctttcaacccgggggggtaggaagctttctgttgctccgcataactgtggtcagctaatagctgctgcctttccgagacagttgtcttatggagttgcttggagaacgtaaaataagaggcctaagcaatgcgtctgatgtacacctgtcgtggaataactgttcccgctctagtagttctcacgctcattcttccgctgtacctctgctccctcattcggagcgtagctgggtatgaatgaaattccgggcttgtagcacagagaaaacttctctcccacaattggnttggtgctggggaggaagctcctgattggtggaaagtccgaggaagtgggcaagccggagggatttcgtgtacctcaggtgccctcactctgaccggccccctatcattacgtaattttctacgactcgcggtagctcaggcagagcgggttcctgcagcggcgcgaccctctgacgtctccgcttctaattggtcaagagctgcgactgcagttctgaagcctaactggttgcccgtgccgcctcggaggtgaagtgtactgcgctgattggcttccaggcgccggccgcgtgtgatgtcccgggcaacgattggctctcgcctaccgggggcttctctcaccgggactcgggactcccgggaagtggaccggcagaagagggggctagctagctgtctctgcggaccagggagacccccgcgcccccccggtgtgaggcggcctcacagggccgggtgggctggcgagccgacgcggcggcggaggaggctgtgaggagtgtgtggaacaggacccgggacagaggaaccatggctccgcagaacctgagcaccttttgcctgttgctgctatacctcatcggggcggtgattgccggacgagatttctataagatcttgggggtgcctcgaagtgcctctataaaggatattaaaaaggcctataggaaactagccctgcagcttcatcccgaccggaaccctgatgatccacaagcccaggagaaattccaggatctgggtgctgcttatgaggttctgtcagatagtgagaaacggaaacagtacgatacttatggtgaagaaggattaaaagatggtcatcagagctcccatggagacattttttcacacttctttggggattttggtttcatgtttggaggaacccctcgtcagcaagacagaaatattccaagaggaagtgatattattgtagatctagaagtcactttggaagaagtatatgcaggaaattttgtggaagtagttagaaacaaacctgtggcaaggcaggctcctggcaaacggaagtgcaattgtcggcaagagatgcggaccacccagctgggccctgggcgcttccaaatgacccaggaggtggtctgcgacgaatgccctaatgtcaaactagtgaatgaagaacgaacgctggaagtagaaatagagcctggggtgagagacggcatggagtacccctttattggagaaggtgagcctcacgtggatggggagcctggagatttacggttccgaatcaaagttgtcaagcacccaatatttgaaaggagaggagatgatttgtacacaaatgtgacaatctcattagttgagtcactggttggctttgagatggatattactcacttggatggtcacaagggtacataatttcccgggataagatctacaggcannggcgaagctatgggagaacgggggcggctcccccatttggcgacacatatccagggcctggaaatcctttgggtgggtttcccaagaaaggttccaaggagcggagaaggtcttaccgcttggacgggcg

SEQ ID NO: 36659 - DNA, 1881 bp, Homo sapiens
  misc_feature (418)..(418): n is a, c, g, or t
accgagacctggcggaccccgttgctagagcggcagattgcggctcaagcgtctgagaaaatctaggctggggtcgagagtccgcaacagtggcacctggagccagacccaccgctttctggtgtcgcgcctttcaacccgggggggtaggaagctttctgttgctccgcataactgtggtcagctaatagctgctgcctttccgagacagttgtcttatggagttgcttggagaacgtaaaataagaggcctaagcaatgcgtctgatgtacacctgtcgtggaataactgttcccgctctagtagttctcacgctcattcttccgctgtacctctgctccctcattcggagcgtagctgggtatgaatgaaattccgggcttgtagcacagagaaaacttctctcccacaattggnttggtgctggggaggaagctcctgattggtggaaagtccgaggaagtgggcaagccggagggatttcgtgtacctcaggtgccctcactctgaccggccccctatcattacgtaattttctacgactcgcggtagctcaggcagagcgggttcctgcagcggcgcgaccctctgacgtctccgcttctaattggtcaagagctgcgactgcagttctgaagcctaactggttgcccgtgccgcctcggaggtgaagtgtactgcgctgattggcttccaggcgccggccgcgtgtgatgtcccgggcaacgattggctctcgcctaccgggggcttctctcaccgggactcgggactcccgggaagtggaccggcagaagagggggctagctagctgtctctgcggaccagggagacccccgcgcccccccggtgtgaggcggcctcacagggccgggtgggctggcgagccgacgcggcggcggaggaggctgtgaggagtgtgtggaacaggacccgggacagaggaaccatggctccgcagaacctgagcaccttttgcctgttgctgctatacctcatcggggcggtgattgccggacgagatttctataagatcttgggggtgcctcgaagtgcctctataaaggatattaaaaaggcctataggaaactagccctgcagcttcatcccgaccggaaccctgatgatccacaagcccaggagaaattccaggatctgggtgctgcttatgaggttctgtcagatagtgagaaacggaaacagtacgatacttatggtgaagaaggattaaaagatggtcatcagagctcccatggagacattttttcacacttctttggggattttggtttcatgtttggaggaacccctcgtcagcaagacagaaatattccaagaggaagtgatattattgtagatctagaagtcactttggaagaagtatatgcaggaaattttgtggaagtagttagaaacaaacctgtggcaaggcaggctcctggcaaacggaagtgcaattgtcggcaagagatgcggaccacccagctgggccctgggcgcttccaaatgacccaggaggtggtctgcgacgaatgccctaatgtcaaactagtgaatgaagaacgaacgctggaagtagaaatagagcctggggtgagagacggcatggagtacccctttattggagaaggtgagcctcacgtggatggggagcctggagatttacggttccgaatcaaagttgtcaagcacccaatatttgaaaggagaggagatgatttgtacacaaatgtgacaatctcattagttgagtcactggttggctttgagatggatattactcacttggatggtcacaagtacatattcccgggttagtcacaggcaggccacgttgagacggagctccacttgcacacattcaggccttgatatcctt

SEQ ID NO: 36660 - DNA, 2351 bp, Homo sapiens
  misc_feature (418)..(418): n is a, c, g, or t
accgagacctggcggaccccgttgctagagcggcagattgcggctcaagcgtctgagaaaatctaggctggggtcgagagtccgcaacagtggcacctggagccagacccaccgctttctggtgtcgcgcctttcaacccgggggggtaggaagctttctgttgctccgcataactgtggtcagctaatagctgctgcctttccgagacagttgtcttatggagttgcttggagaacgtaaaataagaggcctaagcaatgcgtctgatgtacacctgtcgtggaataactgttcccgctctagtagttctcacgctcattcttccgctgtacctctgctccctcattcggagcgtagctgggtatgaatgaaattccgggcttgtagcacagagaaaacttctctcccacaattggnttggtgctggggaggaagctcctgattggtggaaagtccgaggaagtgggcaagccggagggatttcgtgtacctcaggtgccctcactctgaccggccccctatcattacgtaattttctacgactcgcggtagctcaggcagagcgggttcctgcagcggcgcgaccctctgacgtctccgcttctaattggtcaagagctgcgactgcagttctgaagcctaactggttgcccgtgccgcctcggaggtgaagtgtactgcgctgattggcttccaggcgccggccgcgtgtgatgtcccgggcaacgattggctctcgcctaccgggggcttctctcaccgggactcgggactcccgggaagtggaccggcagaagagggggctagctagctgtctctgcggaccagggagacccccgcgcccccccggtgtgaggcggcctcacagggccgggtgggctggcgagccgacgcggcggcggaggaggctgtgaggagtgtgtggaacaggacccgggacagaggaaccatggctccgcagaacctgagcaccttttgcctgttgctgctatacctcatcggggcggtgattgccggacgagatttctataagatcttgggggtgcctcgaagtgcctctataaaggatattaaaaaggcctataggaaactagccctgcagcttcatcccgaccggaaccctgatgatccacaagcccaggagaaattccaggatctgggtgctgcttatgaggttctgtcagatagtgagaaacggaaacagtacgatacttctttggggattttggtttcatgtttggaggaacccctcgtcagcaagacagaaatattccaagaggaagtgatattattgtagatctagaagtcactttggaagaagtatatgcaggaaattttgtggaagtagttagaaacaaacctgtggcaaggcaggctcctggcaaacggaagtgcaattgtcggcaagagatgcggaccacccagctgggccctgggcgcttccaaatgacccaggaggtggtctgcgacgaatgccctaatgtcaaactagtgaatgaagaacgaacgctggaagtagaaatagagcctggggtgagagacggcatggagtacccctttattggagaaggtgagcctcacgtggatggggagcctggagatttacggttccgaatcaaagttgtcaagcacccaatatttgaaaggagaggagatgatttgtacacaaatgtgacaatctcattagttgagtcactggttggctttgagatggatattactcacttggatggtcacaaggtacatatttcccgggataagatcaccaggccaggagcgaagctatggaagaaaggggaagggctccccaactttgacaacaacaatatcaagggctctttgataatcacttttgatgtggattttccaaaagaacagttaacagaggaagcgagagaaggtatcaaacagctactgaaacaagggtcagtgcagaaggtatacaatggactgcaaggatattgagagtgaataaaattggactttgtttaaaataagtgaataagcgatatttattatctgcaaggtttttttgtgtgtgtttttgtttttattttcaatatgcaagttaggcttaatttttttatctaatgatcatcatgaaatgaataagagggcttaagaatttgtccatttgcattcggaaaagaatgaccagcaaaaggtttactaatacctctccctttggggatttaatgtctggtgctgccgcctgagtttcaagaattaaagctgcaagaggactccaggagcaaaagaaacacaatatagagggttggagttgttagcaatttcattcaaaatgccaactggagaagtctgtttttaaatacattttgttgttattttt

SEQ ID NO: 36661 - DNA, 1999 bp, Homo sapiens
  misc_feature (418)..(418): n is a, c, g, or t
accgagacctggcggaccccgttgctagagcggcagattgcggctcaagcgtctgagaaaatctaggctggggtcgagagtccgcaacagtggcacctggagccagacccaccgctttctggtgtcgcgcctttcaacccgggggggtaggaagctttctgttgctccgcataactgtggtcagctaatagctgctgcctttccgagacagttgtcttatggagttgcttggagaacgtaaaataagaggcctaagcaatgcgtctgatgtacacctgtcgtggaataactgttcccgctctagtagttctcacgctcattcttccgctgtacctctgctccctcattcggagcgtagctgggtatgaatgaaattccgggcttgtagcacagagaaaacttctctcccacaattggnttggtgctggggaggaagctcctgattggtggaaagtccgaggaagtgggcaagccggagggatttcgtgtacctcaggtgccctcactctgaccggccccctatcattacgtaattttctacgactcgcggtagctcaggcagagcgggttcctgcagcggcgcgaccctctgacgtctccgcttctaattggtcaagagctgcgactgcagttctgaagcctaactggttgcccgtgccgcctcggaggtgaagtgtactgcgctgattggcttccaggcgccggccgcgtgtgatgtcccgggcaacgattggctctcgcctaccgggggcttctctcaccgggactcgggactcccgggaagtggaccggcagaagagggggctagctagctgtctctgcggaccagggagacccccgcgcccccccggtgtgaggcggcctcacagggccgggtgggctggcgagccgacgcggcggcggaggaggctgtgaggagtgtgtggaacaggacccgggacagaggaaccatggctccgcagaacctgagcaccttttgcctgttgctgctatacctcatcggggcggtgattgccggacgagatttctataagatcttgggggtgcctcgaagtgcctctataaaggatattaaaaaggcctataggaaactagccctgcagcttcatcccgaccggaaccctgatgatccacaagcccaggagaaattccaggatctgggtgctgcttatgaggttctgtcagatagtgagaaacggaaacagtacgatacttatggtgaagaaggattaaaagatggtcatcagagctcccatggagacattttttcacacttctttggggattttggtttcatgtttggaggaacccctcgtcagcaagacagaaatattccaagaggaagtgatattattgtagatctagaagtcactttggaagaagtatatgcaggaaattttgtggaagtagttagaaacaaacctgtggcaaggcaggctcctggcaaacggaagtgcaattgtcggcaagagatgcggaccacccagctgggccctgggcgcttccaaatgacccaggaggtggtctgcgacgaatgccctaatgtcaaactagtgaatgaagaacgaacgctggaagtagaaatagagcctgggtgtaatctgctctgactaggtgagcctcacgtggatggggagcctggagatttacggttccgaatcaaagttgtcaagagaggagatgatttgtacacaaatgtgacaatctcattagttgagtcactggttggctttgagatggatattactcacttggatggtcacaaggtacatatttcccgggataagatcaccaggccaggagcgaagctatggaagaaaggggaagggctccccaactttgacaacaacaatatcaagggctatgtggattttccaaaagaacagttaacagaggaagcgagagaaggtatcaaacagctactgaaacaagggtcagtgcagaaggtatacaatggactgcaaggatattgagagtgaataaaattggactttgttta

SEQ ID NO: 36662 - DNA, 1031 bp, Homo sapiens
cggacgcgtgggtcgacccacgcgtccggttagaaacaaacctgtggcaaggcaggctcctggcaaacggaagtgcaattgtcggcaagagatgcggaccacccagctgggccctgggcgcttccaaatgacccaggaggtggtctgcgacgaatgccctaatgtcaaactagtgaatgaagaacgaacgctggaagtagaaatagagcctggggtgagagacggcatggagtacccctttattggagaaggtgagcctcacgtggatggggagcctggagatttacggttccgaatcaaagttgtcaagcacccaatatttgaaaggagaggagatgatttgtacacaaatgtgacaatctcattagttgagtcactggttggctttgagatggatattactcacttggatggtcacaaggtacatatttcccgggataagatcaccaggccaggagcgaagctatggaagaaaggggaagggctccccaactttgacaacaacaatatcaagggctctttgataatcacttttgatgtggattttccaaaagaacagttaacagaggaagcgagagaaggtatcaaacagctactgaaacaagggtcagtgcagaaggtatacaatggactgcaaggatattgagagtgaataaaattggactttgtttaaaataagtgaataagcgatatttattatctgcaaggtttttttgtgtgtgtttttgtttttattttcaatatgcaagttaggcttaatttttttatctaatgatcatcatgaaatgaataagagggcttaagaatttgtccatttgcattcggaaaagaatgaccagcaaaaggtttactaatacctctccctttggggatttaatgtctggtgctgccgcctgagtttcaagaattaaagctgcaagaggactccaggagcaaaagaaacacaatatagagggttggagttgttagcaatttcattcaaaatgccaactggagaagtctgtttttaaatacattttgttgttattttt

SEQ ID NO: 36663 - DNA, 820 bp, Homo sapiens
gtgctgactaaggatccccagcttacccttactggagaaggtgagcctcacgtggatggggagcctggagatttacggttccgaatcaaagttgtcaagcacccaatatttgaaaggagaggagatgatttgtacacaaatgtgacaatctcattagttgagtcactggttggctttgagatggatattactcacttggatggtcacaaggtacatatttcccgggataagatcaccaggccaggagcgaagctatggaagaaaggggaagggctccccaactttgacaacaacaatatcaagggctctttgataatcacttttgatgtggattttccaaaagaacagttaacagaggaagcgagagaaggtatcaaacagctactgaaacaagggtcagtgcagaaggtatacaatggactgcaaggatattgagagtgaataaaattggactttgtttaaaataagtgaataagcgatatttattatctgcaaggtttttttgtgtgtgtttttgtttttattttcaatatgcaagttaggcttaatttttttatctaatgatcatcatgaaatgaataagagggcttaagaatttgtccatttgcattcggaaaagaatgaccagcaaaaggtttactaatacctctccctttggggatttaatgtctggtgctgccgcctgagtttcaagaattaaagctgcaagaggactccaggagcaaaagaaacacaatatagagggttggagttgttagcaatttcattcaaaatgccaactggagaagtctgtttttaaatacattttgttgttattttt

SEQ ID NO: 36664 - DNA, 1748 bp, Homo sapiens
gcagtatgatcggtgtctagctgaagttgtctttaaatgcccttactcgtcacagtttaaacacttaggatgtggcaatcttaagtatcaatggcattttatgtccagctaacatcctaaagcattagaaattaaaaacgaaagacttttaaaaacatacatcaaacatgcttgcaccagagaagctttttaaaataatacactctcatagccaggtgctaatttaattttacttatgaaattaagagaggtgatgggttctagcaacagatattttcacggacatattctaaaaccactagagaattcgctacctctcagagccatcgatgctttgagctacctttataaacagggcacaaatgtttactgctgtggtttacaagaaaagggctactcacttattttgaaaccaacgaaccaacttttaactagggtgaacaaagcactcaaagtgctttgtgaaattggagcatacagagattttgagcttcaagtatttgctagttttaaaaagaatacaccttttctttaccttgtagcagcaattaaaagtcacacaaagcttgcatcgagtagggccaactgccacttgggtagcctatggtcacattcaatactgagaatgacttggaactcacagattaatatgaaagaagcagcgttcatcccaagacccatgctcacaattacagctccgtgccctgaggtagagttgagatttggattaagaaatagatttctaatacgactcaagatcatcctacaatattttctttggaaactaatttagcccatgatattttaaagagagacaagagaaggcctatttatcttgtctaagtgaacggcatttgtatattcataagctatttttggtaagaattttaaatcttttagctcaaggcctacagggcatcatgatctttgccttccttgaaaatacaatttaaattgtacaaacactttataaaaagctaattattggtgttagaacatgaccccacacaatgctgcttgacccctgaaactgacattcatgagcataacctttgttacattgttctttttgatgtaatttgtagaaatgttttttagttcgtaatggaaaatgtatgtaccctgaaaaattacttattttgtttaactttggtataaaggtgttgggcattttcttggggagggggggattacaaaagaagtttgtctcccacatcaaaaaacgttcaaagaaattaagtatttattatattttttgcagatgtttccatacaattcacataacctttttgtaaagagagatgaagaaatggattaaagatttttaatatttgaaatggtaaatagaactaatttattgtaatatatttctgttatttatagatgtttccttaatgttttactgtgcattaccactttcatttaagccttatccttgtgaatttaccatttcttttttaaaacatgtctagatgcatattttaaataactggaatgtaaatcactagcatatctgaattcccaaatgtaatttttaaaaattattttggtttggaaaaaaaagattcatttgaaagccttcagatggaggggtgggaacatttttatggctttatgaattggaatttcataggcttatttacctagattgtgtgtgaacaaaaaaatattgtaaatagatgaatgtttcccataatgtaaaaagaagaaattaataaaataattaatgcactgctaaaaaaaatgtg

SEQ ID NO: 36665 - DNA, 1539 bp, Homo sapiens
gcagtatgatcggtgtctagctgaagttgtctttaaatgcccttactcgtcacagtttaaacacttaggatgtggcaatcttaagtatcaatggcattttatgtccagctaacatcctaaagcattagaaattaaaaacgaaagacttttaaaaacatacatcaaacatgcttgcaccagagaagctttttaaaataatacactctcatagccaggtgctaatttaattttacttatgaaattaagagaggtgatgggttctagcaacagatattttcacggacatattctaaaaccactagagaattcgctacctctcagagccatcgatgctttgagctacctttataaacagggcacaaatgtttactgctgtggtttacaagaaaagggctactcacttattttgaaaccaacgaaccaacttttaactagggtgaacaaagcactcaaagtgctttgtgaaattggagcatacagagattttgagcttcaagtatttgctagttttaaaaagaatacaccttttctttaccttgtagcagcaattaaaagtcacacaaagcttgcatcgagtagggccaactgccacttgggtagcctatggtcacattcaatactgagaatgacttggaactcacagattaatatgaaagaagcagcgttcatcccaagacccatgctcacaattacagctccgtgccctgaggtagagttgagatttggattaagaaatagatttctaatacgactcaagatcatcctacaatattttctttggaaactaatttagcccatgatattttaaagagagacaagagaaggcctatttatcttgtctaagtgaacggcatttgtatattcataagctatttttggtaagaattttaaatcttttagctcaaggcctacagggcatcatgatctttgccttccttgaaaatacaatttaaattgtacaaacactttataaaaagctaattattggtgttagaacatgaccccacacaatgctgcttgacccctgaaactgacattcatgagcataacctttgttacattgttctttttgatgtaatttgtagaaatgttttttagttcgtaatggaaaatgtatgtaccctgaaaaattacttattttgtttaactttggtataaaggtgttgggcattttcttggggagggggggattacaaaagaagtttgtctcccacatcaaaaaacgttcaaagaaattaagtatttattatattttttgcagatgtttccatacaattcacataacctttttgtaaagagagatgaagaaatggattaaagatttttaatatttgaaatggtaaatagaactaatttattgtaatatatttctgttatttatagatgtttccttaatgttttactgtgcattaccaatttcataggcttatttacctagattgtgtgtgaacaaaaaaatattgtaaatagatgaatgtttcccataatgtaaaaagaagaaattaataaaataattaatgcactgctaaaaaaaatgtg

SEQ ID NO: 36666 - DNA, 324 bp, Homo sapiens
cccaggagctcaagatcagcctgggcaacatagtgaagccccatctctacaaaataaaattgaatttaaaactagctgggcatagtggcacgcacctgtcatcccagctactcaggaggctgagatgggaggacaccttgaacccaggagtttgaggttacagtgagctatgatcatgccactgcactctagcctgggtgacagagcgagatcttgtctctaaatgaaaaagaaaactaattaaaaatgtcattgagtaggaaagaaaagatcatacatactatgctaagacttatgtgtatgtacatcagcacttatcaagct

SEQ ID NO: 36667 - DNA, 286 bp, Homo sapiens
catgttacacagggtagcatcagtaatatacccatttaaaaattatctgttcctctcttagtggtttgaccctacatttctaagtacatacataatttctgctgctagttttattttaacatatctacattgcacaaagacaggtacaagtaactgaattcaagtgagccttgacactttaatgagggtgttctgtgctgattaagcacttctgtaaatatcaagaattatactatgcaaagacttgtttgtacgtcagcactaagaacttctattgagtaggaaa

SEQ ID NO: 36668 - DNA, 326 bp, Homo sapiens
ccagttagacttccatgggtcccacaaatgcacaaaccctccatcttgggctgactgcactgagtgtttgctgacctgcatctctctgggatggaacccccagaggttgactcttggccacaaccactactaagatctcttcagtgctacctctaaactgggaaaggaatataaacactgagattccaccagggctgcagttggcagctcaggaatgccaagttttgaactgtagccaggactgaagggcacaaggaacctacatcttcagaacactgagagggaacatggctgcaactgtgaggaaacataggggaaacatataa

SEQ ID NO: 36669 - DNA, 291 bp, Homo sapiens
ggcagagggaacaacaaaaaaaaagttttttcagtgaatgaataaataaatgagacttgaaagatttttacctttgtgttttctctctgacaatcaattatacctttcacttatctcttgtttctgatgaacaagtttaacattcaacaagcaacatggcttcttgcaacatcaacaaatgcccatcattttcaaggccgcatagtattccattctatggagagccatgatttatccaatcctctatcgatggactttattgtcattttcatcttcttataaataatgatg

SEQ ID NO: 36670 - DNA, 449 bp, Homo sapiens
catgtaggttaagagctccctggagtaagactgaccagaattctgctttggcctcttattatctgatcaagtttctcaacttctctgattttaaattctctttgtctataaaattgagataatagtattgggttggtttgtgaagtagatgcttaaattaacttaaagggtttagcactttgcctatcatgtaaatggtcaataaatgttagtaatgattaaataatattgttgaatgaattgctctattagtctttcattctcttcttccctatttttttttactcttttctatgtatctttctctcatttttgctctcttggtatgccaaagggacattactattttcagtcaaatccacacggcttatggagaagacttatctcccaagaattgttttggtttgttgtaaccacttagagaaatttgttttattatcaaggacaaa

SEQ ID NO: 36671 - DNA, 498 bp, Homo sapiens
aaaggaatagaggataaagatttaatatcagataatacaagtaaaactcctaacccagtgggagaaaatatcaactgttagcttataaatcccctgaaactcaccaaggcaaatgaaatatatcctcattttttaaattagccacagggagtaactgaagagatgtagaagacattttatatcatgtaaaaacaagtgttttatgacactttttggccaaatagtgagaaaataaaggtaaaacaatacatatatgttagaaatgagcatatttgtagagcttcatatttgattatgtattcatatgcatttgggctcatattatctgttcttatagttggcttcatagttctggtttttagacaacaagccctcttgcccctgctcctcggcacagccagcaaggagtgtagaggggggaaacagcggaatagagaggtcacttggccgccatattatcctcctctccctctacttatcttttcataagctctttat

SEQ ID NO: 36672 - DNA, 611 bp, Homo sapiens
gctctcctttctgactgtgctctgtccatttcctctgatagttctacagtgtcagccggttgcctacaaggagcttatcggacaatatctgtgcagtctgtgggcagaagatcattgtggagcttgatgaagaagggctcattgaaaacacctaccagctttcctgtaatcatgtctttcatgaattctgcatccgaggttggtgtatcgttgggaaaaagcagacttgcccttactgcaaagagaaagttgatttgaagaggatgatcagtaatccctgggagcgcacacattttctgtatggacaaatcctggattggcttcgttatttggtggcctggcaacctgtggtgataggaatagttcaaggcattaactattcactagggctggaataggacagcagaccccagaagcaacatactgcatggttgaaatccttggtccaacatttaatattaatttttttaattttagagatgatcccaagtgtttagaaaactaagtaaactttgttgtcaagcaatttgtccatgtggaaagaatttaaagagaagctgaacaatggaataaacaaataaagcatgttttttcatctttcccattaaaac

SEQ ID NO: 36673 - DNA, 553 bp, Homo sapiens
atattcgttctggttatctattattaattattcgtgggcgggatggtttagctgcacgactctcttaatttatccatcgctacagttctacagtgtcagccggttgcctacaaggagcttatcggacaatatctgtgcagtctgtgggcagaagatcattgtggagcttgatgaagaagggctcattgaaaacacctaccagctttcctgtaatcatgtctgggagcgcacacattttctgtatggacaaatcctggattggcttcgttatttggtggcctggcaacctgtggtgataggaatagttcaaggcattaactattcactagggctggaataggacagcagaccccagaagcaacatactgcatggttgaaatccttggtccaacatttaatattaatttttttaattttagagatgatcccaagtgtttagaaaactaagtaaactttgttgtcaagcaatttgtccatgtggaaagaatttaaagagaagctgaacaatggaataaacaaataaagcatgttttttcatctttcccattaaaac

SEQ ID NO: 36674 - DNA, 1579 bp, Homo sapiens
ctcctccagtcctgccgcccggtaacaaaaccggggttcccgccacacgcacccggtagggctcaggacgctttatcggcgacaatggctggctgaatgggaggcctgaggtcctgaaggaaccgggggtgctggcgaccgggacctcgaggccgctgctggggaggacgctggccagcgtgcagggggcggaggcggggcgtgccgggaggctcccatctcccgccccgcacaacccgggcagggccgccgctccgccgccgccgcagatccggctctcaccctcggctcccgaggccccgcggcgcctccttctgcggactctgcgggaccctccccggcaggcgctgtgccctggagaaggcacagtggctcaggcatggccgcggggacggcggcgcggaaggcagcgccggtgctggaggcccccccgcagcaggagcagctctctcatacaaagctttctgcagaagacacatggaacctgcagcaggagaggatgtacaagatgcaccggggccacgattccatgcacgtggaaatgatcttgatcttcctctgcgttctggtcattgcccagatagtgctggttcagtggagacagaggcatggccgatcctacaatctggtgaccttgttgcagatgtgggttgtccccttatatttcacgataaaattatactggtggcggtttctgtctatgtgggggatgttctccgttattaccagttacatcctcttcagagctacccgaaaacccctctcaggaaggacaccacgattggtctacaaatggtttcttttgatctacaaactcagctatgcatttggtgttgtgggttacttggcgatcgtgtttacaatgtgtggattcaatctgtttttcaaaatcaaagctagagattccatggattttggcattgtgtctttgttctacggcctctactatggagtaatggggagagactttgccgagatctgctcagactacatggcttccactatagggttctacagtgtcagccggttgcctacaaggagcttatcggacaatatctgtgcagtctgtgggcagaagatcattgtggagcttgatgaagaagggctcattgaaaacacctaccagctttcctgtaatcatgtctttcatgaattctgcatccgaggttggtgtatcgttgggaaaaagcagacttgcccttactgcaaagagaaagttgatttgaagaggatgatcagtaatccctgggagcgcacacattttctgtatggacaaatcctggattggcttcgttatttggtggcctggcaacctgtggtgataggaatagttcaaggcattaactattcactagggctggaataggacagcagaccccagaagcaacatactgcatggttgaaatccttggtccaacatttaatattaatttttttaattttagagatgatcccaagtgtttagaaaactaagtaaactttgttgtcaagcaatttgtccatgtggaaagaatttaaagagaagctgaacaatggaataaacaaataaagcatgttttttcatctttcccattaaaac

SEQ ID NO: 36675 - DNA, 1791 bp, Homo sapiens
ctcctccagtcctgccgcccggtaacaaaaccggggttcccgccacacgcacccggtagggctcaggacgctttatcggcgacaatggctggctgaatgggaggcctgaggtcctgaaggaaccgggggtgctggcgaccgggacctcgaggccgctgctggggaggacgctggccagcgtgcagggggcggaggcggggcgtgccgggaggctcccatctcccgccccgcacaacccgggcagggccgccgctccgccgccgccgcagatccggctctcaccctcggctcccgaggccccgcggcgcctccttctgcggactctgcgggaccctccccggcaggcgctgtgccctggagaaggcacagtggctcaggcatggccgcggggacggcggcgcggaaggcagcgccggtgctggaggcccccccgcagcaggagcagctctctcatacaaagctttctgcagaagacacatggaacctgcagcaggagaggatgtacaagatgcaccggggccacgattccatgcacgtggaaatgatcttgatcttcctctgcgttctggtcattgcccagatagtgctggttcagtggagacagaggcatggccgatcctacaatctggtgaccttgttgcagatgtgggttgtccccttatatttcacgataaaattatactggtggcggtttctgtctatgtgggggatgttctccgttattaccagttacatcctcttcagagctacccgaaaacccctctcaggaaggacaccacgattggtctacaaatggtttcttttgatctacaaactcagctatgcatttggtgttgtgggttacttggcgatcgtgtttacaatgtgtggattcaatctgtttttcaaaatcaaagctagagattccatggattttggcattgtgtctttgttctacggcctctactatggagtaatggggagagactttgccgagatctgctcagactacatggcttccactatagggttctacagtgtcagccggttgcctacaaggagcttatcggacaatatctgtgcagtctgtgggcagaagatcattgtggagcttgatgaagaagggctcattgaaaacacctaccagctttcctgtaatcatgtgtgctgaggacactgaaatgaatgagacatagtcctacaggtaacacatggtctaggagaaacatgtcccttacagaacctcccgaaaaaagcgatgtgcctcatcaagtcatgactccaccactagaccctgaagatgggaccattccatgccatcatgaaccagacattgccttttcatatctagaagcctccctaacaagatgcttcagctttcatgaattctgcatccgaggttggtgtatcgttgggaaaaagcagacttgcccttactgcaaagagaaagttgatttgaagaggatgatcagtaatccctgggagcgcacacattttctgtatggacaaatcctggattggcttcgttatttggtggcctggcaacctgtggtgataggaatagttcaaggcattaactattcactagggctggaataggacagcagaccccagaagcaacatactgcatggttgaaatccttggtccaacatttaatattaatttttttaattttagagatgatcccaagtgtttagaaaactaagtaaactttgttgtcaagcaatttgtccatgtggaaagaatttaaagagaagctgaacaatggaataaacaaataaagcatgttttttcatctttcccattaaaac

SEQ ID NO: 36676 - DNA, 1812 bp, Homo sapiens
ctcctccagtcctgccgcccggtaacaaaaccggggttcccgccacacgcacccggtagggctcaggacgctttatcggcgacaatggctggctgaatgggaggcctgaggtcctgaaggaaccgggggtgctggcgaccgggacctcgaggccgctgctggggaggacgctggccagcgtgcagggggcggaggcggggcgtgccgggaggctcccatctcccgccccgcacaacccgggcagggccgccgctccgccgccgccgcagatccggctctcaccctcggctcccgaggccccgcggcgcctccttctgcggactctgcgggaccctccccggcaggcgctgtgccctggagaaggcacagtggctcaggcatggccgcggggacggcggcgcggaaggcagcgccggtgctggaggcccccccgcagcaggagcagctctctcatacaaagctttctgcagaagacacatggaacctgcagcaggagaggatgtacaagatgcaccggggccacgattccatgcacgtggaaatgatcttgatcttcctctgcgttctggtcattgcccagatagtgctggttcagtggagacagaggcatggccgatcctacaatctggtgaccttgttgcagatgtgggttgtccccttatatttcacgataaaattatactggtggcggtttctgtctatgtgggggatgttctccgttattaccagttacatcctcttcagagctacccgaaaacccctctcaggaaggacaccacgattggtctacaaatggtttcttttgatctacaaactcagctatgcatttggtgttgtgggttacttggcgatcgtgtttacaatgtgtggattcaatctgtttttcaaaatcaaagctagagattccatggattttggcattgtgtctttgttctacggcctctactatggagtaatggggagagactttgccgagatctgctcagactacatggcttccactatagggttctacagtgtcagccggttgcctacaaggagcttatcggacaatatctgtgcagtctgtgggcagaagatcattgtggagcttgatgaagaagggctcattgaaaacacctaccagctttcctgtaatcatgtgtgctgaggacactgaaatgaatgagacatagtcctacaggtaacacatggtctaggagaaacatgtcccttacagaacctcccgaaaaaagcgatgtgcctcatcaagtcatgactccaccactagaccctgaagatgggaccattccatgccatcatgaaccagacattgccttttcatatctagaagcctccctaacaagatgcttcagctttcatgaattctgcatccgaggttggtgtatcgttgggaaaaagcagacttgcccttactgcaaagagaaagttgatttgaagaggatgatcagtaatccctgggagcgcacacattttctgtatggacaaatcctggattggcttcgttatttggtggcctggcaacctgtggtgataggaatagttcaaggcattaactattcactagggctggaataggacagcagaccccagaagcaacatactgcatggttgaaatccttggtccaacatttaatattaatttttttaattttagagatgatcccaagtgtttagaaaactaagtaaactttgttgtcaagcaatttgtccatgtggaaagaatttaaagagaagctgaacaatggaataaacaaacaacaaaacgtcttttgtttgtcataacgatatcaatgtcaatattataattct

SEQ ID NO: 36677 - DNA, 503 bp, Homo sapiens
tcacataaggggcttttaattgagcacatagaattaacaagaaaggaaatacccattcattacattgtttattatatttgcaaatgacatttatgaatatttctgctacttggctgtatatagaacaacctccttaactgagatttagctgggagcgcacacattttctgtatggacaaatcctggattggcttcgttatttggtggcctggcaacctgtggtgataggaatagttcaaggcattaactattcactagggctggaataggacagcagaccccagaagcaacatactgcatggttgaaatccttggtccaacatttaatattaatttttttaattttagagatgatcccaagtgtttagaaaactaagtaaactttgttgtcaagcaatttgtccatgtggaaagaatttaaagagaagctgaacaatggaataaacaaacaacaaaacgtcttttgtttgtcataacgatatcaatgtcaatattataattct

SEQ ID NO: 36678 - DNA, 1437 bp, Homo sapiens
ctcctccagtcctgccgcccggtaacaaaaccggggttcccgccacacgcacccggtagggctcaggacgctttatcggcgacaatggctggctgaatgggaggcctgaggtcctgaaggaaccgggggtgctggcgaccgggacctcgaggccgctgctggggaggacgctggccagcgtgcagggggcggaggcggggcgtgccgggaggctcccatctcccgccccgcacaacccgggcagggccgccgctccgccgccgccgcagatccggctctcaccctcggctcccgaggccccgcggcgcctccttctgcggactctgcgggaccctccccggcaggcgctgtgccctggagaaggcacagtggctcaggcatggccgcggggacggcggcgcggaaggcagcgccggtgctggaggcccccccgcagcaggagcagctctctcatacaaagctttctgcagaagacacatggaactggtgaccttgttgcagatgtgggttgtccccttatatttcacgataaaattatactggtggcggtttctgtctatgtgggggatgttctccgttattaccagttacatcctcttcagagctacccgaaaacccctctcaggaaggacaccacgattggtctacaaatggtttcttttgatctacaaactcagctatgcatttggtgttgtgggttacttggcgatcgtgtttacaatgtgtggattcaatctgtttttcaaaatcaaagctagagattccatggattttggcattgtgtctttgttctacggcctctactatggagtaatggggagagactttgccgagatctgctcagactacatggcttccactatagggttctacagtgtcagccggttgcctacaaggagcttatcggacaatatctgtgcagtctgtgggcagaagatcattgtggagcttgatgaagaagggctcattgaaaacacctaccagctttcctgtaatcatgtctttcatgaattctgcatccgaggttggtgtatcgttgggaaaaagcagacttgcccttactgcaaagagaaagttgatttgaagaggatgatcagtaatccctgggagcgcacacattttctgtatggacaaatcctggattggcttcgttatttggtggcctggcaacctgtggtgataggaatagttcaaggcattaactattcactagggctggaataggacagcagaccccagaagcaacatactgcatggttgaaatccttggtccaacatttaatattaatttttttaattttagagatgatcccaagtgtttagaaaactaagtaaactttgttgtcaagcaatttgtccatgtggaaagaatttaaagagaagctgaacaatggaataaacaaataaagcatgttttttcatctttcccattaaaac

SEQ ID NO: 36679 - DNA, 1273 bp, Homo sapiens
ctcctccagtcctgccgcccggtaacaaaaccggggttcccgccacacgcacccggtagggctcaggacgctttatcggcgacaatggctggctgaatgggaggcctgaggtcctgaaggaaccgggggtgctggcgaccgggacctcgaggccgctgctggggaggacgctggccagcgtgcagggggcggaggcggggcgtgccgggaggctcccatctcccgccccgcacaacccgggcagggccgccgctccgccgccgccgcagatccggctctcaccctcggctcccgaggccccgcggcgcctccttctgcggactctgcgggaccctccccggcaggcgctgtgccctggagaaggcacagtggctcaggcatggccgcggggacggcggcgcggaaggcagcgccggtgctggaggcccccccgcagcaggagcagctctctcatacaaagctttctgcagaagacacatggaacctgcagcaggagaggatgtacaagatgcaccggggccacgattccatgcacgtggaaatgatcttgatcttcctctgcgttctggtcattgcccagatagtgctggttcagtggagacagaggcatggccgatcctacaatctggtgaccttgttgcagatgtgggttgtccccttatatttcacgataaaattatactggtggcggtttctgtctatgtgggggatgttctccgttattaccagttacatcctcttcagagctacccgaaaacccctctcaggaaggacaccacgattggtctacaaatggtttcttttgatctacaaactcagctatgcatttggtgttgtgggttacttggcgatcgtgtttacaatgtgtggattcaatctgtttttcaaaatcaaagctagagattccatggattttggcattgtgtctttgttctacggcctctactatggagtaatggggagagactttgccgagatctgctcagactacatggcttccactatagggttctacagtgtcagccggttgcctacaaggagcttatcggacaatatctgtgcagtctgtgggcagaagatcattgtggagcttgatgaagaagggctcattgaaaacacctaccagctttcctgtaatcatgttttaaatgccagaaaacattccactctttatgttctatattttccacattaagggctgtagtggaaatgtgatgagacactgcaaaaaataggtaaaatatatggaagaatattcaggatggatggatgg

SEQ ID NO: 36680 - DNA, 425 bp, Homo sapiens
gggtttcaccatgttggccaggctgttcttgaactcctgacctcaggtgatccacctgcctcagcctcccaaagtggctgagattacaggcgtgaccaccacgcccggccaagtcctacttctaggtgtgaaaaatgattgcaaactttaacaccactacagtaagcttttaaaaatttgacctacaataactttgaagactgaaagttattctgttaatgtaatgtactgaaagtccaacactgcagattagctcagcaataccattttaggaatattcacttaagaactaaaagcatcaaaacacatatgcaacaaaccatgaagcatcatgcatcaaatctttctactagttaaatctatcaaacagaagagtataacaagaaaatcaatgcctaatattgagataactgatccaaacattc

SEQ ID NO: 36681 - DNA, 1525 bp, Homo sapiens
aaaattctatagtgaatcctgtttgcttcatggactgagtatagtagcgtatctttttctgtgactagaagttatttatgaaagagaatcatttatgtttgaagaagtaaatatgcctcagtttcaaatggtcctttaagggctctgtataaacgattccaatatatttctcagttgttattaaagtacttgatttttttcttgtctaacttttagcaatttttatattaatatttcaaagaaccatgtttaagtaaattactagcaaaggaactctttgggggaactttatgaaattttctcttggcagttgctaaaagttttcttacgttttctaaaagttcagtaatagtacatttatctttagaaaagtttgcttttcagaaagtgtttccatttttcttgtggtcagaatgtgctgtgaattttaaatgtatttttaagatattatagctaaattgtacctcactgttttctctaaaaagttttactgcttttgcttccactccactattcagtgataacaagggtaacaagtttccactagaattgcttgtcactttattcttgtacttttgttttactactgaacatctttttaaatcgttgccacaaaatatctcgcttttatcattttcacattgctctagtatatcaactttggaaacaagacatcattctatttatagcattctgtttttagtagtggtatttccatttacaaaatacagtaattcttgatcgctgaagacgtcaaatcctagaaaacatagcatgcctacgcgtgatgttaacatcattctcgaatagttgttggttgaagattcatttgatgaatccgatttttcagaaatagacgagtctgatgatacagacgattctggtgttagttctctgtagaaataactccaagaacacttttaatagtttattttcacattgaaaatcagatttgctccagcctcaaagagtatatttatgtaaaattaggtaagcgatatagaagcaagctgcactttttttctaaatgggaaggtattaaaaaagaaaagtctcattttagtaacatagtcttccttaaactctatgccacttgtaagatttctgaaaactgaagacatagaagggaacgggcttgatatgaacgacagctttgctggtaaataaacccaactgaacctaagattatctaaggtaacctctttttctagtcttttattgtgtgaacagttacctcctgctgagttgttggcagaatttccatataatcttgcttatgaccatttctacattatttgtatcatcttttagaagtcttacccaggttgatataggttaccgttctctagatctgtgtctccaattcttcttacatggcattaggtattttaagcttgttttttttcagacatcgtatagtcaattcttgaatgtgttgagaggtgctatgtcattgtaagctttattcttcttctctgaatgattagcttgtttaaattttaccttaaattcttttttttctttt

SEQ ID NO: 36682 - DNA, 440 bp, Homo sapiens
tgccttctctcctcattccagtctgcctgtctgtctgggtgacaataactctggggaaaaatgacaaggacaaaatatgagtttctccccacccagttttagaagcccaggtcccactgatgacacccagaaagaccctctgggaaagttgtcagacaagatctgtcagctccaggacatagattttcttcagtaacatcaaatcccaatattttgttctgtttttactcactctaacccaagcatgatggagttgcttatggccctgtaggcaagtcagaaggcagaaacttgctgtttgtcatttccccaacagaggttgggtggcagcacttgacagatatacttggaggatgaagaccatttgggggattcaaaactaataaaattaaaaactaaaaaaagacatacttggaggggagggtctcccagtgcatgac

SEQ ID NO: 36683 - DNA, 491 bp, Homo sapiens
gactctgtctcaaaaataaaataaaataaaataataaagaggttaagaagatggcttaaagtcacacagccagcaagtcgggggagcttagtctctgtgacactatcacccatgctgtagaccatcaccatctgatagaaataatgtgagccccatatattatttaaagtgttctaatagccacattaaaaagtaaaaagaaccatgtgagattaattttaataatatatttcctttaacccaatatagccaaaatattatcatttcaacatgtaatcaatataaaaactattaatgagacagttactttttttgtgctaagtctttgaaatctggtgtggatgtaacacatagcacatctcggtttggagactaaattttcattggaaatacttggtctgtatttagatttcataaaatttcataaaattagattttataaaatttaggtttcacaaaatttacagttgaaaaagtagatttacatatca

SEQ ID NO: 36684 - DNA, 338 bp, Homo sapiens
tgcgtgtatagtttaagtcatacaaacaatacaagcgagtaaagtgccaaagggaatgtcaacgttttcccatatttttcttcagtaagatgataagaaatgcattgttaagagggttatagtcactgagaatcttagtggaggcactcttgtctatgccagggttgactggaggagacactactacagaactgggctccttaacagaaataaggctgataggatcctgaaataacagaggccaagtagtaagacttaactgtcagaagcaaggtgtgcacagtttttgcaatgagtggcaagattgatgtggcatccaggggcccattctacagaga

SEQ ID NO: 36685 - DNA, 760 bp, Homo sapiens
ccgcattaatgcaaacctacacacccgccacccacccccgccgttagaaatcataggtgggatgctggatatagaaccaagactttggaggaaaggcatccgagaaagctttgaggatcagaggaaaaaagcactgcagtttgctcagtggtggaaaccatatgacttcaccaaaagtaaaaactattgaggtgtaccttccattttaaaatttttcttcagatcccgttcagttttatttccattgcatctaatgaagcaactgaccctcaggtcacaggcagagagaatcacagcagcagactgctctgggtcagtgacaactgtacatcaggagattgtgttgttttcttcttcacctgctcctatctatggacttcattttagtcaccatggagtaaaaacatatattcgatgatctgctcacattcctgctctctacctacttcttggtattccgaattgttcagttaatttagagaaggccttttctgaagggatatctagaaagcataggaaatccttggttcagagggaagtgggtctgcttcatggttgttaagtctactgtctggcttcttttgcatttttaaaaataagacgatttaattttaatttcataggattttatagaaaagctcttaattttctactagcagtatatagtatcacttctattctttttgttaaaggaaaaggaaatgtccccaaagtattaaagaattaaatgatactgaaaatttgtatgattcaaatttgt

SEQ ID NO: 36686 - DNA, 2174 bp, Homo sapiens
cgtccttcatcataacagtcggcatcttcctcctcctcatcttcatcatcaatgtcgtcatcatacaagtcgtcgtaaagcaaatctaaggttacacctcaaggaactaaagaaacgaagaacaaacctaacccaaaccctaacacagcagaagaaaataaataacaaagattagagcagaactaaacaaaattgaaacagataaacattcaaatcaaaagccatcggaaaccagtactgatgaacaccaacatgttccagaagacccaagagaaaaatcacaagatgaagtcttgagagatgaccctccaaaaaaagaacatctacgggatacaaagtctacatttgctggcagtccagagcgtgagtccattcacatcctgagtgttgatgagaagaacaagttgggagccaagattatcaaagcagagatgatggggaatatggaattagctgaacaacttaaagttcaacttgaaaaggcaaataaattcaaagaaactataacacagataccaaaaaaatctggggtagagaatgaagaccagcaagaagtaatccttgtcagaacagatcagtctggaagagtatggcctgtgaacacacccggaaaatctctggaatcacaaggaggaagaagaaagagacagatggtttcaacccatgaggaaagagaaagggtcagatactttcatgatgatgataatctaagcctaaatgatttagtcaaaaatgaaaagatgggaacagcagaaaatcaaaacaagctctttatgagaatggcatctaagtttatgggaaaaacagatggagactattacaccctggatgacatgtttgtctccaaagcagctgagagagaacgtcttggtgaagaggaagagaaccaaaggaaaaaagctattgctgagcatcggagtcttgctgcacaaatggaaaaatgtctgtattgttttgacagctctcaatttcccaagcatcttattgttgcaataggtgttaaggtttatttatgtttacccaacgtacggtctcttactgaggggcactgcctgatagtccctttgcagcaccatagagcagctactttgttggatgaagacatctgggaggagatccagatgttcagaaaatcattggtaaagatgtttgaagataaaggattagactgcatttttttggaaactaatatgagcatgaagaaacagtatcacatggtttatgaatgtattcctcttcccaaggaagtgggtgacatggctcccatctattttaagaaagccataatggaatctgatgaagagtggtccatgaacaagaagttgatagatctctcttcaaaagatatcagaaagtctgtacccagagggttaccttacttctctgtggattttggccttcacggagggtttgcccatgtcattgaagatcagcacaaattccctcattactttggaaaggaaatcataggtgggatgctggatatagaaccaagactttggaggaaaggcatccgagaaagctttgaggatcagaggaaaaaagcactgcagtttgctcagtggtggaaaccatatgacttcaccaaaagtaaaaactattgaggtgtaccttccattttaaaatttttcttcagatcccgttcagttttatttccattgcatctaatgaagcaactgaccctcaggtcacaggcagagagaatcacagcagcagactgctctgggtcagtgacaactgtacatcaggagattgtgttgttttcttcttcacctgctcctatctatggacttcattttagtcaccatggagtaaaaacatatattcgatgatctgctcacattcctgctctctacctacttcttggtattccgaattgttcagttaatttagagaaggccttttctgaagggatatctagaaagcataggaaatccttggttcagagggaagtgggtctgcttcatggttgttaagtctactgtctggcttcttttgcatttttaaaaataagacgatttaattttaatttcataggattttatagaaaagctcttaattttctactagcagtatatagtatcacttctattctttttgttaaaggaaaaggaaatgtccccaaagtattaaagaattaaatgatactgaaaatttgtatgattcaaatttgt

SEQ ID NO: 36687 - DNA, 1144 bp, Homo sapiens
tcactattctccagataaaatctagaacagtcatccaataattaagccagaaagggagtatgaacaaacatgaagtaaagatgtttgtgagatgttcagaaaatcattggtaaagatgtttgaagataaaggattagactgcatttttttggaaactaatatgagcatgaagaaacagtatcacatggtttatgaatgtattcctcttcccaaggaagtgggtgacatggctcccatctattttaagaaagccataatggaatctgatgaagagtggtccatgaacaagaagttgatagatctctcttcaaaagatatcagaaagtctgtacccagagggttaccttacttctctgtggattttggccttcacggagggtttgcccatgtcattgaagatcagcacaaattccctcattactttggaaaggaaatcataggtgggatgctggatatagaaccaagactttggaggaaaggcatccgagaaagctttgaggatcagaggaaaaaagcactgcagtttgctcagtggtggaaaccatatgacttcaccaaaagtaaaaactattgaggtgtaccttccattttaaaatttttcttcagatcccgttcagttttatttccattgcatctaatgaagcaactgaccctcaggtcacaggcagagagaatcacagcagcagactgctctgggtcagtgacaactgtacatcaggagattgtgttgttttcttcttcacctgctcctatctatggacttcattttagtcaccatggagtaaaaacatatattcgatgatctgctcacattcctgctctctacctacttcttggtattccgaattgttcagttaatttagagaaggccttttctgaagggatatctagaaagcataggaaatccttggttcagagggaagtgggtctgcttcatggttgttaagtctactgtctggcttcttttgcatttttaaaaataagacgatttaattttaatttcataggattttatagaaaagctcttaattttctactagcagtatatagtatcacttctattctttttgttaaaggaaaaggaaatgtccccaaagtattaaagaattaaatgatactgaaaatttgtatgattcaaatttgt

SEQ ID NO: 36688 - DNA, 307 bp, Homo sapiens
agaagaacaagttgggagccaagattatcaaagcagagatgatggggaatatggtaagactcttagatgttgctttagagaataatgattaaatgtttaacttcttatgagtaattttagaagttccttagcagtgtggatatagcacactgtgaaaataactgttggttattgattccttaaagaaattctcaggcctggcaccatgcctgtaatcccagcactttgggaggccaaggcaggcggatcacttgaggtcaggagttcgagaccagcctggccaaaatggtgaaaccctgtctctagt

SEQ ID NO: 36689 - DNA, 2478 bp, Homo sapiens
tagtcaatggaaatatttcagtcaaaattagaagatgctgaaaaagctgcatccacgaaagaagattatagacgggaacggtggaggaaacccacatattcagataaagcacaaaattgtcaagaaagtagagaatcagacttagtaaaatatggtaacagttcaagggatagatatgctacaacagatactgcaaaaaatagcaataatgaaaaatttattggtgatgaaaaagataagagacctgggtctttagaaacgtgtagaagagaatctaacccaaggcaaaatcaagagttttcttttggcaatttgagagctaaattcttgagaccctctgatgatgaagaactgtcatttcacagcaagggcagaaaatttgaaccacttagttcatcttcagcattggtagctcagggctctttgtgtagtggttttagaaaacccaccaagaacagtgaagaaagattaacatcatggagtcgctctgatgggagaggagacaagaaacattcaaatcaaaagccatcggaaaccagtactgatgaacaccaacatgttccagaagacccaagagaaaaatcacaagatgaagtcttgagagatgaccctccaaaaaaagaacatctacgggatacaaagtctacatttgctggcagtccagagcgtgagtccattcacatcctgagtgttgatgagaagaacaagttgggagccaagattatcaaagcagagatgatggggaatatggaattagctgaacaacttaaagttcaacttgaaaaggcaaataaattcaaagaaactataacacagataccaaaaaaatctggggtagagaatgaagaccagcaagaagtaatccttgtcagaacagatcagtctggaagagtatggcctgtgaacacacccggaaaatctctggaatcacaaggaggaagaagaaagagacagatggtttcaacccatgaggaaagagaaagggtcagatactttcatgatgatgataatctaagcctaaatgatttagtcaaaaatgaaaagatgggaacagcagaaaatcaaaacaagctctttatgagaatggcatctaagtttatgggaaaaacagatggagactattacaccctggatgacatgtttgtctccaaagcagctgagagagaacgtcttggtgaagaggaagagaaccaaaggaaaaaagctattgctgagcatcggagtcttgctgcacaaatggaaaaatgtctgtattgttttgacagctctcaatttcccaagcatcttattgttgcaataggtgttaaggtttatttatgtttacccaacgtacggtctcttactgaggggcactgcctgatagtccctttgcagcaccatagagcagctactttgttggatgaagacatctgggaggagatccagatgttcagaaaatcattggtaaagatgtttgaagataaaggattagactgcatttttttggaaactaatatgagcatgaagaaacagtatcacatggtttatgaatgtattcctcttcccaaggaagtgggtgacatggctcccatctattttaagaaagccataatggaatctgatgaagagtggtccatgaacaagaagttgatagatctctcttcaaaagatatcagaaagtctgtacccagagggttaccttacttctctgtggattttggccttcacggagggtttgcccatgtcattgaagatcagcacaaattccctcattactttggaaaggaaatcataggtgggatgctggatatagaaccaagactttggaggaaaggcatccgagaaagctttgaggatcagaggaaaaaagcactgcagtttgctcagtggtggaaaccatatgacttcaccaaaagtaaaaactattgaggtgtaccttccattttaaaatttttcttcagatcccgttcagttttatttccattgcatctaatgaagcaactgaccctcaggtcacaggcagagagaatcacagcagcagactgctctgggtcagtgacaactgtacatcaggagattgtgttgttttcttcttcacctgctcctatctatggacttcattttagtcaccatggagtaaaaacatatattcgatgatctgctcacattcctgctctctacctacttcttggtattccgaattgttcagttaatttagagaaggccttttctgaagggatatctagaaagcataggaaatccttggttcagagggaagtgggtctgcttcatggttgttaagtctactgtctggcttcttttgcatttttaaaaataagacgatttaattttaatttcataggattttatagaaaagctcttaattttctactagcagtatatagtatcacttctattctttttgttaaaggaaaaggaaatgtccccaaagtattaaagaattaaatgatactgaaaatttgtatgattcaaatttgt

SEQ ID NO: 36690 - DNA, 1651 bp, Homo sapiens
tagtcaatggaaatatttcagtcaaaattagaagatgctgaaaaagctgcatccacgaaagaagattatagacgggaacggtggaggaaacccacatattcagataaagcacaaaattgtcaagaaagtagagaatcagacttagtaaaatatggtaacagttcaagggatagatatgctacaacagatactgcaaaaaatagcaataatgaaaaatttattggtgatgaaaaagataagagacctgggtctttagaaacgtgtagaagagaatctaacccaaggcaaaatcaagagttttcttttggcaatttgagagctaaattcttgagaccctctgatgatgaagaactgtcatttcacagcaagggcagaaaatttgaaccacttagttcatcttcagcattggtagctcagggctctttgtgtagtggttttagaaaacccaccaagaacagtgaagaaagattaacatcatggagtcgctctgatgggagaggagacaagaaacattcaaatcaaaagccatcggaaaccagtactgatgaacaccaacatgttccagaagacccaagagaaaaatcacaagatgaagtcttgagagatgaccctccaaaaaaagaacatctacgggatacaaagtctacatttgctggcagtccagagcgtgagtccattcacatcctgagtgttgatgagaagaacaagttgggagccaagattatcaaagcagagatgatggggaatatggaattagctgaacaacttaaagttcaacttgaaaaggcaaataaattcaaagaaactataacacagataccaaaaaaatctggggtagagaatgaagaccagcaagaagtaatccttgtcagaacagatcagtctggaagagtatggcctgtgaacacacccggaaaatctctggaatcacaaggaggaagaagaaagagacagatggtttcaacccatgaggaaagagaaagggtcagatactttcatgatgatgataatctaagcctaaatgatttagtcaaaaatgaaaagatgggaacagcagaaaatcaaaacaagctctttatgagaatggcatctaagtttatgggaaaaacagatggagactattacaccctggatgacatgtttgtctccaaagcagctgagagagaacgtcttggtgaagaggaagagaaccaaaggaaaaaagctattgctgagcatcggagtcttgctgcacaaatggaaaaatgtctgtattgttttgacagctctcaatttcccaagcatcttattgttgcaataggtgttaaggtttatttatgtttacccaacgtacggtctcttactgaggggcactgcctgatagtccctttgcagcaccatagagcagctactttgttggatgaagacatctgggaggagatccaggtcagcataataaatgttcattatcattttaaaactcatgagcaatttttgtaaattattgtgataaattccaataggtataacttcatttaatgattttagtttctaaacttaaacacgtgtgttttcatagttgtatatatctgtggatcatgatgtttccatcattttatttcccttgtgtactccagattttgagaccttttatctacgaaataaactgtga

SEQ ID NO: 36691 - DNA, 508 bp, Homo sapiens
ccaaactacctgtccccatctaacatctgccccatcaggtatcaaaggcatctgtgaaacaggaggaaggagcacccctccaatgcaggcgtcatgtcaagtggagtctccccagcaggctgtccttcccatggatgtctttctgccaggctggagaactgtggtccctgaccagacgcggggtggggggccaccgccatcttgctggtgatatgacagccagcatatccactccaaagggtgtcgcaaagactctgcaaaactaaaagggttgctcatcaaaaggcagttgtcaaataagaacacccgtcttctccacggcactgagaccatccagatctggcttgggactggggtgaagtaggagtagctggtaacttagtgtgatgcttgggccagagtcgtgggtaagggaaaatgacatcccacaaaagcaaagggtccaagaacaggatttctgttctcttgcattggattctactactccctacttttgaatacatcagga

SEQ ID NO: 36692 - DNA, 249 bp, Homo sapiens
tttttcttttgcttctggttttctattggtttgtttgctattgacttggaggaatttctcatacattttggatattaacgctttatcatatacatggtttacaaatattttctcccaccccataggttattttttttccactttggtaattgtttcttttactgtgcagaagtattttaatttgataaaatcacacctatttttgtgtgtgttgcctctgtagaaattctgtttctagttattgctacc

SEQ ID NO: 36693 - DNA, 498 bp, Homo sapiens
cctgtgccccaggtgtgtttgctaccatacctccccaggggatagccctccaaacctgattggccaactagtctggtcttaaagtcctacagggacggccatcacgatactcactcagctatggcgaagacctgagtcctaattttggcttaaccccaaacttgggcgattcagttttacctgtgtcctctctataccatagtttatgacaaggggttttctgtggctggtctccaaggcctcttccaatcttgacattctatgatcctgtaagtctttgaataatggcccaggatgccaacaagaagtcaccaatgagagttcaggtgttctgttggaaatctttgtaaaatcacagagaaaaggagaagaaaaagaataaagaggaaaaactggacacataaataggaagacaaagaatgaatgtggactggggagagaagagtcattgacagggacaagaaataaataactttgacgcaaatcctgggaagactc

SEQ ID NO: 36694 - DNA, 116 bp, Homo sapiens
ctcaggaggctaaggctagagaatcacttaaacccgagaggtggaggaagttgcagtgagccgagatcacatgcactgtactccagactcagcaacaagagcaaaactctgtctca

SEQ ID NO: 36695 - DNA, 370 bp, Homo sapiens
tttttttttgaggcagggtctcgctctgtcgcccaggctggagtgcagtggcacaaactcagatcactgcagcctccgcttcccaggctcaagcgatcctccccccttggcctcccaaagtgctaggatttcgggcacgacactaccgccggctaaattttgtattttgtgtagagctgggtttccccatgttgcccaggctggtcttgaactactgggctcaagtggtcagcccgcctcagctttccaaactgctggaattacagtattatttttaaaaccacatatttcattattttaaaaacgatgctcttttcttgagtatttaggtatttccatttttgtttcatgttagtaaaacaaaaatttg

SEQ ID NO: 36696 - DNA, 5378 bp, Homo sapiens
agaatctgctgagcccccactaacccagagtgataaaagagagacttctcacaccacagcagcagcgactggtcggagttcccatgctgatgcaagagaatgtgctatttcaacccaggcagagcaagaagcaaaaacccttcaaacttcaacagactcagtctccaaagaaggcaacacaaattgcaagggagaaggcatgcaagttaatactctatttgaaacaagccaggttccagactggagtgatcctcctcaggtacaagttcaggaaacagtcagagagacaatctcttgcagccagatgccagctttctcagagcctgctggggaggagtccccattcactgggaccacaacaatttccttctcaaacttaggaggggtccacaaggaaaatgcatcattagctcaacactcggaggtcaaaccctgtacctgtggtccacagcaggaagaaaaacaagacagagatggcaacatacctgacaatttcagggaagacctaaaatatgagcagagcatctcagaagccaatgatgagactatgtccccaggtgtgttctcaaggcatctccccaaggatgctcgtgctgacttcagggagcctgtggctgtctctgttgcttcccctgaacccacagatactgccctcaccctggaaaatgtgtgtgatgagccaagggacagagaagcagtgtgtgcaatggagtgttttgaggctagtgaccaaggaacatgttttgataccatagattctcttgttgggacaccagttgataactattcgcctcaagaaatttgctctgtagatacggaactggcagaaggtcaaaacaaagtatctgatttatgttcttctaatgacaagacactggaagtcttttttcagacacaagtgtctgagacttcagtgtctacgtgcaaaagcagcaaggacggcaactcagtcatgtcccctctttttatcagtactttcaccttgaacatttcacacacagctagtgaaggtgccacaggagaaaatctagccaaggtggagaaatccacctacccactggcctccacagtacatgctggccaggagcagccaagccccagcaactcaggagggcttgatgaaacacagctcctttcttctgagaacaatcctttagtgcaatttaaagaaggaggtgacaagagccccagtcctagtgccgcagacaccacagccacaccagccagttatagttcaattgtgagttttccttgggagaagccaacaacattaactgctaataatgagtgctttcaagcgaccagagagactgttaccattgccaccgaagtccacccagccaaataccttgctgtgtcaattcctgaggacaagcatgcaggtggcactgaggagaggttccctcgtgcatcccatgaaaaggtttcccaatttccttcccaagtgcaggtggatcatattttaagtggtgctaccatcaaatctacaaaagagctactttgcagggcacccagtgtgccaggagtcccacaccatgtcctgcagctcccagagggagagggtttctgcagtaattcccctcttcaggttgataacctgtctggagataagagccagactgtggacagagcagactttaggagctatgaagagaatttccaagaaagaggaagtgaaacaaagcagggggtccagcagcagagcctgtcccagcagggttctctttctgcacctgatttccaacaaagtttgcctacgacatctgctgcacaagaggaaagaaacttggtgcccacggccccctcaccagcaagctctagggaaggagcagggcagcgctcaggttgggggacgagggtctccgtggtggctgaaactgctggggaagaagacagtcaggctctgagcaacgttccatctctctctgatatccttttggaagagtctaaagaatatagacctggaaattgggaggcaggcaacaagctgaagattataactctagaggcttccgcttctgaaatctggccaccacgacaactgacaaattctgagagcaaggcatcagacggtggtctcataattcctgacaaggtctgggctgtacctgatagtctaaaggcagatgctgttgtgcctgaattggccccctctgaaatagcagcattggctcacagtccagaggatgctgagtcagcccttgctgatagcagagaaagccataaaggcgaagagcccaccatcagtgtacactggagaagtctttcttcccggggtttcagccaaccgagactcctggagtcatccgtggaccctgtagatgaaaaggagttatctgtcacagattcactgtcagcggcttctgaaactggagggaaggaaaatgttaacaatgtgagtcaagaccaggaggaaaaacaactcaagatggatcacactgccttctttaaaaagtttctgacctgccctaaaatcctagagtcctctgtagatcccattgatgagataagtgtgatagagtacaccagggctggaaaaccagagccctctgaaaccacaccacagggcgccagagaaggaggtcaatcaaatgacggaaacatgggccacgaagcggaaatccagtcggccattttgcaagttccatgtctccagggaaccattctgagtgaaaatagaatcagcagaagccaagaaggcagtatgaagcaggaggcagaacaaattcaacctgaggaggcaaaaactgccatttggcaagtcctgcaacccagcgaaggcggtgaaagaattccaagtggatgtagcataggccaaatacaagaaagcagtgatgggagcttaggggaggctgagcaaagcaaaaaggacaaagcagaattgatttcccccacttcacctctttctagttgtcttccaataatgactcactcttctcttggggttgacacgcacaactccacaggccaaattcatgacgtccctgaaaatgacatagttgagcccagaaagcgtcagtatgtgtttcctgtttcacagaaaaggggaactattgagaatgagcgtgggaaacctttgccctcttctcctgatcttaccaggttcccttgtacttcatctcctgaaggaaatgtcacagactttttgataagccacaaaatggaggaacctaaaatagaggtgcttcaaattggggaaaccaaacccccaagctcatctagctcctcagcgaagaccttggcatttatttcaggagaacgtgagttagagaaagcccctaagttactgcaggatccatgtcaaaagggcaccctgggctgtgcgaaaaagtccagggagagagagaagtccctggaagcccgagcaggcaaatcgccagggaccctcacagcagtgacggggtcagaggaggtcaagaggaagccagaagccccaggcagtggacatttagctgagggagtaaagaagaaaattttgtccagggtggcagcactgaggctgaaactggaagaaaaggaaaatatcagaaagaactcagcctttcttaaaaagatgcccaaactcgaaacatcattatcacacacagaagagaaacaagacccaaaaaagccatcttgcaaaagagaaggaagagctccagtattactgaaaaaaatccaagctgagatgttccctgaacactctggaaatgtaaaattaagctgccaatttgcagaaattcatgaagattctactatctgctggacaaaagattcaaagtccatagcccaagtgcagagaagtgcaggggacaactccactgtttcctttgccatcgtgcaagccagtccgaaggaccagggactctattactgctgcatcaagaacagctacggaaaagtgactgctgaatttaacctcacagctgaagttctcaaacagctgtcaagtcgccaggatactaaaggatgtgaagagattgaattcagccaactcatcttcaaagaagacttcctccatgacagctactttgggggccgcctgcgtggtcagatcgccacggaggagctgcactttggagaaggggttcaccgcaaagccttccgcagcacagtgatgcacggcctcatgcctgtcttcaaacctggccatgcctgtgtgcttaaggtgcacaatgccattgcctatgggaccagaaataatgatgagctcatccaaaggaactacaaactcgctgcccaggaatgctatgttcaaaatactgccaggtattatgccaagatctacgctgctgaagcacagcctctggaaggctttggagaagtacctgagatcattcctatttttcttatccatcggcctgagaacaatatcccgtatgctacagtggaggaggagctgattggagaatttgtgaagtattccatcagggatgggaaagaaataaacttcttgagaagagaatcagaagctggtcagaaatgttgcaccttccagcactgggtgtaccagaaaacaagtggctgcctcctggtgacggacatgcaaggtgtaggaatgaagctaactgacgttggcatagcaacgctggctaaagggtacaagggatttaaaggcaactgttccatgaccttcattgatcagtttaaagcactacaccagtgtaacaagtattgcaaaatgctgggactgaaatcccttcaaaacaacaaccagaaacagaagcagccgagcattgggaaaagcaaagttcaaacaaactctatgacagtaaagaaggcagggcctgagaccccaggcgaaaagaaaacctaacgtccctgggtaacctaatggccactggctagcagcacacaatctcgccagggaaaatctgaggccacacaggagagaatatacagcctgcagagagtgcgtggcaatccttactcccagccgactgtgcgccaagatgcttctaaacccatcacctgctgtcttcactcaaatgatttcagaacaggatttgcgaccaggtttatggggagattgaatcaacgattggtctcaaagacagtccattctttatatacacgtttagcatttttaccaacctcacatcatgtgtatatttgtgtatttgcacatggttgtgctgtcgaggacctggtgctgagaagagtctgttcacagccaaaattcttcccactgtcattcctaacctgggatttctagacacatcctgctgtgatgtaaacagaaatcacgaattcgctcactggatcaagttgttccactggtgtctaatacgctattgttgccggaggtgggttctgtgacgtgaagccatttcccatcattcaacagccagttacaattttctgtttaattaaattcatatttaaacaaaaaaaaaaga

SEQ ID NO: 36697 - DNA, 877 bp, Homo sapiens
ctttcaagtttttctttttaaactgatgaaagtgtcctgtttttaaaagctatgtttccttccacccaaactcacaggtacaagggatttaaaggcaactgttccatgaccttcattgatcagtttaaagcactacaccagtgtaacaagtattgcaaaatgctgggactgaaatcccttcaaaacaacaaccagaaacagaagcagccgagcattgggaaaagcaaagttcaaacaaactctatgacagtaaagaaggcagggcctgagaccccaggcgaaaagaaaacctaacgtccctgggtaacctaatggccactggctagcagcacacaatctcgccagggaaaatctgaggccacacaggagagaatatacagcctgcagagagtgcgtggcaatccttactcccagccgactgtgcgccaagatgcttctaaacccatcacctgctgtcttcactcaaatgatttcagaacaggatttgcgaccaggtttatggggagattgaatcaacgattggtctcaaagacagtccattctttatatacacgtttagcatttttaccaacctcacatcatgtgtatatttgtgtatttgcacatggttgtgctgtcgaggacctggtgctgagaagagtctgttcacagccaaaattcttcccactgtcattcctaacctgggatttctagacacatcctgctgtgatgtaaacagaaatcacgaattcgctcactggatcaagttgttccactggtgtctaatacgctattgttgccggaggtgggttctgtgacgtgaagccatttcccatcattcaacagccagttacaattttctgtttaattaaattcatatttaaacaaaaaaaaaaga

SEQ ID NO: 36698 - DNA, 4154 bp, Homo sapiens
agaatctgctgagcccccactaacccagagtgataaaagagagacttctcacaccacagcagcagcgactggtcggagttcccatgctgatgcaagagaatgtgctatttcaacccaggcagagcaagaagcaaaaacccttcaaacttcaacagactcagtctccaaagaaggcaacacaaattgcaagggagaaggcatgcaagttaatactctatttgaaacaagccaggttccagactggagtgatcctcctcaggtacaagttcaggaaacagtcagagagacaatctcttgcagccagatgccagctttctcagagcctgctggggaggagtccccattcactgggaccacaacaatttccttctcaaacttaggaggggtccacaaggaaaatgcatcattagctcaacactcggaggtcaaaccctgtacctgtggtccacagcaggaagaaaaacaagacagagatggcaacatacctgacaatttcagggaagacctaaaatatgagcagagcatctcagaagccaatgatgagactatgtccccaggtgtgttctcaaggcatctccccaaggatgctcgtgctgacttcagggagcctgtggctgtctctgttgcttcccctgaacccacagatactgccctcaccctggaaaatgtgtgtgatgagccaagggacagagaagcagtgtgtgcaatggagtgttttgaggctagtgaccaaggaacatgttttgataccatagattctcttgttgggacaccagttgataactattcgcctcaagaaatttgctctgtagatacggaactggcagaaggtcaaaacaaagtatctgatttatgttcttctaatgacaagacactggaagtcttttttcagacacaagtgtctgagacttcagtgtctacgtgcaaaagcagcaaggacggcaactcagtcatgtcccctctttttatcagtactttcaccttgaacatttcacacacagctagtgaaggtgccacaggagaaaatctagccaaggtggagaaatccacctacccactggcctccacagtacatgctggccaggagcagccaagccccagcaactcaggagggcttgatgaaacacagctcctttcttctgagaacaatcctttagtgcaatttaaagaaggaggtgacaagagccccagtcctagtgccgcagacaccacagccacaccagccagttatagttcaattgtgagttttccttgggagaagccaacaacattaactgctaataatgagtgctttcaagcgaccagagagactgttaccattgccaccgaagtccacccagccaaataccttgctgtgtcaattcctgaggacaagcatgcaggtggcactgaggagaggttccctcgtgcatcccatgaaaaggtttcccaatttccttcccaagtgcaggtggatcatattttaagtggtgctaccatcaaatctacaaaagagctactttgcagggcacccagtgtgccaggagtcccacaccatgtcctgcagctcccagagggagagggtttctgcagtaattcccctcttcaggttgataacctgtctggagataagagccagactgtggacagagcagactttaggagctatgaagagaatttccaagaaagaggaagtgaaacaaagcagggggtccagcagcagagcctgtcccagcagggttctctttctgcacctgatttccaacaaagtttgcctacgacatctgctgcacaagaggaaagaaacttggtgcccacggccccctcaccagcaagctctagggaaggagcagggcagcgctcaggttgggggacgagggtctccgtggtggctgaaactgctggggaagaagacagtcaggctctgagcaacgttccatctctctctgatatccttttggaagagtctaaagaatatagacctggaaattgggaggcaggcaacaagctgaagattataactctagaggcttccgcttctgaaatctggccaccacgacaactgacaaattctgagagcaaggcatcagacggtggtctcataattcctgacaaggtctgggctgtacctgatagtctaaaggcagatgctgttgtgcctgaattggccccctctgaaatagcagcattggctcacagtccagaggatgctgagtcagcccttgctgatagcagagaaagccataaaggcgaagagcccaccatcagtgtacactggagaagtctttcttcccggggtttcagccaaccgagactcctggagtcatccgtggaccctgtagatgaaaaggagttatctgtcacagattcactgtcagcggcttctgaaactggagggaaggaaaatgttaacaatgtgagtcaagaccaggaggaaaaacaactcaagatggatcacactgccttctttaaaaagtttctgacctgccctaaaatcctagagtcctctgtagatcccattgatgagataagtgtgatagagtacaccagggctggaaaaccagagccctctgaaaccacaccacagggcgccagagaaggaggtcaatcaaatgacggaaacatgggccacgaagcggaaatccagtcggccattttgcaagttccatgtctccagggaaccattctgagtgaaaatagaatcagcagaagccaagaaggcagtatgaagcaggaggcagaacaaattcaacctgaggaggcaaaaactgccatttggcaagtcctgcaacccagcgaaggcggtgaaagaattccaagtggatgtagcataggccaaatacaagaaagcagtgatgggagcttaggggaggctgagcaaagcaaaaaggacaaagcagaattgatttcccccacttcacctctttctagttgtcttccaataatgactcactcttctcttggggttgacacgcacaactccacaggccaaattcatgacgtccctgaaaatgacatagttgagcccagaaagcgtcagtatgtgtttcctgtttcacagaaaaggggaactattgagaatgagcgtgggaaacctttgccctcttctcctgatcttaccaggttcccttgtacttcatctcctgaaggaaatgtcacagactttttgataagccacaaaatggaggaacctaaaatagaggtgcttcaaattggggaaaccaaacccccaagctcatctagctcctcagcgaagaccttggcatttatttcaggagaacgtgagttagagaaagcccctaagttactgcaggatccatgtcaaaagggcaccctgggctgtgcgaaaaagtccagggagagagagaagtccctggaagcccgagcaggcaaatcgccagggaccctcacagcagtgacggggtcagaggaggtcaagaggaagccagaagccccaggcagtggacatttagctgagggagtaaagaagaaaattttgtccagggtggcagcactgaggctgaaactggaagaaaaggaaaatatcagaaagaactcagcctttcttaaaaagatgcccaaactcgaaacatcattatcacacacagaagagaaacaagacccaaaaaagccatcttgcaaaagagaaggaagaggtgaggctctgttgctgtccatcattgttaaagtttgggcttgtagaccaggtatccagttcctgtgtcctcgagggtcctttgcaattaaggccagtgtcccccaggtgggcattgatgctatggttgtggccaagtggcttcagcatgtggcatcagaatcacctggaggacttgttaaaacccagattgctcccctcccccagtgtgtgaaatttgcacttctaacaagttcccaggtgatctatcgggagaaccacgattgagaaccactgataaaggccgcctgtaggcatgtctgttggaggggaatgtgatgaaggtgcttttccgtttcattatcctcttttacaaaatctatttaaaaatataaacagaagcattaatcagtgtagctaattagtataatgaaatagaccatgcactaagcaggatttgtggaaatgaatattttggtacaaattgggattctcctctttaatcactgatttttcattaaaaataacttccttgaaaatt

SEQ ID NO: 36699 - DNA, 490 bp, Homo sapiens
ctccagtattactgaaaaaaatccaagctgagatgttccctgaacactctggaaatgtaaaattaagctgccaatttgcagaaattcatgaagattctactatctgctggacaaaagattcaaagtccatagcccaagtgcagagaaggtgcgatgtttttccctggttacttttcacagttgttgcttgtttatttcacaacatggttgtaaaaaagaaaaaagaataaattataggacgtgaaaaggaaaattgaagcagagattccacatccacaatattaaaaaagactaaatatcggaagacaagtgtctggatggggaaaatgatggaggattcttgcccaggttttgccagaattgagttctggggttttgggaagtcacacaacctttcactacattttttaaatcaggggaaggaacatgtcaaatgatattctagtctgaggttctgtggtcctaagattaaagagctctcatctgtatg

SEQ ID NO: 36700 - DNA, 579 bp, Homo sapiens
atgaagttgtgtcatttaggaaacatggtgtcttaagaaaacttggggaaaataatcagttgacatggtagcgatattcttccatcagttaaatgttgtttcctgatctggtgacattgttttcagagatcactactgtatgctgagtgtgtgccaaggaacataaatatgaatgttccatgtccacactaatgagactgaagggaatgtaaccagcacagcacacactggtggaggatgacggaggagctggcacacactcctggacaaacatagatgactgtggtcccattcagaaaaagaagggaagaggaacatggtacaggggactctgatccttagcctgtatcagatcctagaccacaatagttgggttaagcacagtagactcacagctaaaagcatatcttcttttgagaattgtctactcatgtccttagcccactttgaaagaaattatagatgatgcgaacaaatggaaacacatcccatggactcttgggccaggctgccaggatctgtcattttccatgtggctttggccagattacctgactgccctgttcctgtttcctgatc

SEQ ID NO: 36701 - DNA, 1763 bp, Homo sapiens
ctcttttttttttttaacattaatctcaatgcgctgggattacaggtgtgagccaccgcgcctggccgacatttaacaatcttttgatttacatttttatagccactctatcaagatttgactcatgctgagtgtgggtcctgggaacctgcatgaccagcagtctgatgggagcacccatgaccataatggctacactctagtcatgaattaacatttcattaaacccaaacgtctgcttcaattcttcctccagtgtgatgtacagtttccttgcagtgcccaagggctctagagctcatcccacccaaaccaaagaatgctggtcaagtgggaaggagtccctgttctcagctgtagagggtgtggggagcactccgagtgccgtatctcagaacatctaagaacagtctaggaaaacacactccatttgtggttctccagagaatcagcacttggaatcctttgccaccgcgtaccccaggctctgaatcctgactgcgagattacacctgccagttcaccatcgactgtgtcacacggctcagcacagctcccaggccaacccatcctgatttccatctacttctaaactgcatcactctactcctcacagcaacaactcaaattccctaatgactaatctgttcttaaaaaaaaaaaaaaaaaaaaaagagagagatggggtttcgcagtgttgcctaggctgatcttgaactcctgagctcaagcaatcctcttaccccagcctcccaaagtgttgggattacaggcgtgagccagcacacccagactaatctgctctgagtaacattttaccaagccagatttctgaaactttttttaaaaattaaaatcccatgcacacacaagttacaggcaagcttgaatgtacactggaaacgcagacctctgttgctttattactaatggtgacaactttcctacatccttttaccagcttctagaacaaggcacccatgaagagggcaacacacatcatgccccactgctccctgtgcaccggaagaagggcctgatcatcagggacagccgcctttcaagcctgacaatgatgtctgtccttgtaccattttcacatcctttgttatggcagacccgcaaaggaaggtttatacctaaatccctaatgacttctcagtccaagaaagtttctgtgtaaaaaagcagcagctttcctgcggtgaaggggaaggtcaaagagtcaccaacacataaaggatttcaaaaaggaaaatttacaatttctcatgcacactctacagccctgctggtgccctgggccaagtgctgtgctggaggcacttctaaaaggcaggattcccacatgatgaagtgccaggctctggagccagacagcctgggttcacatgcaggcaccactgtttaccagtcacttgacctaggcatgtcactctctgtgcctcagtttcagatgaaacaaggatagcagtatgtacatatcatgtggttctcacaaggactaaatgaaatactacattgttattatattattatatttctgctaaaaagttgggggcaggtgccgagcacggtggctcacgcctgtaatcccagcactttgggaggctgaggcgggcggatcacatgaagtcaggagttcgaggccagcctggccaacatggtgaaactccgactctactaaacatataaaaattatccaggcatggtggcacacacctgtaataccagctactcaggaggctgggacaggagaatca

SEQ ID NO: 36702 - DNA, 405 bp, Homo sapiens
ataccgtttcttgcaaaagcacacaggtagtaagtggcacagctgtgatctgaagctagtgactcactgttatcatgtaaggcagaagtgtgtaccccacatggggagagacgcacagggaggtccagtcatttggaggaagataaaaatttttccagcctgggcaacatggcaagaccacatcaccacaaaattattgggggcaggtgccgagcacggtggctcacgcctgtaatcccagcactttgggaggctgaggcgggcggatcacatgaagtcaggagttcgaggccagcctggccaacatggtgaaactccgactctactaaacatataaaaattatccaggcatggtggcacacacctgtaataccagctactcaggaggctgggacaggagaatca

SEQ ID NO: 36703 - DNA, 1024 bp, Homo sapiens
ggaggatcaaggacctttttgtgaacacacaaagtttgagatgccttggacacattgaagtggagcggtcagggaggcaagggtggaggtgggatgcggaggggaggtgggatgcagagcgtcgtggatggatcagttttgctcgatagagggacatgtttttctgtggcaacaggagggcaaaaggagaaggtggccacagatgccggtagatgagctgagagtgattgtattccctatcctctcggaagcttgaggcaaggccatcaacagacaatcagagggaataagaagagatagaatatatgaagaaagggagaaaagatgaaatcgtaattgtgtagcagggcaagaagtccagaaatttctgtgctgtgccaagttcccagttgaggcggtgaacatgaaaatatactgatacccattgcctggtttttctccaaggacacttggctcctagggcacaaaacagaaagtacgtggtttgtccaggccgagggctttgcatagttgcagtggatggagaggaggtcaaggaatggaggcacatggtagagagagactgtccccagagcacggggactcctggccggatgagggggacaggggcaggaggaggcaggtggaaagtagagggagggctcagtggtctggaggctacaggaagtgacggggggaccagaaggagctggaaaccagtgtggttgtggcccagggtgggatgtttggatttctgatgtcagagagggtccagtccttctgatgatggggaggggtggaggctgaatctatggtagagatagtgagaggaactggaacaatgtagctgtcaagtggaaatgggagaaagggctgggcgtggtggctcacgcctgtaatcccagcatattgggaggctgaggcaagaggatcgtgttagctcaggagttctgggctgcattgagctgtgattgtgccactgcactccagccttggcaacagagtgcccagttaaaaataaaaataaaataaaataaaaaaatta

SEQ ID NO: 36704 - DNA, 5139 bp, Homo sapiens
aggtcccagtaaccgccggttggaggcggccgaaccgcagtagggaaagacccaggctgcgggacgcggtgcaggctgcggcgctgacggcctctgctccttccgcgggtttccgactccctgccctagattttctgcttagcgacttggggtcccctctcgtttgcttctggtaggagtcgcaatcccagcagcaatagcccagaagaggacacggttcccgtaccgaagggttcagtaccagcagcccgaccatcacgcggcgggatgtctgtggttggcattgacctcggctttctcaactgctacattgctgtcgcgagaagtggcggcatcgagaccatcgccaatgagtacagcgacaggtgtaccccggcctgtatatcattgggatcaagaactcgagccattggaaatgcagcaaagagccagatagtcacgaacgtaagaaatacaattcatggcttcaaaaagcttcatgggcgatcatttgatgatcccattgtgcaaactgaaaggatcaggcttccctatgaactgcagaaaatgcctaatggaagtgcaggagttaaggtgcggtacttagaggaagagagaccttttgcaattgagcaagttactggaatgctgttagccaagcttaaagagacttcagaaaatgctttgaagaaaccagtggctgactgtgtgatttcaattcctagcttttttactgatgccgagagaagatctgtgatggctgcagcccaggttgcaggcttaaattgtttaaggttgatgaatgaaactactgcagttgcactggcgtatggaatttataaacaggatcttcccccattagatgagaaaccaagaaatgtagtatttattgatatgggacattctgcctatcaggtctcggtttgtgcttttaacaaaggaaaacttaaagtcttggctactacctttgatccatatttgggtggcaggaactttgatgaggctttagtagactacttctgtgatgagttcaagaccaaatataagataaatgtgaaagaaaactctcgggccttgttgcgtttatatcaggaatgtgaaaaactaaagaagctaatgagtgcaaatgcatcagatcttccattgaacattgagtgtttcatgaatgaccttgatgtttctagtaaaatgaacagggctcaatttgaacaactgtgtgcttcccttttggccagggttgaaccacctttaaaagcagtaatggaacaagctaacttacaacgtgaagacattagtagtatagaaattgtaggaggagcaacacgaattcctgcagtgaaagaacaaatcactaaattctttcttaaagacataagtaccacattaaatgctgatgaagctgttgcaagaggatgtgcgttacagtgtgcgattctctcaccagcatttaaagtgcgtgaattttccataacagaccttgttccctattcaatcacattaaggtggaagacctcttttgaagatggaagtggggaatgtgaagttttctgtaagaaccatcctgccccattctcaaaagtcattactttccacaagaaggaaccatttgaactagaagcattttatactaatttacatgaagtgccttatcctgatgcaagaattgggagcttcactattcagaatgtttttccacagtctgatggtgatagttccaaagtgaaggttaaagttcgtgttaacatccatggaatcttcagtgtggctagcgcatcagtaattgagaagcaaaatttggaaggcgatcacagtgatgctccaatggagacagaaacttcatttaaaaatgaaaacaaagataatatggataaaatgcaggttgatcaagaagaagggcatcaaaaatgtcatgctgaacacactccagaagaggaaattgatcatacaggagccaaaacaaagtcagctgtctcagacaaacaagaccgattaaatcagacacttaaaaaaggaaaagtcaaaagtattgatctaccgatccagagtagcctatgtagacaactaggccaagatcttctcaacagctacattgaaaatgaggggaagatgatcatgcaagataagttagagaaagaaagaaatgatgctaagaatgccgttgaagaatatgtatatgattttagagacaggctgggcactgtctatgaaaaattcatcactccagaagacttgagtaaactgtctgcagtattggaagacacagaaaattggctttatgaagacggagaggaccaacctaaacaagtttatgtggataagcttcaagaactaaagaaatacggccagcctattcaaatgaagtacatggagcatgaagagagaccaaaagccttaaatgacttgggaaaaaagatccaacttgtcatgaaagtgatagaagcttatagaaacaaggatgaaagatatgatcatctggatcctactgaaatggaaaaggttgaaaaatgtatcagtgatgccatgagttggctgaatagtaagatgaatgcacagaacaaactaagtctcactcaagatcctgtggtaaaagtttcagaaatagtagcaaagtcaaaggaactggataatttctgtaaccccatcatttacaagcccaaaccaaaagcagaagttcctgaagacaaaccaaaagctaatagtgaacacaatggcccaatggatggacagagtggaactgaaactaaatcagattcaacaaaagacagctcacagcatactaaatcctctggagagatggaagtggactaagtcttaattttaccttcacattaattcaaaccgtgcaagtaaccacggggtccatcttttacatctggtacacacaacagacgctcagttgttcttaaccacttttgtcatttgttttttggagtagttttgaaaagtgttttatattgagtgcacttctgttcatttccattgctgcttatatgcagtgttagccgaattagatttacaagacaatctaagctttccggataattttatatatcaaacatacaggatggatacatagttggcaacagtctaccttatttaaagcttctactgggataaacctcaattcctttattcaggaaaggatactttattgcattattgttgcagaagcatagatttaattgcatctttattttgaaaaacaaatgaaaattgatggggtttaaagctacagaggcactgacctttttctagttattgtattgctacaatttaaatattaaaacaaataagagctttctcaacaaattagtccatctcattgatgtaccacagaaatccaaagctttgctgtcatcacataaatgaattaaatcacatgtgaaagggaacacacccaattttatgttaaggtgaaaccagcagtttgcttcttttattagtaatgtggattgatgttttctcagagtaactcgttgtcttttcgcttgaaatttttgatcttgtcctgaagactagctgctgctaaaacaatgctagcctaaagatacaggagtctctgacaaaatgactttcatgttaaggggaaatgctgtttatctactcagacatgcatctgtgatgttcatagccttgtttcagttataatagttgtcttgtttttttcttaattgattttgttaataataccttaacacagggtaggaagaagtggcacagtgtattgcattatatacatttatcattgatttacctaatgttaccttgtagattaaacactattaagtggtaatacttgaaaaggagcacttataccataagtcttaggaaataatgtttgtaataaacttaactatgttacatatcaacaggcaaaaatatagaatgttacatagtgttgtgtgattaaattatagttcctgctgttaacattaccttttgaaaccttggctccagttttggtgcttcttatacaaattaaatgcgaaaagggactgtaaacttaagatgtattttaaggactttatctgtgcttcatcacccaacttgttcacattgttaatttctgtccagagacctgaaactgcttaagtatgggaacagactgaaatggtgtttcaacctgcaagagacagaagcatagacaagtatatgagcccttatgtccttaatgccaatcaactagattgacctaggttaaaatttcaaaaggctcattttctcccaaagctaaatctttatattaggaacaattaaatattgacttaagttgtaaaaattgagagtacaatatctttagggatagtcattatttctcacaactagttctctacgagagattttgtttctacaatgtagtcagcacttaatggagagtatggagtagtgcattttgcagggatttttattccgtcttttgaggggaagaatctcttttttgcattaaaaaatcatataaacttaatatatttttaaactctcctagtctttaaactttctcttaattctcttaaaatgaaataggtatatccaataggtgatgaaatacattttttacaaacatagatgctttttatttgtatgttgaatgtacagattcatttcaagaaaagcatgaagataatgaaagcaaatatgtaacaatacaagtagggactttagagcttctatttgggttaaaacatccactcacttggttaggagctatgcctcagaaacttcctgggagtaaatatgggaacaacttttctattaatacatctaaattttctagtatatcctgacattttccattcctgctctgaagtcacttttagttttgtgttttagtcagatagtaccactaatttttgtaattatataacacttcatttaataacttatatacatccaaatatatatactttttctacccaattattcaacttaaaagatttcaaaaacgatttagccttataatgtatttatttatttaattcattaatgaaagagagtgctctctttaatgcagctttgggtagacagtctaattcagtccaattttaatctgcattaaaatatgcaatgctagacaaagattttcaaaataaaaagctattatttcagaaattattttaaaagatgcatagtaaaacagtgttttcctatggtaagcaaata

SEQ ID NO: 36705 - DNA, 3979 bp, Homo sapiens
aggtcccagtaaccgccggttggaggcggccgaaccgcagtagggaaagacccaggctgcgggacgcggtgcaggctgcggcgctgacggcctctgctccttccgcgggtttccgactccctgccctagattttctgcttagcgacttggggtcccctctcgtttgcttctggtaggagtcgcaatcccagcagcaatagcccagaagaggacacggttcccgtaccgaagggttcagtaccagcagcccgaccatcacgcggcgggatgtctgtggttggcattgacctcggctttctcaactgctacattgctgtcgcgagaagtggcggcatcgagaccatcgccaatgagtacagcgacaggtgtaccccggcctgtatatcattgggatcaagaactcgagccattggaaatgcagcaaagagccagatagtcacgaacgtaagaaatacaattcatggcttcaaaaagcttcatgggcgatcatttgatgatcccattgtgcaaactgaaaggatcaggcttccctatgaactgcagaaaatgcctaatggaagtgcaggagttaaggtgcggtacttagaggaagagagaccttttgcaattgagcaagttactggaatgctgttagccaagcttaaagagacttcagaaaatgctttgaagaaaccagtggctgactgtgtgatttcaattcctagcttttttactgatgccgagagaagatctgtgatggctgcagcccaggttgcaggcttaaattgtttaaggttgatgaatgaaactactgcagttgcactggcgtatggaatttataaacaggatcttcccccattagatgagaaaccaagaaatgtagtatttattgatatgggacattctgcctatcaggtctcggtttgtgcttttaacaaaggaaaacttaaagtcttggctactacctttgatccatatttgggtggcaggaactttgatgaggctttagtagactacttctgtgatgagttcaagaccaaatataagataaatgtgaaagaaaactctcgggccttgttgcgtttatatcaggaatgtgaaaaactaaagaagctaatgagtgcaaatgcatcagatcttccattgaacattgagtgtttcatgaatgaccttgatgtttctagtaaaatgaacagggctcaatttgaacaactgtgtgcttcccttttggccagggttgaaccacctttaaaagcagtaatggaacaagctaacttacaacgtgaagacattagtagtatagaaattgtaggaggagcaacacgaattcctgcagtgaaagaacaaatcactaaattctttcttaaagacataagtaccacattaaatgctgatgaagctgttgcaagaggatgtgcgttacagtgtgcgattctctcaccagcatttaaagtgcgtgaattttccataacagaccttgttccctattcaatcacattaaggtggaagacctcttttgaagatggaagtggggaatgtgaagttttctgtaagaaccatcctgccccattctcaaaagtcattactttccacaagaaggaaccatttgaactagaagcattttatactaatttacatgaagtgccttatcctgatgcaagaattgggagcttcactattcagaatgtttttccacagtctgatggtgatagttccaaagtgaaggttaaagttcgtgttaacatccatggaatcttcagtgtggctagcgcatcagtaattgagaagcaaaatttggaaggcgatcacagtgatgctccaatggagacagaaacttcatttaaaaatgaaaacaaagataatatggataaaatgcaggttgatcaagaagaagggcatcaaaaatgtcatgctgaacacactccagaagaggaaattgatcatacaggagccaaaacaaagtcagctgtctcagacaaacaagaccgattaaatcagacacttaaaaaaggaaaagtcaaaagtattgatctaccgatccagagtagcctatgtagacaactaggccaagatcttctcaacagctacattgaaaatgaggggaagatgatcatgcaagataagttagagaaagaaagaaatgatgctaagaatgccgttgaagaatatgtatatgattttagagacaggctgggcactgtctatgaaaaattcatcactccagaagacttgagtaaactgtctgcagtattggaagacacagaaaattggctttatgaagacggagaggaccaacctaaacaagtttatgtggataagcttcaagaactaaagaaatacggccagcctattcaaatgaagtacatggagcatgaagagagaccaaaagccttaaatgacttgggaaaaaagatccaacttgtcatgaaagtgatagaagcttatagaaacaaggatgaaagatatgatcatctggatcctactgaaatggaaaaggttgaaaaatgtatcagtgatgccatgagttggctgaatagtaagatgaatgcacagaacaaactaagtctcactcaagatcctgtggtaaaagtttcagaaatagtagcaaagtcaaaggaactggataatttctgtaaccccatcatttacaagcccaaaccaaaagcagaagttcctgaagacaaaccaaaagctaatagtgaacacaatggcccaatggatggacagagtggaactgaaactaaatcagattcaacaaaagacagctcacagcatactaaatcctctggagagatggaagtggactaagtcttaattttaccttcacattaattcaaaccgtgcaagtaaccacggggtccatcttttacatctggtacacacaacagacgctcagttgttcttaaccacttttgtcatttgttttttggagtagttttgaaaagtgttttatattgagtgcacttctgttcatttccattgctgcttatatgcagtgttagccgaattagatttacaagacaatctaagctttccggataattttatatatcaaacatacaggatggatacatagttggcaacagtctaccttatttaaagcttctactgggataaacctcaattcctttattcaggaaaggatactttattgcattattgttgcagaagcatagatttaattgcatctttattttgaaaaacaaatgaaaattgatggggtttaaagctacagaggcactgacctttttctagttattgtattgctacaatttaaatattaaaacaaataagagctttctcaacaaattagtccatctcattgatgtaccacagaaatccaaagctttgctgtcatcacataaatgaattaaatcacatgtgaaagggaacacacccaattttatgttaaggtgaaaccagcagtttgcttcttttattagtaatgtggattgatgttttctcagagtaactcgttgtcttttcgcttgaaatttttgatcttgtcctgaagactagctgctgctaaaacaatgctagcctaaagatacaggagtctctgacaaaatgactttcatgttaaggggaaatgctgtttatctactcagacatgcatctgtgatgttcatagccttgtttcagttataatagttgtcttgtttttttcttaattgattttgttaataataccttaacacagggtaggaagaagtggcacagtgtattgcattatatacatttatcattgatttacctaatgttaccttgtagattaaacactattaagtggtaatacttgaaaaggagcacttataccataagtcttaggaaataatgtttgtaataaacttaactatgttacatatcaacaggcaaaaatatagaatgttacatagtgttgtgtgattaaattatagttcctgctgttaacattaccttttgaaaccttggctccagttttggtgcttcttatacaaattaaatgcgaaaagggactgta

SEQ ID NO: 36706 - DNA, 4746 bp, Homo sapiens
aggtcccagtaaccgccggttggaggcggccgaaccgcagtagggaaagacccaggctgcgggacgcggtgcaggctgcggcgctgacggcctctgctccttccgcgggtttccgactccctgccctagattttctgcttagcgacttggggtcccctctcgtttgcttctggtaggagtcgcaatcccagcagcaatagcccagaagaggacacggttcccgtaccgaagggttcagtaccagcagcccgaccatcacgcggcgggatgtctgtggttggcattgacctcggctttctcaactgctacattgctgtcgcgagaagtggcggcatcgagaccatcgccaatgagtacagcgacaggtgtaccccggcctgtatatcattgggatcaagaactcgagccattggaaatgcagcaaagagccagatagtcacgaacgtaagaaatacaattcatggcttcaaaaagcttcatgggcgatcatttgatgatcccattgtgcaaactgaaaggatcaggcttccctatgaactgcagaaaatgcctaatggaagtgcaggagttaaggtgcggtacttagaggaagagagaccttttgcaattgagcaagttactggaatgctgttagccaagcttaaagagacttcagaaaatgctttgaagaaaccagtggctgactgtgtgatttcaattcctagcttttttactgatgccgagagaagatctgtgatggctgcagcccaggttgcaggcttaaattgtttaaggttgatgaatgaaactactgcagttgcactggcgtatggaatttataaacaggatcttcccccattagatgagaaaccaagaaatgtagtatttattgatatgggacattctgcctatcaggtctcggtttgtgcttttaacaaaggaaaacttaaagtcttggctactacctttgatccatatttgggtggcaggaactttgatgaggctttagtagactacttctgtgatgagttcaagaccaaatataagataaatgtgaaagaaaactctcgggccttgttgcgtttatatcaggaatgtgaaaaactaaagaagctaatgagtgcaaatgcatcagatcttccattgaacattgagtgtttcatgaatgaccttgatgtttctagtaaaatgaacagggctcaatttgaacaactgtgtgcttcccttttggccagggttgaaccacctttaaaagcagtaatggaacaagctaacttacaacgtgaagacattagtagtatagaaattgtaggaggagcaacacgaattcctgcagtgaaagaacaaatcactaaattctttcttaaagacataagtaccacattaaatgctgatgaagctgttgcaagaggatgtgcgttacagtgtgcgattctctcaccagcatttaaagtgcgtgaattttccataacagaccttgttccctattcaatcacattaaggtggaagacctcttttgaagatggaagtggggaatgtgaagttttctgtaagaaccatcctgccccattctcaaaagtcattactttccacaagaaggaaccatttgaactagaagcattttatactaatttacatgaagtgccttatcctgatgcaagaattgggagcttcactattcagaatgtttttccacagtctgatggtgatagttccaaagtgaaggttaaagttcgtgttaacatccatggaatcttcagtgtggctagcgcatcagtaattgagaagcaaaatttggaaggcgatcacagtgatgctccaatggagacagaaacttcatttaaaaatgaaaacaaagataatatggataaaatgcaggttgatcaagaagaagggcatcaaaaatgtcatgctgaacacactccagaagaggaaattgatcatacaggagccaaaacaaagtcagctgtctcagacaaacaagaccgattaaatcagacacttaaaaaaggaaaagtcaaaagtattgatctaccgatccagagtagcctatgtagacaactaggccaagatcttctcaacagctacattgaaaatgaggggaagatgatcatgcaagataagttagagaaagaaagaaatgatgctaagaatgcccagaacaaactaagtctcactcaagatcctgtggtaaaagtttcagaaatagtagcaaagtcaaaggaactggataatttctgtaaccccatcatttacaagcccaaaccaaaagcagaagttcctgaagacaaaccaaaagctaatagtgaacacaatggcccaatggatggacagagtggaactgaaactaaatcagattcaacaaaagacagctcacagcatactaaatcctctggagagatggaagtggactaagtcttaattttaccttcacattaattcaaaccgtgcaagtaaccacggggtccatcttttacatctggtacacacaacagacgctcagttgttcttaaccacttttgtcatttgttttttggagtagttttgaaaagtgttttatattgagtgcacttctgttcatttccattgctgcttatatgcagtgttagccgaattagatttacaagacaatctaagctttccggataattttatatatcaaacatacaggatggatacatagttggcaacagtctaccttatttaaagcttctactgggataaacctcaattcctttattcaggaaaggatactttattgcattattgttgcagaagcatagatttaattgcatctttattttgaaaaacaaatgaaaattgatggggtttaaagctacagaggcactgacctttttctagttattgtattgctacaatttaaatattaaaacaaataagagctttctcaacaaattagtccatctcattgatgtaccacagaaatccaaagctttgctgtcatcacataaatgaattaaatcacatgtgaaagggaacacacccaattttatgttaaggtgaaaccagcagtttgcttcttttattagtaatgtggattgatgttttctcagagtaactcgttgtcttttcgcttgaaatttttgatcttgtcctgaagactagctgctgctaaaacaatgctagcctaaagatacaggagtctctgacaaaatgactttcatgttaaggggaaatgctgtttatctactcagacatgcatctgtgatgttcatagccttgtttcagttataatagttgtcttgtttttttcttaattgattttgttaataataccttaacacagggtaggaagaagtggcacagtgtattgcattatatacatttatcattgatttacctaatgttaccttgtagattaaacactattaagtggtaatacttgaaaaggagcacttataccataagtcttaggaaataatgtttgtaataaacttaactatgttacatatcaacaggcaaaaatatagaatgttacatagtgttgtgtgattaaattatagttcctgctgttaacattaccttttgaaaccttggctccagttttggtgcttcttatacaaattaaatgcgaaaagggactgtaaacttaagatgtattttaaggactttatctgtgcttcatcacccaacttgttcacattgttaatttctgtccagagacctgaaactgcttaagtatgggaacagactgaaatggtgtttcaacctgcaagagacagaagcatagacaagtatatgagcccttatgtccttaatgccaatcaactagattgacctaggttaaaatttcaaaaggctcattttctcccaaagctaaatctttatattaggaacaattaaatattgacttaagttgtaaaaattgagagtacaatatctttagggatagtcattatttctcacaactagttctctacgagagattttgtttctacaatgtagtcagcacttaatggagagtatggagtagtgcattttgcagggatttttattccgtcttttgaggggaagaatctcttttttgcattaaaaaatcatataaacttaatatatttttaaactctcctagtctttaaactttctcttaattctcttaaaatgaaataggtatatccaataggtgatgaaatacattttttacaaacatagatgctttttatttgtatgttgaatgtacagattcatttcaagaaaagcatgaagataatgaaagcaaatatgtaacaatacaagtagggactttagagcttctatttgggttaaaacatccactcacttggttaggagctatgcctcagaaacttcctgggagtaaatatgggaacaacttttctattaatacatctaaattttctagtatatcctgacattttccattcctgctctgaagtcacttttagttttgtgttttagtcagatagtaccactaatttttgtaattatataacacttcatttaataacttatatacatccaaatatatatactttttctacccaattattcaacttaaaagatttcaaaaacgatttagccttataatgtatttatttatttaattcattaatgaaagagagtgctctctttaatgcagctttgggtagacagtctaattcagtccaattttaatctgcattaaaatatgcaatgctagacaaagattttcaaaataaaaagctattatttcagaaattattttaaaagatgcatagtaaaacagtgttttcctatggtaagcaaata

SEQ ID NO: 36707 - DNA, 2474 bp, Homo sapiens
aggtcccagtaaccgccggttggaggcggccgaaccgcagtagggaaagacccaggctgcgggacgcggtgcaggctgcggcgctgacggcctctgctccttccgcgggtttccgactccctgccctagattttctgcttagcgacttggggtcccctctcgtttgcttctggtaggagtcgcaatcccagcagcaatagcccagaagaggacacggttcccgtaccgaagggttcagtaccagcagcccgaccatcacgcggcgggatgtctgtggttggcattgacctcggctttctcaactgctacattgctgtcgcgagaagtggcggcatcgagaccatcgccaatgagtacagcgacaggtgtaccccggcctgtatatcattgggatcaagaactcgagccattggaaatgcagcaaagagccagatagtcacgaacgtaagaaatacaattcatggcttcaaaaagcttcatgggcgatcatttgatgatcccattgtgcaaactgaaaggatcaggcttccctatgaactgcagaaaatgcctaatggaagtgcaggagttaaggtgcggtacttagaggaagagagaccttttgcaattgagcaagttactggaatgctgttagccaagcttaaagagacttcagaaaatgctttgaagaaaccagtggctgactgtgtgatttcaattcctagcttttttactgatgccgagagaagatctgtgatggctgcagcccaggttgcaggcttaaattgtttaaggttgatgaatgaaactactgcagttgcactggcgtatggaatttataaacaggatcttcccccattagatgagaaaccaagaaatgtagtatttattgatatgggacattctgcctatcaggtctcggtttgtgcttttaacaaaggaaaacttaaagtcttggctactacctttgatccatatttgggtggcaggaactttgatgaggctttagtagactacttctgtgatgagttcaagaccaaatataagataaatgtgaaagaaaactctcgggccttgttgcgtttatatcaggaatgtgaaaaactaaagaagctaatgagtgcaaatgcatcagatcttccattgaacattgagtgtttcatgaatgaccttgatgtttctagtaaaatgaacagggctcaatttgaacaactgtgtgcttcccttttggccagggttgaaccacctttaaaagcagtaatggaacaagctaacttacaacgtgaagacattagtagtatagaaattgtaggaggagcaacacgaattcctgcagtgaaagaacaaatcactaaattctttcttaaagacataagtaccacattaaatgctgatgaagctgttgcaagaggatgtgcgttacagtgtgcgattctctcaccagcatttaaagtgcgtgaattttccataacagaccttgttccctattcaatcacattaaggtggaagacctcttttgaagatggaagtggggaatgtgaagttttctgtaagaaccatcctgccccattctcaaaagtcattactttccacaagaaggaaccatttgaactagaagcattttatactaatttacatgaagtgccttatcctgatgcaagaattgggagcttcactattcagaatgtttttccacagtctgatggtgatagttccaaagtgaaggttaaagttcgtgttaacatccatggaatcttcagtgtggctagcgcatcagtaattgagaagcaaaatttggaaggcgatcacagtgatgctccaatggagacagaaacttcatttaaaaatgaaaacaaagataatatggataaaatgcaggttgatcaagaagaagggcatcaaaaatgtcatgctgaacacactccagaagaggaaattgatcatacaggagccaaaacaaagtcagctgtctcagacaaacaagaccgattaaatcagacacttaaaaaaggaaaagtcaaaagtattgatctaccgatccagagtagcctatgtagacaactaggccaagatcttctcaacagctacattgaaaatgaggtatgtaaatctgagttgatgctgaaataggtggtagtttattctgaaattttgtagaagtcaatgattatctccaaaatttagggcactagtttataactcctaaggaattatattaagtagattactaaactattttttacaaaatactgagctgttttaatgccatatgtactgtgtagctatcatcttagttgtgtgaaaaacatgtattgcctcctctatagagaaagacttttctgaaattgattcttccttttattctgtctttaacaatgacacccagcagaccacatatggggaaatattagctgctcccctcttctcctgtgttgtccttaaagattatatctctgttcaaaatgttttctgacatccattaaatatttttttaa

SEQ ID NO: 36708 - DNA, 2306 bp, Homo sapiens
agagagagagagagagagagagagagagagagagagagagagagagacttaaccacttttgtcatttgttttttggagtagttttgaaaagtgttttatattgagtgcacttctgttcatttccattgctgcttatatgcagtgttagccgaattagatttacaagacaatctaagctttccggataattttatatatcaaacatacaggatggatacatagttggcaacagtctaccttatttaaagcttctactgggataaacctcaattcctttattcaggaaaggatactttattgcattattgttgcagaagcatagatttaattgcatctttattttgaaaaacaaatgaaaattgatggggtttaaagctacagaggcactgacctttttctagttattgtattgctacaatttaaatattaaaacaaataagagctttctcaacaaattagtccatctcattgatgtaccacagaaatccaaagctttgctgtcatcacataaatgaattaaatcacatgtgaaagggaacacacccaattttatgttaaggtgaaaccagcagtttgcttcttttattagtaatgtggattgatgttttctcagagtaactcgttgtcttttcgcttgaaatttttgatcttgtcctgaagactagctgctgctaaaacaatgctagcctaaagatacaggagtctctgacaaaatgactttcatgttaaggggaaatgctgtttatctactcagacatgcatctgtgatgttcatagccttgtttcagttataatagttgtcttgtttttttcttaattgattttgttaataataccttaacacagggtaggaagaagtggcacagtgtattgcattatatacatttatcattgatttacctaatgttaccttgtagattaaacactattaagtggtaatacttgaaaaggagcacttataccataagtcttaggaaataatgtttgtaataaacttaactatgttacatatcaacaggcaaaaatatagaatgttacatagtgttgtgtgattaaattatagttcctgctgttaacattaccttttgaaaccttggctccagttttggtgcttcttatacaaattaaatgcgaaaagggactgtaaacttaagatgtattttaaggactttatctgtgcttcatcacccaacttgttcacattgttaatttctgtccagagacctgaaactgcttaagtatgggaacagactgaaatggtgtttcaacctgcaagagacagaagcatagacaagtatatgagcccttatgtccttaatgccaatcaactagattgacctaggttaaaatttcaaaaggctcattttctcccaaagctaaatctttatattaggaacaattaaatattgacttaagttgtaaaaattgagagtacaatatctttagggatagtcattatttctcacaactagttctctacgagagattttgtttctacaatgtagtcagcacttaatggagagtatggagtagtgcattttgcagggatttttattccgtcttttgaggggaagaatctcttttttgcattaaaaaatcatataaacttaatatatttttaaactctcctagtctttaaactttctcttaattctcttaaaatgaaataggtatatccaataggtgatgaaatacattttttacaaacatagatgctttttatttgtatgttgaatgtacagattcatttcaagaaaagcatgaagataatgaaagcaaatatgtaacaatacaagtagggactttagagcttctatttgggttaaaacatccactcacttggttaggagctatgcctcagaaacttcctgggagtaaatatgggaacaacttttctattaatacatctaaattttctagtatatcctgacattttccattcctgctctgaagtcacttttagttttgtgttttagtcagatagtaccactaatttttgtaattatataacacttcatttaataacttatatacatccaaatatatatactttttctacccaattattcaacttaaaagatttcaaaaacgatttagccttataatgtatttatttatttaattcattaatgaaagagagtgctctctttaatgcagctttgggtagacagtctaattcagtccaattttaatctgcattaaaatatgcaatgctagacaaagattttcaaaataaaaagctattatttcagaaattattttaaaagatgcatagtaaaacagtgttttcctatggtaagcaaata

SEQ ID NO: 36709 - DNA, 265 bp, Homo sapiens
tcctagcattgatgattttgagcaggttacttaagcttcctgagacttaataacaggtttgttatggtttataaaagataatctgggggaagtacctgccccatagtgatcaatcaggatatgatcataattattgccaagatgattatttgccaacatcttaaagatgatagccaaattattcaatgaattgaataagttaatctgaggctcacatactgattggagttcttttttccttaagggagcttcactattcagaatg

SEQ ID NO: 36710 - DNA, 183 bp, Homo sapiens
accccctggtgttttggtaacacaaatttggcagatgtattttctaaaataatctattgaatcaacacagctcatttcacaccaggagtagatcattttttaacaaccctttcctttatgtgataacattattgcagtaataactatgcaataataaataataatgaccattttattcatttg

SEQ ID NO: 36711 - DNA, 660 bp, Homo sapiens
gaagtttggaatatagtagaagttattaaattatgttgatttataacaaggtttcagaaaatgatgggatgagctttatttaacagataatgcacatttgttatatgcaaaagcatataatgctttgctgtcaggaataaaacctttgggatttatattgtggtagggcagctggacttgtgcacaaatacctgtactataatcacaaatatatctgtgagtcacaaatataccaaatattactgaatttaaaaggcagaaaatgcatttgattaggagaaaacctgagacagaactttaaaggcataaaagtggaattttagctagtctttgaagggattgataagatttttttttttaagttttggattgataggattttgattggcaaagattactgaaagagagcattcctgcctgagagattagcgtaagcaaaggcttggaggtgagaagcccaggagatgtggggaatggtgagttaggttttaatttttaaactatgacctatagtaagaaatacatgtcacacttctatctaatatatgcatgtatgaatgtttgtgtgtgggtaaaacaagaagtttcataatacagtaactgtccttaacagtggcaggtgcagttggatgttatctattttgtttgactaaaaaaaaa

SEQ ID NO: 36712 - DNA, 265 bp, Homo sapiens
ggacattttgaacgttcatttggacgtgtagtgttgtcttgtttttcatgtgtttgatgtgtcccagtgttgatttccattcatctggtggaacagttatctcttccaattttattgtataggttggatagggaaagattttactgatgtatgtgggtcttaggatgttggtttataggagtgtgttgacttttattgtagtttagtgcagcagtgtagtctccgtgtagtttcttcagctgtaatccatgctagtgatgttcgc

SEQ ID NO: 36713 - DNA, 240 bp, Homo sapiens
tacctttctcaatgtaatgaagtattttacagtcaatttgtgatgtaaatgttgctcttgtctttcctcacttacaaattactttgacattgaacagctgtgagacagacatattgagatgcctgccgttgttattattcattttatgctgtccaagatatcatttaatttagacttacaagtatttccttgtgattatattactctgtccttgttaataaagtgctgctgtgtttgact

SEQ ID NO: 36714 - DNA, 390 bp, Homo sapiens
caggaagatcacttgagcccagaagttcaaggctacagtgaacttgaaccactgcactccatccagcctagtcaacagagccagatcctgtctcaaaaaaaattataattaaaaacaaaagcaagatttggtaaattgagaaaggctggaacagaattgatattactgtagcactggaatctatgtttaattggggggtggggaaagatggtacacatagccaaaatattcagagctgcctaatgaacactttcttacattctggaagcaaagtgtttttaggaagtctgatccacaaagatttaaattatggaacacactgtcaaatggatgatatcttcttcaagcctcccttctcttgccaaatacttttccaatgtaaatcctgac

SEQ ID NO: 36715 - DNA, 437 bp, Homo sapiens
tttacatgaagtgaacaccaagtggccaatgggaaacctctagggggtatttggacccaagaagattctgtatctggggcccttgagcggctgctctggccactccaaccctgtggagtgtactttcattttcaataaagctctgcttttgttgtttcattctttccttgctttgtgcattttgtccaattctttcttcaaaatgccaagaacctggacaccctccaccggtaacaaatgcccatatttacatattagtttaagtttgctatttcagagagctgcgatgataggtacatcagtactgaaaaagcactactacttggttcttcagtagggaacattactgtttagaatgaatactactacatcaaatgaaatgatcctggttattttgaatcatggaagacatttttttaaaatgctcctagttaaaa

SEQ ID NO: 36716 - DNA, 462 bp, Homo sapiens
acctgctctatgttcttctctccttctttctccctctcttttttagtgaaagtgtctcactatgttgcccaggctggagtacagtggctattcacaggtgcaatcatagctcactgcagcctcaaattcctaggctcaagcaatcctcctgcctcagcctcctgattagctggggctatagacagtgcatccacatccaacatctatgttcttcctgaacttttattttgccttcctttggtttgattagtcatttatttactattcaattttcccctctgttagtgtggatggcatatactgtgacagccattctgcatgtttacagacattctggctgtctatcctgggcacaaggtcagactgcgtttcctaaccactcaagtaatgtgtggccatgtaactagctttgaccaataaaatgtgagtataagtgctatgtgtgtgtcacctccagatgga

SEQ ID NO: 36717 - DNA, 423 bp, Homo sapiens
tcttttcctgcgttaattctactagcacttgagtgttttgctgtggctatctgccccttatctcttgctctgttgagattaaagcctggaccacaggattaaaaaacattcttaaagttttaccacggaagcgaagcggccaacacaccttttcccctttgccttgttttcgcggagatgaagctccagccagtagctttgaagggccccattctcttcccattgaccagagagagagttcaggacagtatagacagcccagtggccaagggatgagttttgcaggtgtctgagtgaatgattaatcctccagctgtaagaggtgtcaggagaggctgggcgcggtggctcaagcctgtaatcccagcactttgggaggccaaggtgggtggatcacgaggtcaggagatcgagaccatcctg

SEQ ID NO: 36718 - DNA, 327 bp, Homo sapiens
gcatcagtgtacttttgatattaattctcattttttagaaaaaacttagaacttttttcataatcttagccagtttgattgcacataaaaattctttcacaagattcatttttcacaaatgttttacaactttcttatccattcaatttttgccctatattttcttatttttcatctcgaaacaactactctactttatgacaaaaattactctcttttgttgggtgtggtgcctcactcctgtaatcccagcactttgggaggctgagatcacttgaggtcaaaagtttgagaccagcctggccaacatggtgaaactccatttct

SEQ ID NO: 36719 - DNA, 725 bp, Homo sapiens
gcctaggctggtcttaaactctgaccttaagtgatcctcccgcctcagcctcccaaaatgctaggtttataggcataagccaccacacctggcccgctctacctttctgctcccaaaattgactccccctttcacaacagcaactcctcttctcacctgtagttccaagagaaaaaacatttctttattccttttgattgtcaaaaactatttcataccaactttttgaaatttaaaattgaatcaagcataatttttaagtgcaaatcaaggatatatagctgttactcaattttaatggggaaaagctttgttatgatagaatatctaatgtatttgatagtcattcatttcttatctatgcagggaactatccaggagcttaaaattttattgggagacagaatacatgagggggcctcaaaaccctcaaaaaaaaagttaaggtcagttaataagatttccatctaaaaattaaactagaaaaatctgcacatagtggagattagccatctgtaaaatgaaaccaaagaaccatccaggaggcaagattggaattggaagattcagaaaaggatgctgaaccaacttcattttaccctttctataaaaaacacttttttttttttaacagagaaggcaaatggttatcatggaacctaaaaaaggggaattaagagatcattactgggccaggagcggtggctcatgcctgtaatcctagc

SEQ ID NO: 36720 - DNA, 273 bp, Homo sapiens
tagaataaaaggacattcataaatatttttagaaagcccattagaagtgtttgaattattatgtgatttatataggataaaatccatgttttggttgtacacgtctgtaagtttggataaatgcatagtcatgtaaccaccaccaaaattaaaatttaaaacaattctggccaggtgtggtggctcacccttgtaatcccaacacttcgggaggccgaggtgggtagattatgaggtcaagagatcgagaccattctggccaacatggagaaa

SEQ ID NO: 36721 - DNA, 1611 bp, Homo sapiens
  misc_feature (1602)..(1611): n is a, c, g, or t
ctagtagctacctcacagggcagttgttgaaaataagctaatgctcctaaaaccctgagaacagtgctctgtgtatgataagtgttcatagacgtcacattatttatttattttgaaaattcttcttttagtcaaacttataagttttctgtggctcaaaatattctcaaccagggtttctttagtggccatcagctcccagggggtgatatcatggaagctgttatgcttaggaatttgtttaaaaagacgtcctgccctgtgccccagtacatttcaacaccacccagccacacagccgccttctggcccaacactcttaaagacacagtgcttgggaaatgtcctcatgcccctttcctgaggcaggtttgccactgtttccccaggcctggcagtcacagatggcagtcactgacctgctgtgatttgagagatggagagaaaaccttccactcttcttattctccctaatagcctcagtctctgccttcagttccacatttccctttggcgtaagctatgattgtcgtccaaggcccctcctagataggcaaggactcatgataccaagagtgtgatcaggggatagagatgagatgtctgggttggatgcgggagtggggtattttctaactaatggggtgcaaggggtacctgagcatgctctcaaaatgtgttataccctaaaaaatgtttttaaggtagtgtgttgatataacagttgttaagaccatgatgctagaggcaagatcgtgagatccatagagaaggtagttgaagggtagggccttttattcacatatatgctgccttctccaccaactgatgtgatatccttttatattcgtgactccagtgaacccacgcctctgaggatttacacccttgtatttgtactcctcttgagtctgggctggcctgtgactttaatcagtgcaatgcagaagtggttcagtgccagttctaagactacaaagagaaagaaaagttcaaccttccaatatcccagcagacatcaggccccagctgtgtcaccagcttcacgcccacgagtgaccacaacaaacccagcagaaccaaccagcgcatcccagccctggttgcagaatcatgagtaaataaaatggttgctgttctaagccatcgtgctttggagtggtttcttatatgtcagtagatgactgaaacaaccaaagccacagcctccgcctcccccagccccattcccccactcctccccacttgctaacctccatgaagccctgggacttgggcagctgaaggtgcagaaaagatgccaaatgaaaaagccaccctccttgacaacaacccagctgaggggagcaggcagagaggggcggttgaaggaagcacgctgcctggtgtttgaaagcatatgaggggctgccctgagcgcatctccttacattcttgtctcaagaccacccagcaggcatggcccctccaggtaaccttgcactctcctcccggacccctccccagtccccagacaaacccacctctccctcctggactctccatgggtcccttctccccacctgccactgggatcaggaagaataaagacctgaactcacnnnnnnnnnn

SEQ ID NO: 36722 - DNA, 658 bp, Homo sapiens
agtggtcaagagaatgcagtgggaatgacgcagtgcaacttcttggatgtagcttgtacctgcaaccccacaaggttccttgtgaagcttgaggtgtaaggtctaccctgaggagaaggagggcacagattctgaaagagggccttttaaaatgaaggacttattttccctgatgcatgctgtattacattttctgacatgatgaagggactgggcttgagaccatttagttatagaaacataatgttgcacattttttttgtatgcctgaggtcgtggccactacaataaatactatttacaaaattttgaatttttcagcttacgtgacaattttcgattctgcagaactccactgacatagttagagctcaatatcaggtttcctgaatcaaagttaaatgcatttaaaaaattctgtttataggagcacttcccaagagggcaaatgggaggtatatcttggccctttgtgctctcagattattttttcaaaacctgccttgagaatgctgaggaaggccttgacatttagctgctccaaattatcccattgttgttctggacacttacttgctagtaatattggagagatcagtgctgtggtttctgctgcaaacacttagaatatggtatcatcctcaaagttaaaaaaaaa

SEQ ID NO: 36723 - DNA, 143 bp, Homo sapiens
atttgaaatacatctatcacctagatattgagatatattatacatttaatatagtgtgttgctggtatagggatagacaaatgaacattggatcagaatagcactgaaacaagatctacccctatatgggcatgtccctatta

SEQ ID NO: 36724 - DNA, 295 bp, Homo sapiens
tgacatgtggctttttattatacaaattgcaacattacaacataaacaaaacatcaagataatatggctcaaagaaaaaaaagaatatccagaaatcaattattaaaaaaaggagatgtaaaaattatgtgagacaatttgaattaaagtcttgatctattttttaaaagaaaaaaataaattaccctagaaaatcaaaattacatctcaatgatgctcaatgagtaaaatggaaattaaaaaaacaaaatgaaataacaaaaatgaaaccaacaaaaagataaaaagcacagaa

SEQ ID NO: 36725 - DNA, 350 bp, Homo sapiens
ttaatgaaaatctgtattaatttgatggatgcattgtattcacacattttgaattttgtgtattatttaaaacaaaaactaggttttattttccaaatctgaggttttgtgaatttattttatactaagtatatgaaattaactcatggtaaggctgttaaagaaaagtgatttagatcaggaaggtacagctcaatatactattatgcataaatatgtatagtaaaatgaatattgtccttagtcacaagtaatataagaagaaaatcaactcttggataaatgaagaataagaaataagatacaaagtctaggtttgataatatttagataatattcaggcaatatcc

SEQ ID NO: 36726 - DNA, 370 bp, Homo sapiens
aattattttcaatacatcaaaattattatttcatgaattgcagtttagctaagtttaagaatcaatgaattgaataaaaaattaaataaaaacagtacaggtgtaaagagcaaatacaattttaaaataagagactgacttctccctgttgaaaataagaaaaataaagaaagagatacctccttccttttcttagagcactttagagatttcctaattgtaattgtttttctctgtctctttgaaatgtatgtaaatctctttaaaagctaaagaagtcttttccagctttatgaccagggaatgtcttttcttatggaacctggggactcatccttttggggattatcgttttacagggaagatggct

SEQ ID NO: 36727 - DNA, 210 bp, Homo sapiens
ctgacgtttttactgcctcttcaaaagtagtaagacttacattcaaaggatatttatggttaaaatgtagtaaaagttagccaatagaaattagaaattcatagaatcagcccaagtaattagatcttatttacttattctttcagttattcccatggtcaaggcacagaagaggtggggtgggtataattatagtttgaataagaagtt

SEQ ID NO: 36728 - DNA, 422 bp, Homo sapiens
tttatttttttttattctgatctagtgccagcaggggggaaaaatagtaatctcctcggagccattgtcattgctgaggaccaagaacagcaaaaaagctgtctgcacagaaatgctaaaccccaaaataagaaacataggacatttctgcaacccaaattctcacaaatgcaccagtctatccctagatcaaggaaataactgaaaatctgaaaggtatccagctgaaattcaaggacagttcttcactgtagctgagctgccctccagctttgaaagaaccttgtgtgaagacgtgactctgaccagtctccccaaacagctgaagagcagaacacaaaccatgaagtgtctacactgagtccattttccaagaggtatatgaaaagattttaaggtcaacacagaaaataaacctaccc

SEQ ID NO: 36729 - DNA, 459 bp, Homo sapiens
cctttagcatgacgtctctcaacttcagtttcctcatgggtagattgagggattgaataagataagtggtggcaatcacaaatcttcacaaggtttacccggatgagacaggcatcataaatgagcaaagaagactgggggcagtggttgggtagtaggtgtgtggaggtatgggggatagcacaggtgaaactaaatgcaaggcaacgttagtcctgcgtcagggagatattagggagtagaaggacctggagagaaaatgcctcatccaatgagagccagacttactcagttccagttaattgttatgtaagaatgagggcccagtgttatcagaactttcaatgttttgagagaatcctaaagttcagatttttatgtgaaatctattctagtgttaaaacatcagcaatttggccgggcgcagtggctcacgcctgtcatcccagcactttggag

SEQ ID NO: 36730 - DNA, 423 bp, Homo sapiens
tccatccctccatcctccattcctccatccctccatgcctctgtccctgcatccctccgtccctccatccctccgtccctccatccctccatccctccacccctccattctccattcctccacccctccattctccattcctccatcctccatccctccgtccctccatctctccatcccttcatcctccattctccatcctccatccctccatctctccatccctccattttctatcctgccatctctccatccctccatctctccatccctccattctccctccctcctccatcctccattctccttccatctctccatccctccattctccatccctccattctccatccctccgtctctccatccctccatctgtccatccctccatcctccttccctctattcctccatcctccatcc

SEQ ID NO: 36731 - DNA, 248 bp, Homo sapiens
ggagggatcttcttcagcagcccccgcccgccccgcccctgcgcccgtggaccgcgggctccaagccccagttccctaagcccaggcgccggcgatccagatctgcctggaggggaggggaggacggtggatcggagcccccgcaccctcgccccagcccatcacccgccttcctgtccctctccttgctaactctccggggccctgccggccgcgggcggagctccctccgcggcgctcggcgagcc

SEQ ID NO: 36732 - DNA, 370 bp, Homo sapiens
gacagatttactctgaagattcaatgaaaaaacatccacaaacaacttttctacaagaaacaaaacattttaaagaaaacatttacttcagccgggcgcggtggcttacgcctgtaatcccagcactttgggagggcgaggcgggtgcatcacgaggtcagaagttcgaaaccagactggccagtatggtgaaactgtgtctctactaaaaatacaaaaattagcctggcgtggtggtgtgtgcctgtgatcccagctactcaggaggctgaggcaggagaatcgcttgaacctgggaggcagaggttgcagtgagctgagatcaggccattgtgctccagcctgggcaacagagcgagactccgactca

SEQ ID NO: 36733 - DNA, 269 bp, Homo sapiens
acgccaatttttttacttgtagaggcaaggtctcactatgttgcccaggctcctggactcaagcaatcctcctgccttggcctcccaaagcactgggattacagacatgagccactgcacctgacctatttttagttttttgggaaacctccatactgctctccacagtggttgtacatttacattcctcccagtagtgtgtgagggttcccctagagattattttattttatttttatttatttattttttgagacagagtctcgctc

SEQ ID NO: 36734 - DNA, 834 bp, Homo sapiens
acagttctctaccgagagagtgtcttcaagctctgccccaagcttacctacttggatggctataccgagaggaccaggaagcacctgtactcagatgccgaggtggatggtgtggatgaagaggaggaggacgaagaaggagaagatgaggaagacgaggacgaagggggtcgatacacacagtgttctcactgtgcggggtctcacagtctagttgatcagacacgagtcgacaaagatacacggggttttgtgggttctctgagagcctgatgaactactttagaggtgaaagctgaattacaagtggcagcttagccatgcaaagatctgggtgagcaggcagcaagaacaacaagtgcaaaggccctgaagtggcggtgagcacggtgagtggaggagcagcaggggaggccggtgagggtggagtggaagatttgaaggcaagaacaagaggaaggaagctttggtctcaaaaggctttggaggtgagggcactgggataaattatctagcctttgtcagctctaccgagcccagaatgttcttcattcattcatacgttcattcgtaaacactggttgaacaactgtttaatgagcacctactttacattgggggtacaacagagaacaaaatagacaagaatccctgtcctcatggagtggatatgctagttgagggggcagatgattaaaagacaaaatacaggccaggcgaggtggctcatgcctgtaatcccagcagttgggaaggccaaagtgggaggatcgctggaggccaggagttcaagaccaacctcggcaacatagtgagaccctgtctttacaggaa

SEQ ID NO: 36735 - DNA, 172 bp, Homo sapiens
tttctcgtaggcattccttctgcgttgaacgcatattcactattctagctgaagggtataatatacagccacgaagggggtcgatacacacagtgttctcactgtgcggggtctcacagtctagttgatcagacacgagtcgacaaagatacacggggttttgtgggttctc

SEQ ID NO: 36736 - DNA, 354 bp, Homo sapiens
gtgagttcactctctcttcttgagctgggacgtcgttttctcctgcccttggacatcggtgctcctggttctaggaccttcatattcagactgggacttacactgttggccccatggtttccatcaaagtctcctcagcctttgggcttagactgagctacgccactggctttcctggggctccagcttggagaaggcaggtcatgggacttctcagcctcccctaattatgggagctaatccctcgtaataaatctcttgctatctctctattgtttctgtttttctagagaactctgactaatacagggatccaaattgcttcagtcttgtggcaccttcatttcaataagc

SEQ ID NO: 36737 - DNA, 374 bp, Homo sapiens
ttcctctccttggctgttgagtcttgggtttccacttgttaaggctgggcttggttaactcctctgattctcctcgcatcaagaagacagtttcttactgtagcaagctgcacccaccatgagccacatgggaagggctgagaaaggccacttttgacagcctcctattgaagcatgcagcaaagggagacagggaggaatagattcagacggaattgccttaaactcctccatgcatatttatatttgaaaaaaagtgcttgggaactaaaagtcaagaaacctattttctactataaaattttatttattttctgtgactttaggtaagtcagcaatccctttaaatgaaaaatgtttaatagaattaaaaa

SEQ ID NO: 36738 - DNA, 681 bp, Homo sapiens
gtcctaattattagtatctataacacctttgttgtctttcttatattttttctaattcacattaaaacaagtgtataactattaaaatacaaaatgtttgcacaccacctaacactttgtgtagcactggtggcacacaccccacactgggggaagttgtggactacgtgagcttcagttctttcgcacagtgttgaattcatgcttgtgaacacctacagagctgggaactgaggatgcggcagaaaataagcagaagtctctaggctggtgtgggagagtacacagatcatggcagtacaaatgactgcgatttatgatgggtgccacaaaggaaaagtataagagttgcgaacctatggatataaaaaacatgaaacaggcccagtagctcccgcctgtaatcccagcactttgggaggccaaggtgggtggattgcttgagccaaggaatccgagaccagcctgagcaacatagttagacccctgtctctaaaaaaaaaaaaaaaaaaaaaatacaaaaattagccaggcatggtggcatactcctgtagtcccaactactcaggagggtaaggtggtaggatcgcttgagccctggaggttgaagctgcagtgagccgtaattgcaccactgccctccagcctggcagcctgggtgacagagcaggatcctgtctg

SEQ ID NO: 36739 - DNA, 865 bp, Homo sapiens
taaaatttcgtggtccaccactaggaagtattaactcctgtgaagaacaaaataaaccaaaagtattaatttccatttttaactagtttagatggttttcccttgggcttaaaatggaaagcttttactgtgtgtatgtgtgtgtgtgcgcgtgcatgtgtgtgtatctgtatctatatcatacagcatatcaaagaaaatatttcttccttcctactctccattatgattactttttctctatttctctgtccatctactagaaaatggtgttgctagaaatggaaaagggatcacagtaagtcggatagtgaacgtctctgttcaatcccagggtcacagagacaagcgctattttcccttttctcccacacaaggtaatttaaaattgcactcattttgtgatttctcttgaaacatacacacaaccaaaggcctgactgagactgtctgtcaggacaatctggaatttagcaatgccagccaggctcaaatgactgcctgacccactgggaccctggatcaagtgatgtgccagagggcatggatggaatatgatattaaggcagcctattgattctctagattacctccttgagaaactaattatatttaatctttataagtgaagatttttgtattttaaaatctactttttttgtcaacataaaaatattagttttgatcctcagaagctcttgtctctgattttaaagagatattacttagttccccatcttttatggtatcagtaagttagtggaaatagtggtgaataaatcccacagaaaatagttagagaaaatcaaacataagcttcactgcagacataggggtgcctattcttcttcagtcaaaaaaaaaa

SEQ ID NO: 36740 - DNA, 419 bp, Homo sapiens
ttttattagagattgtaaaggttataacatcactttggtgtttcgtagtcaagttttaacataaggatgtgcctgaaaaatcatttgtaattagagaatgggaagattcttgggttgcatttttgtcagcaaattgcagaggatcattattctgctctagagttgcaccgtccagttcagaagccactagccacatgtggctgttgagtacttgaaatgtattgatatgtgcaataagtgtagaagacatattggattttagagatccagtatggaaaatacaaagtatttcattagttttattcatcaaatattaaacaaatattggtttttatatggaaaaaatacttaaaattaattttgaattcttttgaaatacttttgatattgggttaaataaaatgtattttgggctgtgc

SEQ ID NO: 36741 - DNA, 395 bp, Homo sapiens
ttttttgatacagagttccgctcttgttgcctagcctggagtgcaatggcgccatctcggctcactgcaatctccgcctcccgggttcaagtgattctcctgtctcagcctcctgagtagctgagattacaggcacctgccaccatgcccagctaatttttgtgttttagtagagatggggtttcaccatgttaaggtgggaattctcaaagcatggtccctgtaccagcaacatcagcatcacctgggaacttgttagaaatgcagactttggctgggcacagtggatcacaaatcctgtaatcccaaaactgagggaggctgaggtgggaggatcttctgagcctaggagttactggacaacatggcaagaccgtatctctaccccccaccaa

SEQ ID NO: 36742 - DNA, 540 bp, Homo sapiens
tttggaaatcagagtttttgtttgtttgtttgtttcaatttgagagcaggtactgcttattaaccaaccagcttagaaaaataatcatggtagacaccttagttcactcttctaataagcctgttgatctggtcctccctgttgccagcatctccaccttctgcaaaatgggtggccttcattccatctcatggagaagataatttgaatggccgcaggaagttattttctttgaagtgttttccaacagtatagatctcatgaatcagatctccatgcagatgatgtcatatttatcaagagatcgagcaatcaaagcgttatctgtcaaagcatttcgcttcttattgattttgccataaccatgcttgcagattagttcatttactgacttcagatttgagtacccccatgcaatgtatgggtctacaatcctcagcatgttaattgaagcctttctgagtttcacaaagattccattgaagatttgataaaggcgtagaagctgcaacacctttcggacatttgggctcacaccat

SEQ ID NO: 36743 - DNA, 441 bp, Homo sapiens
tgagacagagtctcgctctgttgcccaggctggagtgcagtggcgcaatctcggctcactgcaacctctgcctcctgggttcacgccattctcctgcctcagcctcccgagtagctgggactacaggcgcccacgacattttttgtatttgtactagagacggggtttcaccatgttagccaggttggtttcgatctcctgacctcgtgatccacccgccttggcctcccaaagtgttgggattacaggagtgagccaccgtgctcagccttgaatttcttttttaaatctccccaccctgccaggaaaaaaaaaaacctccctgatattctgactgagattgtaaattgaatttacagtgtgattttgggaaaactgacatccaagaacaaaatatggctctccacttattcttctatcgctctcagaattttagttttc

SEQ ID NO: 36744 - DNA, 132 bp, Homo sapiens
caaacatgttgttaatattattacatacatatttaagtacttacaaaagatcatcaagatatgcaacttttttaattgttctgaaacaaaatggacaaagcagctaacattctggcattatttcctgcctga

SEQ ID NO: 36745 - DNA, 409 bp, Homo sapiens
ctacaggcgcccgccaccacgccctgctaattttttgtatttttagtagaggcgggatttcactgtgttagccaggatggtctcgatctcctgacctcgtgatccacctgccttggcctcccaaagtgctgggattatagccgtgagccaccgcgcccagcacatgatacaagattttatctctcttcctttcctctgcttccctgctcttgacaccctcatctccccaagactcctccctacccctgtcatgggggagggaattcaaacttcatttgcagataagtgaccatctgtccttccaaaggtttatggagaaaaggaagaattgtatagcctcctgggaagacagattaatccagattagctctaggcaaaggaatcagcctattcaagataacaccattta

SEQ ID NO: 36746 - DNA, 1684 bp, Homo sapiens
agcctcaacctgacactcagcagcaagttaggcctatctacaaatctcctgctctgtgcccgcgcagtccagtggaggagatattcctaattagggggcacttccaaggggcggagtctccgcggcgagtggccgtggaggggcgcaaggcagacggtctccagccacgatacctgggccaatcccagcctgtcacgtcatgcctagtgagctgaacaagctgcgtaactgtcgtgtgcctcagtttccccacgtgtataatggaaatgattacaataaacaggacctttttgaggagttgccatgaggactgtcagacgccaaggcgccccgagaggcacttcgcttccatgccgaggccaagggcgcacaggtgcgtctggacacgcgtggctgcatcgcgcacaggcgcaccacgttccacgacggcatcgtgttcagccagcggccggtgcgcctgggcgagcgtgtggcgctgcgagtgctgcgggaggagagcggctggtgcggcggcctccgcgtgggcttcacgcgcctggaccccgcgtgcgtgtccgtgcccagcctgccgcccttcctgtgccccgacctggaggagcagagcccgacgtgggcggccgtgctgcctgagggctgcgcgctcactggggacttggtccgcttctgggtggaccgccgcggctgcctcttcgccaaggtcaacgccggctgccggctcctgctgcgtgagggcgtgcccgtcggcgccccgctctgggccgtgatggacgtgtatgggaccactaaggccatcgagctgctggatcccacagccagccggctcccaacacccatgccatgggacctcagcaacaaggctgtgcctgagcccaaagccacaccaggagaggagtgtgccatctgcttctatcacgctgccaacacccgccttgtgccctgcggccacacatacttctgcagatactgtgcctggcgggtcttcagcgatacggccaagtgccctgtgtgccgctggcagatagaggcggtagcccctgcgcagggccctcctgctctgagggttgaggaaggctcatgaaaggaggcttcccagtatgagtggcagcccgggcctagatctgagtctggcccctgcagagaggaaggaggcgcagccctaccttctttctggggaagagtcagaaaggctgattagcaagaggtgcggcagagagaggaaggcagggaggtgctgtctgctgcctccacctgttccccaacaggatagcaaggaaaaacccctctttctgtccatgccagaactatccttctgatggggtgctttgtttagagatggggtggcccaatccccaatcagttttacatctgagggagttcaggtatctgttgtgactggtgaagccctgtacctcctgggtattgaagaacctggacttgaagcaggaggtatctgcaaggaatgtataaagttccacatggaagctgggttgcctcccacaagtccccagtagagtggatctgtagttacccgccctgcctccctttcagggtggtcatgaggtcccagagagaccatgcatctgaagatgatttaaaacatgaaagtgtattgttgtcactgtggtaatttccttgccagtttctgagatatcaaaataaagtttgtgtttcctgaatgattttg

SEQ ID NO: 36747 - DNA, 1718 bp, Homo sapiens
  misc_feature (80)..(80): n is a, c, g, or t
ggccttctccaggcagttccttctagacctggggacctgtgcccgaggaccttagactgatgggtgcccagctctgcttngaggccatacagaaggggtttcaccatgttagccaggttggtcgcgatctcctgacctcgtgatccacccgcctcggcctcccaaagtgctgggattacaggcgtgagccaccgcacccggccttgaggacctggtctttcagcaccagctattggggttgtgcatctctggacctaccctcccagacgccaaggcgccccgagaggcacttcgcttccatgccgaggccaagggcgcacaggtgcgtctggacacgcgtggctgcatcgcgcacaggcgcaccacgttccacgacggcatcgtgttcagccagcggccggtgcgcctgggcgagcgtgtggcgctgcgagtgctgcgggaggagagcggctggtgcggcggcctccgcgtgggcttcacgcgcctggaccccgcgtgcgtgtccgtgcccagcctgccgcccttcctgtgccccgacctggaggagcagagcccgacgtgggcggccgtgctgcctgagggctgcgcgctcactggggacttggtccgcttctgggtggaccgccgcggctgcctcttcgccaaggtcaacgccggctgccggctcctgctgcgtgagggcgtgcccgtcggcgccccgctctgggccgtgatggacgtgtatgggaccactaaggccatcgagctgctggatcccacagccagccggctcccaacacccatgccatgggacctcagcaacaaggctgtgcctgagcccaaaggctttgggccaaaagatttggctctgcctactggaaacctaaaagcaacctggcatctctgccttcgagagcatttgcctactctccacaccaggagaggagtgtgccatctgcttctatcacgctgccaacacccgccttgtgccctgcggccacacatacttctgcagatactgtgcctggcgggtcttcagcgatacggccaagtgccctgtgtgccgctggcagatagaggcggtagcccctgcgcagggccctcctgctctgagggttgaggaaggctcatgaaaggaggcttcccagtatgagtggcagcccgggcctagatctgagtctggcccctgcagagaggaaggaggcgcagccctaccttctttctggggaagagtcagaaaggctgattagcaagaggtgcggcagagagaggaaggcagggaggtgctgtctgctgcctccacctgttccccaacaggatagcaaggaaaaacccctctttctgtccatgccagaactatccttctgatggggtgctttgtttagagatggggtggcccaatccccaatcagttttacatctgagggagttcaggtatctgttgtgactggtgaagccctgtacctcctgggtattgaagaacctggacttgaagcaggaggtatctgcaaggaatgtataaagttccacatggaagctgggttgcctcccacaagtccccagtagagtggatctgtagttacccgccctgcctccctttcagggtggtcatgaggtcccagagagaccatgcatctgaagatgatttaaaacatgaaagtgtattgttgtcactgtggtaatttccttgccagtttctgagatatcaaaataaagtttgtgtttcctgaatgattttg

SEQ ID NO: 36748 - DNA, 1158 bp, Homo sapiens
ctggactcagtgacttcagacacagaagtctgtccatggctccttatcacatccgcaaataccaggagagcgaccgcaagtcggtcgtgggcttgctctccggggggatggccgaacacgccccagccaccttccggcgattactgaagctgcctcgaaccctcatactcttacttgggggggcccttgccctactcctggtctctggctcctggattctggccctcgtgttcagcctcagcctccttcctgccctgtggttccttgccaaaaaaccctggacgcggtatgtagacatagcattgcgcacagacatgtctgacatcaccaaatcctacctgagtgagtgtggctcctgcttctgggtggctgaatctgaagagaaggtggtgggcacagtaggagctctgcccgttgatgatcccaccttgagggagaagcggttgcagctgtttcatctctctgtggacaatgagcaccgtggtcaggggatagcaaaagccctggtcaggactgtcctccagtttgcccgggaccagggctacagtgaagttgtcctggacaccagcaacatccagctctctgccatgggcctctaccagagcttgggcttcaagaagacgggccagtccttcttccacgtgtgggccaggctggtggatcttcatacagttcatttcatctatcacctcccttctgctcaggcagggcgtctatgatttctttccttctgtattggtcagaatagaatccattcggctgtagcagcaagcaatccccaacctctgactgcaatgacctttctgtgcaataaaagcttattgtccattaacatctgagtcccatgcgattgcctgtggggtagcttctgggtttctgcttcattcagtctttttgattcccatctgtttcatttttatggtctgggtgctgcttcccgacgtcaccgggatccctgggtgtttctctcctttccctggaagcctttctttcacccacaaggcaccgggaagcctttgtgctactgttcctcctgcgtgtgtccgtttggacctctgaatcatttccttcttgctgataggcttgttcttctggacagccaggaagactctcttgggtagtgggcgcatgcgattctggtggccctgccgttccctc

SEQ ID NO: 36749 - DNA, 319 bp, Homo sapiens
tggtagagatgggttctcacttttttgcccaggctgatcatgaactcctgcccacctcggccttccaaagtgaaccaccatgcctgacctctacctcttgatggagtttgctgcagagaattcaatctacaaaaccattcttcttattcattccacatgcccccttttgttcaacattgtaatcactaaacctctttcagttctttaaactcaccttgttctccagcttttggcctgaaaacatgtgtttctctccacctgaaatattctttcttgcctgttttttctagctgactgctatacatagtttaggttttag

SEQ ID NO: 36750 - DNA, 366 bp, Homo sapiens
atcatgactcttcactgttgatggtgactctgattcacctggtcaaggtagtgttcattaggtttctccactgcacacttagtctttccctctactttccacactgctgcctttggaggagtgttgctgtgcccagctcatgcttgtggagtggggatttaatgttctcactcttcgagggtagagtatctgcataaactacttggaattctgcatggaatatttgtgtcttctcccccatttatttatttaatcatttatttatatcacggtacactcatggacatttattttatgctttatgttataatcctatactactttatttattttgttgcttaaatttttccagatggaacaatttgg

SEQ ID NO: 36751 - DNA, 201 bp, Homo sapiens
ggctccgcagaacacagtgtgggactgcccacctgccggctggccctctgcacccctcccagtcctggcattctgtgggttgaatgggaggacaagaatggcagccagaggagggcaagccacagtgggtctgccccatagccagctcctcgcccacattttgtccagtccctggcacgaggtgatcggccagtcactggg

SEQ ID NO: 36752 - DNA, 356 bp, Homo sapiens
gtgagtgctggggagagcagaggcagaaggcagaatagatagcagggggcaaggccagtgggcagagacacggccgaccctgaagcatcccatgcctcagtttcctcctgcatacaggaaggttagataattgcataggaattttcaggttctaaaatgtgtgcagaacctaaacacagtaaaatactgcacaaagacatttaaagactagggagggtcgaagtcaatctttcaatcatacatttcatcaaaaacattctttcaggctgggcacagtggttcacccctatagtctcagcactttgggaggccgaggtggtaggatagcttgaggccaggagttctagaccagcctg

SEQ ID NO: 36753 - DNA, 278 bp, Homo sapiens
cccagctagaaagataggcataataccagcaattaatattcagcatttcacattatagtcaagaggatgtgtttttctttgtgatgtggctcataagctaagagtgttgggagccagactctgaactgtgtcttctttttgtggatgaggattaaggaggaaaaaaacagcgacgacaatcctgctccatctgtaaatgaacaaacatcttgattttatagctatttgctttgtaaaactaaggaatgaaacaaaaattactggatgcctaagtaaca

SEQ ID NO: 36754 - DNA, 298 bp, Homo sapiens
tttttttgtcaatcttaagattttaatttcagcttaggcctttcttatttccatcatggacctggctccctttgtaagtttaccagaatctgtcaactaatcctcagagcactccctttctgtctctcccacataagaatttgctaaatgatatccatataacctcttattctgtatttttaagggacaaagaattggctgtttcttataagttattttcctttatactatttataatttgtctacctaaatcacaatgtgttcataactcttctttctgtatttcttttcgtcgaca

SEQ ID NO: 36755 - DNA, 3498 bp, Homo sapiens
gaattcgaggatccgggtaccatggggctggagtggggaccgaggccctgctcactcccctggtgggccggcttgcccgcctgctggaggccacacccacagactcttgtggctatttccgggagaccattcggcgggacatccggcaggcgcgggagcggttcagtgggccacagctgcggcaggagctggctcgcctgcagcggagactggacagcgtggagctgctgagccccgacatcatcatgaacttgctgctctcctaccgcgatgtgcaggactactcggccatcattgagctggtggagacgctgcaggccttgcccacctgtgatgtggccgagcagcataatgtctgcttccactacacttttgccctcaaccggaggaacaggcctggggaccgggcgaaggccctgtctgtgctgctgccgctggtacagcttgagggctctgtggcgcccgatctgtactgcatgtgtggccgtatctacaaggacatgttcttcagctcgggtttccaggatgctgggcaccgggagcaggcctatcactggtatcgcaaggcttttgacgtagagcccagccttcactcaggcatcaatgcagctgtgctcctcattgctgccgggcagcactttgaggattccaaagagctccggctaataggcatgaagctgggctgcctgctggcccgcaaaggctgcgtggagaagatgcagtattactgggatgtgggtttctacctgggagcccagatcctcgccaatgaccccacccaggtggtgctggctgcagagcagctgtataagctcaatgcccccatatggtacctggtgtccgtgatggagaccttcctgctctaccagcacttcaggcccacgccagagccccctggagggccaccacgccgtgcccacttctggctccacttcttgctacagtcctgccaaccattcaagacagcctgtgcccagggcgaccagtgcttggtgctggtcctggagatgaacaaggtgctgctgcctgcaaagctcgaggttcggggtactgacccagtaagcacagtgaccctgagcctgctggagcctgagacccaggacattccctccagctggaccttcccagtcgcctccatatgcggagtcagcgcctcaaagcgcgacgagcgctgctgcttcctctatgcactccccccggctcaggacgtccagctgtgcttccccagcgtagggcactgccagtggttctgcggcctgatccaggcctgggtgacgaacccggattccacggcgcccgcggaggaggcggagggcgcgggggagatgttggagtttgattatgagtacacggagacgggcgagcggctggtgctgggcaagggcacgtatggggtggtgtacgcgggccgcgatcgccacacgagggtgcgcatcgccatcaaggagatcccggagcgggacagcaggttctctcagcccctgcatgaagagatcgctcttcacagacgcctgcgccacaagaacatagtgcgctatctgggctcagctagccagggcggctaccttaagatcttcatggaggaagtgcctggaggcagcctgtcctccttgctgcggtcggtgtggggacccctgaaggacaacgagagcaccatcagtttctacacccgccagatcctgcagggacttggctacttgcacgacaaccacatcgtgcacagggacataaaaggggacaatgtgctgatcaacaccttcagtgggctgctcaagatttctgacttcggcacctccaagcggctggcaggcatcacaccttgcactgagaccttcacaggaactctgcagtatatggccccagaaatcattgaccagggcccacgcgggtatgggaaagcagctgacatctggtcactgggctgcactgtcattgagatggccacaggtcgcccccccttccacgagctcgggagcccacaggctgccatgtttcaggtgggtatgtacaaggtccatccgccaatgcccagctctctgtcggccgaggcccaagcctttctcctccgaacttttgagccagacccccgcctccgagccagcgcccagacactgctgggggaccccttcctgcagcctgggaaaaggagccgcagccccagctccccacgacatgctccacggccctcagatgccccttctgccagtcccactccttcagccaactcaaccacccagtctcagacattcccgtgccctcaggcaccctctcagcacccacccagccccccgaagcgctgcctcagttatgggggcaccagccagctccgggtgcccgaggagcctgcggccgaggagcctgcgtctccggaggagagttcggggctgagcctgctgcaccaggagagcaagcgtcgggccatgctggccgcagtattggagcaggagctgccagcgctggcggagaatctgcaccaggagcagaagcaagagcagggggcccgtctgggcagaaaccatgtggaagagctgctgcgctgcctcggggcacacatccacactcccaaccgccggcagctcgcccaggagctgcgggcgctgcaaggacggctgagggcccagggccttgggcctgcgcttctgcacagaccgctgtttgccttcccggatgcggtgaagcagatcctccgcaagcgccagatccgtccacactggatgttcgttctggactcactgctcagccgtgctgtgcgggcagccctgggtgtgctaggaccggaggtggagaaggaggcggtctcaccgaggtcagaggagctgagtaatgaaggggactcccagcagagcccaggccagcagagcccgcttccggtggagcccgagcagggccccgctcctctgatggtgcagctgagcctcttgagggcagagactgatcggctgcgcgaaatcctggcggggaaggaacgggagtaccaggccctggtgcagcgggctctacagcggctgaatgaggaagcccggacctatgtcctggccccagagcctccaactgctctttcaacggaccagggcctggtgcagtggctacaggaactgaatgtggattcaggcaccatccaaatgctgttgaaccatagcttcaccctccacactctgctcacctatgccactcgagatgacctcatctacacccgcatcaggggagggatggtatgccgcatctggagggccatcttggcacagcgagcaggatccacaccagtcacctctggaccctgagagctgaatgagggcatcataggccagacaggcccaaggatggatgaatggagaggacaaaggcagcttctgacacaccagccccaggacctggggcgactggaggaagccaggcgagtggggcccaggactggttccagtgagagaaaccaaccacaggcacccaagcactaccagacaaagcgtattaaacagaacacttttgaacctttaaaaa

SEQ ID NO: 36756 - DNA, 518 bp, Homo sapiens
caggacttgacgttcccagattccctgtctcctctgtgaagatcaggcctgcagcaaaaaaccgtctgcccagtcctagcttcccaggccttccctggtgcagtggctacaggaactgaatgtggattcaggcaccatccaaatgctgttgaaccatagcttcaccctccacactctgctcacctatgccactcgagatgacctcatctacacccgcatcaggggagggatggtatgccgcatctggagggccatcttggcacagcgagcaggatccacaccagtcacctctggaccctgagagctgaatgagggcatcataggccagacaggcccaaggatggatgaatggagaggacaaaggcagcttctgacacaccagccccaggacctggggcgactggaggaagccaggcgagtggggcccaggactggttccagtgagagaaaccaaccacaggcacccaagcactaccagacaaagcgtattaaacagaacacttttgaacctttaaaaa

SEQ ID NO: 36757 - DNA, 3738 bp, Homo sapiens
agcctacaagtgaaggcagggcagcgttggcgggcgctcccttgagaagtccaggtggcgggcacctccgagccgattcccaggatcccccaagtggctctgagctgccgatcaccggatgccccagattcctgggacccaatcccggatttcagaacctcaggaccttgcaagtccgagctaggatttctccctggactttagattcctggaacgggacgtcaggccgtattccggatccctagatcccgtgggagattctccgattccgaacggattccagatcccaagattcctgatctgccggcccaggctcctgccccgcccccggttcccagtgcgcggcgccccgcgcctgagcgcccccgcatggcggggccgtgtccccggtccggggcggagcgcgccggcagctgctggcaggacccgctggccgtggcgctgagccggggccggcagctcgcggcgcccccgggccggggctgcgcgcggagccggccgctcagcgtggtctacgtgctgacccgggagccgcagcccgggctcgagcctcgggagggaaccgaggcggagccgctgcccctgcgctgcctgcgcgaggcttgcgcgcaggtcccccggccgcggccgcccccgcagctgcgcagcctgcccttcgggacgctggagctaggcgacaccgcggctctggatgccttctacaacgcggatgtggtggtgctggaggtgagcagctcgctggtacagccctccctgttctaccaccttggtgtgcgtgagagcttcagcatgaccaacaatgtgctcctctgctcccaggccgacctccctgacctgcaggccctgcgggaggatgttttccagaagaactcggattgcgttggcagctacacactgatcccctatgtggtgacggccactggtcgggtgctgtgtggtgatgcaggccttctgcggggcctggctgatgggctggtacaggctggagtggggaccgaggccctgctcactcccctggtgggccggcttgcccgcctgctggaggccacacccacagactcttgtggctatttccgggagaccattcggcgggacatccggcaggcgcgggagcggttcagtgggccacagctgcggcaggagctggctcgcctgcagcggagactggacagcgtggagctgctgagccccgacatcatcatgaacttgctgctctcctaccgcgatgtgcaggactactcggccatcattgagctggtggagacgctgcaggccttgcccacctgtgatgtggccgagcagcataatgtctgcttccactacacttttgccctcaaccggaggaacaggcctggggaccgggcgaaggccctgtctgtgctgctgccgctggtacagcttgagggctctgtggcgcccgatctgtactgcatgtgtggccgtatctacaaggacatgttcttcagctcgggtttccaggatgctgggcaccgggagcaggcctatcactggtatcgcaaggcttttgacgtagagcccagccttcactcaggcatcaatgcagctgtgctcctcattgctgccgggcagcactttgaggattccaaagagctccggctaataggcatgaagctgggctgcctgctggcccgcaaaggctgcgtggagaagatgcagtattactgggatgtgggtttctacctgggagcccagatcctcgccaatgaccccacccaggtggtgctggctgcagagcagctgtataagctcaatgcccccatatggtacctggtgtccgtgatggagaccttcctgctctaccagcacttcaggcccacgccagagccccctggagggccaccacgccgtgcccacttctggctccacttcttgctacagtcctgccaaccattcaagacagcctgtgcccagggcgaccagtgcttggtgctggtcctggagatgaacaaggtgctgctgcctgcaaagctcgaggttcggggtactgacccagtaagcacagtgaccctgagcctgctggagcctgagacccaggacattccctccagctggaccttcccagtcgcctccatatgcggagtcagcgcctcaaagcgcgacgagcgctgctgcttcctctatgcactccccccggctcaggacgtccagctgtgcttccccagcgtagggcactgccagtggttctgcggcctgatccaggcctgggtgacgaacccggattccacggcgcccgcggaggaggcggagggcgcgggggagatgttggagtttgattatgagtacacggagacgggcgagcggctggtgctgggcaagggcacgtatggggtggtgtacgcgggccgcgatcgccacacgagggtgcgcatcgccatcaaggagatcccggagcgggacagcaggttctctcagcccctgcatgaagagatcgctcttcacagacgcctgcgccacaagaacatagtgcgctatctgggctcagctagccagggcggctaccttaagatcttcatggaggaagtgcctggaggcagcctgtcctccttgctgcggtcggtgtggggacccctgaaggacaacgagagcaccatcagtttctacacccgccagatcctgcagggacttggctacttgcacgacaaccacatcgtgcacagggacataaaaggggacaatgtgctgatcaacaccttcagtgggctgctcaagatttctgacttcggcacctccaagcggctggcaggcatcacaccttgcactgagaccttcacaggaactctgcagtatatggccccagaaatcattgaccagggcccacgcgggtatgggaaagcagctgacatctggtcactgggctgcactgtcattgagatggccacaggtcgcccccccttccacgagctcgggagcccacaggctgccatgtttcaggtgggtatgtacaaggtccatccgccaatgcccagctctctgtcggccgaggcccaagcctttctcctccgaacttttgagccagacccccgcctccgagccagcgcccagacactgctgggggaccccttcctgcagcctgggaaaaggagccgcagccccagctccccacgacatgctccacggccctcagatgccccttctgccagtcccactccttcagccaactcaaccacccagtctcagacattcccgtgccctcaggcaccctctcagcacccacccagccccccgaagcgctgcctcagttatgggggcaccagccagctccgggtgcccgaggagcctgcggccgaggagcctgcgtctccggaggagagttcggggctgagcctgctgcaccaggagagcaagcgtcgggccatgctggccgcagtattggagcaggagctgccagcgctggcggagaatctgcaccaggagcagaagcaagagcagggggcccgtctgggcagaaaccatgtggaagagctgctgcgctgcctcggggcacacatccacactcccaaccgccggcagctcgcccaggagctgcgggcgctgcaaggatggatgaatggagaggacaaaggcagcttctgacacaccagccccaggacctggggcgactggaggaagccaggcgagtggggcccaggactggttccagtgagagaaaccaaccacaggcacccaagcactaccagacaaagcgtattaaacagaacacttttgaacctttaaaaa

SEQ ID NO: 36758 - DNA, 4552 bp, Homo sapiens
agcctacaagtgaaggcagggcagcgttggcgggcgctcccttgagaagtccaggtggcgggcacctccgagccgattcccaggatcccccaagtggctctgagctgccgatcaccggatgccccagattcctgggacccaatcccggatttcagaacctcaggaccttgcaagtccgagctaggatttctccctggactttagattcctggaacgggacgtcaggccgtattccggatccctagatcccgtgggagattctccgattccgaacggattccagatcccaagattcctgatctgccggcccaggctcctgccccgcccccggttcccagtgcgcggcgccccgcgcctgagcgcccccgcatggcggggccgtgtccccggtccggggcggagcgcgccggcagctgctggcaggacccgctggccgtggcgctgagccggggccggcagctcgcggcgcccccgggccggggctgcgcgcggagccggccgctcagcgtggtctacgtgctgacccgggagccgcagcccgggctcgagcctcgggagggaaccgaggcggagccgctgcccctgcgctgcctgcgcgaggcttgcgcgcaggtcccccggccgcggccgcccccgcagctgcgcagcctgcccttcgggacgctggagctaggcgacaccgcggctctggatgccttctacaacgcggatgtggtggtgctggaggtgagcagctcgctggtacagccctccctgttctaccaccttggtgtgcgtgagagcttcagcatgaccaacaatgtgctcctctgctcccaggccgacctccctgacctgcaggccctgcgggaggatgttttccagaagaactcggattgcgttggcagctacacactgatcccctatgtggtgacggccactggtcgggtgctgtgtggtgatgcaggccttctgcggggcctggctgatgggctggtacaggctggagtggggaccgaggccctgctcactcccctggtgggccggcttgcccgcctgctggaggccacacccacagactcttgtggctatttccgggagaccattcggcgggacatccggcaggcgcgggagcggttcagtgggccacagctgcggcaggagctggctcgcctgcagcggagactggacagcgtggagctgctgagccccgacatcatcatgaacttgctgctctcctaccgcgatgtgcaggactactcggccatcattgagctggtggagacgctgcaggccttgcccacctgtgatgtggccgagcagcataatgtctgcttccactacacttttgccctcaaccggaggaacaggcctggggaccgggcgaaggccctgtctgtgctgctgccgctggtacagcttgagggctctgtggcgcccgatctgtactgcatgtgtggccgtatctacaaggacatgttcttcagctcgggtttccaggatgctgggcaccgggagcaggcctatcactggtatcgcaaggcttttgacgtagagcccagccttcactcaggcatcaatgcagctgtgctcctcattgctgccgggcagcactttgaggattccaaagagctccggctaataggcatgaagctgggctgcctgctggcccgcaaaggctgcgtggagaagatgcagtattactgggatgtgggtttctacctgggagcccagatcctcgccaatgaccccacccaggtggtgctggctgcagagcagctgtataagctcaatgcccccatatggtacctggtgtccgtgatggagaccttcctgctctaccagcacttcaggcccacgccagagccccctggagggccaccacgccgtgcccacttctggctccacttcttgctacagtcctgccaaccattcaagacagcctgtgcccagggcgaccagtgcttggtgctggtcctggagatgaacaaggtgctgctgcctgcaaagctcgaggttcggggtactgacccagtaagcacagtgaccctgagcctgctggagcctgagacccaggacattccctccagctggaccttcccagtcgcctccatatgcggagtcagcgcctcaaagcgcgacgagcgctgctgcttcctctatgcactccccccggctcaggacgtccagctgtgcttccccagcgtagggcactgccagtggttctgcggcctgatccaggcctgggtgacgaacccggattccacggcgcccgcggaggaggcggagggcgcgggggagatgttggagtttgattatgagtacacggagacgggcgagcggctggtgctgggcaagggcacgtatggggtggtgtacgcgggccgcgatcgccacacgagggtgcgcatcgccatcaaggagatcccggagcgggacagcaggttctctcagcccctgcatgaagagatcgctcttcacagacgcctgcgccacaagaacatagtgcgctatctgggctcagctagccagggcggctaccttaagatcttcatggaggaagtgcctggaggcagcctgtcctccttgctgcggtcggtgtggggacccctgaaggacaacgagagcaccatcagtttctacacccgccagatcctgcagggacttggctacttgcacgacaaccacatcgtgcacagggacataaaaggggacaatgtgctgatcaacaccttcagtgggctgctcaagatttctgacttcggcacctccaagcggctggcaggcatcacaccttgcactgagaccttcacaggaactctgcagtatatggccccagaaatcattgaccagggcccacgcgggtatgggaaagcagctgacatctggtcactgggctgcactgtcattgagatggccacaggtcgcccccccttccacgagctcgggagcccacaggctgccatgtttcaggtgggtatgtacaaggtccatccgccaatgcccagctctctgtcggccgaggcccaagcctttctcctccgaacttttgagccagacccccgcctccgagccagcgcccagacactgctgggggaccccttcctgcagcctgggaaaaggagccgcagccccagctccccacgacatgctccacggccctcaggtgcttgcgggtggcgggatgggcacagtggagggcagaggagttgtggagctgtgagggtggaggagagcccagctgatggctctgtccctccctcagatgccccttctgccagtcccactccttcagccaactcaaccacccagtctcagacattcccgtgccctcaggcaccctctcagcacccacccagccccccgaagcgctgcctcagttatgggggcaccagccagctccgggtgcccgaggagcctgcggccgaggagcctgcgtctccggaggagagttcggggctgagcctgctgcaccaggagagcaagcgtcgggccatgctggccgcagtattggagcaggagctgccagcgctggcggagaatctgcaccaggagcagaagcaagagcagggggcccgtctgggcagaaaccatgtggaagagctgctgcgctgcctcggggcacacatccacactcccaaccgccggcagctcgcccaggagctgcgggcgctgcaaggacggctgagggcccagggccttgggcctgcgcttctgcacagaccgctgtttgccttcccggatgcggtgaagcagatcctccgcaagcgccagatccgtccacactggatgttcgttctggactcactgctcagccgtgctgtgcgggcagccctgggtgtgctaggaccggaggtggagaaggaggcggtctcaccgaggtcagaggagctgagtaatgaaggggactcccagcagagcccaggccagcagagcccgcttccggtggagcccgagcagggccccgctcctctgatggtgcagctgagcctcttgagggcagagactgatcggctgcgcgaaatcctggcggggaaggaacgggagtaccaggccctggtgcagcgggctctacagcggctgaatgaggaagcccggacctatgtcctggccccagagcctccaactgctctttcaacggaccagggcctggtgcagtggctacaggaactgaatgtggattcaggcaccatccaaatgctgttgaaccatagcttcaccctccacactctgctcacctatgccactcgagatgacctcatctacacccgcatcaggggagggatggtatgccgcatctggagggccatcttggcacagcgagcaggatccacaccagtcacctctggaccctgagagctgaatgagggcatcataggccagacaggcccaaggatggatgaatggagaggacaaaggcagcttctgacacaccagccccaggacctggggcgactggaggaagccaggcgagtggggcccaggactggttccagtgagagaaaccaaccacaggcacccaagcactaccagacaaagcgtattaaacagaacacttttgaacctttaaaaa

SEQ ID NO: 36759 - DNA, 4376 bp, Homo sapiens
agcctacaagtgaaggcagggcagcgttggcgggcgctcccttgagaagtccaggtggcgggcacctccgagccgattcccaggatcccccaagtggctctgagctgccgatcaccggatgccccagattcctgggacccaatcccggatttcagaacctcaggaccttgcaagtccgagctaggatttctccctggactttagattcctggaacgggacgtcaggccgtattccggatccctagatcccgtgggagattctccgattccgaacggattccagatcccaagattcctgatctgccggcccaggctcctgccccgcccccggttcccagtgcgcggcgccccgcgcctgagcgcccccgcatggcggggccgtgtccccggtccggggcggagcgcgccggcagctgctggcaggacccgctggccgtggcgctgagccggggccggcagctcgcggcgcccccgggccggggctgcgcgcggagccggccgctcagcgtggtctacgtgctgacccgggagccgcagcccgggctcgagcctcgggagggaaccgaggcggagccgctgcccctgcgctgcctgcgcgaggcttgcgcgcaggtcccccggccgcggccgcccccgcagctgcgcagcctgcccttcgggacgctggagctaggcgacaccgcggctctggatgccttctacaacgcggatgtggtggtgctggaggtgagcagctcgctggtacagccctccctgttctaccaccttggtgtgcgtgagagcttcagcatgaccaacaatgtgctcctctgctcccaggccgacctccctgacctgcaggccctgcgggaggatgttttccagaagaactcggattgcgttggcagctacacactgatcccctatgtggtgacggccactggtcgggtgctgtgtggtgatgcaggccttctgcggggcctggctgatgggctggtacaggctggagtggggaccgaggccctgctcactcccctggtgggccggcttgcccgcctgctggaggccacacccacagactcttgtggctatttccgggagaccattcggcgggacatccggcaggcgcgggagcggttcagtgggccacagctgcggcaggagctggctcgcctgcagcggagactggacagcgtggagctgctgagccccgacatcatcatgaacttgctgctctcctaccgcgatgtgcaggactactcggccatcattgagctggtggagacgctgcaggccttgcccacctgtgatgtggccgagcagcataatgtctgcttccactacacttttgccctcaaccggaggaacaggcctggggaccgggcgaaggccctgtctgtgctgctgccgctggtacagcttgagggctctgtggcgcccgatctgtactgcatgtgtggccgtatctacaaggacatgttcttcagctcgggtttccaggatgctgggcaccgggagcaggcctatcactggtatcgcaaggcttttgacgtagagcccagccttcactcaggcatcaatgcagctgtgctcctcattgctgccgggcagcactttgaggattccaaagagctccggctaataggcatgaagctgggctgcctgctggcccgcaaaggctgcgtggagaagatgcagtattactgggatgtgggtttctacctgggagcccagatcctcgccaatgaccccacccaggtggtgctggctgcagagcagctgtataagctcaatgcccccatatggtacctggtgtccgtgatggagaccttcctgctctaccagcacttcaggcccacgccagagccccctggagggccaccacgccgtgcccacttctggctccacttcttgctacagtcctgccaaccattcaagacagcctgtgcccagggcgaccagtgcttggtgctggtcctggagatgaacaaggtgctgctgcctgcaaagctcgaggttcggggtactgacccagtaagcacagtgaccctgagcctgctggagcctgagacccaggacattccctccagctggaccttcccagtcgcctccatatgcggagtcagcgcctcaaagcgcgacgagcgctgctgcttcctctatgcactccccccggctcaggacgtccagctgtgcttccccagcgtagggcactgccagtggttctgcggcctgatccaggcctgggtgacgaacccggattccacggcgcccgcggaggaggcggagggcgcgggggagatgttggagtttgattatgagtacacggagacgggcgagcggctggtgctgggcaagggcacgtatggggtggtgtacgcgggccgcgatcgccacacgagggtgcgcatcgccatcaaggagatcccggagcgggacagcaggttctctcagcccctgcatgaagagatcgctcttcacagacgcctgcgccacaagaacatagtgcgctatctgggctcagctagccagggcggctaccttaagatcttcatggaggaagtgcctggaggcagcctgtcctccttgctgcggtcggtgtggggacccctgaaggacaacgagagcaccatcagtttctacacccgccagatcctgcagggacttggctacttgcacgacaaccacatcgtgcacagggacataaaaggggacaatgtgctgatcaacaccttcagtgggctgctcaagatttctgacttcggcacctccaagcggctggcaggcatcacaccttgcactgagaccttcacaggaactctgcagtatatggccccagaaatcattgaccagggcccacgcgggtatgggaaagcagctgacatctggtcactgggctgcactgtcattgagatggccacaggtcgcccccccttccacgagctcgggagcccacaggctgccatgtttcaggtgggtatgtacaaggtccatccgccaatgcccagctctctgtcggccgaggcccaagcctttctcctccgaacttttgagccagacccccgcctccgagccagcgcccagacactgctgggggaccccttcctgcagcctgggaaaaggagccgcagccccagctccccacgacatgctccacggccctcagatgccccttctgccagtcccactccttcagccaactcaaccacccagtctcagacattcccgtgccctcaggcaccctctcagcacccacccagccccccgaagcgctgcctcagttatgggggcaccagccagctccgggtgcccgaggagcctgcggccgaggagcctgcgtctccggaggagagttcggggctgagcctgctgcaccaggagagcaagcgtcgggccatgctggccgcagtattggagcaggagctgccagcgctggcggagaatctgcaccaggagcagaagcaagagcagggggcccgtctgggcagaaaccatgtggaagagctgctgcgctgcctcggggcacacatccacactcccaaccgccggcagctcgcccaggagctgcgggcgctgcaaggacggctgagggcccagggccttgggcctgcgcttctgcacagaccgctgtttgccttcccggatgcggtgaagcagatcctccgcaagcgccagatccgtccacactggatgttcgttctggactcactgctcagccgtgctgtgcgggcagccctgggtgtgctaggaccggaggtggagaaggaggcggtctcaccgaggtcagaggagctgagtaatgaaggggactcccagcagagcccaggccagcagagcccgcttccggtggagcccgagcagggccccgctcctctgatggtgcagctgagcctcttgagggcagagactgatcggctgcgcgaaatcctggcggggaaggaacgggagtaccaggccctggtgcagcgggctctacagcggctgaatgaggaagcccggacctatgtcctggccccagagcctccaactgctctttcaacggaccagggcctggtgcagtggctacaggaactgaatgtggattcaggcaccatccaaatggggagggatggtatgccgcatctggagggccatcttggcacagcgagcaggatccacaccagtcacctctggaccctgagagctgaatgagggcatcataggccagacaggcccaaggatggatgaatggagaggacaaaggcagcttctgacacaccagccccaggacctggggcgactggaggaagccaggcgagtggggcccaggactggttccagtgagagaaaccaaccacaggcacccaagcactaccagacaaagcgtattaaacagaacacttttgaacctttaaaaa

SEQ ID NO: 36760 - DNA, 1804 bp, Homo sapiens
cgtgtagtcgatcttagagtatccccaagctctggaaaaggggacaatgtgctgatcaacaccttcagtgggctgctcaagatttctgacttcggcacctccaagcggctggcaggcatcacaccttgcactgagaccttcacaggaactctgcagtatatggccccagaaatcattgaccagggcccacgcgggtatgggaaagcagctgacatctggtcactgggctgcactgtcattgagatggccacaggtcgcccccccttccacgagctcgggagcccacaggctgccatgtttcaggtgggtatgtacaaggtccatccgccaatgcccagctctctgtcggccgaggcccaagcctttctcctccgaacttttgagccagacccccgcctccgagccagcgcccagacactgctgggggaccccttcctgcagcctgggaaaaggagccgcagccccagctccccacgacatgctccacggccctcagatgccccttctgccagtcccactccttcagccaactcaaccacccagtctcagacattcccgtgccctcaggcaccctctcagcacccacccagccccccgaagcgctgcctcagttatgggggcaccagccagctccgggtgcccgaggagcctgcggccgaggagcctgcgtctccggaggagagttcggggctgagcctgctgcaccaggagagcaagcgtcgggccatgctggccgcagtattggagcaggagctgccagcgctggcggagaatctgcaccaggagcagaagcaagagcagggggcccgtctgggcagaaaccatgtggaagagctgctgcgctgcctcggggcacacatccacactcccaaccgccggcagctcgcccaggagctgcgggcgctgcaaggacggctgagggcccagggccttgggcctgcgcttctgcacagaccgctgtttgccttcccggatgcggtgaagcagatcctccgcaagcgccagatccgtccacactggatgttcgttctggactcactgctcagccgtgctgtgcgggcagccctgggtgtgctaggaccggaggtggagaaggaggcggtctcaccgaggtcagaggagctgagtaatgaaggggactcccagcagagcccaggccagcagagcccgcttccggtggagcccgagcagggccccgctcctctgatggtgcagctgagcctcttgagggcagagactgatcggctgcgcgaaatcctggcggggaaggaacgggagtaccaggccctggtgcagcgggctctacagcggctgaatgaggaagcccggacctatgtcctggccccagagcctccaactgctctttcaacggaccagggcctggtgcagtggctacaggaactgaatgtggattcaggcaccatccaaatgctgttgaaccatagcttcaccctccacactctgctcacctatgccactcgagatgacctcatctacacccgcatcaggggagggatggtatgccgcatctggagggccatcttggcacagcgagcaggatccacaccagtcacctctggaccctgagagctgaatgagggcatcataggccagacaggcccaaggatggatgaatggagaggacaaaggcagcttctgacacaccagccccaggacctggggcgactggaggaagccaggcgagtggggcccaggactggttccagtgagagaaaccaaccacaggcacccaagcactaccagacaaagcgtattaaacagaacacttttgaacctttaaaaa

SEQ ID NO: 36761 - DNA, 1890 bp, Homo sapiens
aggtgttgaggtatattttggatgataggttcagtatgggtgcagtcggcctgaggatgacggcattcccctccctgctccaaccccatgatgaagcctagatgggcattggtgctcctgtttctgtcctaggaactctgcagtatatggccccagaaatcattgaccagggcccacgcgggtatgggaaagcagctgacatctggtcactgggctgcactgtcattgagatggccacaggtcgcccccccttccacgagctcgggagcccacaggctgccatgtttcaggtgggtatgtacaaggtccatccgccaatgcccagctctctgtcggccgaggcccaagcctttctcctccgaacttttgagccagacccccgcctccgagccagcgcccagacactgctgggggaccccttcctgcagcctgggaaaaggagccgcagccccagctccccacgacatgctccacggccctcaggtgcttgcgggtggcgggatgggcacagtggagggcagaggagttgtggagctgtgagggtggaggagagcccagctgatggctctgtccctccctcagatgccccttctgccagtcccactccttcagccaactcaaccacccagtctcagacattcccgtgccctcaggcaccctctcagcacccacccagccccccgaagcgctgcctcagttatgggggcaccagccagctccgggtgcccgaggagcctgcggccgaggagcctgcgtctccggaggagagttcggggctgagcctgctgcaccaggagagcaagcgtcgggccatgctggccgcagtattggagcaggagctgccagcgctggcggagaatctgcaccaggagcagaagcaagagcagggggcccgtctgggcagaaaccatgtggaagagctgctgcgctgcctcggggcacacatccacactcccaaccgccggcagctcgcccaggagctgcgggcgctgcaaggacggctgagggcccagggccttgggcctgcgcttctgcacagaccgctgtttgccttcccggatgcggtgaagcagatcctccgcaagcgccagatccgtccacactggatgttcgttctggactcactgctcagccgtgctgtgcgggcagccctgggtgtgctaggaccggaggtggagaaggaggcggtctcaccgaggtcagaggagctgagtaatgaaggggactcccagcagagcccaggccagcagagcccgcttccggtggagcccgagcagggccccgctcctctgatggtgcagctgagcctcttgagggcagagactgatcggctgcgcgaaatcctggcggggaaggaacgggagtaccaggccctggtgcagcgggctctacagcggctgaatgaggaagcccggacctatgtcctggccccagagcctccaactgctctttcaacggaccagggcctggtgcagtggctacaggaactgaatgtggattcaggcaccatccaaatgctgttgaaccatagcttcaccctccacactctgctcacctatgccactcgagatgacctcatctacacccgcatcaggggagggatggtatgccgcatctggagggccatcttggcacagcgagcaggatccacaccagtcacctctggaccctgagagctgaatgagggcatcataggccagacaggcccaaggatggatgaatggagaggacaaaggcagcttctgacacaccagccccaggacctggggcgactggaggaagccaggcgagtggggcccaggactggttccagtgagagaaaccaaccacaggcacccaagcactaccagacaaagcgtattaaacagaacacttttgaacctttaaaaa

SEQ ID NO: 36762 - DNA, 2141 bp, Homo sapiens
agcctacaagtgaaggcagggcagcgttggcgggcgctcccttgagaagtccaggtggcgggcacctccgagccgattcccaggatcccccaagtggctctgagctgccgatcaccggatgccccagattcctgggacccaatcccggatttcagaacctcaggaccttgcaagtccgagctaggatttctccctggactttagattcctggaacgggacgtcaggccgtattccggatccctagatcccgtgggagattctccgattccgaacggattccagatcccaagattcctgatctgccggcccaggctcctgccccgcccccggttcccagtgcgcggcgccccgcgcctgagcgcccccgcatggcggggccgtgtccccggtccggggcggagcgcgccggcagctgctggcaggacccgctggccgtggcgctgagccggggccggcagctcgcggcgcccccgggccggggctgcgcgcggagccggccgctcagcgtggtctacgtgctgacccgggagccgcagcccgggctcgagcctcgggagggaaccgaggcggagccgctgcccctgcgctgcctgcgcgaggcttgcgcgcaggtcccccggccgcggccgcccccgcagctgcgcagcctgcccttcgggacgctggagctaggcgacaccgcggctctggatgccttctacaacgcggatgtggtggtgctggaggtgagcagctcgctggtacagccctccctgttctaccaccttggtgtgcgtgagagcttcagcatgaccaacaatgtgctcctctgctcccaggccgacctccctgacctgcaggccctgcgggaggatgttttccagaagaactcggattgcgttggcagctacacactgatcccctatgtggtgacggccactggtcgggtgctgtgtggtgatgcaggccttctgcggggcctggctgatgggctggtacaggctggagtggggaccgaggccctgctcactcccctggtgggccggcttgcccgcctgctggaggccacacccacagactcttgtggctatttccgggagaccattcggcgggacatccggcaggcgcgggagcggttcagtgggccacagctgcggcaggagctggctcgcctgcagcggagactggacagcgtggagctgctgagccccgacatcatcatgaacttgctgctctcctaccgcgatgtgcaggactactcggccatcattgagctggtggagacgctgcaggccttgcccacctgtgatgtggccgagcagcataatgtctgcttccactacacttttgccctcaaccggaggaacaggcctggggaccgggcgaaggccctgtctgtgctgctgccgctggtacagcttgagggctctgtggcgcccgatctgtactgcatgtgtggccgtatctacaaggacatgttcttcagctcgggtttccaggatgctgggcaccgggagcaggcctatcactggtatcgcaaggcttttgacgtagagcccagccttcactcaggcatcaatgcagctgtgctcctcattgctgccgggcagcactttgaggattccaaagagctccggctaataggcatgaagctgggctgcctgctggcccgcaaaggctgcgtggagaagatgcagtattactgggatgtgggtttctacctgggagcccagatcctcgccaatgaccccacccaggtggtgctggctgcagagcagctgtataagctcaatgcccccatatggtacctggtgtccgtgatggagaccttcctgctctaccagcacttcaggcccacgccagagccccctggagggccaccacgccgtgcccacttctggctccacttcttgctacagtcctgccaaccattcaagacagcctgtgcccagggcgaccagtgcttggtgctggtcctggagatgaacaaggtgctgctgcctgcaaagctcgaggttcggggtactgacccagtaagcacagtgaccctgagcctgctggagcctgagacccaggacattccctccagctggaccttcccagtcgcctccatatgcggagtcagcctcaaaagcgacgacctgtgtcctatatgactccc

SEQ ID NO: 36763 - DNA, 1138 bp, Homo sapiens
cctgcctctagttgaggctcagctgtctcagcggcgcctccctccccctgcaggtgaagcagatcctccgcaagcgccagatccgtccacactggatgttcgttctggactcactgctcagccgtgctgtgcgggcagccctgggtgtgctaggaccgggtaggaggggaatgccacgggcctcctgccagcgagggtgtggtgcttgctgggcgcggtgaacatcgaatggggccggtgggggccaggcgggacaggggcaggcaggcgccggtgggggcgtgactaaatggacatctcccataccggcaccgcctggggcctgcccagagccgggcaccctacccccgcactttggggtctggggttcccaaacgggcgttgtagccttgcctgagttcaccgcactgggctgcagaggtggagaaggaggcggtctcaccgaggtcagaggagctgagtaatgaaggggactcccagcagagcccaggccagcagagcccgcttccggtggagcccgagcagggccccgctcctctgatggtgcagctgagcctcttgagggcagagactgatcggctgcgcgaaatcctggcggggaaggaacgggagtaccaggccctggtgcagcgggctctacagcggctgaatgaggaagcccggacctatgtcctggccccagagcctccaactgctctttcaacggaccagggcctggtgcagtggctacaggaactgaatgtggattcaggcaccatccaaatgctgttgaaccatagcttcaccctccacactctgctcacctatgccactcgagatgacctcatctacacccgcatcaggggagggatggtatgccgcatctggagggccatcttggcacagcgagcaggatccacaccagtcacctctggaccctgagagctgaatgagggcatcataggccagacaggcccaaggatggatgaatggagaggacaaaggcagcttctgacacaccagccccaggacctggggcgactggaggaagccaggcgagtggggcccaggactggttccagtgagagaaaccaaccacaggcacccaagcactaccagacaaagcgtattaaacagaacacttttgaacctttaaaaa

SEQ ID NO: 36764 - DNA, 1300 bp, Homo sapiens
ctggagcactcgctgacaacccctctcttccttctcagggggcccgtctgggcagaaaccatgtggaagagctgctgcgctgcctcggggcacacatccacactcccaaccgccggcagctcgcccaggagctgcgggcgctgcaaggacggctgagggcccagggccttgggcctgcgcttctgcacagaccgctgtttgccttcccggatgcggtgaagcagatcctccgcaagcgccagatccgtccacactggatgttcgttctggactcactgctcagccgtgctgtgcgggcagccctgggtgtgctaggaccgggtaggaggggaatgccacgggcctcctgccagcgagggtgtggtgcttgctgggcgcggtgaacatcgaatggggccggtgggggccaggcgggacaggggcaggcaggcgccggtgggggcgtgactaaatggacatctcccataccggcaccgcctggggcctgcccagagccgggcaccctacccccgcactttggggtctggggttcccaaacgggcgttgtagccttgcctgagttcaccgcactgggctgcagaggtggagaaggaggcggtctcaccgaggtcagaggagctgagtaatgaaggggactcccagcagagcccaggccagcagagcccgcttccggtggagcccgagcagggccccgctcctctgatggtgcagctgagcctcttgagggcagagactgatcggctgcgcgaaatcctggcggggaaggaacgggagtaccaggccctggtgcagcgggctctacagcggctgaatgaggaagcccggacctatgtcctggccccagagcctccaactgctctttcaacggaccagggcctggtgcagtggctacaggaactgaatgtggattcaggcaccatccaaatgctgttgaaccatagcttcaccctccacactctgctcacctatgccactcgagatgacctcatctacacccgcatcaggggagggatggtatgccgcatctggagggccatcttggcacagcgagcaggatccacaccagtcacctctggaccctgagagctgaatgagggcatcataggccagacaggcccaaggatggatgaatggagaggacaaaggcagcttctgacacaccagccccaggacctggggcgactggaggaagccaggcgagtggggcccaggactggttccagtgagagaaaccaaccacaggcacccaagcactaccagacaaagcgtattaaacagaacacttttgaacctttaaaaa

SEQ ID NO: 36765 - DNA, 578 bp, Homo sapiens
ctttctgcgggtctttgaccacatccagctgttgaaccatagcttcaccctccacactctgctcacctatgccactcgagatgacctcatctacacccgcatcaggtacatcctgggccccccaagtgtgaaccatgcatatggcctcatcctggccaactgcaggcctgcctaggttccttcctggaaaccaaaggggcacctgggtcccctagggacagagggggcactgggcagacagtgtgtgcaagatagagtccagggccaccttctggctgagccacactgagtccattacccccaggggagggatggtatgccgcatctggagggccatcttggcacagcgagcaggatccacaccagtcacctctggaccctgagagctgaatgagggcatcataggccagacaggcccaaggatggatgaatggagaggacaaaggcagcttctgacacaccagccccaggacctggggcgactggaggaagccaggcgagtggggcccaggactggttccagtgagagaaaccaaccacaggcacccaagcactaccagacaaagcgtattaaacag

SEQ ID NO: 36766 - DNA, 1399 bp, Homo sapiens
gatcagaaagagctggcctcaccagtaagccctgagttgaggcaaaaggaggtacagatgaattttttgaaccagctgacctcagtttttaaccctagaactgtagcatcacaacctatcagtacacagactctggtggaaggagaaaatgatgagcagtcatctacagatcaagcctcagctatcaaaaccaagaatgtgttcatagctcagaacgtggctagtcttcaagagcttggtggctcggagaagctactgcgtgtatgtttgaacctgccatatttcctacgctatatcaatcggttccaagatgcagttttagctaattccttcttcataatgcctgcaacagtagcagatgccactgctgttcgtaatggctttcattcattggtgattgatgtaactatggcattggataccctttctctacctgtgttggaacctctcaatccttctcgtctacaagatgtgacagtcctcagcctaagttgtctgtatgcaggtgtgagtgtggcaacgtgcatggccatcctccatgtgggtagtgcccagcaagtgcggacagggtccacgagctccaaagaagatgactatgaaagtgacgcagctacaattgtccagaaatgtctcgaaatctatgacatgattggacaagcaatcagcagttctcgccgggctggtggtgagcactatcagaatttccaattgctgggtgcttggtgcttgttaaacagccttttcctcatactgaacctcagtcctactgcgttggctgataaggggaaagagaaggacccactggctgccctccgagtcagagacatcctttctcgtactaaagagggagtgggctcccctaaactggggcctggaaaagggcatcagggatttggggtactctcagtaatattggcaaaccatgccatcaaactgctaacgtctctctttcaagacctacaagtggaggcccttcacaagggttgggagacagatggcccccctgcagccttgagcattatggcccagagcacctccatacagaggattcaacggctgattgactctgtcccactgatgaacctgctcttgacgttactttcaacttcctacagaaaggcatgtgtcctgcagcggcagaggaagggctccatgagcagcgatgccagcgcctccaccgactccaatacttactatgaggacgatttcagtagcacggagggagggacagcagccaagacgatggacagtgagcctattttgggggcaatggttttgagggagactatttcttcccagttaaagaggaaagcaggcaccttccgcctcctcccccacctcctccactggaaagctctcctcgggttaaaagccccagtaagcaggcccctggtgagaa

SEQ ID NO: 36767 - DNA, 1301 bp, Homo sapiens
gatcagaaagagctggcctcaccagtaagccctgagttgaggcaaaaggaggtacagatgaattttttgaaccagctgacctcagtttttaaccctagaactgtagcatcacaacctatcagtacacagactctggtggaaggagaaaatgatgagcagtcatctacagatcaagcctcagctatcaaaaccaagaatgtgttcatagctcagaacgtggctagtcttcaagagcttggtggctcggagaagctactgcgtgtatgtttgaacctgccatatttcctacgctatatcaatcggttccaagatgcagttttagctaattccttcttcataatgcctgcaacagtagcagatgccactgctgttcgtaatggctttcattcattggtgattgatgtaactatggcattggataccctttctctacctgtgttggaacctctcaatccttctcgtctacaagatgtgacagtcctcagcctaagttgtctgtatgcaggtgtgagtgtggcaacgtgcatggccatcctccatgtgggtagtgcccagcaagtgcggacagggtccacgagctccaaagaagatgactatgaaagtgacgcagctacaattgtccagaaatgtctcgaaatctatgacatgattggacaagcaatcagcagttctcgccgggctggtggtgagcactatcagaatttccaattgctgggtgcttggtgcttgttaaacagccttttcctcatactgaacctcagtcctactgcgttggctgataaggggaaagagaaggacccactggctgccctccgagtcagagacatcctttctcgtactaaagagggagtgggctcccctaaactggggcctggaaaagggcatcagggatttggggtactctcagtaatattggcaaaccatgccatcaaactgctaacgtctctctttcaagacctacaagtggaggcccttcacaagggttgggagacagatggcccccctgcagccttgagcattatggcccagagcacctccatacagaggattcaacggctgattgactctgtcccactgatgaacctgctcttgacgttactttcaacttcctacagaaagggtcccttggtgtccccgcccatcgaagagacaggtggcggcgtgtgatgaggaggggtcggactcgagccaatggtagaccccccgttccctgtgatttgcaacaaagtggtaagacttgggttctggagacacatggctgaagtcctccccatggcccaccgactcatgccgctctgtga

SEQ ID NO: 36768 - DNA, 312 bp, Homo sapiens
gattggacaagcaatcagcagttctcgccgggctggtggtgaggtaagaagcgtatctgtctctgctgcatacttcctatcttgtcctctctgagatgtaaatatctctatgattatgttttttattttgtgcctttcacaacagcactatcagaatttccaattgctgggtgcttggtgcttgttaaacagccttttcctcatactgaacctcagtcctactgcgttggctgataaggggaaagagaaggacccactggctgccctccgagtcagagacatcctttctcgtactaaagagggagtgggctc

SEQ ID NO: 36769 - DNA, 461 bp, Homo sapiens
tgtgcgcacgtgtaagttttcagcttatttggataaatacctaggagtctggttactgaattgtatggtaaacctatttagtcttgctcttaatggcatttattttaagtagtcaaatcatggaattgcttgtgggtggggtgtgcttttgtgtttcagctttggtggattcttggatgcactccatggctgagacctgtgcatcttctttttcaggtgtgagtgtggcaacgtgcatggccatcctccatgtgggtagtgcccagcaagtgcggacagggtccacgagctccaaagaagatgactatgaaagtgacgcagctacaattgtccagaaatgtgtaagccaaagatctggggataagggaaccttgattgttcaaatgagggagtatggccagttccactttcttccatgatagaagaaagaacttagagtattctccacactactttccctg

SEQ ID NO: 36770 - DNA, 330 bp, Homo sapiens
accctttcttcaaccctcttctaaggaaagcagaagtcccctttgggtaccagctgtgtggcataaccatggctccttgtccctgacagatgacaccttcctttagaatccaccagcatcatccactctgcgtctagctgacaccctcagacagggatcagccaccctggggcgtgcaggtcaaatatgcagatggggactttgcagaccacttcagtgtcacgctggcacatcatttttgatcctttttcctttttaaacttcctgcaccttttcagataaaatcatattttactatgtatagctaataaatcgtagttttgttctctt

SEQ ID NO: 36771 - DNA, 413 bp, Homo sapiens
aatctgagaactcaacctggctttgaacacagaagaaggaaactttgaacacagaagaaggaatccaggaatgtgagcagcctcagaaagccaaaaaaggtccctggtagcaggaaccaggcttcacccttcattgcgtttaaagagaccatgtagaaaagtgattatggccagcgactctgaagccaaactgcctgggttcaaatctcagctttgccattgacttactagctctgtaaccttggacaatctacttagtttctctgtgctccagtttccccatgtgtaaaatagacaggatctggctctgttgtccaggctggagtgcagtggcgccatcatagctcactgtacccttgaactcctaagctcaagtgatcgtcctgcctctgccttctgagtagctggggcta

SEQ ID NO: 36772 - DNA, 673 bp, Homo sapiens
caggagaatcgcttgaatctgggaggcggaggttgcagtgagctgagatcgcaccactgcactccagcctgttgacagcgagattccatctcaaaaaaaaaaaaaaaaaaaagcagtatgttgtcttcagaaggcctgacactgggaccagaatgcaggcagccacttgttgagcctgcctgggctcttggccttgcttttcttattgcacaccagctgcttttctcacctttctggagtaatacaaatatcccaagaagatactacctcccatgtgcagtgccaaagtctgaccagcctctcctcaacctggtctttggcttccacccttgcgagagactcagttcagtttttatcagatccctgcctatggattatagagtactgcctcagttatgaataaagtggcatttgtttctcatttaggtagtgttttcctgttcatagctgttgggaccctgtgagtagagatgtgatgtgtggtaggacaggaattgggcatttcagggttcctctacagtactatgaccttcagaccctcatcttgatttctcattggtgtcagttccaccattatgggtggcctgagcagtgctgtggtgcagtcagccttagtgacaaggattccaaaatcacaagtaacagctccagatgctggtagcagagactcagc

SEQ ID NO: 36773 - DNA, 410 bp, Homo sapiens
caacatatgatctgatcctgatgcttttgctctctaaattggatatatcatccatactttgtaatatagaatatgtgactacgaaaactctggtaggctgggcgcagtggctcacacctgtaatcccagcactttaggaggccaaggtgggcggatcacttgaggccaggagtttgagaccagcctggccaacacggtgaaaccacgtctctactaaaaatacaaaaattagctgggcatggtggtgcacgcctgtaatcccagctacctgggaggctgaggccatagaatcacttgaaccctggaggtggaggttgcagtgagcagagatagtgccactgcactccagcctgtgtaacagagtgagattctgtctcaaaaaaaaaaaataaagaaagaaagaaagaaac

SEQ ID NO: 36774 - DNA, 393 bp, Homo sapiens
tgattcatttggagaagtttgaatttgaaaagtttttttccttgcttgttatggctttggtttactaaaaactagaatctcctgcttagaggttatgggcaaattaattggtgaagatagtagaaagacacttggatcacagttgctatctgttggcattttaaggaagactgccaatgatagacagtagacacacatcacatgtattgtgaattgccattccagcttaaaaatacctcttaaaatgtggttgaaacttaaaatagggtaggataactgcatgtggtggcccatgcctggaataccaatactttgggaggccaaggcaggaggatcgcttgagcccaggagtttgagaccatcctcagcaacatagtgagacacccatttcta

SEQ ID NO: 36775 - DNA, 402 bp, Homo sapiens
gatacatgccattatacatttttcaaaccccatagaaagtacaacaagagtgaaccctaatgtaagttatagactttgggtgataatgataccccaatgtagattcatcagtcctaacaaatatgccactctggtgtgggattttgatagcgggggaggctctgcatatttggggggtaaagtgttctatgggaaatttgtatactacactcagtttttctaacaacctctaaaactaagaagtaaaatctattttttaaaaggtacatgttcaaaaataaatcatcatgtggtagttatgtatttataatagtcctttcctccttttctctcttaattgctctttcacttctatccttcctccaacctcttatttttccactgtgcccttagtgctttgct

SEQ ID NO: 36776 - DNA, 369 bp, Homo sapiens
tttttttttgagacagagtctcactctgttgctcaggctacagtgcagtggcacgatcacagctcactgtatcctccaactactgggcccaagcaatcctcccacctcagccctgagtagctgggactataggtgtgtaccaccacacccaactattttttgctttttgtagagacggggtctccctgccttgtccaggctggtcttgaactcctgggctcaagcaatccttctgcctcagtctctcaaagtgctagggttacaggcacatatcaccgtgcccggccagatgccttctcttataattgatagaacaagtagacaaaatcagtaaggatataaaagggttgaacgttatcaatcaacttg

SEQ ID NO: 36777 - DNA, 3614 bp, Homo sapiens
atttaggctaggtacgatggctggtggtgatcggccgaggccgggtctcctggcggcggcggagtgaggctgacagcggggaacctgggagacccctccgccctccccgcgatgcgctcggcctgaggttacccggcccggcccttcctcgcttccctcgactattccactgcgtctccgcgccccggcgtcatcctgcgagtccctctgacgggagggaagatggctgcacggagctggcaggacgagctggcccagcaggccgaggagggctcggcccggctgcgggaaatgctctcggtcggcctaggctttctgcgcaccgagctgggcctcgacctggggctggagccgaaacggtaccccggctgggtgatcctggtgggcactggcgcgctcgggctgctgctgctgtttctgctgggctacggctgggccgcggcttgcgccggcgcccgcaaaaagcggaggagcccgccccgcaagcgggaggaggcggcggccgtgccggccgcggcccccgacgacctggccttgctgaagaatctccggagcgaggaacagaagaagaagaaccggaagaaactgtccgagaagcccaaaccaaatgggcggactgttgaagtggctgagggtgaagctgttcgaacacctcaaagtgtaacagcaaagcagccaccagagattgacaagaaaaatgaaaagtcaaagaaaaataagaagaaatcaaagtcagatgctaaagcagtgcaaaacagttcacgccatgatggaaaggaagttgatgaaggagcctgggaaactaaaattagtcacagagagaaacgacagcagcgtaaacgtgataaggtgctgactgattctggttcattggattcaactatccctgggatagaaaataccatcacagttaccaccgagcaacttacaaccgcatcatttcctgttggttccaagaagaataaaggtgattctcatctaaatgttcaagttagcaactttaaatctggaaaaggagattctacacttcaggtttcttcaggattgaatgaaaacctcactgtcaatggaggaggctggaatgaaaagtctgtaaaactctcctcacagatcagtgcaggtgaggagaagtggaactccgtttcacctgcttctgcaggaaagaggaaaactgagccatctgcctggagtcaagacactggagatgctaatacaaatggaaaagactggggaaggagttggagtgaccgttcaatattttctggcattgggtctactgctgagccagtttctcagtctaccacttctgattatcagtgggatgttagccgtaatcaaccctatatcgatgatgaatggtctgggttaaatggtctgtcttctgctgatcccaactctgattggaatgcaccagcagaagagtggggcaattgggtagacgaagaaagagcttcacttctaaagtcccaggaaccaattcctgatgatcaaaaggtctcagatgatgataaagaaaagggagagggagctcttccaactgggaaatccaaaaagaaaaaaaagaaaaagaagaagcaaggtgaagataactctactgcacaggacacagaagaattagaaaaagagattagagaagaccttccagtgaatacctctaaaacccgtccaaaacaggaaaaagctttttccttgaagaccataagcactagtgatccagccgaagtactcgtcaaaaatagccagcctatcaagactcttccacctgctacttctaccgagccatctgtaatcttatcaaaaagtgattctgacaagagctcttcccaagtgccgccaatactacaagagacagataaatccaagtcaaataccaagcaaaatagtgtgcctccttcacagaccaagtctgaaactagctgggaatctcccaaacaaataaaaaagaagaaaaaagccagacgagaaacgtgaaattttttttcctgaattggacatgtgtttgcaaacacttgtcttgaagattatgctgtttatgcaataatttgtgaacatgtacagagttttatataaatttaaaccaatttttaaaacaaaactgcggacaccaccataaaaatggaatcaaaagaaagttaatttatgaaattaagaggtcagcagaatatactcagtgatggaagacacttgggaaagtctttttaatagaacaagaacgatcttaatttaagaatattatcctggtttaacaacagtgccctgtttacaacagattgtgccctatctcatctgcagccgaggaataaaggattctgattagaaagagggttgcctacagattagtaagcaattccttggatcttatgcacagaacttgtaccatttgaatctgttttatgcttaaatcaaagtgctttgatcaaatgcataacctgccatatctttacatatttgttggtagcaatttgtattaaagaaatcacaagtgcaaataaaaagtcatttatcatttgtttaactaaactgtcatggtttagtttacaatttttaaaaagttcttaaaatactgaaaatgcagttgacacttgtgtatggcttatgaagttatttttgatagtcttacattacttgaattgttcaaagtacagtatattttaaattaagaaaagtgaactatatgtatttgttttatacatttaaggcttagactcataaataatgctattgtttatgatttgaaaactttcaggcaaaatccaatttacatttttcccttccctagcaattacttttttccagcttcaactcttcttagttactaatactttgttgactttaaaaatgaaatcattcacaaacttttggtatatgatggagaatgaaaaactagagtcagacagctttaattgacattgtcaacacctccagttatcaggaatacatttttttactgccttaacctgtagtgcgtagaatatgcatcaatttcttgaaggagattcatgtttttataagaattttcatgtaattattgcaattgtggtcaaataaggaacgtttcctgcttgaaattatattgatttaaatgatgtgtgagatgtttcaccattttcaggcactgtgtaattctattgtaataaactggcaggtatctttgtaactataaatagtgcatgctcagccatgtacactgtaaatagcctttaccaaacgtgtttgacaaggaccataattaacatcacttagtgaattgtgataaagaaaaaaaagccatgatttattcgatgtgattggcttgtttttatgtggcgccaagaacgaacctgtttaacagctgtaaccaatggtactgatctatccatccaatgttgtcattatatttgactgtggttcaacagtattgcgttgtcagactaggaaagctaaacgaacaaaatggttttagttttgctgaagactggccttattaatggacagctttcctaacaagagattattaacttttatcaggtgttaacatctgtttcaggaacatggcagtatgtttacatgtcagaagttttgtttaattctatggtatttctaaattgacttgtttaaataaattcagcaaatgg

SEQ ID NO: 36778 - DNA, 3718 bp, Homo sapiens
cccaagccgccattgttccgccgagggaggacagcggggcctggcgctggcgccgagacgccgcttagcggccgccactggagacactccctcccgcctcccgggtctcctggcggcggcggagtgaggctgacagcggggaacctgggagacccctccgccctccccgcggtggcagcggccgatccccggctccggcgcgagggacggccgcgatgcgctcggcctgaggttacccggcccggcccttcctcgcttccctcgactattccactgcgtctccgcgccccggcgtcatcctgcgagtccctctgacgggagggaagatggctgcacggagctggcaggacgagctggcccagcaggccgaggagggctcggcccggctgcgggaaatgctctcggtcggcctaggctttctgcgcaccgagctgggcctcgacctggggctggagccgaaacggtaccccggctgggtgatcctggtgggcactggcgcgctcgggctgctgctgctgtttctgctgggctacggctgggccgcggcttgcgccggcgcccgcaaaaagcggaggagcccgccccgcaagcgggaggaggcggcggccgtgccggccgcggcccccgacgacctggccttgctgaagaatctccggagcgaggaacagaagaagaagaaccggaagaaactgtccgagaagcccaaaccaaatgggcggactgttgaagtggctgagggtgaagctgttcgaacacctcaaagtgtaacagcaaagcagccaccagagattgacaagaaaaatgaaaagtcaaagaaaaataagaagaaatcaaagtcagatgctaaagcagtgcaaaacagttcacgccatgatggaaaggaagttgatgaaggagcctgggaaactaaaattagtcacagagagaaacgacagcagcgtaaacgtgataaggtgctgactgattctggttcattggattcaactatccctgggatagaaaataccatcacagttaccaccgagcaacttacaaccgcatcatttcctgttggttccaagaagaataaaggtgattctcatctaaatgttcaagttagcaactttaaatctggaaaaggagattctacacttcaggtttcttcaggattgaatgaaaacctcactgtcaatggaggaggctggaatgaaaagtctgtaaaactctcctcacagatcagtgcaggtgaggagaagtggaactccgtttcacctgcttctgcaggaaagaggaaaactgagccatctgcctggagtcaagacactggagatgctaatacaaatggaaaagactggggaaggagttggagtgaccgttcaatattttctggcattgggtctactgctgagccagtttctcagtctaccacttctgattatcagtgggatgttagccgtaatcaaccctatatcgatgatgaatggtctgggttaaatggtctgtcttctgctgatcccaactctgattggaatgcaccagcagaagagtggggcaattgggtagacgaagaaagagcttcacttctaaagtcccaggaaccaattcctgatgatcaaaaggtctcagatgatgataaagaaaagggagagggagctcttccaactgggaaatccaaaaagaaaaaaaagaaaaagaagaagcaaggtgaagataactctactgcacaggacacagaagaattagaaaaagagattagagaagaccttccagtgaatacctctaaaacccgtccaaaacaggaaaaagctttttccttgaagaccataagcactagtgatccagccgaagtactcgtcaaaaatagccagcctatcaagactcttccacctgctacttctaccgagccatctgtaatcttatcaaaaagtgattctgacaagagctcttcccaagtgccgccaatactacaagagacagataaatccaagtcaaataccaagcaaaatagtgtgcctccttcacagaccaagtctgaaactagctgggaatctcccaaacaaataaaaaagaagaaaaaagccagacgagaaacgtgaaattttttttcctgaattggacatgtgtttgcaaacacttgtcttgaagattatgctgtttatgcaataatttgtgaacatgtacagagttttatataaatttaaaccaatttttaaaacaaaactgcggacaccaccataaaaatggaatcaaaagaaagttaatttatgaaattaagaggtcagcagaatatactcagtgatggaagacacttgggaaagtctttttaatagaacaagaacgatcttaatttaagaatattatcctggtttaacaacagtgccctgtttacaacagattgtgccctatctcatctgcagccgaggaataaaggattctgattagaaagagggttgcctacagattagtaagcaattccttggatcttatgcacagaacttgtaccatttgaatctgttttatgcttaaatcaaagtgctttgatcaaatgcataacctgccatatctttacatatttgttggtagcaatttgtattaaagaaatcacaagtgcaaataaaaagtcatttatcatttgtttaactaaactgtcatggtttagtttacaatttttaaaaagttcttaaaatactgaaaatgcagttgacacttgtgtatggcttatgaagttatttttgatagtcttacattacttgaattgttcaaagtacagtatattttaaattaagaaaagtgaactatatgtatttgttttatacatttaaggcttagactcataaataatgctattgtttatgatttgaaaactttcaggcaaaatccaatttacatttttcccttccctagcaattacttttttccagcttcaactcttcttagttactaatactttgttgactttaaaaatgaaatcattcacaaacttttggtatatgatggagaatgaaaaactagagtcagacagctttaattgacattgtcaacacctccagttatcaggaatacatttttttactgccttaacctgtagtgcgtagaatatgcatcaatttcttgaaggagattcatgtttttataagaattttcatgtaattattgcaattgtggtcaaataaggaacgtttcctgcttgaaattatattgatttaaatgatgtgtgagatgtttcaccattttcaggcactgtgtaattctattgtaataaactggcaggtatctttgtaactataaatagtgcatgctcagccatgtacactgtaaatagcctttaccaaacgtgtttgacaaggaccataattaacatcacttagtgaattgtgataaagaaaaaaaagccatgatttattcgatgtgattggcttgtttttatgtggcgccaagaacgaacctgtttaacagctgtaaccaatggtactgatctatccatccaatgttgtcattatatttgactgtggttcaacagtattgcgttgtcagactaggaaagctaaacgaacaaaatggttttagttttgctgaagactggccttattaatggacagctttcctaacaagagattattaacttttatcaggtgttaacatctgtttcaggaacatggcagtatgtttacatgtcagaagttttgtttaattctatggtatttctaaattgacttgtttaaataaattcagcaaatgg

SEQ ID NO: 36779 - DNA, 3674 bp, Homo sapiens
cccaagccgccattgttccgccgagggaggacagcggggcctggcgctggcgccgagacgccgcttagcggccgccactggagacactccctcccgcctcccgggtctcctggcggcggcggagtgaggctgacagcggggaacctgggagacccctccgccctccccgcgatgcgctcggcctgaggttacccggcccggcccttcctcgcttccctcgactattccactgcgtctccgcgccccggcgtcatcctgcgagtccctctgacgggagggaagatggctgcacggagctggcaggacgagctggcccagcaggccgaggagggctcggcccggctgcgggaaatgctctcggtcggcctaggctttctgcgcaccgagctgggcctcgacctggggctggagccgaaacggtaccccggctgggtgatcctggtgggcactggcgcgctcgggctgctgctgctgtttctgctgggctacggctgggccgcggcttgcgccggcgcccgcaaaaagcggaggagcccgccccgcaagcgggaggaggcggcggccgtgccggccgcggcccccgacgacctggccttgctgaagaatctccggagcgaggaacagaagaagaagaaccggaagaaactgtccgagaagcccaaaccaaatgggcggactgttgaagtggctgagggtgaagctgttcgaacacctcaaagtgtaacagcaaagcagccaccagagattgacaagaaaaatgaaaagtcaaagaaaaataagaagaaatcaaagtcagatgctaaagcagtgcaaaacagttcacgccatgatggaaaggaagttgatgaaggagcctgggaaactaaaattagtcacagagagaaacgacagcagcgtaaacgtgataaggtgctgactgattctggttcattggattcaactatccctgggatagaaaataccatcacagttaccaccgagcaacttacaaccgcatcatttcctgttggttccaagaagaataaaggtgattctcatctaaatgttcaagttagcaactttaaatctggaaaaggagattctacacttcaggtttcttcaggattgaatgaaaacctcactgtcaatggaggaggctggaatgaaaagtctgtaaaactctcctcacagatcagtgcaggtgaggagaagtggaactccgtttcacctgcttctgcaggaaagaggaaaactgagccatctgcctggagtcaagacactggagatgctaatacaaatggaaaagactggggaaggagttggagtgaccgttcaatattttctggcattgggtctactgctgagccagtttctcagtctaccacttctgattatcagtgggatgttagccgtaatcaaccctatatcgatgatgaatggtctgggttaaatggtctgtcttctgctgatcccaactctgattggaatgcaccagcagaagagtggggcaattgggtagacgaagaaagagcttcacttctaaagtcccaggaaccaattcctgatgatcaaaaggtctcagatgatgataaagaaaagggagagggagctcttccaactgggaaatccaaaaagaaaaaaaagaaaaagaagaagcaaggtgaagataactctactgcacaggacacagaagaattagaaaaagagattagagaagaccttccagtgaatacctctaaaacccgtccaaaacaggaaaaagctttttccttgaagaccataagcactagtgatccagccgaagtactcgtcaaaaatagccagcctatcaagactcttccacctgctacttctaccgagccatctgtaatcttatcaaaaagtgattctgacaagagctcttcccaagtgccgccaatactacaagagacagataaatccaagtcaaataccaagcaaaatagtgtgcctccttcacagaccaagtctgaaactagctgggaatctcccaaacaaataaaaaagaagaaaaaagccagacgagaaacgtgaaattttttttcctgaattggacatgtgtttgcaaacacttgtcttgaagattatgctgtttatgcaataatttgtgaacatgtacagagttttatataaatttaaaccaatttttaaaacaaaactgcggacaccaccataaaaatggaatcaaaagaaagttaatttatgaaattaagaggtcagcagaatatactcagtgatggaagacacttgggaaagtctttttaatagaacaagaacgatcttaatttaagaatattatcctggtttaacaacagtgccctgtttacaacagattgtgccctatctcatctgcagccgaggaataaaggattctgattagaaagagggttgcctacagattagtaagcaattccttggatcttatgcacagaacttgtaccatttgaatctgttttatgcttaaatcaaagtgctttgatcaaatgcataacctgccatatctttacatatttgttggtagcaatttgtattaaagaaatcacaagtgcaaataaaaagtcatttatcatttgtttaactaaactgtcatggtttagtttacaatttttaaaaagttcttaaaatactgaaaatgcagttgacacttgtgtatggcttatgaagttatttttgatagtcttacattacttgaattgttcaaagtacagtatattttaaattaagaaaagtgaactatatgtatttgttttatacatttaaggcttagactcataaataatgctattgtttatgatttgaaaactttcaggcaaaatccaatttacatttttcccttccctagcaattacttttttccagcttcaactcttcttagttactaatactttgttgactttaaaaatgaaatcattcacaaacttttggtatatgatggagaatgaaaaactagagtcagacagctttaattgacattgtcaacacctccagttatcaggaatacatttttttactgccttaacctgtagtgcgtagaatatgcatcaatttcttgaaggagattcatgtttttataagaattttcatgtaattattgcaattgtggtcaaataaggaacgtttcctgcttgaaattatattgatttaaatgatgtgtgagatgtttcaccattttcaggcactgtgtaattctattgtaataaactggcaggtatctttgtaactataaatagtgcatgctcagccatgtacactgtaaatagcctttaccaaacgtgtttgacaaggaccataattaacatcacttagtgaattgtgataaagaaaaaaaagccatgatttattcgatgtgattggcttgtttttatgtggcgccaagaacgaacctgtttaacagctgtaaccaatggtactgatctatccatccaatgttgtcattatatttgactgtggttcaacagtattgcgttgtcagactaggaaagctaaacgaacaaaatggttttagttttgctgaagactggccttattaatggacagctttcctaacaagagattattaacttttatcaggtgttaacatctgtttcaggaacatggcagtatgtttacatgtcagaagttttgtttaattctatggtatttctaaattgacttgtttaaataaattcagcaaatgg

SEQ ID NO: 36780 - DNA, 3126 bp, Homo sapiens
ccccgcaagcgaggaggcgcggctagccggccccgacgacctggccttgctgaagaatctccggagcgaggaacagaagaagaagaaccggaagaaactgtccgagaagcccaaaccaaatgggcggactgttgaagtggctgagggtgaagctgttcgaacacctcaaagtgtaacagcaaagcagccaccagagattgacaagaaaaatgaaaagtcaaagaaaaataagaagaaatcaaagtcagatgctaaagcagtgcaaaacagttcacgccatgatggaaaggaagttgatgaaggagcctgggaaactaaaattagtcacagagagaaacgacagcagcgtaaacgtgataaggtgctgactgattctggttcattggattcaactatccctgggatagaaaataccatcacagttaccaccgagcaacttacaaccgcatcatttcctgttggttccaagaagaataaaggtgattctcatctaaatgttcaagttagcaactttaaatctggaaaaggagattctacacttcaggtttcttcaggattgaatgaaaacctcactgtcaatggaggaggctggaatgaaaagtctgtaaaactctcctcacagatcagtgcaggtgaggagaagtggaactccgtttcacctgcttctgcaggaaagaggaaaactgagccatctgcctggagtcaagacactggagatgctaatacaaatggaaaagactggggaaggagttggagtgaccgttcaatattttctggcattgggtctactgctgagccagtttctcagtctaccacttctgattatcagtgggatgttagccgtaatcaaccctatatcgatgatgaatggtctgggttaaatggtctgtcttctgctgatcccaactctgattggaatgcaccagcagaagagtggggcaattgggtagacgaagaaagagcttcacttctaaagtcccaggaaccaattcctgatgatcaaaaggtctcagatgatgataaagaaaagggagagggagctcttccaactgggaaatccaaaaagaaaaaaaagaaaaagaagaagcaaggtgaagataactctactgcacaggacacagaagaattagaaaaagagattagagaagaccttccagtgaatacctctaaaacccgtccaaaacaggaaaaagctttttccttgaagaccataagcactagtgatccagccgaagtactcgtcaaaaatagccagcctatcaagactcttccacctgctacttctaccgagccatctgtaatcttatcaaaaagtgattctgacaagagctcttcccaagtgccgccaatactacaagagacagataaatccaagtcaaataccaagcaaaatagtgtgcctccttcacagaccaagtctgaaactagctgggaatctcccaaacaaataaaaaagaagaaaaaagccagacgagaaacgtgaaattttttttcctgaattggacatgtgtttgcaaacacttgtcttgaagattatgctgtttatgcaataatttgtgaacatgtacagagttttatataaatttaaaccaatttttaaaacaaaactgcggacaccaccataaaaatggaatcaaaagaaagttaatttatgaaattaagaggtcagcagaatatactcagtgatggaagacacttgggaaagtctttttaatagaacaagaacgatcttaatttaagaatattatcctggtttaacaacagtgccctgtttacaacagattgtgccctatctcatctgcagccgaggaataaaggattctgattagaaagagggttgcctacagattagtaagcaattccttggatcttatgcacagaacttgtaccatttgaatctgttttatgcttaaatcaaagtgctttgatcaaatgcataacctgccatatctttacatatttgttggtagcaatttgtattaaagaaatcacaagtgcaaataaaaagtcatttatcatttgtttaactaaactgtcatggtttagtttacaatttttaaaaagttcttaaaatactgaaaatgcagttgacacttgtgtatggcttatgaagttatttttgatagtcttacattacttgaattgttcaaagtacagtatattttaaattaagaaaagtgaactatatgtatttgttttatacatttaaggcttagactcataaataatgctattgtttatgatttgaaaactttcaggcaaaatccaatttacatttttcccttccctagcaattacttttttccagcttcaactcttcttagttactaatactttgttgactttaaaaatgaaatcattcacaaacttttggtatatgatggagaatgaaaaactagagtcagacagctttaattgacattgtcaacacctccagttatcaggaatacatttttttactgccttaacctgtagtgcgtagaatatgcatcaatttcttgaaggagattcatgtttttataagaattttcatgtaattattgcaattgtggtcaaataaggaacgtttcctgcttgaaattatattgatttaaatgatgtgtgagatgtttcaccattttcaggcactgtgtaattctattgtaataaactggcaggtatctttgtaactataaatagtgcatgctcagccatgtacactgtaaatagcctttaccaaacgtgtttgacaaggaccataattaacatcacttagtgaattgtgataaagaaaaaaaagccatgatttattcgatgtgattggcttgtttttatgtggcgccaagaacgaacctgtttaacagctgtaaccaatggtactgatctatccatccaatgttgtcattatatttgactgtggttcaacagtattgcgttgtcagactaggaaagctaaacgaacaaaatggttttagttttgctgaagactggccttattaatggacagctttcctaacaagagattattaacttttatcaggtgttaacatctgtttcaggaacatggcagtatgtttacatgtcagaagttttgtttaattctatggtatttctaaattgacttgtttaaataaattcagcaaatgg

SEQ ID NO: 36781 - DNA, 3247 bp, Homo sapiens
gaattccgggaagccagacggttaacacagacaaagtgctgccgtgacactcggccctccagtgttgcggagaggcaagagcagcgaccgcgcacctgtccgcccggagctgggacgcgcgcccgggcggccggacgaagcgaggagggaccgccgaggctgcccccaagtgtaactccagcactgtgaggtttcagggattggcagaggggaccaaggggacatgaaaatggacatggaggatgcggatatgactctgtggacagaggctgagtttgaagagaagtgtacatacattgtgaacgaccacccctgggattctggtgctgatggcggtacttcggttcaggcggaggcatccttaccaaggaatctgcttttcaagtatgccaccaacagtgaagaggttattggagtgatgagtaaagaatacataccaaagggcacacgttttggacccctaataggtgaaatctacaccaatgacacagttcctaagaacgccaacaggaaatatttttggaggatctattccagaggggagcttcaccacttcattgacggctttaatgaagagaaaagcaactggatgcgctatgtgaatccagcacactctccccgggagcaaaacctggctgcgtgtcagaacgggatgaacatctacttctacaccattaagcccatccctgccaaccaggaacttcttgtgtggtattgtcgggactttgcagaaaggcttcactacccttatcccggagagctgacaatgatgaatctcacacaaacacagagcagtctaaagcaaccgagcactgagaaaaatgaactctgcccaaagaatgtcccaaagagagagtacagcgtgaaagaaatcctaaaattggactccaacccctccaaaggaaaggacctctaccgttctaacatttcacccctcacatcagaaaaggacctcgatgactttagaagacgtgggagccccgaaatgcccttctaccctcgggtcgtttaccccatccgggcccctctgccagaagactttttgaaagcttccctggcctacgggatcgagagacccacgtacatcactcgctcccccattccatcctccaccactccaagcccctctgcaagaagcagccccgaccaaagcctcaagagctccagccctcacagcagccctgggaatacggtgtcccctgtgggccccggctctcaagagcaccgggactcctacgcttacttgaacgcgtcctacggcacggaaggtttgggctcctaccctggctacgcacccctgccccacctcccgccagctttcatcccctcgtacaacgctcactaccccaagttcctcttgcccccctacggcatgaattgtaatggcctgagcgctgtgagcagcatgaatggcatcaacaactttggcctcttcccgaggctgtgccctgtctacagcaatctcctcggtgggggcagcctgccccaccccatgctcaaccccacttctctcccgagctcgctgccctcagatggagcccggaggttgctccagccggagcatcccagggaggtgcttgtcccggcgccccacagtgccttctcctttaccggggccgccgccagcatgaaggacaaggcctgtagccccacaagcgggtctcccacggcgggaacagccgccacggcagaacatgtggtgcagcccaaagctacctcagcagcgatggcagcccccagcagcgacgaagccatgaatctcattaaaaacaaaagaaacatgaccggctacaagacccttccctacccgctgaagaagcagaacggcaagatcaagtacgaatgcaacgtttgcgccaagactttcggccagctctccaatctgaaggtccacctgagagtgcacagtggagaacggcctttcaaatgtcagacttgcaacaagggctttactcagctcgcccacctgcagaaacactacctggtacacacgggagaaaagccacatgaatgccaggtctgccacaagagatttagcagcaccagcaatctcaagacccacctgcgactccattctggagagaaaccataccaatgcaaggtgtgccctgccaagttcacccagtttgtgcacctgaaactgcacaagcgtctgcacacccgggagcggccccacaagtgctcccagtgccacaagaactacatccatctctgtagcctcaaggttcacctgaaagggaactgcgctgcggccccggcgcctgggctgcccttggaagatctgacccgaatcaatgaagaaatcgagaagtttgacatcagtgacaatgctgaccggctcgaggacgtggaggatgacatcagtgtgatctctgtagtggagaaggaaattctggccgtggtcagaaaagagaaagaagaaactggcctgaaagtgtctttgcaaagaaacatggggaatggactcctctcctcagggtgcagcctttatgagtcatcagatctacccctcatgaagttgcctcccagcaacccactacctctggtacctgtaaaggtcaaacaagaaacagttgaaccaatggatccttaagattttcagaaaacacttattttgtttcttaagttatgacttggtgagtcagggtgcctgtaggaagtggcttgtacataatcccagctctgcaaagctctctcgacagcaaatggtttcccctcacctctggaattaaagaaggaactccaaagttactgaaatctcagggcatgaacaaggcaaaggccaaaatatatatatatatatatatatatctgtatacatattatatatacttatttacacctgtgtctatatatttgcccctgtgtattttgaatatttgtgtggacatgtttgcatagccttcccattactaagactattacctagtcataattattttttcaatgataatccttcataatttattatacaatttatcattcagaaagcaataattaaaaaagtttacaatgactggaaagattccttgtaatttgagtataaatgtatttttgtcttgtggccattctttgtagataatttctgcacatctgtataagtacctaagatttagttaaacaaatatatgacttcagtcaacctctctctctaataatggtttgaaaatgaggtttgggtaattgccaatgttggacagttgatgtgttcattcctgggatcctatcatttgaacagcattgtaca

SEQ ID NO: 36782 - DNA, 3193 bp, Homo sapiens
gaattccgggaagccagacggttaacacagacaaagtgctgccgtgacactcggccctccagtgttgcggagaggcaagagcagcgaccgcgcacctgtccgcccggagctgggacgcgcgcccgggcggccggacgaagcgaggagggaccgccgaggctgcccccaagtgtaactccagcactgtgaggtttcagggattggcagaggggaccaaggggacatgaaaatggacatggaggatgcggatatgactctgtggacagaggctgagtttgaagagaagtgtacatacattgtgaacgaccacccctgggattctggtgctgatggcggtacttcggttcaggcggaggcatccttaccaaggaatctgcttttcaagtatgccaccaacagtgaagaggttattggagtgatgagtaaagaatacataccaaagggcacacgttttggacccctaataggtgaaatctacaccaatgacacagttcctaagaacgccaacaggaaatatttttggaggatctattccagaggggagcttcaccacttcattgacggctttaatgaagagaaaagcaactggatgcgctatgtgaatccagcacactctccccgggagcaaaacctggctgcgtgtcagaacgggatgaacatctacttctacaccattaagcccatccctgccaaccaggaacttcttgtgtggtattgtcgggactttgcagaaaggcttcactacccttatcccggagagctgacaatgatgaatctcacacaaacacagagcagtctaaagcaaccgagcactgagaaaaatgaactctgcccaaagaatgtcccaaagagagagtacagcgtgaaagaaatcctaaaattggactccaacccctccaaaggaaaggacctctaccgttctaacatttcacccctcacatcagaaaaggacctcgatgactttagaagacgtgggagccccgaaatgcccttctaccctcgggtcgtttaccccatccgggcccctctgccagaagactttttgaaagcttccctggcctacgggatcgagagacccacgtacatcactcgctcccccattccatcctccaccactccaagcccctctgcaagaagcagccccgaccaaagcctcaagagctccagccctcacagcagccctgggaatacggtgtcccctgtgggccccggctctcaagagcaccgggactcctacgcttacttgaacgcgtcctacggcacggaaggtttgggctcctaccctggctacgcacccctgccccacctcccgccagctttcatcccctcgtacaacgctcactaccccaagttcctcttgcccccctacggcatgaattgtaatggcctgagcgctgtgagcagcatgaatggcatcaacaactttggcctcttcccgaggctgtgccctgtctacagcaatctcctcggtgggggcagcctgccccaccccatgctcaaccccacttctctcccgagctcgctgccctcagatggagcccggaggttgctccagccggagcatcccagggaggtgcttgtcccggcgccccacagtgccttctcctttaccggggccgccgccagcatgaaggacaaggcctgtagccccacaagcgggtctcccacggcgggaacagccgccacggcagaacatgtggtgcagcccaaagctacctcagcagcgatggcagcccccagcagcgacgaagccatgaatctcattaaaaacaaaagaaacatgaccggctacaagacccttccctacccgctgaagaagcagaacggcaagatcaagtacgaatgcaacgtttgcgccaagactttcggccagctctccaatctgaaggtccacctgagagtgcacagtggagaacggcctttcaaatgtcagacttgcaacaagggctttactcagctcgcccacctgcagaaacactacctggtacacacgggagaaaagccacatgaatgccaggtctgccacaagagatttagcagcaccagcaatctcaagacccacctgcgactccattctggagagaaaccataccaatgcaaggtgtgccctgccaagttcacccagtttgtgcacctgaaactgcacaagcgtctgcacacccgggagcggccccacaagtgctcccagtgccacaagaactacatccatctctgtagcctcaaggttcacctgaaagggaactgcgctgcggccccggcgcctgggctgcccttggaagatctgacccgaatcaatgaagaaatcgagaagtttgacatcagtgacaatgctgaccggctcgaggacgtggaggatgacatcagtgtgatctctgtagtggagaaggaaattctggccgtggtcagaaaagagaaagaagaaactggcctgaaagtgtctttgcaaagaaacatggggaatggactcctctcctcagggtgcagcctttatgagtcatcagatctacccctcatgaagttgcctcccagcaacccactacctctggtacctgtaaaggtcaaacaagaaacagttgaaccaatggatccttaagattttcagaaaacacttattttgtttcttaagttatgacttggtgagtcagggtgcctgtaggaagtggcttgtacataatcccagctctgcaaagctctctcgacagcaaatggtttcccctcacctctggaattaaagaaggaactccaaagttactgaaatctcagggcatgaacaaggcaaaggccaaaatatatatatatatatatatatatctgtatacatattatatatacttatttacacctgtgtctatatatttgcccctgtgtattttgaatatttgtgtggacatgtttgcatagccttcccattactaagactattacctagtcataattattttttcaatgataatccttcataatttattatacaatttatcattcagaaagcaataattaatgtcttgtggccattctttgtagataatttctgcacatctgtataagtacctaagatttagttaaacaaatatatgacttcagtcaacctctctctctaataatggtttgaaaatgaggtttgggtaattgccaatgttggacagttgatgtgttcattcctgggatcctatcatttgaacagcattgtaca

SEQ ID NO: 36783 - DNA, 2902 bp, Homo sapiens
ctgtttccgccctgatttctgctgattcaagactattctggctaaactgattggattctttttctaactaggcagtaggggatcagaaatcacacacggtaccggctgtgtttattctgagaggtgctggggagctttgggtctgacttccttttacatgcctgtcttctcttttggacagatctattccagaggggagcttcaccacttcattgacggctttaatgaagagaaaagcaactggatgcgctatgtgaatccagcacactctccccgggagcaaaacctggctgcgtgtcagaacgggatgaacatctacttctacaccattaagcccatccctgccaaccaggaacttcttgtgtggtattgtcgggactttgcagaaaggcttcactacccttatcccggagagctgacaatgatgaatctcacacaaacacagagcagtctaaagcaaccgagcactgagaaaaatgaactctgcccaaagaatgtcccaaagagagagtacagcgtgaaagaaatcctaaaattggactccaacccctccaaaggaaaggacctctaccgttctaacatttcacccctcacatcagaaaaggacctcgatgactttagaagacgtgggagccccgaaatgcccttctaccctcgggtcgtttaccccatccgggcccctctgccagaagactttttgaaagcttccctggcctacgggatcgagagacccacgtacatcactcgctcccccattccatcctccaccactccaagcccctctgcaagaagcagccccgaccaaagcctcaagagctccagccctcacagcagccctgggaatacggtgtcccctgtgggccccggctctcaagagcaccgggactcctacgcttacttgaacgcgtcctacggcacggaaggtttgggctcctaccctggctacgcacccctgccccacctcccgccagctttcatcccctcgtacaacgctcactaccccaagttcctcttgcccccctacggcatgaattgtaatggcctgagcgctgtgagcagcatgaatggcatcaacaactttggcctcttcccgaggctgtgccctgtctacagcaatctcctcggtgggggcagcctgccccaccccatgctcaaccccacttctctcccgagctcgctgccctcagatggagcccggaggttgctccagccggagcatcccagggaggtgcttgtcccggcgccccacagtgccttctcctttaccggggccgccgccagcatgaaggacaaggcctgtagccccacaagcgggtctcccacggcgggaacagccgccacggcagaacatgtggtgcagcccaaagctacctcagcagcgatggcagcccccagcagcgacgaagccatgaatctcattaaaaacaaaagaaacatgaccggctacaagacccttccctacccgctgaagaagcagaacggcaagatcaagtacgaatgcaacgtttgcgccaagactttcggccagctctccaatctgaaggtccacctgagagtgcacagtggagaacggcctttcaaatgtcagacttgcaacaagggctttactcagctcgcccacctgcagaaacactacctggtacacacgggagaaaagccacatgaatgccaggtctgccacaagagatttagcagcaccagcaatctcaagacccacctgcgactccattctggagagaaaccataccaatgcaaggtgtgccctgccaagttcacccagtttgtgcacctgaaactgcacaagcgtctgcacacccgggagcggccccacaagtgctcccagtgccacaagaactacatccatctctgtagcctcaaggttcacctgaaagggaactgcgctgcggccccggcgcctgggctgcccttggaagatctgacccgaatcaatgaagaaatcgagaagtttgacatcagtgacaatgctgaccggctcgaggacgtggaggatgacatcagtgtgatctctgtagtggagaaggaaattctggccgtggtcagaaaagagaaagaagaaactggcctgaaagtgtctttgcaaagaaacatggggaatggactcctctcctcagggtgcagcctttatgagtcatcagatctacccctcatgaagttgcctcccagcaacccactacctctggtacctgtaaaggtcaaacaagaaacagttgaaccaatggatccttaagattttcagaaaacacttattttgtttcttaagttatgacttggtgagtcagggtgcctgtaggaagtggcttgtacataatcccagctctgcaaagctctctcgacagcaaatggtttcccctcacctctggaattaaagaaggaactccaaagttactgaaatctcagggcatgaacaaggcaaaggccaaaatatatatatatatatatatatatctgtatacatattatatatacttatttacacctgtgtctatatatttgcccctgtgtattttgaatatttgtgtggacatgtttgcatagccttcccattactaagactattacctagtcataattattttttcaatgataatccttcataatttattatacaatttatcattcagaaagcaataattaaaaaagtttacaatgactggaaagattccttgtaatttgagtataaatgtatttttgtcttgtggccattctttgtagataatttctgcacatctgtataagtacctaagatttagttaaacaaatatatgacttcagtcaacctctctctctaataatggtttgaaaatgaggtttgggtaattgccaatgttggacagttgatgtgttcattcctgggatcctatcatttgaacagcattgtaca

SEQ ID NO: 36784 - DNA, 2774 bp, Homo sapiens
gaattccgggaagccagacggttaacacagacaaagtgctgccgtgacactcggccctccagtgttgcggagaggcaagagcagcgaccgcgcacctgtccgcccggagctgggacgcgcgcccgggcggccggacgaagcgaggagggaccgccgaggctgcccccaagtgtaactccagcactgtgaggtttcagggattggcagaggggaccaaggggacatgaaaatggacatggaggatgcggatatgactctgtggacagaggctgagtttgaagagaagtgtacatacattgtgaacgaccacccctgggattctggtgctgatggcggtacttcggttcaggcggaggcatccttaccaaggaatctgcttttcaagtatgccaccaacagtgaagaggttattggagtgatgagtaaagaatacataccaaagggcacacgttttggacccctaataggtgaaatctacaccaatgacacagttcctaagaacgccaacaggaaatatttttggaggatctattccagaggggagcttcaccacttcattgacggctttaatgaagagaaaagcaactggatgcgctatgtgaatccagcacactctccccgggagcaaaacctggctgcgtgtcagaacgggatgaacatctacttctacaccattaagcccatccctctccagccctcacagcagccctgggaatacggtgtcccctgtgggccccggctctcaagagcaccgggactcctacgcttacttgaacgcgtcctacggcacggaaggtttgggctcctaccctggctacgcacccctgccccacctcccgccagctttcatcccctcgtacaacgctcactaccccaagttcctcttgcccccctacggcatgaattgtaatggcctgagcgctgtgagcagcatgaatggcatcaacaactttggcctcttcccgaggctgtgccctgtctacagcaatctcctcggtgggggcagcctgccccaccccatgctcaaccccacttctctcccgagctcgctgccctcagatggagcccggaggttgctccagccggagcatcccagggaggtgcttgtcccggcgccccacagtgccttctcctttaccggggccgccgccagcatgaaggacaaggcctgtagccccacaagcgggtctcccacggcgggaacagccgccacggcagaacatgtggtgcagcccaaagctacctcagcagcgatggcagcccccagcagcgacgaagccatgaatctcattaaaaacaaaagaaacatgaccggctacaagacccttccctacccgctgaagaagcagaacggcaagatcaagtacgaatgcaacgtttgcgccaagactttcggccagctctccaatctgaaggtccacctgagagtgcacagtggagaacggcctttcaaatgtcagacttgcaacaagggctttactcagctcgcccacctgcagaaacactacctggtacacacgggagaaaagccacatgaatgccaggtctgccacaagagatttagcagcaccagcaatctcaagacccacctgcgactccattctggagagaaaccataccaatgcaaggtgtgccctgccaagttcacccagtttgtgcacctgaaactgcacaagcgtctgcacacccgggagcggccccacaagtgctcccagtgccacaagaactacatccatctctgtagcctcaaggttcacctgaaagggaactgcgctgcggccccggcgcctgggctgcccttggaagatctgacccgaatcaatgaagaaatcgagaagtttgacatcagtgacaatgctgaccggctcgaggacgtggaggatgacatcagtgtgatctctgtagtggagaaggaaattctggccgtggtcagaaaagagaaagaagaaactggcctgaaagtgtctttgcaaagaaacatggggaatggactcctctcctcagggtgcagcctttatgagtcatcagatctacccctcatgaagttgcctcccagcaacccactacctctggtacctgtaaaggtcaaacaagaaacagttgaaccaatggatccttaagattttcagaaaacacttattttgtttcttaagttatgacttggtgagtcagggtgcctgtaggaagtggcttgtacataatcccagctctgcaaagctctctcgacagcaaatggtttcccctcacctctggaattaaagaaggaactccaaagttactgaaatctcagggcatgaacaaggcaaaggccaaaatatatatatatatatatatatatctgtatacatattatatatacttatttacacctgtgtctatatatttgcccctgtgtattttgaatatttgtgtggacatgtttgcatagccttcccattactaagactattacctagtcataattattttttcaatgataatccttcataatttattatacaatttatcattcagaaagcaataattaaaaaagtttacaatgactggaaagattccttgtaatttgagtataaatgtatttttgtcttgtggccattctttgtagataatttctgcacatctgtataagtacctaagatttagttaaacaaatatatgacttcagtcaacctctctctctaataatggtttgaaaatgaggtttgggtaattgccaatgttggacagttgatgtgttcattcctgggatcctatcatttgaacagcattgtaca

SEQ ID NO: 36785 - DNA, 405 bp, Homo sapiens
tcctgtgttttttcctgtttaggttattggagtgatgagtaaagaatacataccaaagggcacacgttttggacccctaataggtgaaatctacaccaatgacacagttcctaagaacgccaacaggaaatatttttggagggtaagtaagggaaatttcttcagacccattaaatgttaggaaaaaatggagctaaaagagctgggtggctcacctttctcatcctgtgctgagaaatgctggggctcacccataagtatccagcatccccatggacacagggaattctgaacaaatgtgatgaaaccgatgaaatgtctggcctgtaggtggttagtgatggagatacgggctatatgtgaatcttgatttttgcaattcattagagctttgtaatgaaagga

SEQ ID NO: 36786 - DNA, 407 bp, Homo sapiens
gaactgcacttttgagtgagtggcccagagccttctagaatgagagtgcgttggaagccagatatgtggcgattgtgtcgccagctgttactcaggttttctcaagaaggaggagcaactttggcagttttgcttcagttctctctagccctctgtgtaatcgcccctttttctttatttcagcacaaacacagagcagtctaaagcaaccgagcactgagaaaaatgaactctgcccaaagaatgtcccaaagagagagtacagcgtgaaagaaatcctaaaattggactccaacccctccaaaggaaaggacctctaccgttctaacatttcacccctcacatcagaaaaggacctcgatgactttagaagacgtgggagccccgaaatgcccttctaccctcgg

SEQ ID NO: 36787 - DNA, 3368 bp, Homo sapiens
aacaaatatgaatattgttacatcacctctgactctctgactagtaagaaactatgcatttccatacccaatgaaacctcaattcctacagcaattctacttttattgcctcccaagaactatttcttcatggtcaatatcactctttaaaagctagcaaaatatgactttcttctgaggtttgggcaatctggatcaatatttatgtatctaaccacttgaaaggctgtctccttttttggccttttaaattaaaacttccataaaatgaagcaaaatatgaaaacagctagttgatttatcaataatgtgaaaccctccttctgaatttttttggtaaaaattaccacactgaaaccaaaacttaaccttggcttggactctcagataaattgcttttgtattctttgactacaaagtattctcaaaaagaagaaattatttctgatggtagatcaaactctagccaagaaggtctagataaactagaggactgtataattatctaaagtaattcagggggacttttagaaaaattctttaatttttgttcctgtgtaaaaattattattaatggatggcagcccaaattactattcttcttttaaaatttgtttcaagtgtgtcaccaggcactcataaaattcatttatttgttatataactcaatgacctgaaataataggtgctcattgctttttcatttgatccttaaaaacaattttattctgtctaaaaaaaattctcctgctaaaatccaaatgattacctggctataggaggagtcccattttatgaacatgtatgaaatatttagttggattcagatgaaatgcaacttagagaaaggaatggataccagtagagaagatggaaagagacacaaaaatcagactttgcttacatcaaaattaggtctgttgtctaatcctgttaacctagaggcaagctgaaaatagatggtaaggataaatagatttttaaacacagtatttatatttaacagaatgtcataaaaatgacagaatgccatgaaattcagcatgtcaaaactttgataaaacaaacaagaaatttaataaatatgctaattagagtgaatatttaaagggacaaaaataacttgtcacatcatagatgtctccccagtgcagaatttattatctgctgggaaaatttggttttatgtcttcaatcaatatttgctgcattatctaattaaacattagtatattttttgtgctaatgagaaaccatgcaagagtccaaatatcaagtgtggtgacagcttgaatcagttgagtttggtgttcatgaataaaattcttgatgaatgtgaaatgaatggtttatatacataagttttatgtgcagtaaattaattaggctttaaaacttgttagcatgcttagctcctcttttttccattgaattatcttcctatcttccttccttccttcctttccttcctttccttccctccctctttgctttatttctttctagctcttataagataaatgacaatagtactttactatttgggctggagcctccctttttcactttcacatgattgaacactttgtggatttgtgagaaaaggggaaagaagatgagcacgtagatgcagatcagttgaggatagaagtgactgagagaattgggaccttgacttccagagactgtcagtcaagagaaatgtgggtctataaaaatctatgtgtgttcattttcattgaatttaaacactttttcaagaagtatcagggtcaatctgtttggacaatctcctatttttacccccttacaaatgtcttaagttagaaaaacctcttattttcaagtagtcatttttttttatgtgagtaccacactgctaaagactgaaatagaaaaaaaaaatgctttttctgtttgtagggaaattgctttctgaaaactactcccaataagatgtatacatcaaatgcaacttgattttactggctctttatctagagataactgatgcactgtcttctttcttagatacccttctgtaattcagcttggcatagtatgatgttttgagttcttattgagggtttggaaacatttgtcatcaattttatgtctactctattgaaaaagcaatatacaatgtattccatatttcttagctctgtgtctttgaggttttaaacctatattcagatagctgtttttagctacaattttgagtattcaccagaatttacaaattgccattttattaaatacaaaaaaaaaaaagtacagcttggatcaagagatcaaacatttacaaatctcaatccaaagccattatttttcagggaaaattaaatcatttctagcagagtatttgactcctaagggaaaataagtcaaatatcttctttaagagtaagggcattcttccattgtaggtatttctaattgactttataataatttgaacaaatcttgaacaagatttaaagaatttataatctcccaaacttaaaattgtattctttctggttttttatttttatgtattaagattatattcaaaccacttaattatcttcatgacataagtttgtgttaatagaaaattatacagaaaaaaacatgatttgttcctctgtggaaagatatgcttcaatgagttaaatacccttgaattttggttctcatttcttatttggacttttctgttatgtacctcaggggtcttaaattctaacagatgaagtagtcaaaggggtataaaatacttgaaaaaaattaaaacttcaaaagggacgaatttctctgttaacttttgtttatcctatactgacttattttgaaattgtgaaaaaacaggcagctaccatataaattggtatctatgaaaatactgattactttcttcctgtgattttcactgttaagaaaacctttgtcttgaaatgatggacaatcttaatacttgttcagataaagaaatgtgactttcaatacctttaccatttgtatttctttagggaaatattttaataatgattgtaaaaatagaagaaatatggttgagaaaaatagaagaaattaagatgaaatttgaacagttgtaatccacagtcccatttttccctctattttattgccttctactaagttattgaaggcccagatctgcaaaatttacaagctactaattcattgtctcctttaagaatttggagcaaaaattattccgactatgcggaaatgaattcacatcatcatggcaggttttgactatgagggaattcaggttaggttcaaatagaataatggtccatggagaaaaatactttctgatttttcttcaagttggatggaaaggtttttctttattt

SEQ ID NO: 36788 - DNA, 2152 bp, Homo sapiens
aacaaatatgaatattgttacatcacctctgactctctgactagtaagaaactatgcatttccatacccaatgaaacctcaattcctacagcaattctacttttattgcctcccaagaactatttcttcatggtcaatatcactctttaaaagctagcaaaatatgactttcttctgaggtttgggcaatctggatcaatatttatgtatctaaccacttgaaaggctgtctccttttttggccttttaaattaaaacttccataaaatgaagcaaaatatgaaaacagctagttgatttatcaataatgtgaaaccctccttctgaatttttttggtaaaaattaccacactgaaaccaaaacttaaccttggcttggactctcagataaattgcttttgtattctttgactacaaagtattctcaaaaagaagaaattatttctgatggtagatcaaactctagccaagaaggtctagataaactagaggactgtataattatctaaagtaattcagggggacttttagaaaaattctttaatttttgttcctgtgtaaaaattattattaatggatggcagcccaaattactattcttcttttaaaatttgtttcaagtgtgtcaccaggcactcataaaattcatttatttgttatataactcaatgacctgaaataataggtgctcattgctttttcatttgatccttaaaaacaattttattctgtctaaaaaaaattctcctgctaaaatccaaatgattacctggctataggaggagtcccattttatgaacatgtatgaaatatttagttggattcagatgaaatgcaacttagagaaaggaatggataccagtagagaagatggaaagagacacaaaaatcagactttgcttacatcaaaattaggtctgttgtctaatcctgttaacctagaggcaagctgaaaatagatggtaaggataaatagatttttaaacacagtatttatatttaacagaatgtcataaaaatgacagaatgccatgaaattcagcatgtcaaaactttgataaaacaaacaagaaatttaataaatatgctaattagagtgaatatttaaagggacaaaaataacttgtcacatcatagatgtctccccagtgcagaatttattatctgctgggaaaatttggttttatgtcttcaatcaatatttgctgcattatctaattaaacattagtatattttttgtgctaatgagaaaccatgcaagagtccaaatatcaagtgtggtgacagcttgaatcagttgagtttggtgttcatgaataaaattcttgatgaatgtgaaatgaatggtttatatacataagttttatgtgcagtaaattaattaggctttaaaacttgttagcatgcttagctcctcttttttccattgaattatcttcctatcttccttccttccttcctttccttcctttccttccctccctctttgctttatttctttctagctcttataagataaatgacaatagtactttactatttgggctggagcctccctttttcactttcacatgattgaacactttgtggatttgtgagaaaaggggaaagaagatgagcacgtagatgcagatcagttgaggatagaagtgactgagagaattgggaccttgacttccagagactgtcagtcaagagaaatgtgggtctataaaaatctatgtgtgttcattttcattgaatttaaacactttttcaagaagtatcagggtcaatctgtttggacaatctcctatttttacccccttacaaatgtcttaagttagaaaaacctcttattttcaagtagtcatttttttttatgtgagtaccacactgctaaagactgaaatagaaaaaaaaaatgctttttctgtttgtagggaaattgctttctgaaaactactcccaataagatgtatacatcaaatgcaacttgattttactggctctttatctagagataactgatgcactgtcttctttcttagatacccttctgtaattcagcttggcatagtatgatgttttgagttcttattgagggtttggaaacatttgtcatcaattttatgtctttagcagtgtggtgtcgacgcggccggcaattta

SEQ ID NO: 36789 - DNA, 451 bp, Homo sapiens
ctagttacaaagcggtttcactttgtaaatgctctttggatggcaggaaccaagcagccatgaaaagaggagttacacctttaaaggagtcattccatcatgactctcaggactggaacatggaatacctgaatggcctctttggcacagataggccacccttgaaaggtgttccaagctaggaactcactaccactgttacatcgatgcaactctgtgagaagtttttatctggtgatggaaaatctcatctcttcaacacactgactactaccagtctcagaaccctgtaaacaagattcattcatctcaaattgggttaaagcagtcaccctgccttacattagtttggaataaggatgtggggatggtggtagaggaggggagtggatgatgatttttttattgttatttgattctaaagaaacttctatacattttgcatttaaaa

SEQ ID NO: 36790 - DNA, 373 bp, Homo sapiens
aagagaccttcactactacttccctgctttcacagcaggtgtcctggtggtacaaaccccaggtatgaagctgcaaggagggacccagttccaggacaccaagaacacccagctactcagcaatctccttccaccgtggacctcggcacatgaacacagcacaggcacccaacgattccgccaaggcctgcaggagtgttgtgcctggtccaacccagagtgtcaacaagcatgtctttcccaacattgttacaaagtgcaaggatagagtctcccaagtgtgcggctcctttcacctaccttgtctcctgggatcctcataacagccctgtgaggtgggaaagggggctattcttaaccccatttgagagat

SEQ ID NO: 36791 - DNA, 532 bp, Homo sapiens
tgtagctgcaattatgcttgtaaattttttgtctacttatgtaaacattttcacaggtttgtagctaatagaagaaaacaaagaatctgttcacctatttatgtaagtgaaagtgtaaatttaaaaatacatttagtcctgctgttaataacccttccattcttttttactttccctcagaccatatattgtgattatagtttctgctgaggaggatggaaactcaactccctttgaataatattagtaattctacttgatgttcagaaccggattgcaagagagtttaaagtgcccaacaccccttgtgggaaactttttagtatcttaagtgcatggaactactgctgcagccacaccgcctgaagcttcagccacactgaaacttcataacaaaacttaccctcttttttcctaatttctgtggtcattgcaatttgagcatgttactttgtttaacaaaaactcatttcttaaagattattttagtattgctgtacaaacagaataaaattatggcattattcagtga

SEQ ID NO: 36792 - DNA, 322 bp, Homo sapiens
gcctcccaaagcgctggtattacaggtgtgagccaccaagcccagcccaaggacttttttttttttggtaggtatgtctgcctgtttgttgggtatatcctattagggatgtacagtcagttaccctgttttaaagttgtgaaacaattctctagtggcgcatgcttgccaattggatatcactaagtttatttcattttgcattcaacctttaggcattagtgttgtttacctttttaatgtaagataattcgcatgattttaaggtcagatgtacaaaaccaggtataatcagaaatgtggggctttgacccgtcttctc

SEQ ID NO: 36793 - DNA, 439 bp, Homo sapiens
taatagataataatgatagcagtaatgtttgtcaagcattgtctataggccaggcactgttttattaactttacaagtattaattcacttaattcttataaagtcctctgaaacaggttctattattatctttattttacagatgaggaaactaaggcacagagagtttaagcaactcgctcagagtttgacagctaccaagcagcagagttgggacttgaacccaggccctgcagtctgactgcaaagccggtctcttctctgtcactatcttcacctatctctttgcctctctaggacccaacactgtgactcccaaaacattgcttaatctgggatatcatagactcaaaaattttaaaaacattttggagaattatatcaggttatcatttaaaaatttttgatgaataccccttattcttactatcctttcata

SEQ ID NO: 36794 - DNA, 403 bp, Homo sapiens
gtttgagggcaaccatggcattggaaagtgaggggggaattgtggaaagtagaaaacagaccccaaactctgggtgtcagctacctaaatctctgctaatggctgaatcacacgtgtggggcaggctccaggcagctaagctaaggatgaagtcattgtattgagatttgagctcccaccctagagtttatagtattaagtccaacttacactgtagataattaataattgccctctaaaaaaaaaaatcaacactctttagaggaatataatataatccagaattgccacagcataatgtatcctgtaatgtccaggatacagtttacaattgcttgacgttcaggaaaatgtgacctgttctcaattgaaaagatgatcagcggagactgactgtgagagg

SEQ ID NO: 36795 - DNA, 783 bp, Homo sapiens
cagctacattgtgtcagggcaaggtgaatgcctggccatgcctatagatgctacacagcctggagcagagttaaaggaaaccaacatggaaccttggcaatggagacagtaggactttccaattgatgatgactcatgttactctcacaaggtaaattgccaaaccacatcacccttatcagtcaaatgtatggggtctccaagaaatgaaaagccctatgcccacatcatccctccaggcacttggactttccctttacgtgggctaaaggggtcacttggatggaggccataaagctggtgaaatttagcaggacccttccaagtcacatcagcacctccagctatcagggaaagaaaatgaaaagtagatttctgtctgtggatcttatttgagagatgaggggcagacattctggcatcagaagagtaagagctctggatttcaagagttaaactcataatctcataccaggagactgtcctgagctcaaacctgtctcctgcaagcctcctcctttccccagagagttgtgatcaggattaaaggagagaattaaccaaaaaaaaaaaaaaaagatattttaggtaaatcattagcaatatgctgcttcttgctagagcctgcttccccaaattatatattcgatatgtgcttgggtagatgtcagtgccaatgcaggtgcagggaaggtgctccaacacacataaaaaagaaaagtcaccctttattccttcttattgcagactgtaaaatatttctcaactacacttgttataatg

SEQ ID NO: 36796 - DNA, 5612 bp, Homo sapiens
ggagtgggccaggccgccagccccgccagccccgccagccccgccagccccgcgatggcttgggccgcgctcctcggcctcctggccgcactgttgctgctgctgctactgagccgccgccgcacgcggcgacctggtgagcctcccctggacctgggcagcatcccctggttggggtatgccttggactttggaaaagatgctgccagcttcctcacgaggatgaaggagaagcacggtgacatctttactatactggttgggggcaggtatgtcaccgttctcctggacccacactcctacgacgcggtggtgtgggagcctcgcaccaggctcgacttccatgcctatgccatcttcctcatggagaggatttttgatgtgcagcttccacattacagccccagtgatgaaaaggccaggatgaaactgactcttctccacagagagctccaggcactcacagaagccatgtataccaacctccatgcagtgctgttgggcgatgctacagaagcaggcagtggctggcacgagatgggtctcctcgacttctcctacagcttcctgctcagagccggctacctgactctttacggaattgaggcgctgccacgcacccatgaaagccaggcccaggaccgcgtccactcagctgatgtcttccacacctttcgccagctcgaccggctgctccccaaactggcccgtggctccctgtcagtgggggacaaggaccacatgtgcagtgtcaaaagtcgcctgtggaagctgctatccccagccaggctggccaggcgggcccaccggagcaaatggctggagagttacctgctgcacctggaggagatgggtgtgtcagaggagatgcaggcacgggccctggtgctgcagctgtgggccacacaggggaatatgggtcccgctgccttctggctcctgctcttccttctcaagaatcctgaagccctggctgctgtccgcggagagctcgagagtatcctttggcaagcggagcagcctgtctcgcagacgaccactctcccacagaaggttctagacagcacacctgtgcttgatagcgtgctgagtgagagcctcaggcttacagctgcccccttcatcacccgcgaggttgtggtggacctggccatgcccatggcagacgggcgagaattcaacctgcgacgtggtgaccgcctcctcctcttccccttcctgagcccccagagagacccagaaatctacacagacccagaggtatttaaatacaaccgattcctgaaccctgacggatcagagaagaaagacttttacaaggatgggaaacggctgaagaattacaacatgccctggggggcggggcacaatcactgcctggggaggagttatgcggtcaacagcatcaaacaatttgtgttccttgtgctggtgcacttggacttggagctgatcaacgcagatgtggagatccctgagtttgacctcagcaggtacggcttcggtctgatgcagccggaacacgacgtgcccgtccgctaccgcatccgcccatgacacagggagcagatggatccacgtgctcgcctctgcccagcctgccccagcctgccccagcctcccagctttctgtgtgcacagttggcccgggtgcaggtgctagcattaccacttccctgcttttctcccagaaggctgggtccaggggagggaaaagctaagagggtgaacaaagaaaagacattgaaagctctatggattatccactgcaaagttttctttccaaaatcaggctttgtctgctcccaattcacctcgttactctcacctcgtgatatccacaaatgctattcagataaggcagaactaggagtcttcactgctctgcccccaactcccggaggtgtcaccttcctagttcttatgagctagcatggcccgggccttatccagtcaaagcggatgctggccacagaaaggccactcaggatgtcctttgtgtccattgatgtcattcagcagtcagtcccccaataatccttaaactagctaaaaccaaaggagtcccttagaagatctgcttccctggggccccatttgccagattgccccattgctcacactacttgagaaaatgcaggagagcttcccccaaggctgatgcattcccggtgcagaacaggggcaccctccaaacactgggctctgaggagtggagttctctgttctagagtgacaggcaccagatgggatgggctttctcagtgtcagcactcaggtagggagctaaggaagacacagcccagacaagatggctggaaggagccagccaggactccttagactgatcaagccaaaaaagaaggtgccgatttcatgcattctagtgcagaagccccaactgtgatcacgatccagtctgcagacgtgttttgtttggacttcacttaaaaaaatgccttagttgttatcatctttgggagagttcattcaaaatgtccagcttctcttgaaaacttggtatatctggccacactgggctcacattcccaagggtaactcttggccagagctgagtggcagccgcctcccttatgcaggacatgtgctctcggcttcaccagggttctgaccgggtctgcttctgcattcacagcgcctcctggacctgaaggcatctgagtgtgagaccctgttctaactcttagaagtgacattgtaagaggtggtggggaccagctaattggtccaacccagcctgagtgcaccaccctttgaacaaatgtatcagtgatgaaaatttgcctttgccccggcttgcctgtaatcccagcactttgggaggccgaggtgggcggatcacttgaggtcgggagttcaagaccagcctggccaacatggcgaaaccccgtctctactaaacataaaaaaattagtcaggtgtggcggtgcgtgcctgtaatcccagctattcaggaggctgaggcaccagaattgcttgaacccaggaggtggaggttgcagtgaactgagactgcgccacggcactccagcctgggcgacagagcaagactctgtctcaataaataaataattaattaaaataaaaaacagcttaaagagaaaaatggcctgcaaaccttttttatgatgctatttttattaatataaagtcctgtttattgagaccctttaaatgcctgcgagagaccctacagacagtatgtctactcctcacagcatctctatgaagagaaggagggttgtgcccacttcatagatgagaaaactgagaggtgaggtgacttgcctggggccacatagctcataagctgtagaactctgcaggcagatttactgtcccaggagcaaatgctggatgagcaactcctgttctttgggctcaaggggactggtgatgggacaattcttctcgacttcaggagctgacagagccagaggcacctaaacttgggtacatcttgtaagacacataatgaggtccctctagctttagctggagggagataaaagaaccccagacctctgaatgtcccagaggctagtctcttctcagagcagcactggggtttgggggcttccctgggcctcagcctccaggcacccccaggattcccagagagacgctgtgattggcaggaggcaggatatccccagggaaacccatcttcacgcctgggtgacccccactgccgcctccttcttaactctgcaggaaatcagagctggcagcctccagtgggaggacagagccggtttccgtggcaaccctcagctgcctcatcgtggctgggaagggaaggaagcaagccggcagaaatagctatggaaggtcttgcgcaggctgcaaccctggtgtgctgggcgaaaacccttatgactccccccttccaaatcaggctgggttgtcactgagactagattctcacctgccttcaaagaagggccaattccctttaaaggtcgcacctccttggaaccacagtcattagtgaattacactcaaggaaaagatgtgctcccaccaggcagctccagctgttacctgagatactgaagtgcagctcaggagacgattatttaaacctgcccttgttttaatcgttatttttctctttaaaaaaaatagaagctataaagaaaagagggagagatgagtgggttagctacctgctatgcgctagttaggaagttacctggatgccattgtatttcttcatcccttgcttaagaatcaaaattactggacatatgttaggaatactctttctttctttctttctttttaagctcagtggcaagaatgaaatactctttttttttttttttttttgagatggagtctcgctctgctgcccaggctagagtgcagtggcgtgatctcggctcactgcaagctctgcctcccgtgttcacaccattctcctgcctcagcctcctgagtagctgggactacaggcacccgccaccacacccggctaatttttggatttttagtagagatgggatttcaccgtattagccaggatggtcttgatctcctgagctcgtgatctgcccgcctcggcctcccaaagtgctgggattacaggtgtgagccaccgcgcccagccaagaataaaatactcttaagttgatctaatgaagtgtttccttaccattgtgattattgttactattatttgctatattttaatattgttgtttaccaaatattctcctttaaacagactcgctttttaaacttttttttttttttttggagacggagttccacgcttattgcccaggctggagtgcaatggcacgatctcagctcaccacaacctccacctccggggtttaagcaatgcttctgcctcagcttcccaagtagctgagattacaggcgcacaccaccacgcccaactgattttggtatttttagtagagacggggttcccccatgttggtcaggctggtctcgaactcctgaccctcgtgatttgcctgccttggcctcccaaagtgctaggattacaggcatgagccaccatgcccggcctaaactttgtttttaaaatgaactttttttccccccaattgctgccaatagtggataacatgtatcactcactgccaaaaatagaaagtgaccatgaaaaataaattcgctggggaagggggctccatgctggtgtggccaaggctgagagctctctcttctctgttacaaaacgagataagcaagtgttagaattgccttaaggccacactggcatctccctgaccttctccagggacagaagcaggagtaagtttctcatcccatgggcgaccagggccatctcctcccaccagtggcccccactcacagggagctggcaatgccctacctgcctgttctccagatggagaaacaggctctgagatttcacaggtcttgcccaaagtcattgattttgatgattaaaaagaataaacacagtgtttcctgagtagcagtgattgttatgccttgctattttaataaagattctattttcgtataacattgtcaagtggaaacatgctgaaatctattaaaccatctttgtttgtgaaaaaaaaaa

SEQ ID NO: 36797 - DNA, 3418 bp, Homo sapiens
ggagtgggccaggccgccagccccgccagccccgccagccccgccagccccgcgatggcttgggccgcgctcctcggcctcctggccgcactgttgctgctgctgctactgagccgccgccgcacgcggcgacctggtgagcctcccctggacctgggcagcatcccctggttggggtatgccttggactttggaaaagatgctgccagcttcctcacgaggatgaaggagaagcacggtgacatctttactatactggttgggggcaggtatgtcaccgttctcctggacccacactcctacgacgcggtggtgtgggagcctcgcaccaggctcgacttccatgcctatgccatcttcctcatggagaggatttttgatgtgcagcttccacattacagccccagtgatgaaaaggccaggatgaaactgactcttctccacagagagctccaggcactcacagaagccatgtataccaacctccatgcagtgctgttgggcgatgctacagaagcaggcagtggctggcacgagatgggtctcctcgacttctcctacagcttcctgctcagagccggctacctgactctttacggaattgaggcgctgccacgcacccatgaaagccaggcccaggaccgcgtccactcagctgatgtcttccacacctttcgccagctcgaccggctgctccccaaactggcccgtggctccctgtcagtgggggacaaggaccacatgtgcagtgtcaaaagtcgcctgtggaagctgctatccccagccaggctggccaggcgggcccaccggagcaaatggctggagagttacctgctgcacctggaggagatgggtgtgtcagaggagatgcaggcacgggccctggtgctgcagctgtgggccacacaggggaatatgggtcccgctgccttctggctcctgctcttccttctcaagaatcctgaagccctggctgctgtccgcggagagctcgagagtatcctttggcaagcggagcagcctgtctcgcagacgaccactctcccacagaaggttctagacagcacacctgtgcttgatagcgtgctgagtgagagcctcaggcttacagctgcccccttcatcacccgcgaggttgtggtggacctggccatgcccatggcagacgggcgagaattcaacctgcgacgtggtgaccgcctcctcctcttccccttcctgagcccccagagagacccagaaatctacacagacccagaggtatttaaatacaaccgattcctgaaccctgacggatcagagaagaaagacttttacaaggatgggaaacggctgaagaattacaacatgccctggggggcggggcacaatcactgcctggggaggagttatgcggtcaacagcatcaaacaatttgtgttccttgtgctggtgcacttggacttggagctgatcaacgcagatgtggagatccctgagtttgacctcagcaggtacggcttcggtctgatgcagccggaacacgacgtgcccgtccgctaccgcatccgcccatgacacagggagcagatggatccacgtgctcgcctctgcccagcctgccccagcctgccccagcctcccagctttctgtgtgcacagttggcccgggtgcaggtgctagcattaccacttccctgcttttctcccagaaggctgggtccaggggagggaaaagctaagagggtgaacaaagaaaagacattgaaagctctatggattatccactgcaaagttttctttccaaaatcaggctttgtctgctcccaattcacctcgttactctcacctcgtgatatccacaaatgctattcagataaggcagaactaggagtcttcactgctctgcccccaactcccggaggtgtcaccttcctagttcttatgagctagcatggcccgggccttatccagtcaaagcggatgctggccacagaaaggccactcaggatgtcctttgtgtccattgatgtcattcagcagtcagtcccccaataatccttaaactagctaaaaccaaaggagtcccttagaagatctgcttccctggggccccatttgccagattgccccattgctcacactacttgagaaaatgcaggagagcttcccccaaggctgatgcattcccggtgcagaacaggggcaccctccaaacactgggctctgaggagtggagttctctgttctagagtgacaggcaccagatgggatgggctttctcagtgtcagcactcaggtagggagctaaggaagacacagcccagacaagatggctggaaggagccagccaggactccttagactgatcaagccaaaaaagaaggtgccgatttcatgcattctagtgcagaagccccaactgtgatcacgatccagtctgcagacgtgttttgtttggacttcacttaaaaaaatgccttagttgttatcatctttgggagagttcattcaaaatgtccagcttctcttgaaaacttggtatatctggccacactgggctcacattcccaagggtaactcttggccagagctgagtggcagccgcctcccttatgcaggacatgtgctctcggcttcaccagggttctgaccgggtctgcttctgcattcacagcgcctcctggacctgaaggcatctgagtgtgagaccctgttctaactcttagaagtgacattgtaagaggtggtggggaccagctaattggtccaacccagcctgagtgcaccaccctttgaacaaatgtatcagtgatgaaaatttgcctttgccccggcttgcctgtactcccaaagtgctaggattacaggcatgagccaccatgcccggcctaaactttgtttttaaaatgaactttttttccccccaattgctgccaatagtggataacatgtatcactcactgccaaaaatagaaagtgaccatgaaaaataaattcgctggggaagggggctccatgctggtgtggccaaggctgagagctctctcttctctgttacaaaacgagataagcaagtgttagaattgccttaaggccacactggcatctccctgaccttctccagggacagaagcaggagtaagtttctcatcccatgggcgaccagggccatctcctcccaccagtggcccccactcacagggagctggcaatgccctacctgcctgttctccagatggagaaacaggctctgagatttcacaggtcttgcccaaagtcattgattttgatgattaaaaagaataaacacagtgtttcctgagtagcagtgattgttatgccttgctattttaataaagattctattttcgtataacattgtcaagtggaaacatgctgaaatctattaaaccatctttgtttgtgaaaaaaaaaa

SEQ ID NO: 36798 - DNA, 3503 bp, Homo sapiens
ggagtgggccaggccgccagccccgccagccccgccagccccgccagccccgcgatggcttgggccgcgctcctcggcctcctggccgcactgttgctgctgctgctactgagccgccgccgcacgcggcgacctggtgagcctcccctggacctgggcagcatcccctggttggggtatgccttggactttggaaaagatgctgccagcttcctcacgaggatgaaggagaagcacggtgacatctttactatactggttgggggcaggtatgtcaccgttctcctggacccacactcctacgacgcggtggtgtgggagcctcgcaccaggctcgacttccatgcctatgccatcttcctcatggagaggatttttgatgtgcagcttccacattacagccccagtgatgaaaaggccaggatgaaactgactcttctccacagagagctccaggcactcacagaagccatgtataccaacctccatgcagtgctgttgggcgatgctacagaagcaggcagtggctggcacgagatgggtctcctcgacttctcctacagcttcctgctcagagccggctacctgactctttacggaattgaggcgctgccacgcacccatgaaagccaggcccaggaccgcgtccactcagctgatgtcttccacacctttcgccagctcgaccggctgctccccaaactggcccgtggctccctgtcagtgggggacaaggaccacatgtgcagtgtcaaaagtcgcctgtggaagctgctatccccagccaggctggccaggcgggcccaccggagcaaatggctggagagttacctgctgcacctggaggagatgggtgtgtcagaggagatgcaggcacgggccctggtgctgcagctgtgggccacacaggggaatatgggtcccgctgccttctggctcctgctcttccttctcaagaatcctgaagccctggctgctgtccgcggagagctcgagagtatcctttggcaagcggagcagcctgtctcgcagacgaccactctcccacagaaggttctagacagcacacctgtgcttgatagcgtgctgagtgagagcctcaggcttacagctgcccccttcatcacccgcgaggttgtggtggacctggccatgcccatggcagacgggcgagaattcaacctgcgacgtggtgaccgcctcctcctcttccccttcctgagcccccagagagacccagaaatctacacagacccagaggtatttaaatacaaccgattcctgaaccctgacggatcagagaagaaagacttttacaaggatgggaaacggctgaagaattacaacatgccctggggggcggggcacaatcactgcctggggaggagttatgcggtcaacagcatcaaacaatttgtgttccttgtgctggtgcacttggacttggagctgatcaacgcagatgtggagatccctgagtttgacctcagcaggtacggcttcggtctgatgcagccggaacacgacgtgcccgtccgctaccgcatccgcccatgacacagggagcagatggatccacgtgctcgcctctgcccagcctgccccagcctgccccagcctcccagctttctgtgtgcacagttggcccgggtgcaggtgctagcattaccacttccctgcttttctcccagaaggctgggtccaggggagggaaaagctaagagggtgaacaaagaaaagacattgaaagctctatggattatccactgcaaagttttctttccaaaatcaggctttgtctgctcccaattcacctcgttactctcacctcgtgatatccacaaatgctattcagataaggcagaactaggagtcttcactgctctgcccccaactcccggaggtgtcaccttcctagttcttatgagctagcatggcccgggccttatccagtcaaagcggatgctggccacagaaaggccactcaggatgtcctttgtgtccattgatgtcattcagcagtcagtcccccaataatccttaaactagctaaaaccaaaggagtcccttagaagatctgcttccctggggccccatttgccagattgccccattgctcacactacttgagaaaatgcaggagagcttcccccaaggctgatgcattcccggtgcagaacaggggcaccctccaaacactgggctctgaggagtggagttctctgttctagagtgacaggcaccagatgggatgggctttctcagtgtcagcactcaggtagggagctaaggaagacacagcccagacaagatggctggaaggagccagccaggactccttagactgatcaagccaaaaaagaaggtgccgatttcatgcattctagtgcagaagccccaactgtgatcacgatccagtctgcagacgtgttttgtttggacttcacttaaaaaaatgccttagttgttatcatctttgggagagttcattcaaaatgtccagcttctcttgaaaacttggtatatctggccacactgggctcacattcccaagggtaactcttggccagagctgagtggcagccgcctcccttatgcaggacatgtgctctcggcttcaccagggttctgaccgggtctgcttctgcattcacagcgcctcctggacctgaaggcatctgagtgtgagaccctgttctaactcttagaagtgacattgtaagaggtggtggggaccagctaattggtccaacccagcctgagtgcaccaccctttgaacaaatgtatcagtgatgaaaatttgcctttgccccggcttgcctgtaatcccagcactttgggaggccgaggtgggcggatcacttgaggctggtctcgaactcctgaccctcgtgatttgcctgccttggcctcccaaagtgctaggattacaggcatgagccaccatgcccggcctaaactttgtttttaaaatgaactttttttccccccaattgctgccaatagtggataacatgtatcactcactgccaaaaatagaaagtgaccatgaaaaataaattcgctggggaagggggctccatgctggtgtggccaaggctgagagctctctcttctctgttacaaaacgagataagcaagtgttagaattgccttaaggccacactggcatctccctgaccttctccagggacagaagcaggagtaagtttctcatcccatgggcgaccagggccatctcctcccaccagtggcccccactcacagggagctggcaatgccctacctgcctgttctccagatggagaaacaggctctgagatttcacaggtcttgcccaaagtcattgattttgatgattaaaaagaataaacacagtgtttcctgagtagcagtgattgttatgccttgctattttaataaagattctattttcgtataacattgtcaagtggaaacatgctgaaatctattaaaccatctttgtttgtgaaaaaaaaaa

SEQ ID NO: 36799 - DNA, 1029 bp, Homo sapiens
cttataaaggtctttgcaaaaatgcttcatgtttacaatcaaactgtaattcattgaagtcattcctgcaacatctgagataatgtaaaccaactggtttgttttatgactacctaaattgattctgagaaaattgccctgaagaattgaaaagaataaatagttaaagcatcactttttatcacacctctctcttactaaagagcttacaatgattctccattacctgcaggcttataactaaatattccatagtaaaagagctgtacttctgagacttgtagagcattccctcataaactatttgtagcattagccataggtttacatattactaactttggttggcaagcatcttcatccatttctgctgctacaacaaaatatcttagactgggtcatttatatataatacaaatttatatctctcagttctggaggctgagaagtctaagatcaaggcactgctagacttgcttgctctctgcttccaagatagcgtcttgtttttgtgtcctgcagagaggatgaatgttgtgtcctcacatggcagaagtggcaaaaaagccactttcatgccttttgtaaggcactaatcccattcatgagggcagaactctcatgacttaatcatctcctaaaggccccacctcttattcccattgcactggaaactcagtttcagcatgaattttgaagagacaaaaacattcaaaccatagcagcaagtatctagaggatttgtgaaaggaggcatagaaagaggcttggttgaatgagactgagaaaggtgtgcatgccgtagagataatgtgtgatgctactggggtgttcctagtaccaggtgatacatgtttgcctgggaaagtaatgacaggactaaaaatgatgatagacattacagaacttctttcatttattcaaaaataggccaggcatcgtggctcacacctgtaatcccagcaatttgggaggctgagatgggaggatcacttgaggtcaggagttcaagaccagcctgactaacat

SEQ ID NO: 36800 - DNA, 332 bp, Homo sapiens
gttcaggtagccttctccaggagttccaccctcatccccaagccataagtaatcctttcctcctttgagttccagtagcactctttatacctctctttgtatttataaactgggccttgaaacataattatttgtatttcttttccctaataaaatacgagtacctaagcacaaactgataaacattcaggttaaactcaacggatatgttattgaatatctgctttgtccaaagcactgtgcctaaagctatgcaaacatgagtattacaccgctcttgtctttgtcacgttgttcctcatagtgcctggtctccctcttgacatttttct

SEQ ID NO: 36801 - DNA, 960 bp, Homo sapiens
aagttagcagtagtgctagcacctcagggcttgaaaaaacaaaaatacaaaaatattgagtgtctcctgcaacccaggcacagggttaaggactttaggcaagattattctccccatttcacagacgatgacatggagatttgcttataacagtctctggccagggacctcgctaagaaatattggcaatatgaggggaaattcctgtgaaactgtgatcctttcctctgaggggcctccttaacagctgtccagacggcgtcgccagctgcccaggcagttcctatccctttcggagctccagcctgcccctcctgacgctctcagagtctggccttctgctgggccccgggtctctcactggcagaatggagttctcggagctgatccatacgggctgagcccaagcagagtttctacggggcccggaggcgcccccgcttcgcggcacggtgtgagtcaccgtccaccacctgctcctgtcgccaggcccgcgtcctctccggacctgtggctgctgctgttgcgtagcgtcgactccttcgagaagcagtgagacgtggcggggtgggggagggtccccggggttggggagcgcgcggcttggcggagtagggggcacggccagcgcagtcagagctggcgccctcctgcgtaagcccaatccgggaaactcgttgcccctctcctgggaaaggaacgtccctccccagggttgcgagtgactcgggcaccatcaccctgtgctgtaaagacctgcgagtgctgcagctggaaatagagggcgcggaagcgacgctgggcatcgcccgctccatcgaggaccaacgcgtggcggctgagcgaggtgaacgaggacttcagcttgtgccccagatacccccgtgcggtgatcgtgccatacttggtggacgatgatgccctggcgcgcagcgcccgcttccgtcagggaggtcgctt

SEQ ID NO: 36802 - DNA, 488 bp, Homo sapiens
ctctgctcagcgtcctgacctgtcttcctcctcctcaggcctgtttctgcgctggacctgctcacctgagcctgcagaagctgcatgggggaagagtgtggcaaatagtgacaggaagggagaagacagaagcctctcagccaactgcttcagccgagcccctattctaagcactggctccttggatagcagctgagatgttcctgaaacctctgcaggccccttaggacctttacaccttggatgagggtgcctgcaacccaggttagccaaaagtactgagggtcttaagtttgaagtgtccaaagtatagggaggtctcaataataaaagtctccatgatcagtccgttcgcatgttaacatgcgaacggactgatctcaacacctcttcaaggacaacttcgcacctctcatgttcgtcacaaatattggactacctacctgggacactggggaactcacgatcagtccgttcgcaaattggtc

SEQ ID NO: 36803 - DNA, 2284 bp, Homo sapiens
aagttagcagtagtgctagcacctcagggcttgaaaaaacaaaaatacaaaaatattgagtgtctcctgcaacccaggcacagggttaaggactttaggcaagattattctccccatttcacagacgatgacatggagatttgcttataacagtctctggccagggacctcgctaagaaatattggcaatatgaggggaaattcctgtgaaactgtgatcctttcctctgaggggcctccttaacagctgtccagacggcgtcgccagctgcccaggcagttcctatccctttcggagctccagcctgcccctcctgacgctctcagagtctggccttctgctgggccccgggtctctcactggcagaatggagttctcggagctgatccatacgggctgagcccaagcagagtttctacggggcccggaggcgcccccgcttcgcggcacggtgtgagtcaccgtccaccacctgctcctgtcgccaggcccgcgtcctctccggacctgtggctgctgctgttgcgtagcgtcgactccttcgagaagcagtgagacgtggcggggtgggggagggtccccggggttggggagcgcgcggcttggcggagtagggggcacggccagcgcagtcagagctggcgccctcctgcgtaagcccaatccgggaaactcgttgcccctctcctgggaaaggaacgtccctccccagggttgcgagtgactcgggcaccatcaccctgtgctgtaaagacctgcgagtgctgcagctggaaatagagggcgcggaagcgacgctgggcatcgcccgctccatcgaggtgtgccgagggagctcccgagccctttaagctctccctgtctcgcgtagaggggaataaaaaggtgcttctgttcaaagaggctccgcagccgcagctaaatggcagggggatgcagggtggtccggggtacttggagaggccgaagctgaagctacaggactgaggggctggaaagggcgcgggcgagacaattccgaccctccccagagcccctgacttccttctccggacgctgtcctccctggaatcagtcatcacctccttccctttattctaccgtcccaagggcctgagattgggcgactcctggcacttcctcccgcccgaactctactgcaagagagtagctcgcgaagtgggcgcggtcgtaggggcccgggaaggtggaagcgccgggcctggaagaggcgcggggacagggcactccctgggtgccctagacctggcctctctcctccctgcgctgcagaccaacgcgtggcggctgagcgaggttctgctacgctccagccagcccctaactggtccccagaagcggcgctgctacagggaccaggagctgctgcgaactgcgctggcgggggctcgtccttgggcgcggggcttcatcatggacacgctctcggcccaggccgcgaaacaagcccgcgtgactggcggaggcacagagaccaaggccgcttaacctggctggttgcactggtccctggagagagggcgtcccctgcaggagagcttcatgcgcctggtggaggcctgtggggactcggagcaaagcatggacaactggctgagtcggctggacggctgccgctgactgtaacatgtaaagcaggcactgagcaccacctgcctggcagtccagggcatggagaggcctggtacatggggctgaaggcacagacagcaccctgcttgtgacttcactggcccaactcatcctggaccccttgagcaagaccatggctggattccaggaactggtggagtggaagtggatccaggaaaatgccgtgtgaagggaggactcagatgcactccctgtggtctgggctcaaccagccaaaagagcaacaaagactccagaacccactctacctcctcaatcccttggccatctgtggagccccagagcctgcggctgtggcaaggcctgtttctgcgctggacctgctcacctgagcctgcagaagctgcatgggggaagagtgtggcaaatagtgacaggaagggagaagacagaagcctctcagccaactgcttcagccgagcccctattctaagcactggctccttggatagcagctgagatgttcctgaaacctctgcaggccccttaggacctttacaccttggatgagggtgcctgcaacccaggttagccaaaagtactgagggtcttaagtttgaagtgtccaaagtatagggaggtctcaataataaaagtctccatgatcag

SEQ ID NO: 36804 - DNA, 1851 bp, Homo sapiens
aagttagcagtagtgctagcacctcagggcttgaaaaaacaaaaatacaaaaatattgagtgtctcctgcaacccaggcacagggttaaggactttaggcaagattattctccccatttcacagacgatgacatggagatttgcttataacagtctctggccagggacctcgctaagaaatattggcaatatgaggggaaattcctgtgaaactgtgatcctttcctctgaggggcctccttaacagctgtccagacggcgtcgccagctgcccaggcagttcctatccctttcggagctccagcctgcccctcctgacgctctcagagtctggccttctgctgggccccgggtctctcactggcagaatggagttctcggagctgatccatacgggctgagcccaagcagagtttctacggggcccggaggcgcccccgcttcgcggcacggtgtgagtcaccgtccaccacctgctcctgtcgccaggcccgcgtcctctccggacctgtggctgctgctgttgcgtagcgtcgactccttcgagaagcagaacgtccctccccagggttgcgagtgactcgggcaccatcaccctgtgctgtaaagacctgcgagtgctgcagctggaaatagagggcgcggaagcgacgctgggcatcgcccgctccatcgaggggcctgagattgggcgactcctggcacttcctcccgcccgaactctactgcaagagagtagctcgcgaagtgggcgcggtcgtaggggcccgggaaggtggaagcgccgggcctggaagaggcgcggggacagggcactccctgggtgccctagacctggcctctctcctccctgcgctgcagaccaacgcgtggcggctgagcgaggttctgctacgctccagccagcccctaactggtccccagaagcggcgctgctacagggaccaggagctgctgcgaactgcgctggcgggggctcgtccttgggcgcggggcttcatcatggacacgctctcggcccaggccgcgaaacaagcccgcgtgactggcggaggcacagagaccaaggccgcttaacctggctggttgcactggtccctggagagagggcgtcccctgcaggagagcttcatgcgcctggtggaggcctgtggggactcggagcaaagcatggacaactggctgagtcggctggacggctgccgctgactgtaacatgtaaagcaggcactgagcaccacctgcctggcagtccagggcatggagaggcctggtacatggggctgaaggcacagacagcaccctgcttgtgacttcactggcccaactcatcctggaccccttgagcaagaccatggctggattccaggaactggtggagtggaagtggatccaggaaaatgccgtgtgaagggaggactcagatgcactccctgtggtctgggctcaaccagccaaaagagcaacaaagactccagaacccactctacctcctcaatcccttggccatctgtggagccccagagcctgcggctgtggcaaggcctgtttctgcgctggacctgctcacctgagcctgcagaagctgcatgggggaagagtgtggcaaatagtgacaggaagggagaagacagaagcctctcagccaactgcttcagccgagcccctattctaagcactggctccttggatagcagctgagatgttcctgaaacctctgcaggccccttaggacctttacaccttggatgagggtgcctgcaacccaggttagccaaaagtactgagggtcttaagtttgaagtgtccaaagtatagggaggtctcaataataaaagtctccatgatcag

SEQ ID NO: 36805 - DNA, 1295 bp, Homo sapiens
caattcgcggcgtagccgctgccccaactcctgccccattctggtcccgcccctctcccgccttttcgctgggaagggtatcacctttctctggccccgcccctgacggttccgggccccgcgaagcttagtcccttctttgtcaagccaggacccgcccacggtctattcatagggtcccaaaccactttggccacaacacccccagactggtccgaagcctcgtgagttcgccctggtcgttgcactccagcctgtcgctgtgcagacctggcttagaggacccctaaggctgaggggtcacttccagaactgagtccggtccgcaggttctgctacgctccagccagcccctaactggtccccagaagcggcgctgctacagggaccaggagctgctgcgaactgcgctggcgggggctcgtccttgggcgcggggcttcatcatggacacgctctcggcccaggccgcgaaacaagcccgcgtgactggcggaggcacagagaccaaggccgcttaacctggctggttgcactggtccctggagagagggcgtcccctgcaggagagcttcatgcgcctggtggaggcctgtggggactcggagcaaagcatggacaactggctgagtcggctggacggctgccgctgactgtaacatgtaaagcaggcactgagcaccacctgcctggcagtccagggcatggagaggcctggtacatggggctgaaggcacagacagcaccctgcttgtgacttcactggcccaactcatcctggaccccttgagcaagaccatggctggattccaggaactggtggagtggaagtggatccaggaaaatgccgtgtgaagggaggactcagatgcactccctgtggtctgggctcaaccagccaaaagagcaacaaagactccagaacccactctacctcctcaatcccttggccatctgtggagccccagagcctgcggctgtggcaaggcctgtttctgcgctggacctgctcacctgagcctgcagaagctgcatgggggaagagtgtggcaaatagtgacaggaagggagaagacagaagcctctcagccaactgcttcagccgagcccctattctaagcactggctccttggatagcagctgagatgttcctgaaacctctgcaggccccttaggacctttacaccttggatgagggtgcctgcaacccaggttagccaaaagtactgagggtcttaagtttgaagtgtccaaagtatagggaggtctcaataataaaagtctccatgatcag

SEQ ID NO: 36806 - DNA, 1163 bp, Homo sapiens
caattcgcggcgtagccgctgccccaactcctgccccattctggtcccgcccctctcccgccttttcgctgggaagggtatcacctttctctggccccgcccctgacggttccgggccccgcgaagcttagtcccttctttgtcaagccaggacccgcccacggtctattcatagggtcccaaaccactttggccacaacacccccagactggtccgaagcctcgtgagttcgccctggtcgttgcactccagcctgtcgctgtgcagacctggcttagaggacccctaaggctgaggggtcacttccagaactgagtccggtccgcaggttctgctacgctccagccagcccctaactggtccccagaagcggcgctgctacagggaccaggagctgctgcgaactgcgctggcgggggctcgtccttgggcgcggggcttcatcatggacacgctctcggcccaggccgcgaaacaagcccgcgtgactggcggaggcacagagaccaaggccgcttaacctggctggttgcactggtccctggagagagggcgtcccctgcaggagagcttcatgcgcctggtggaggcctgtggggactcggagcaaagcatggacaactggctgagtcggctggacggctgccgctgactgtaacatgtaaagcaggcactgagcaccacctgcctggcagtccagggcatggagagatgccgtgtgaagggaggactcagatgcactccctgtggtctgggctcaaccagccaaaagagcaacaaagactccagaacccactctacctcctcaatcccttggccatctgtggagccccagagcctgcggctgtggcaaggcctgtttctgcgctggacctgctcacctgagcctgcagaagctgcatgggggaagagtgtggcaaatagtgacaggaagggagaagacagaagcctctcagccaactgcttcagccgagcccctattctaagcactggctccttggatagcagctgagatgttcctgaaacctctgcaggccccttaggacctttacaccttggatgagggtgcctgcaacccaggttagccaaaagtactgagggtcttaagtttgaagtgtccaaagtatagggaggtctcaataataaaagtctccatgatcag

SEQ ID NO: 36807 - DNA, 1431 bp, Homo sapiens
aagttagcagtagtgctagcacctcagggcttgaaaaaacaaaaatacaaaaatattgagtgtctcctgcaacccaggcacagggttaaggactttaggcaagattattctccccatttcacagacgatgacatggagatttgcttataacagtctctggccagggacctcgctaagaaatattggcaatatgaggggaaattcctgtgaaactgtgatcctttcctctgaggggcctccttaacagctgtccagacggcgtcgccagctgcccaggcagttcctatccctttcggagctccagcctgcccctcctgacgctctcagagtctggccttctgctgggccccgggtctctcactggcagaatggagttctcggagctgatccatacgggctgagcccaagcagagtttctacggggcccggaggcgcccccgcttcgcggcacggtgtgagtcaccgtccaccacctgctcctgtcgccaggcccgcgtcctctccggacctgtggctgctgctgttgcgtagcgtcgactccttcgagaagcagtgagacgtggcggggtgggggagggtccccggggttggggagcgcgcggcttggcggagtagggggcacggccagcgcagtcagagctggcgccctcctgcgtaagcccaatccgggaaactcgttgcccctctcctgggaaaggaacgtccctccccagggttgcgagtgactcgggcaccatcaccctgtgctgtaaagacctgcgagtgctgcagctggaaatagagggcgcggaagcgacgctgggcatcgcccgctccatcgaggtgtgccgagggagctcccgagccctttaagctctccctgtctcgcgtagaggggaataaaaaggtgcttctgttcaaagaggctccgcagccgcagctaaatggcagggggatgcagggtggtccggggtacttggagaggccgaagctgaagctacaggactgaggggctggaaagggcgcgggcgagacaattccgaccctccccagagcccctgacttccttctccggacgctgtcctccctggaatcagtcatcacctccttccctttattctaccgtcccaagggcctgagattgggcgactcctggcacttcctcccgcccgaactctactgcaagagagtagctcgcgaagtgggcgcggtcgtaggggcccgggaaggtggaagcgccgggcctggaagaggcgcggggacagggcactccctgggtgccctagacctggcctctctcctccctgcgctgcagaccaacgcgtggcggctgagcgaggtgaacgaggacttcagcttgtgccccagatacccccgtgcggtgatcgtgccatacttggtggacgatgatgccctggcgcgcagcgcccgcttccgtcagggaggtcgctt

SEQ ID NO: 36808 - DNA, 1706 bp, Homo sapiens
aagttagcagtagtgctagcacctcagggcttgaaaaaacaaaaatacaaaaatattgagtgtctcctgcaacccaggcacagggttaaggactttaggcaagattattctccccatttcacagacgatgacatggagatttgcttataacagtctctggccagggacctcgctaagaaatattggcaatatgaggggaaattcctgtgaaactgtgatcctttcctctgaggggcctccttaacagctgtccagacggcgtcgccagctgcccaggcagttcctatccctttcggagctccagcctgcccctcctgacgctctcagagtctggccttctgctgggccccgggtctctcactggcagaatggagttctcggagctgatccatacgggctgagcccaagcagagtttctacggggcccggaggcgcccccgcttcgcggcacggtgtgagtcaccgtccaccacctgctcctgtcgccaggcccgcgtcctctccggacctgtggctgctgctgttgcgtagcgtcgactccttcgagaagcagtgagacgtggcggggtgggggagggtccccggggttggggagcgcgcggcttggcggagtagggggcacggccagcgcagtcagagctggcgccctcctgcgtaagcccaatccgggaaactcgttgcccctctcctgggaaaggaacgtccctccccagggttgcgagtgactcgggcaccatcaccctgtgctgtaaagacctgcgagtgctgcagctggaaatagagggcgcggaagcgacgctgggcatcgcccgctccatcgaggtgtgccgagggagctcccgagccctttaagctctccctgtctcgcgtagaggggaataaaaaggtgcttctgttcaaagaggctccgcagccgcagctaaatggcagggggatgcagggtggtccggggtacttggagaggccgaagctgaagctacaggactgaggggctggaaagggcgcgggcgagacaattccgaccctccccagagcccctgacttccttctccggacgctgtcctccctggaatcagtcatcacctccttccctttattctaccgtcccaagggcctgagattgggcgactcctggcacttcctcccgcccgaactctactgcaagagagtagctcgcgaagtgggcgcggtcgtaggggcccgggaaggtggaagcgccgggcctggaagaggcgcggggacagggcactccctgggtgccctagacctggcctctctcctccctgcgctgcagaccaacgcgtggcggctgagcgaggttctgctacgctccagccagcccctaactggtccccagaagcggcgctgctacagggaccaggagctgctgcgaactgcgctggcgggggctcgtccttgggcgcggggcttcatcatggacacgctctcggcccaggccgcgaaacaagcccgcgtgactggcggaggcacagagaccaaggccgcttaacctggctggttgcactggtccctggagagcactgagcacaggggctgccacagtggccggctcagacatggcagagatcagcagagaatgggcaatcaggctcccctgagatgagcagcagcgcagaggaggtgcccctctcttactacaccaacttcagggcttgagctggaaaagatgaccagactcccaccgc

SEQ ID NO: 36809 - DNA, 1147 bp, Homo sapiens
aagttagcagtagtgctagcacctcagggcttgaaaaaacaaaaatacaaaaatattgagtgtctcctgcaacccaggcacagggttaaggactttaggcaagattattctccccatttcacagacgatgacatggagatttgcttataacagtctctggccagggacctcgctaagaaatattggcaatatgaggggaaattcctgtgaaactgtgatcctttcctctgaggggcctccttaacagctgtccagacggcgtcgccagctgcccaggcagttcctatccctttcggagctccagcctgcccctcctgacgctctcagagtctggccttctgctgggccccgggtctctcactggcagaatggagttctcggagctgatccatacgggctgagcccaagcagagtttctacggggcccggaggcgcccccgcttcgcggcacggtgtgagtcaccgtccaccacctgctcctgtcgccaggcccgcgtcctctccggacctgtggctgctgctgttgcgtagcgtcgactccttcgagaagcaggcctgagattgggcgactcctggcacttcctcccgcccgaactctactgcaagagagtagctcgcgaagtgggcgcggtcgtaggggcccgggaaggtggaagcgccgggcctggaagaggcgcggggacagggcactccctgggtgccctagacctggcctctctcctccctgcgctgcagaccaacgcgtggcggctgagcgaggttctgctacgctccagccagcccctaactggtccccagaagcggcgctgctacagggaccaggagctgctgcgaactgcgctggcgggggctcgtccttgggcgcggggcttcatcatggacacgctctcggcccaggccgcgaaacaagcccgcgtgactggcggaggcacagagaccaaggccgcttaacctggctggttgcactggtccctggagagcactgagcacaggggctgccacagtggccggctcagacatggcagagatcagcagagaatgggcaatcaggctcccctgagatgagcagcagcgcagaggaggtgcccctctcttactacaccaacttcagggcttgagctggaaaagatgaccagactcccaccgc

SEQ ID NO: 36810 - DNA, 174 bp, Homo sapiens
ggtcgacatcatcatcatcatggatttgctggtgcagtattttctgtgttttctttttaatttacagcctttcttattttgatatttttttaatgttgtggatgaatgccagctttcagacagagcccacttagcttgtccacatgtccccgtacatcgttagaagcttgaatt

SEQ ID NO: 36811 - DNA, 2139 bp, Homo sapiens
agcgtgtgggagcgagcgcgagaaatgcagaggctgcagcggcggcggcggcggcagtagcggcagcggcgacgacggcggcggcagcgctccaactggctcctcgctccgggctccgccgtcgagccgggagagagcctccgccagcggccaggcaccagccagacgacgccagcgaccccggcctctcggcggcaccgcgctaactcaggggctgcataggcacccagagccgaactccaagatgggaggcaagctcagcaagaagaagaagggctacaatgtgaacgacgagaaagccaaggagaaagacaagaaggccgagggcgcggcgacggaagaggaggggaccccgaaggagagtgagccccaggcggccgcagagcccgccgaggccaaggagggcaaggagaagcccgaccaggacgccgagggcaaggccgaggagaaggagggcgagaaggacgcggcggctgccaaggaggaggccccgaaggcggagcccgagaagacggagggcgcggcagaggccaaggctgagcccccgaaggcgcccgagcaggagcaggcggcccccggccccgctgcgggcggcgaggcccccaaagctgctgaggccgccgcggccccggccgagagcgcggcccctgccgccggggaggagcccagcaaggaggaaggggaacccaaaaagactgaggcgcccgcagctcctgccgcccaggagaccaaaagtgacggggccccagcttcagactcaaaacccggcagctcggaggctgccccctcttccaaggagacccccgcagccacggaagcgcctagttccacacccaaggcccagggccccgcagcctctgcagaagagcccaagccggtggaggccccggcagctaattccgaccaaaccgtaaccgtgaaagagtgacaaggacagcctataggaaaaacaataccacttaaaacaatctcctctctctctctctctctctctctctatctctctctctatctcctctctctctctcctctcctatctctcctctctctctctcctatactaacttgtttcaaattggaagtaatgatatgtattgcccaaggaaaaatacaggatgttgtcccatcaagggagggagggggtgggagaatccaaatagtatttttgtggggaaatatctaatataccttcagtcaactttaccaagaagtcctggatttccaagatccgcgtctgaaagtgcagtacatcgtttgtacctgaaactgccgccacatgcactcctccaccgctgagagttgaatagcttttcttctgcaatgggagttgggagtgatgcgtttgattctgcccacagggcctgtgccaaggcaatcagatctttatgagagcagtattttctgtgttttctttttaatttacagcctttcttattttgatatttttttaatgttgtggatgaatgccagctttcagacagagcccacttagcttgtccacatggatctcaatgccaatcctccattcttcctctccagatatttttgggagtgacaaacattctctcatcctacttagcctacctagatttctcatgacgagttaatgcatgtccgtggttgggtgcacctgtagttctgtttattggtcagtggaaatgaaaaaaaaaaaaaaaaaaaaaaggtctggcgtccattggcagtcccagtttctcttccattcctggtgtccacagacaccacaaccactcattgcaatgtggacaaaaaaaacaaaaaaaaaaacccacaaacaatctgttcccaggggctgtgccttggaacattttatttgtcacggggtataaaggggggccacccggctattcaaggtttcaaccacttcacacaggcaaaaacaaacaacaaacctctcccacaggcggcgggaatccgcgggccaataaggggggcgcgaagagacccctctccgaggggggggggcgcccggagacccacacgctttggtgctcccccttataaaaagagagcgggataaaattccagccaccctctggggggataacaccgcgggggcccaaaaccgtgcaccccgtgggttacacaatcgtgctaatccgggccaccaaaatttccaac

SEQ ID NO: 36812 - DNA, 1982 bp, Homo sapiens
agcgtgtgggagcgagcgcgagaaatgcagaggctgcagcggcggcggcggcggcagtagcggcagcggcgacgacggcggcggcagcgctccaactggctcctcgctccgggctccgccgtcgagccgggagagagcctccgccagcggccaggcaccagccagacgacgccagcgaccccggcctctcggcggcaccgcgctaactcaggggctgcataggcacccagagccgaactccaagatgggaggcaagctcagcaagaagaagaagggctacaatgtgaacgacgagaaagccaaggagaaagacaagaaggccgagggcgcggcgacggaagaggaggggaccccgaaggagagtgagccccaggcggccgcagagcccgccgaggccaaggagggcaaggagaagcccgaccaggacgccgagggcaaggccgaggagaaggagggcgagaaggacgcggcggctgccaaggaggaggccccgaaggcggagcccgagaagacggagggcgcggcagaggccaaggctgagcccccgaaggcgcccgagcaggagcaggcggcccccggccccgctgcgggcggcgaggcccccaaagctgctgaggccgccgcggccccggccgagagcgcggcccctgccgccggggaggagcccagcaaggaggaaggggaacccaaaaagactgaggcgcccgcagctcctgccgcccaggagaccaaaagtgacggggccccagcttcagactcaaaacccggcagctcggaggctgccccctcttccaaggagacccccgcagccacggaagcgcctagttccacacccaaggcccagggccccgcagcctctgcagaagagcccaagccggtggaggccccggcagctaattccgaccaaaccgtaaccgtgaaagagtgacaaggacagcctataggaaaaacaataccacttaaaacaatctcctctctctctctctctctctctctctatctctctctctatctcctctctctctctcctctcctatctctcctctctctctctcctatactaacttgtttcaaattggaagtaatgatatgtattgcccaaggaaaaatacaggatgttgtcccatcaagggagggagggggtgggagaatccaaatagtatttttgtggggaaatatctaatataccttcagtcaactttaccaagaagtcctggatttccaagatccgcgtctgaaagtgcagtacatcgtttgtacctgaaactgccgccacatgcactcctccaccgctgagagttgaatagcttttcttctgcaatgggagttgggagtgatgcgtttgattctgcccacagggcctgtgccaaggcaatcagatctttatgagagcagtattttctgtgttttctttttaatttacagcctttcttattttgatatttttttaatgttgtggatgaatgccagctttcagacagagcccacttagcttgtccacatggatctcaatgccaatcctccattcttcctctccagatatttttgggagtgacaaacattctctcatcctacttagcctacctagatttctcatgacgagttaatgcatgtccgtggttgggtgcacctgtagttctgtttattggtcagtggaaatgaaaaaaaaaaaaaaaaaaaaaatttttgggcggcctgggcccgagaaaaaagtttctaggaacaattccgtttggggcgcgcgggccccagtaagtgtaagtgtgaccatgggccaatagccgtgtttcccaaaggaagaactccgtggcacggaactaagcgtggttctgtggtttcccttcccccaaattaaaaaagcgccccgggggaacaccggagcgttttggaacacacatcccagaagggaagtccggagggcacagtaccggcgctctatcacaggggtcccaagcgagctcgattacaattagccgccagga

SEQ ID NO: 36813 - DNA, 2159 bp, Homo sapiens
  misc_feature (124)..(124): n is a, c, g, or t
tgtttggcatcccactgaccccacatctgtttcgctgctaatgctctgctgccagaactatccaagctgcctccctctgggcccagggactatcgctgaagagatgacatctctgtatgttacncaggctggactggaactctgggctcaagccatcctcctgcctcacctcctgaagtgttgggattacaggaaagggtcccaatccagaccccaagggaggattcttggatctcatgcaagaaagaattcaggaactccaagatgggaggcaagctcagcaagaagaagaagggctacaatgtgaacgacgagaaagccaaggagaaagacaagaaggccgagggcgcggcgacggaagaggaggggaccccgaaggagagtgagccccaggcggccgcagagcccgccgaggccaaggagggcaaggagaagcccgaccaggacgccgagggcaaggccgaggagaaggagggcgagaaggacgcggcggctgccaaggaggaggccccgaaggcggagcccgagaagacggagggcgcggcagaggccaaggctgagcccccgaaggcgcccgagcaggagcaggcggcccccggccccgctgcgggcggcgaggcccccaaagctgctgaggccgccgcggccccggccgagagcgcggcccctgccgccggggaggagcccagcaaggaggaaggggaacccaaaaagactgaggcgcccgcagctcctgccgcccaggagaccaaaagtgacggggccccagcttcagactcaaaacccggcagctcggaggctgccccctcttccaaggagacccccgcagccacggaagcgcctagttccacacccaaggcccagggccccgcagcctctgcagaagagcccaagccggtggaggccccggcagctaattccgaccaaaccgtaaccgtgaaagagtgacaaggacagcctataggaaaaacaataccacttaaaacaatctcctctctctctctctctctctctctctatctctctctctatctcctctctctctctcctctcctatctctcctctctctctctcctatactaacttgtttcaaattggaagtaatgatatgtattgcccaaggaaaaatacaggatgttgtcccatcaagggagggagggggtgggagaatccaaatagtatttttgtggggaaatatctaatataccttcagtcaactttaccaagaagtcctggatttccaagatccgcgtctgaaagtgcagtacatcgtttgtacctgaaactgccgccacatgcactcctccaccgctgagagttgaatagcttttcttctgcaatgggagttgggagtgatgcgtttgattctgcccacagggcctgtgccaaggcaatcagatctttatgagagcagtattttctgtgttttctttttaatttacagcctttcttattttgatatttttttaatgttgtggatgaatgccagctttcagacagagcccacttagcttgtccacatggatctcaatgccaatcctccattcttcctctccagatatttttgggagtgacaaacattctctcatcctacttagcctacctagatttctcatgacgagttaatgcatgtccgtggttgggtgcacctgtagttctgtttattggtcagtggaaatgaaaaaaaaaaaaaaaaaaaaaaggtctggcgtccattggcagtcccagtttctcttccattcctggtgtccacagacaccacaaccactcattgcaatgtggacaaaaaaaacaaaaaaaaaaacccacaaacaatctgttcccaggggctgtgccttggaacattttatttgtcacggggtataaaggggggccacccggctattcaaggtttcaaccacttcacacaggcaaaaacaaacaacaaacctctcccacaggcggcgggaatccgcgggccaataaggggggcgcgaagagacccctctccgaggggggggggcgcccggagacccacacgctttggtgctcccccttataaaaagagagcgggataaaattccagccaccctctggggggataacaccgcgggggcccaaaaccgtgcaccccgtgggttacacaatcgtgctaatccgggccaccaaaatttccaac

SEQ ID NO: 36814 - DNA, 2085 bp, Homo sapiens
agcgtgtgggagcgagcgcgagaaatgcagaggctgcagcggcggcggcggcggcagtagcggcagcggcgacgacggcggcggcagcgctccaactggctcctcgctccgggctccgccgtcgagccgggagagagcctccgccagcggccaggcaccagccagacgacgccagcgaccccggcctctcggcggcaccgcgctaactcaggggctgcataggcacccagagccgaactccaagatgggaggcaagctcagcaagaagaagaagggctacaatgtgaacgacgagaaagccaaggagaaagacaagaaggccgagggcgcggcgacggaagaggaggggaccccgaaggagagtgagccccaggcggccgcagagcccgccgaggccaaggagggcaaggagaagcccgaccaggacgccgagggcaaggccgaggagaaggagggcgagaaggacgcggcggctgccaaggaggaggccccgaaggcggagcccgagaagacggagggcgcggcagaggccaaggctgagcccccgaaggcgcccgagcaggagcaggcggcccccggccccgctgcgggcggcgaggcccccaaagctgctgaggccgccgcggccccggccgagagcgcggcccctgccgccggggaggagcccagcaaggaggaaggggaacccaaaaagactgaggcgcccgcagctcctgccgcccaggagaccaaaagtgacggggccccagcttcagactcggaagcgcctagttccacacccaaggcccagggccccgcagcctctgcagaagagcccaagccggtggaggccccggcagctaattccgaccaaaccgtaaccgtgaaagagtgacaaggacagcctataggaaaaacaataccacttaaaacaatctcctctctctctctctctctctctctctatctctctctctatctcctctctctctctcctctcctatctctcctctctctctctcctatactaacttgtttcaaattggaagtaatgatatgtattgcccaaggaaaaatacaggatgttgtcccatcaagggagggagggggtgggagaatccaaatagtatttttgtggggaaatatctaatataccttcagtcaactttaccaagaagtcctggatttccaagatccgcgtctgaaagtgcagtacatcgtttgtacctgaaactgccgccacatgcactcctccaccgctgagagttgaatagcttttcttctgcaatgggagttgggagtgatgcgtttgattctgcccacagggcctgtgccaaggcaatcagatctttatgagagcagtattttctgtgttttctttttaatttacagcctttcttattttgatatttttttaatgttgtggatgaatgccagctttcagacagagcccacttagcttgtccacatggatctcaatgccaatcctccattcttcctctccagatatttttgggagtgacaaacattctctcatcctacttagcctacctagatttctcatgacgagttaatgcatgtccgtggttgggtgcacctgtagttctgtttattggtcagtggaaatgaaaaaaaaaaaaaaaaaaaaaaggtctggcgtccattggcagtcccagtttctcttccattcctggtgtccacagacaccacaaccactcattgcaatgtggacaaaaaaaacaaaaaaaaaaacccacaaacaatctgttcccaggggctgtgccttggaacattttatttgtcacggggtataaaggggggccacccggctattcaaggtttcaaccacttcacacaggcaaaaacaaacaacaaacctctcccacaggcggcgggaatccgcgggccaataaggggggcgcgaagagacccctctccgaggggggggggcgcccggagacccacacgctttggtgctcccccttataaaaagagagcgggataaaattccagccaccctctggggggataacaccgcgggggcccaaaaccgtgcaccccgtgggttacacaatcgtgctaatccgggccaccaaaatttccaac

SEQ ID NO: 36815 - DNA, 2104 bp, Homo sapiens
cccaccccccccttccgcctggcctcggcgtcactctcgtttacctcgccacgcggcgcggcggcggcggcggcagtagcggcagcggcgacgacggcggcggcagcgctccaactggctcctcgctccgggctccgccgtcgagccgggagagagcctccgccagcggccaggcaccagccagacgacgccagcgaccccggcctctcggcggcaccgcgctaactcaggggctgcataggcacccagagccgaactccaagatgggaggcaagctcagcaagaagaagaagggctacaatgtgaacgacgagaaagccaaggagaaagacaagaaggccgagggcgcggcgacggaagaggaggggaccccgaaggagagtgagccccaggcggccgcagagcccgccgaggccaaggagggcaaggagaagcccgaccaggacgccgagggcaaggccgaggagaaggagggcgagaaggacgcggcggctgccaaggaggaggccccgaaggcggagcccgagaagacggagggcgcggcagaggccaaggctgagcccccgaaggcgcccgagcaggagcaggcggcccccggccccgctgcgggcggcgaggcccccaaagctgctgaggccgccgcggccccggccgagagcgcggcccctgccgccggggaggagcccagcaaggaggaaggggaacccaaaaagactgaggcgcccgcagctcctgccgcccaggagaccaaaagtgacggggccccagcttcagactcggaagcgcctagttccacacccaaggcccagggccccgcagcctctgcagaagagcccaagccggtggaggccccggcagctaattccgaccaaaccgtaaccgtgaaagagtgacaaggacagcctataggaaaaacaataccacttaaaacaatctcctctctctctctctctctctctctctatctctctctctatctcctctctctctctcctctcctatctctcctctctctctctcctatactaacttgtttcaaattggaagtaatgatatgtattgcccaaggaaaaatacaggatgttgtcccatcaagggagggagggggtgggagaatccaaatagtatttttgtggggaaatatctaatataccttcagtcaactttaccaagaagtcctggatttccaagatccgcgtctgaaagtgcagtacatcgtttgtacctgaaactgccgccacatgcactcctccaccgctgagagttgaatagcttttcttctgcaatgggagttgggagtgatgcgtttgattctgcccacagggcctgtgccaaggcaatcagatctttatgagagcagtattttctgtgttttctttttaatttacagcctttcttattttgatatttttttaatgttgtggatgaatgccagctttcagacagagcccacttagcttgtccacatggatctcaatgccaatcctccattcttcctctccagatatttttgggagtgacaaacattctctcatcctacttagcctacctagatttctcatgacgagttaatgcatgtccgtggttgggtgcacctgtagttctgtttattggtcagtggaaatgaaaaaaaaaaaaaaaaaaaaaaggtctggcgtccattggcagtcccagtttctcttccattcctggtgtccacagacaccacaaccactcattgcaatgtggacaaaaaaaacaaaaaaaaaaacccacaaacaatctgttcccaggggctgtgccttggaacattttatttgtcacggggtataaaggggggccacccggctattcaaggtttcaaccacttcacacaggcaaaaacaaacaacaaacctctcccacaggcggcgggaatccgcgggccaataaggggggcgcgaagagacccctctccgaggggggggggcgcccggagacccacacgctttggtgctcccccttataaaaagagagcgggataaaattccagccaccctctggggggataacaccgcgggggcccaaaaccgtgcaccccgtgggttacacaatcgtgctaatccgggccaccaaaatttccaac

SEQ ID NO: 36816 - DNA, 2055 bp, Homo sapiens
agcgtgtgggagcgagcgcgagaaatgcagaggctgcagcggcggcggcggcggcagtagcggcagcggcgacgacggcggcggcagcgctccaactggctcctcgctccgggctccgccgtcgagccgggagagagcctccgccagcggccaggcaccagccagacgacgccagcgaccccggcctctcggcggcaccgcgctaactcaggggctgcataggcacccagagccgaactccaagatgggaggcaagctcagcaagaagaagaagggctacaatgtgaacgacgagaaagccaaggagaaagacaagaaggccgagggcgcggcgacggaagaggaggggaccccgaaggagagtgagccccaggcggccgcagagcccgccgaggccaaggagggcaaggagaagcccgaccaggacgccgagggcaaggccgaggagaaggagggcgagaaggacgcggcggctgccaaggaggaggccccgaaggcggagcccgagaagacggcccccaaagctgctgaggccgccgcggccccggccgagagcgcggcccctgccgccggggaggagcccagcaaggaggaaggggaacccaaaaagactgaggcgcccgcagctcctgccgcccaggagaccaaaagtgacggggccccagcttcagactcaaaacccggcagctcggaggctgccccctcttccaaggagacccccgcagccacggaagcgcctagttccacacccaaggcccagggccccgcagcctctgcagaagagcccaagccggtggaggccccggcagctaattccgaccaaaccgtaaccgtgaaagagtgacaaggacagcctataggaaaaacaataccacttaaaacaatctcctctctctctctctctctctctctctatctctctctctatctcctctctctctctcctctcctatctctcctctctctctctcctatactaacttgtttcaaattggaagtaatgatatgtattgcccaaggaaaaatacaggatgttgtcccatcaagggagggagggggtgggagaatccaaatagtatttttgtggggaaatatctaatataccttcagtcaactttaccaagaagtcctggatttccaagatccgcgtctgaaagtgcagtacatcgtttgtacctgaaactgccgccacatgcactcctccaccgctgagagttgaatagcttttcttctgcaatgggagttgggagtgatgcgtttgattctgcccacagggcctgtgccaaggcaatcagatctttatgagagcagtattttctgtgttttctttttaatttacagcctttcttattttgatatttttttaatgttgtggatgaatgccagctttcagacagagcccacttagcttgtccacatggatctcaatgccaatcctccattcttcctctccagatatttttgggagtgacaaacattctctcatcctacttagcctacctagatttctcatgacgagttaatgcatgtccgtggttgggtgcacctgtagttctgtttattggtcagtggaaatgaaaaaaaaaaaaaaaaaaaaaaggtctggcgtccattggcagtcccagtttctcttccattcctggtgtccacagacaccacaaccactcattgcaatgtggacaaaaaaaacaaaaaaaaaaacccacaaacaatctgttcccaggggctgtgccttggaacattttatttgtcacggggtataaaggggggccacccggctattcaaggtttcaaccacttcacacaggcaaaaacaaacaacaaacctctcccacaggcggcgggaatccgcgggccaataaggggggcgcgaagagacccctctccgaggggggggggcgcccggagacccacacgctttggtgctcccccttataaaaagagagcgggataaaattccagccaccctctggggggataacaccgcgggggcccaaaaccgtgcaccccgtgggttacacaatcgtgctaatccgggccaccaaaatttccaac

SEQ ID NO: 36817 - DNA, 1989 bp, Homo sapiens
agcgtgtgggagcgagcgcgagaaatgcagaggctgcagcggcggcggcggcggcagtagcggcagcggcgacgacggcggcggcagcgctccaactggctcctcgctccgggctccgccgtcgagccgggagagagcctccgccagcggccaggcaccagccagacgacgccagcgaccccggcctctcggcggcaccgcgctaactcaggggctgcataggcacccagagccgaactccaagatgggaggcaagctcagcaagaagaagaagggctacaatgtgaacgacgagaaagccaaggagaaagacaagaaggccgagggcgcggcgacggaagaggaggggaccccgaaggagagtgagccccaggcggccgcagagcccgccgaggccaaggagggcaaggagaagcccgaccaggacgccgagggcaaggccgaggagaaggagggcgagaaggacgcggcggctgccaaggaggaggccccgaaggcggagcccgagaagacgcccagcaaggaggaaggggaacccaaaaagactgaggcgcccgcagctcctgccgcccaggagaccaaaagtgacggggccccagcttcagactcaaaacccggcagctcggaggctgccccctcttccaaggagacccccgcagccacggaagcgcctagttccacacccaaggcccagggccccgcagcctctgcagaagagcccaagccggtggaggccccggcagctaattccgaccaaaccgtaaccgtgaaagagtgacaaggacagcctataggaaaaacaataccacttaaaacaatctcctctctctctctctctctctctctctatctctctctctatctcctctctctctctcctctcctatctctcctctctctctctcctatactaacttgtttcaaattggaagtaatgatatgtattgcccaaggaaaaatacaggatgttgtcccatcaagggagggagggggtgggagaatccaaatagtatttttgtggggaaatatctaatataccttcagtcaactttaccaagaagtcctggatttccaagatccgcgtctgaaagtgcagtacatcgtttgtacctgaaactgccgccacatgcactcctccaccgctgagagttgaatagcttttcttctgcaatgggagttgggagtgatgcgtttgattctgcccacagggcctgtgccaaggcaatcagatctttatgagagcagtattttctgtgttttctttttaatttacagcctttcttattttgatatttttttaatgttgtggatgaatgccagctttcagacagagcccacttagcttgtccacatggatctcaatgccaatcctccattcttcctctccagatatttttgggagtgacaaacattctctcatcctacttagcctacctagatttctcatgacgagttaatgcatgtccgtggttgggtgcacctgtagttctgtttattggtcagtggaaatgaaaaaaaaaaaaaaaaaaaaaaggtctggcgtccattggcagtcccagtttctcttccattcctggtgtccacagacaccacaaccactcattgcaatgtggacaaaaaaaacaaaaaaaaaaacccacaaacaatctgttcccaggggctgtgccttggaacattttatttgtcacggggtataaaggggggccacccggctattcaaggtttcaaccacttcacacaggcaaaaacaaacaacaaacctctcccacaggcggcgggaatccgcgggccaataaggggggcgcgaagagacccctctccgaggggggggggcgcccggagacccacacgctttggtgctcccccttataaaaagagagcgggataaaattccagccaccctctggggggataacaccgcgggggcccaaaaccgtgcaccccgtgggttacacaatcgtgctaatccgggccaccaaaatttccaac

SEQ ID NO: 36818 - DNA, 1676 bp, Homo sapiens
agcgtgtgggagcgagcgcgagaaatgcagaggctgcagcggcggcggcggcggcagtagcggcagcggcgacgacggcggcggcagcgctccaactggctcctcgctccgggctccgccgtcgagccgggagagagcctccgccagcggccaggcaccagccagacgacgccagcgaccccggcctctcggcggcaccgcgctaactcaggggctgcataggcacccagagccgaactccaagatgggaggcaagctcagcaagaagaagaagggctacaatgtgaacgacgagaaagccaaggagaaagacaagaaggccgagggcgcggcgacggaagaggaggggaccccgaaggagagtgagccccaggcggccgcagagcccgccgaggccaaggagggcaaggagaagcccgaccaggacgccgagggcaaggccgaggagaaggagggcgagaaggacgcggcggctgccaaggaggaggccccgaaggcggagcccgagaagacggagggcgcggcagaggccaaggctgagcccccgaaggcgcccgagcaggagcaggcggcccccggccccgctgcgggcggcgaggcccccaaagctgctgaggccgccgcggccccggccgagagcgcggcccctgccgccggggaggagcccagcaaggaggaaggggaacccaaaaagactgaggcgcccgcagctcctgccgcccaggagaccaaaagtgacggggccccagcttcagactcaaaacccggcagctcggaggctgccccctcttccaaggagacccccgcagccacggaagcgcctagttccacacccaaggcccagggccccgcagcctctgcagaagagcccaagccggtggaggccccggcagctaattccgaccaaaccgtaaccgtgaaagagtgacaaggacagcctataggaaaaacaataccacttaaaacaatctcctctctctctctctctctctctctctatctctctctctatctcctctctctctctcctctcctatctctcctctctctctctcctatactaacttgtttcaaattggaagtaatgatatgtattgcccaaggaaaaatacaggatgttgtcccatcaagggagggagggggtgggagaatccaaatagtatttttgtggggaaatatctaatataccttcagtcaactttaccaagaagtcctggatttccaagatccgcgtctgaaagtgcagtacatcgtttgtacctgaaactgccgccacatgcactcctccaccgctgagagttgaatagcttttcttctgcaatgggagttgggagtgatgcgtttgattctgcccacagggcctgtgccaaggcaatcagatctttatgagagcagtattttctgtgttttctttttaatttacagcctttcttattttgatatttttttaatgttgtggatgaatgccagctttcagacagagcccacttagcttgtccacatggatctcaatgccaatcctccattcttcctctccagatatttttgggagtgacaaacattctctcatcctacttagcctacctagatttctcatgacgagttaatgcatgtccgtggttgggtgcacctgtagttctgtttattgggcggtgaacctcttctggtccaggtat

SEQ ID NO: 36819 - DNA, 1840 bp, Homo sapiens
aagcttgcggccgcagagcccgccgaggccaaggagggcaaggagaagcccgaccaggacgccgagggcaaggccgaggagaaggagggcgagaaggacgcggcggctgccaaggaggtggctcctcgctccgggctccgccgtcgagccgggagagagcctccgccagcggccaggcaccagccagacgacgccagcgaccccggcctctcggcggcaccgcgctaactcaggggctgcataggcacccagagccgaactccaagatgggaggcaagctcagcaagaagaagaagggctacaatgtgaacgacgagaaagccaaggagaaagacaagaaggccgagggcgcggcgacggaagagcccagcaaggaggaaggggaacccaaaaagactgaggcgcccgcagctcctgccgcccaggagaccaaaagtgacggggccccagcttcagactcaaaacccggcagctcggaggctgccccctcttccaaggagacccccgcagccacggaagcgcctagttccacacccaaggcccagggccccgcagcctctgcagaagagcccaagccggtggaggccccggcagctaattccgaccaaaccgtaaccgtgaaagagtgacaaggacagcctataggaaaaacaataccacttaaaacaatctcctctctctctctctctctctctctctatctctctctctatctcctctctctctctcctctcctatctctcctctctctctctcctatactaacttgtttcaaattggaagtaatgatatgtattgcccaaggaaaaatacaggatgttgtcccatcaagggagggagggggtgggagaatccaaatagtatttttgtggggaaatatctaatataccttcagtcaactttaccaagaagtcctggatttccaagatccgcgtctgaaagtgcagtacatcgtttgtacctgaaactgccgccacatgcactcctccaccgctgagagttgaatagcttttcttctgcaatgggagttgggagtgatgcgtttgattctgcccacagggcctgtgccaaggcaatcagatctttatgagagcagtattttctgtgttttctttttaatttacagcctttcttattttgatatttttttaatgttgtggatgaatgccagctttcagacagagcccacttagcttgtccacatggatctcaatgccaatcctccattcttcctctccagatatttttgggagtgacaaacattctctcatcctacttagcctacctagatttctcatgacgagttaatgcatgtccgtggttgggtgcacctgtagttctgtttattggtcagtggaaatgaaaaaaaaaaaaaaaaaaaaaaggtctggcgtccattggcagtcccagtttctcttccattcctggtgtccacagacaccacaaccactcattgcaatgtggacaaaaaaaacaaaaaaaaaaacccacaaacaatctgttcccaggggctgtgccttggaacattttatttgtcacggggtataaaggggggccacccggctattcaaggtttcaaccacttcacacaggcaaaaacaaacaacaaacctctcccacaggcggcgggaatccgcgggccaataaggggggcgcgaagagacccctctccgaggggggggggcgcccggagacccacacgctttggtgctcccccttataaaaagagagcgggataaaattccagccaccctctggggggataacaccgcgggggcccaaaaccgtgcaccccgtgggttacacaatcgtgctaatccgggccaccaaaatttccaac

SEQ ID NO: 36820 - DNA, 1511 bp, Homo sapiens
gaattcaagcttgattgctgcaggaattcggcaagacccagcaaggaggaaggggaacccaaaaagactgaggcgcccgcagctcctgccgcccaggagaccaaaagtgacggggccccagcttcagactcaaaacccggcagctcggaggctgccccctcttccaaggagacccccgcagccacggaagcgcctagttccacacccaaggcccagggccccgcagcctctgcagaagagcccaagccggtggaggccccggcagctaattccgaccaaaccgtaaccgtgaaagagtgacaaggacagcctataggaaaaacaataccacttaaaacaatctcctctctctctctctctctctctctctatctctctctctatctcctctctctctctcctctcctatctctcctctctctctctcctatactaacttgtttcaaattggaagtaatgatatgtattgcccaaggaaaaatacaggatgttgtcccatcaagggagggagggggtgggagaatccaaatagtatttttgtggggaaatatctaatataccttcagtcaactttaccaagaagtcctggatttccaagatccgcgtctgaaagtgcagtacatcgtttgtacctgaaactgccgccacatgcactcctccaccgctgagagttgaatagcttttcttctgcaatgggagttgggagtgatgcgtttgattctgcccacagggcctgtgccaaggcaatcagatctttatgagagcagtattttctgtgttttctttttaatttacagcctttcttattttgatatttttttaatgttgtggatgaatgccagctttcagacagagcccacttagcttgtccacatggatctcaatgccaatcctccattcttcctctccagatatttttgggagtgacaaacattctctcatcctacttagcctacctagatttctcatgacgagttaatgcatgtccgtggttgggtgcacctgtagttctgtttattggtcagtggaaatgaaaaaaaaaaaaaaaaaaaaaaggtctggcgtccattggcagtcccagtttctcttccattcctggtgtccacagacaccacaaccactcattgcaatgtggacaaaaaaaacaaaaaaaaaaacccacaaacaatctgttcccaggggctgtgccttggaacattttatttgtcacggggtataaaggggggccacccggctattcaaggtttcaaccacttcacacaggcaaaaacaaacaacaaacctctcccacaggcggcgggaatccgcgggccaataaggggggcgcgaagagacccctctccgaggggggggggcgcccggagacccacacgctttggtgctcccccttataaaaagagagcgggataaaattccagccaccctctggggggataacaccgcgggggcccaaaaccgtgcaccccgtgggttacacaatcgtgctaatccgggccaccaaaatttccaac

SEQ ID NO: 36821 - DNA, 1500 bp, Homo sapiens
gtcatctaaggatcccgtaagtgagcccagcaaggaggaaggggaacccaaaaagactgaggcgcccgcagctcctgccgcccaggagaccaaaagtgacggggccccagcttcagactcaaaacccggcagctcggaggctgccccctcttccaaggagacccccgcagccacggaagcgcctagttccacacccaaggcccagggccccgcagcctctgcagaagagcccaagccggtggaggccccggcagctaattccgaccaaaccgtaaccgtgaaagagtgacaaggacagcctataggaaaaacaataccacttaaaacaatctcctctctctctctctctctctctctctatctctctctctatctcctctctctctctcctctcctatctctcctctctctctctcctatactaacttgtttcaaattggaagtaatgatatgtattgcccaaggaaaaatacaggatgttgtcccatcaagggagggagggggtgggagaatccaaatagtatttttgtggggaaatatctaatataccttcagtcaactttaccaagaagtcctggatttccaagatccgcgtctgaaagtgcagtacatcgtttgtacctgaaactgccgccacatgcactcctccaccgctgagagttgaatagcttttcttctgcaatgggagttgggagtgatgcgtttgattctgcccacagggcctgtgccaaggcaatcagatctttatgagagcagtattttctgtgttttctttttaatttacagcctttcttattttgatatttttttaatgttgtggatgaatgccagctttcagacagagcccacttagcttgtccacatggatctcaatgccaatcctccattcttcctctccagatatttttgggagtgacaaacattctctcatcctacttagcctacctagatttctcatgacgagttaatgcatgtccgtggttgggtgcacctgtagttctgtttattggtcagtggaaatgaaaaaaaaaaaaaaaaaaaaaaggtctggcgtccattggcagtcccagtttctcttccattcctggtgtccacagacaccacaaccactcattgcaatgtggacaaaaaaaacaaaaaaaaaaacccacaaacaatctgttcccaggggctgtgccttggaacattttatttgtcacggggtataaaggggggccacccggctattcaaggtttcaaccacttcacacaggcaaaaacaaacaacaaacctctcccacaggcggcgggaatccgcgggccaataaggggggcgcgaagagacccctctccgaggggggggggcgcccggagacccacacgctttggtgctcccccttataaaaagagagcgggataaaattccagccaccctctggggggataacaccgcgggggcccaaaaccgtgcaccccgtgggttacacaatcgtgctaatccgggccaccaaaatttccaac

SEQ ID NO: 36822 - DNA, 1743 bp, Homo sapiens
agcgtgtgggagcgagcgcgagaaatgcagaggctgcagcggcggcggcggcggcagtagcggcagcggcgacgacggcggcggcagcgctccaactggctcctcgctccgggctccgccgtcgagccgggagagagcctccgccagcggccaggcaccagccagacgacgccagcgaccccggcctctcggcggcaccgcgctaactcaggggctgcataggcacccagagccgaactccaagatgggaggcaagctcagcaagaagaagaagggctacaatgtgaacgacgagaaagccaaggagaaagacaagaaggccgagggcgcggcgacggaagaggaggggaccccgaaggagagtgagccccaggcggccgcagagcccgccgaggccaaggagggcaaggagaagcccgaccaggacgccgagggcaaggccgaggagaaggagggcgagaaggacgcggcggctgccaaggaggaggccccggcagctaattccgaccaaaccgtaaccgtgaaagagtgacaaggacagcctataggaaaaacaataccacttaaaacaatctcctctctctctctctctctctctctctatctctctctctatctcctctctctctctcctctcctatctctcctctctctctctcctatactaacttgtttcaaattggaagtaatgatatgtattgcccaaggaaaaatacaggatgttgtcccatcaagggagggagggggtgggagaatccaaatagtatttttgtggggaaatatctaatataccttcagtcaactttaccaagaagtcctggatttccaagatccgcgtctgaaagtgcagtacatcgtttgtacctgaaactgccgccacatgcactcctccaccgctgagagttgaatagcttttcttctgcaatgggagttgggagtgatgcgtttgattctgcccacagggcctgtgccaaggcaatcagatctttatgagagcagtattttctgtgttttctttttaatttacagcctttcttattttgatatttttttaatgttgtggatgaatgccagctttcagacagagcccacttagcttgtccacatggatctcaatgccaatcctccattcttcctctccagatatttttgggagtgacaaacattctctcatcctacttagcctacctagatttctcatgacgagttaatgcatgtccgtggttgggtgcacctgtagttctgtttattggtcagtggaaatgaaaaaaaaaaaaaaaaaaaaaaggtctggcgtccattggcagtcccagtttctcttccattcctggtgtccacagacaccacaaccactcattgcaatgtggacaaaaaaaacaaaaaaaaaaacccacaaacaatctgttcccaggggctgtgccttggaacattttatttgtcacggggtataaaggggggccacccggctattcaaggtttcaaccacttcacacaggcaaaaacaaacaacaaacctctcccacaggcggcgggaatccgcgggccaataaggggggcgcgaagagacccctctccgaggggggggggcgcccggagacccacacgctttggtgctcccccttataaaaagagagcgggataaaattccagccaccctctggggggataacaccgcgggggcccaaaaccgtgcaccccgtgggttacacaatcgtgctaatccgggccaccaaaatttccaac

SEQ ID NO: 36823 - DNA, 1321 bp, Homo sapiens
  misc_feature (53)..(53): n is a, c, g, or t
cagagccgaactccaagatgggaggcaagcccagcaaggaggaaggggaaccnaaaaagactgaggccccggcagctaattccgaccaaaccgtaaccgtgaaagagtgacaaggacagcctataggaaaaacaataccacttaaaacaatctcctctctctctctctctctctctctctatctctctctctatctcctctctctctctcctctcctatctctcctctctctctctcctatactaacttgtttcaaattggaagtaatgatatgtattgcccaaggaaaaatacaggatgttgtcccatcaagggagggagggggtgggagaatccaaatagtatttttgtggggaaatatctaatataccttcagtcaactttaccaagaagtcctggatttccaagatccgcgtctgaaagtgcagtacatcgtttgtacctgaaactgccgccacatgcactcctccaccgctgagagttgaatagcttttcttctgcaatgggagttgggagtgatgcgtttgattctgcccacagggcctgtgccaaggcaatcagatctttatgagagcagtattttctgtgttttctttttaatttacagcctttcttattttgatatttttttaatgttgtggatgaatgccagctttcagacagagcccacttagcttgtccacatggatctcaatgccaatcctccattcttcctctccagatatttttgggagtgacaaacattctctcatcctacttagcctacctagatttctcatgacgagttaatgcatgtccgtggttgggtgcacctgtagttctgtttattggtcagtggaaatgaaaaaaaaaaaaaaaaaaaaaaggtctggcgtccattggcagtcccagtttctcttccattcctggtgtccacagacaccacaaccactcattgcaatgtggacaaaaaaaacaaaaaaaaaaacccacaaacaatctgttcccaggggctgtgccttggaacattttatttgtcacggggtataaaggggggccacccggctattcaaggtttcaaccacttcacacaggcaaaaacaaacaacaaacctctcccacaggcggcgggaatccgcgggccaataaggggggcgcgaagagacccctctccgaggggggggggcgcccggagacccacacgctttggtgctcccccttataaaaagagagcgggataaaattccagccaccctctggggggataacaccgcgggggcccaaaaccgtgcaccccgtgggttacacaatcgtgctaatccgggccaccaaaatttccaac

SEQ ID NO: 36824 - DNA, 1249 bp, Homo sapiens
aggcatggtactggcccggagtgttgggataagagtgacaaggacagcctataggaaaaacaataccacttaaaacaatctcctctctctctctctctctctctctctatctctctctctatctcctctctctctctcctctcctatctctcctctctctctctcctatactaacttgtttcaaattggaagtaatgatatgtattgcccaaggaaaaatacaggatgttgtcccatcaagggagggagggggtgggagaatccaaatagtatttttgtggggaaatatctaatataccttcagtcaactttaccaagaagtcctggatttccaagatccgcgtctgaaagtgcagtacatcgtttgtacctgaaactgccgccacatgcactcctccaccgctgagagttgaatagcttttcttctgcaatgggagttgggagtgatgcgtttgattctgcccacagggcctgtgccaaggcaatcagatctttatgagagcagtattttctgtgttttctttttaatttacagcctttcttattttgatatttttttaatgttgtggatgaatgccagctttcagacagagcccacttagcttgtccacatggatctcaatgccaatcctccattcttcctctccagatatttttgggagtgacaaacattctctcatcctacttagcctacctagatttctcatgacgagttaatgcatgtccgtggttgggtgcacctgtagttctgtttattggtcagtggaaatgaaaaaaaaaaaaaaaaaaaaaaggtctggcgtccattggcagtcccagtttctcttccattcctggtgtccacagacaccacaaccactcattgcaatgtggacaaaaaaaacaaaaaaaaaaacccacaaacaatctgttcccaggggctgtgccttggaacattttatttgtcacggggtataaaggggggccacccggctattcaaggtttcaaccacttcacacaggcaaaaacaaacaacaaacctctcccacaggcggcgggaatccgcgggccaataaggggggcgcgaagagacccctctccgaggggggggggcgcccggagacccacacgctttggtgctcccccttataaaaagagagcgggataaaattccagccaccctctggggggataacaccgcgggggcccaaaaccgtgcaccccgtgggttacacaatcgtgctaatccgggccaccaaaatttccaac

SEQ ID NO: 36825 - DNA, 1045 bp, Homo sapiens
gcacgagctcgtgccgctcgtgccgtgtcccatcaagggagggagggggtgggagaatccaaatagtatttttgtggggaaatatctaatataccttcagtcaactttaccaagaagtcctggatttccaagatccgcgtctgaaagtgcagtacatcgtttgtacctgaaactgccgccacatgcactcctccaccgctgagagttgaatagcttttcttctgcaatgggagttgggagtgatgcgtttgattctgcccacagggcctgtgccaaggcaatcagatctttatgagagcagtattttctgtgttttctttttaatttacagcctttcttattttgatatttttttaatgttgtggatgaatgccagctttcagacagagcccacttagcttgtccacatggatctcaatgccaatcctccattcttcctctccagatatttttgggagtgacaaacattctctcatcctacttagcctacctagatttctcatgacgagttaatgcatgtccgtggttgggtgcacctgtagttctgtttattggtcagtggaaatgaaaaaaaaaaaaaaaaaaaaaaggtctggcgtccattggcagtcccagtttctcttccattcctggtgtccacagacaccacaaccactcattgcaatgtggacaaaaaaaacaaaaaaaaaaacccacaaacaatctgttcccaggggctgtgccttggaacattttatttgtcacggggtataaaggggggccacccggctattcaaggtttcaaccacttcacacaggcaaaaacaaacaacaaacctctcccacaggcggcgggaatccgcgggccaataaggggggcgcgaagagacccctctccgaggggggggggcgcccggagacccacacgctttggtgctcccccttataaaaagagagcgggataaaattccagccaccctctggggggataacaccgcgggggcccaaaaccgtgcaccccgtgggttacacaatcgtgctaatccgggccaccaaaatttccaac

SEQ ID NO: 36826 - DNA, 1029 bp, Homo sapiens
gcagtttaagatcattttattgaagagcaagggtgggagaatccaaatagtatttttgtggggaaatatctaatataccttcagtcaactttaccaagaagtcctggatttccaagatccgcgtctgaaagtgcagtacatcgtttgtacctgaaactgccgccacatgcactcctccaccgctgagagttgaatagcttttcttctgcaatgggagttgggagtgatgcgtttgattctgcccacagggcctgtgccaaggcaatcagatctttatgagagcagtattttctgtgttttctttttaatttacagcctttcttattttgatatttttttaatgttgtggatgaatgccagctttcagacagagcccacttagcttgtccacatggatctcaatgccaatcctccattcttcctctccagatatttttgggagtgacaaacattctctcatcctacttagcctacctagatttctcatgacgagttaatgcatgtccgtggttgggtgcacctgtagttctgtttattggtcagtggaaatgaaaaaaaaaaaaaaaaaaaaaaggtctggcgtccattggcagtcccagtttctcttccattcctggtgtccacagacaccacaaccactcattgcaatgtggacaaaaaaaacaaaaaaaaaaacccacaaacaatctgttcccaggggctgtgccttggaacattttatttgtcacggggtataaaggggggccacccggctattcaaggtttcaaccacttcacacaggcaaaaacaaacaacaaacctctcccacaggcggcgggaatccgcgggccaataaggggggcgcgaagagacccctctccgaggggggggggcgcccggagacccacacgctttggtgctcccccttataaaaagagagcgggataaaattccagccaccctctggggggataacaccgcgggggcccaaaaccgtgcaccccgtgggttacacaatcgtgctaatccgggccaccaaaatttccaac

SEQ ID NO: 36827 - DNA, 1168 bp, Homo sapiens
agcgtgtgggagcgagcgcgagaaatgcagaggctgcagcggcggcggcggcggcagtagcggcagcggcgacgacggcggcggcagcgctccaactggctcctcgctccgggctccgccgtcgagccgggagagagcctccgccagcggccaggcaccagccagacgacgccagcgaccccggcctctcggcggcaccgcgctaactcaggggctgcataggcacccagagccgaactccaagatgggaggcaagctcagcaagaagaagaagggctacaatgtgaacgacgagaaagccaaggagaaagacaagaaggccgagggcgcggcgacggaagaggaggggaccccgaaggagagtgagccccaggcggccgcagagcccgccgaggccaaggagggcaaggagaagcccgaccaggacgccgagggcaaggccgaggagaaggagggcgagaaggacgcggcggctgccaaggaggaggccccgaaggcggagcccgagaagacggagggcgcggcagaggccaaggctgagcccccgaaggcgcccgagcaggagcaggcggcccccggccccgctgcgggcggcgaggcccccaaagctgctgaggccgccgcggccccggccgagagcgcggcccctgccgccggggaggagcccagcaaggaggaaggggaacccaaaaagactgaggcgcccgcagctcctgccgcccaggagaccaaaagtgacggggccccagcttcagactcaaaacccggcagctcggaggctgccccctcttccaaggagacccccgcagccacggaagcgcctagttccacacccaaggcccagggccccgcagcctctgcagaagagcccaagccggtggaggccccggcagctaattccgaccaaaccgtaaccgtgaaagagtgacaaggacagcctataggaaaaacaataccacttaaaacaatctcctctctctctctctctctctctctctatctctctctctatctcctctctctctctcctctcctatctctcctctctctctctcctatactaacttgtttcaaattggaagtaatgatatgtattgcccaaggaaaaatacaggatgttgtcccatcaagggagggaggtatgctctgattaagatcctgagagtca

SEQ ID NO: 36828 - DNA, 998 bp, Homo sapiens
cgtttatttcatcagcgtgactggggtttcatttaaatttaatgtaccgtggccgcaatttaccaagaagtcctggatttccaagatccgcgtctgaaagtgcagtacatcgtttgtacctgaaactgccgccacatgcactcctccaccgctgagagttgaatagcttttcttctgcaatgggagttgggagtgatgcgtttgattctgcccacagggcctgtgccaaggcaatcagatctttatgagagcagtattttctgtgttttctttttaatttacagcctttcttattttgatatttttttaatgttgtggatgaatgccagctttcagacagagcccacttagcttgtccacatggatctcaatgccaatcctccattcttcctctccagatatttttgggagtgacaaacattctctcatcctacttagcctacctagatttctcatgacgagttaatgcatgtccgtggttgggtgcacctgtagttctgtttattggtcagtggaaatgaaaaaaaaaaaaaaaaaaaaaaggtctggcgtccattggcagtcccagtttctcttccattcctggtgtccacagacaccacaaccactcattgcaatgtggacaaaaaaaacaaaaaaaaaaacccacaaacaatctgttcccaggggctgtgccttggaacattttatttgtcacggggtataaaggggggccacccggctattcaaggtttcaaccacttcacacaggcaaaaacaaacaacaaacctctcccacaggcggcgggaatccgcgggccaataaggggggcgcgaagagacccctctccgaggggggggggcgcccggagacccacacgctttggtgctcccccttataaaaagagagcgggataaaattccagccaccctctggggggataacaccgcgggggcccaaaaccgtgcaccccgtgggttacacaatcgtgctaatccgggccaccaaaatttccaac

SEQ ID NO: 36829 - DNA, 943 bp, Homo sapiens
agcgtgtgggagcgagcgcgagaaatgcagaggctgcagcggcggcggcggcggcagtagcggcagcggcgacgacggcggcggcagcgctccaactggctcctcgctccgggctccgccgtcgagccgggagagagcctccgccagcggccaggcaccagccagacgacgccagcgaccccggcctctcggcggcaccgcgctaactcaggggctgcataggcacccagagccgaactccaagatgggaggcaagctcagcaagaagaagaagggctacaatgtgaacgacgagaaagccaaggagaaagacaagaaggccgagggcgcggcgacggaagaggaggggaccccgaaggagagtgagccccaggcggccgcagagcccgccgaggccaaggagggcaaggagaagcccgaccaggacgccgagggcaaggccgaggagaaggagggcgagaaggacgcggcggctgccaaggaggaggccccgaaggcggagcccgagaagacggagggcgcggcagaggccaaggctgagcccccgaaggcgcccgagcaggagcaggcggcccccggccccgctgcgggcggcgaggcccccaaagctgctgaggccgccgcggccccggccgagagcgcggcccctgccgccggggaggagcccagcaaggaggaaggggaacccaaaaagactgaggcgcccgcagctcctgccgcccaggagaccaaaagtgacggggccccagcttcagactcaaaacccggcagctcggaggctgccccctcttccaaggagacccccgcagccacggaagcgcctagttccacacccaaggcccagggccccgcagcctctgcagaagagcccaagccggtggaggccccggcagctaattccgacctacccaccgcctttccccccgacattccccccgtccta

SEQ ID NO: 36830 - DNA, 910 bp, Homo sapiens
agcgtgtgggagcgagcgcgagaaatgcagaggctgcagcggcggcggcggcggcagtagcggcagcggcgacgacggcggcggcagcgctccaactggctcctcgctccgggctccgccgtcgagccgggagagagcctccgccagcggccaggcaccagccagacgacgccagcgaccccggcctctcggcggcaccgcgctaactcaggggctgcataggcacccagagccgaactccaagatgggaggcaagctcagcaagaagaagaagggctacaatgtgaacgacgagaaagccaaggagaaagacaagaaggccgagggcgcggcgacggaagaggaggggaccccgaaggagagtgagccccatgtgctgtgcctgcatgatgccctgcctgatgtgccaatggatgtgtgcaatggatgaatgccctgaccatgtgactgcctgatgtgtgcaatggcctgagtgaggaactgtgaggggctgatgaatgtgactgctgtgctgtgcttgcccaaattgggaatggggatgtgcccccctgtatatgggctgtgatgccccctggagaaatgactgtgatgtgtgctgcctgtgctatgaatgtgcccaaattgtggcctttggaaaggcccccctctggaaaatggtggctggccccctggaatgccatgtggatgcctatgttgctggtggccccccccctggtgacccccccctgggcttgcctggtgtggcttgtggctggattgtggcccctccccaaaatggcttgccttagattgtggcctggcctggctgtggccccccttgggccccggaaggatgcctggcttgtgctccccctttggcccttgctctggggtgtggaatgtgggaggcccccttatggctaaatgggcg

SEQ ID NO: 36831 - DNA, 3059 bp, Homo sapiens
cccagattttaattttggggttggctcaaactagtgaaaactatgactcaatggccaattgctttatcaaatttgataactaaaacttaaaatgaatatggaaaatcagaaagcaactctattttagagctattttgtaagagttgtgctttctttaacaccatctgtagtcttaagtttgtctctagctagaactgaacaaagctctataatttttaccaagcacttattattaatacttcttataagtagtaagcatctttactaacacaactgagaattaagtcataaaacataactaatacagcacattactgcctgacaaaattaaagagtactgtgtgtatgtataactactacaggttaacacttcacccaaatgatagcgtttttcctcagtagattattgtcaaataggaatttctaagcacattgagtcaaagcattttttccaagttaataaagtgttatttactatctttgttagaggtgacatgtcaaacactacagtgagctctgtggggtttttttttttttttttttgcccgtgagttttttaccatgctgctctgaccagtttgagtggcaattaccaatagatttgttttctttattctatggagatgtttttaccactgacactgttttctgattatagtctgcttcatagaaaatagcctgcataatcaaacaaggagttactttgaaattaaagtatgcctggctattaaaaatgcagattttaggtgggtaaacatcaggtaggtctgggtgggtcatgttctaggcctagaaaaatacactattagacaagttctaaagaaggcaaggagataaaggcatcaggtggtaacttctaattgaatattatatgttgatcatacataatatatactatgcctggaaattatgactgaaaagcacctattcggttagtgctcctattcatgagaacatatctccaatactaaatgagataagcctgttctaaaatcttatagccagtattttaagaaacttgattatacttaccaaaggaacattgttgttttctcttgttttaaatatggagaggtttaatcctttacataacaaaggaattaattttagcaaaatgattcattccaaccttcttataagaaatatctaggagagtcaagtaagaaaaataacgaatctaagtgataaacattcaagaaattctctaaataagagatttatttataattttaatatctcagggttctttttaggtttccaggggaaaagagcaggataacagtgtggagactgctaagttgagaatttaaaacaaatgagaacataagatttttaaaattgcattgtgaatgtaaaatttttatcaatcctttgctctcttttagacatattgagaaaatgttaaatagaaaaaattaagtaattttaataagatgtttcagatctttgagtatgaaaaacataacaaaaaagcctaatttcaaaaaactatttgagatcaagggacaatggtgtgaccaatatgaagggtcaagactgaaatgtattgtctttactatcaagaactctactttcagttgtttctcagacagttaatttcagcttcatagagatttctgagcaaattaagaaacactgttttcctgggtttgttttgggtatatgtcattatagttatgttatttcttgttgaaatttataattgtaggttttttgtattgttttagtatttaatggtgtataatgtgttattacattatatgtagttataccaaaatattgcctgaagataaatcatgacaaggtcccctgtttattcctgtgttacagacgcatggaattgctcctgtagatttgaatttttgtttcatttttttctgtcccacccttcactctctctgtttcagaacatttttggtagaagtgctatccagaagtgaacttgtcaaaaggcaagtagcatgaaagaagacagaagaagcaaaaggctaatacagtggataatttctgagcacttgaagtttcttcaaatgtgcaagactgtgtgtcttcctattagatgtataaattggatatttcatgcctaattaaatgttgcgttggattgcagtgcctatcatacagtgattggagtaaattgaggcctaatcctgaacacatatagagcatattgttagatatttttcctgtgacatttgaagttattattctcccatttcctttttctttttttgtttataatcatatgtccctaagattgttttccttttttggaccaaaaaaaagaaaaaaaaaatcttagcttttcatcctcccagtgtattctgcattgtccttaccctagatcagccccttctgtgttaacagtttttctcacaatgtagcaacttttatccacccttcaggaccttcactgggactagttcattcattttcaaatagctatttcaacctttaacatctactgtcttagtcttttacacagaagccagagtgactggtcttggcaagactctgttgtgtatcaccactctaaccttactgatttgtttcagcaaatttgctttagttaaattgctttactcagattcccccaaactttatatgtgtattgtcatctttgtgcatattatttctcatgcatgaaatactcaatttttattcttttatctaacgcttactcttacatttctttaaagctctggccaagtattttatttcgtccctaaacattctaactatccaccaaactggtaagttggcttttctttttcctccccctgtcattcatttagctgttatatttcattttaatgttttgggtggtgcctcttatactatgttgtattcctagacaaggaaatgtatatcaaaatatgttagatgattgattgttttatctccttgatgatagcacctcttatactgctttacagaatcaggaaaaagtaaactgcattttacatagtggttttaaatattgattgattgatattctaaacctggtttcctatataaagttgtaagttcaagataaagagaccacattctttactcat

SEQ ID NO: 36832 - DNA, 3035 bp, Homo sapiens
cccagattttaattttggggttggctcaaactagtgaaaactatgactcaatggccaattgctttatcaaatttgataactaaaacttaaaatgaatatggaaaatcagaaagcaactctattttagagctattttgtaagagttgtgctttctttaacaccatctgtagtcttaagtttgtctctagctagaactgaacaaagctctataatttttaccaagcacttattattaatacttcttataagtagtaagcatctttactaacacaactgagaattaagtcataaaacataactaatacagcacattactgcctgacaaaattaaagagtactgtgtgtatgtataactactacaggttaacacttcacccaaatgatagcgtttttcctcagtagattattgtcaaataggaatttctaagcacattgagtcaaagcattttttccaagttaataaagtgttatttactatctttgttagaggtgacatgtcaaacactacagtgagctctgtggggtttttttttttttttttttgcccgtgagttttttaccatgctgctctgaccagtttgagtggcaattaccaatagatttgttttctttattctatggagatgtttttaccactgacactgttttctgattatagtctgcttcatagaaaatagcctgcataatcaaacaaggagttactttgaaattaaagtatgcctggctattaaaaatgcagattttaggtgggtaaacatcaggtaggtctgggtgggtcatgttctaggcctagaaaaatacactattagacaagttctaaagaaggcaaggagataaaggcatcaggtggtaacttctaattgaatattatatgttgatcatacataatatatactatgcctggaaattatgactgaaaagcacctattcggttagtgctcctattcatgagaacatatctccaatactaaatgagataagcctgttctaaaatcttatagccagtattttaagaaacttgattatacttaccaaaggaacattgttgttttctcttgttttaaatatggagaggtttaatcctttacataacaaaggaattaattttagcaaaatgattcattccaaccttcttataagaaatatctaggagagtcaagtaagaaaaataacgaatctaagtgataaacattcaagaaattctctaaataagagatttatttataattttaatatctcagggttctttttaggtttccaggggaaaagagcaggataacagtgtggagactgctaagttgagaatttaaaacaaatgagaacataagatttttaaaattgcattgtgaatgtaaaatttttatcaatcctttgctctcttttagacatattgagaaaatgttaaatagaaaaaattaagtaattttaataagatgtttcagatctttgagtatgaaaaacataacaaaaaagcctaatttcaaaaaactatttgagatcaagggacaatggtgtgaccaatatgaagggtcaagactgaaatgtattgtctttactatcaagaactctactttcagttgtttctcagacagttaatttcagcttcatagagatttctgagcaaattaagaaacactgttttcctgggtttgttttgggtatatgtcattatagttatgttatttcttgttgaaatttataattgtaggttttttgtattgttttagtatttaatggtgtataatgtgttattacattatatgtagttataccaaaatattgcctgaagataaatcatgacaaggtcccctgtttattcctgtgttacagacgcatggaattgctcctgtagatttgaatttttgtttcatttttttctgtcccacccttcactctctctgtttcagaacatttttggtagaagtgctatccagaagtgaacttgtcaaaaggcaagtagcatgaaagaagacagaagaagcaaaaggctaatacagtggataatttctgagcacttgaagtttcttcaaatgtgcaagactgtgtgtcttcctattagatgtataaattggatatttcatgcctaattaaatgttgcgttggattgcagtgcctatcatacagtgattggagtaaattgaggcctaatcctgaacacatatagagcatattgttagatatttttcctgtgacatttgaagttattattctcccatttcctttttctttttttgtttataatcatatgtccctaagattgttttccttttttggaccaaaaaaaagaaaaaaaaaatcttagcttttcatcctcccagtgtattctgcattgtccttaccctagatcagccccttctgtgttaacagtttttctcacaatgtagcaacttttatccacccttcaggaccttcactgggactagttcattcattttcaaatagctatttcaacctttaacatctactgtcttagtcttttacacagaagccagagtgactggtcttggcaagactctgttgtgtatcaccactctaaccttactgatttgtttcagcaaatttgctttagttaaattgctttactcagattcccccaaactttatatgtgtattgtcatctttgtgcatattatttctcatgcatgaaatactcaatttttattcttttatctaacgcttactcttacatttctttaaagctctggccaagtattttatttcgtccctaaacattctaactatccaccaaactggggccctctgatccatccaaaaagcccggcatcaggaaagacaatttcaaaactgaagtttgattttgggaagcctattaaatatgttagaagttcaaaccacttgatattatgaaatagaatttcatattaccataagttatttattttgtcaaaatgatgactccaaaattttaaagaagcaaaaacctttttataaccctttacaaattttgctaaagatgtgcttttattttaatgctcaatttacagaaaaaatatataataccttttttgaattta

SEQ ID NO: 36833 - DNA, 2688 bp, Homo sapiens
aacgatgcgcactgctggagacgggcgaccttcgctggccggtcggtgggttcctggttttctgctgccgagtaaacaaacgttccctttcctaacttagcagtcacagagctatttccaagagttgttcttaatttcctgtgcgatattcccattggctatttaacactgaacattctgtttttgaatcaaagttagttaaaatttgttgtcaataagtttaacattctgttcttccgcgtgatggattttcttttggagattcgaactgaagcctgtacggaggaaatgttgtttttaagggaaatgaatagaaacaatccactttgaagaagccatggcgaaatcaaagacaaaacatagactttgttctcaggaatcttcagtatctgccctgctggcaagctgcaccctgagtggtagtaattcctctaattctgatggctcgtttcactataaagataagctgtacagatctgcttctcaagctctacaggcttatattgatgattttgatttaggccaaatatatcctggtgcaagcactggaaaaattaacattgatgaggattttactaatatgtcacagttctgcaactatatttacaaaccaaacaatgcttttgaaaaccttgatcacaaaaagcactcaaacttcatatcctgtagaagacacaccgttaatgacatagactccatgagcctaacaactgatgatctattaagactcccagcagatggatcattttcttatacttatgttggaccgagtcacccaacgagcaagaaaaacaagaaatgccgtggaagactgggttcattggacattgagaagaatccacattttcaaggaccctacacttccatgggcaaggataactttgttactcctgttatacgctcaaatataaatggaaagcaatgtggtgacaaaattgaattgcttatcttgaaggccaagagaaatctagagcagtgtactgaagaattaccaaagtccatgaaaaaggatgacagtccttgctcattagataaacttgaagcagacagatcatgggaaaatattcctgttactttcaaatctcctgttcccgttaactctgatgatagtcctcaacaaacttcaagggcaaagagtgctaaaggggttcttgaagactttctaaataatgataatcagagctgtactctctctggaggcaaacatcatggtcctgttgaagccctgaaacaaatgttatttaaccttcaagcagtacaagaacgttttaatcaaaataagaccacagatccaaaagaagagattaaacaagtttcagaagatgatttctctaaattacagttgaaggaaagtatgattcctattactaggtcacttcagaaggctttgcaccatttatctcgcctgagagacctggttgatgatacgaatggagaacggtcaccgaaaatgtgaagaggaaaatgaaactgtcaccacaatgaatagtcaccacagaacaaataggcattttttctattacttaaactgacaaaaacatttttggtagaagtgctatccagaagtgaacttgtcaaaaggcaagtagcatgaaagaagacagaagaagcaaaaggctaatacagtggataatttctgagcacttgaagtttcttcaaatgtgcaagactgtgtgtcttcctattagatgtataaattggatatttcatgcctaattaaatgttgcgttggattgcagtgcctatcatacagtgattggagtaaattgaggcctaatcctgaacacatatagagcatattgttagatatttttcctgtgacatttgaagttattattctcccatttcctttttctttttttgtttataatcatatgtccctaagattgttttccttttttggaccaaaaaaaagaaaaaaaaaatcttagcttttcatcctcccagtgtattctgcattgtccttaccctagatcagccccttctgtgttaacagtttttctcacaatgtagcaacttttatccacccttcaggaccttcactgggactagttcattcattttcaaatagctatttcaacctttaacatctactgtcttagtcttttacacagaagccagagtgactggtcttggcaagactctgttgtgtatcaccactctaaccttactgatttgtttcagcaaatttgctttagttaaattgctttactcagattcccccaaactttatatgtgtattgtcatctttgtgcatattatttctcatgcatgaaatactcaatttttattcttttatctaacgcttactcttacatttctttaaagctctggccaagtattttatttcgtccctaaacattctaactatccaccaaactggtaagttggcttttctttttcctccccctgtcattcatttagctgttatatttcattttaatgttttgggtggtgcctcttatactatgttgtattcctagacaaggaaatgtatatcaaaatatgttagatgattgattgttttatctccttgatgatagcacctcttatactgctttacagaatcaggaaaaagtaaactgcattttacatagtggttttaaatattgattgattgatattctaaacctggtttcctatataaagttgtaagttcaagataaagagaccacattctttactcat

SEQ ID NO: 36834 - DNA, 1917 bp, Homo sapiens
aacgatgcgcactgctggagacgggcgaccttcgctggccggtcggtgggttcctggttttctgctgccgagtaaacaaacgttccctttcctaacttagcagtcacagagctatttccaagagttgttcttaatttcctgtgcgatattcccattggctatttaacactgaacattctgtttttgaatcaaagttagttaaaatttgttgtcaataagtttaacattctgttcttccgcgtgatggattttcttttggagattcgaactgaagcctgtacggaggaaatgttgtttttaagggaaatgaatagaaacaatccactttgaagaagccatggcgaaatcaaagacaaaacatagactttgttctcaggaatcttcagtatctgccctgctggcaagctgcaccctgagtggtagtaattcctctaattctgatggctcgtttcactataaagataagctgtacagatctgcttctcaagctctacaggcttatattgatgattttgatttaggccaaatatatcctggtgcaagcactggaaaaattaacattgatgaggattttactaatatgtcacagttctgcaactatatttacaaaccaaacaatgcttttgaaaaccttgatcacaaaaagcactcaaacttcatatcctgtagaagacacaccgttaatgacatagactccatgagcctaacaactgatgatctattaagactcccagcagatggatcattttcttatacttatgttggaccgagtcacccaacgagcaagaaaaacaagaaatgccgtggaagactgggttcattggacattgagaagaatccacattttcaaggaccctacacttccatgggcaaggataactttgttactcctgttatacgctcaaatataaatggaaagcaatgtggtgacaaaattgaattgcttatcttgaaggccaagagaaatctagagcagtgtactgaagaattaccaaagtccatgaaaaaggatgacagtccttgctcattagataaacttgaagcagacagatcatgggaaaatattcctgttactttcaaatctcctgttcccgttaactctgatgatagtcctcaacaaacttcaagggcaaagagtgctaaaggggttcttgaagactttctaaataatgataatcagagctgtactctctctggaggcaaacatcatggtcctgttgaagccctgaaacaaatgttatttaaccttcaagcagtacaagaacgttttaatcaaaataagaccacagatccaaaagaagagattaaacaagtttcagaagatgatttctctaaattacagttgaaggaaagtatgattcctattactaggtcacttcagaaggctttgcaccatttatctcgcctgagagacctggttgatgatacgaatggagaacggtcaccgaaaatgtgaagaggaaaatgaaactgtcaccacaatgaatagtcaccacagaacaaataggcattttttctattacttaaactgacaaaaacatttttggtagaagtgctatccagaagtgaacttgtcaaaagctctggccaagtattttatttcgtccctaaacattctaactatccaccaaactggggccctctgatccatccaaaaagcccggcatcaggaaagacaatttcaaaactgaagtttgattttgggaagcctattaaatatgttagaagttcaaaccacttgatattatgaaatagaatttcatattaccataagttatttattttgtcaaaatgatgactccaaaattttaaagaagcaaaaacctttttataaccctttacaaattttgctaaagatgtgcttttattttaatgctcaatttacagaaaaaatatataataccttttttgaattta

SEQ ID NO: 36835 - DNA, 383 bp, Homo sapiens
tgtacagatctgcttctcaagctctacaggcttatattgatgattttgatttaggccaaatatatcctggtgcaagcactggaaaaattaacattgatgaggattttactaatatgtcacagttctgcaactatatttacaaaccaaacaatggtatgcttttattctttgttttctttgtgttcagatgttttgaagcatttgggagatgtactgtagtattgtaaagtttgacattatttttgttactttggagtaaaaataacataatattgagatctgggtgtttttgtaaaatgattatataattctctgtggaacagtaatattcacaagatgttaagagtttgtccataataaagcttccttgaagacaagtttgg

SEQ ID NO: 36836 - DNA, 457 bp, Homo sapiens
gtcccttatctttctgctttgaagagttcaagtgcaaaagcagataattttattacaaaaatggaaattataaccaaacacaatgatccactatggccgttttgttaatagtcttgttaaaaatatgtaatagtgtactcgggaggctgaggcaggaaaatggcgtgaacctggaaggcagagcttgcggtgagccgagatcacgccactgcactcctgcctgggaaacagaacaagactccattccaaaaaaaaaaaaaaaaaaaaaaaatttactggaaactttaaacataaaaaaactatttttttaggtcttctgctataataatactatatctaaaaaataacaattcaaattattctgctatattaacctataattcaatcttatctggacagtttggcatataggaagcactcaactatagaacaaatgagtaggacatggcaaaaacag

SEQ ID NO: 36837 - DNA, 1813 bp, Homo sapiens
ggcaatagcgtttatggcagcatttagcggacacagaagcacatctgaaagtggagagagacgcgtttccccattgctggccgagtcccaccactttgctcagctatgaacacctgacatctcgtttcattttcatgcaaaatctggagataattattatccacaattctaaggccttaggcccctccgcatgagcctgccattaccacttcattcccttgcacctgaaagactccagagccccttgaaagaacaggtcctccaagaggagcatcgccagccagcccctgaatctcctgaggaaactctcatgcacatatcttgacctgagcacagaccggacgccagcggagggcaggagcaagcaggacacactgtggctgaggaggggaccctgggcttgtgggcctcggagaggcagagcaggggaggcagatgagactgcacacagctttttgtttgacatatcctaagccccctgcacacgccactcaaggtcttctctgtgccccatctggtgcaggaggcctgtctgtctgtgaaattgcttttagcaatagctgtggatcaccactgagagggtgaatatacaaatgaacaatgggcagaccgtctatgatggcaaaacttggacctccaaccttgaggccaaagcacatcatgtgcggcctctggcgggactcaggtctgggaagcgactgcagcttccctattttctagctctgcttccaactaagaaagtcagatattctccccaaaccaaccccataggatgcccgctgccaggtggcccacccccagcttccccctgacaacagcctccacccagggcatacccaaccagagccttcccatcttctaatgggaagcttcccctccccaccccaccttcaaggctctgccacgcgcagggacagtgtagccttcttggctacagcttcgagtgagcagcctctgccatcctcgctgatgtccccggttaccgtgaaggctcctccaggacactgtctgcactgcctgtcgtccagaccccacctctgcccaggcaccctggccttaatgctgcagcccacagggcacccagctggtgactgaggcctgttctgagcccctcgctggcacattcctggacttctcagtttggtgccagggcctcattcctgcttcccatttgctctgttacaggggaattagtcccttcctttactcttttgtgctgtgctttctaaacgtggtgtttgtcataataagaagcatgaggggcacatggatcagcctcacagacaggtgagtctgtagctcttaccagacccttgttcacatccatgaacttggctgtggatcaccagggaaactgggtgaggttctgccatccaggggttttgtcctgagaacttggcttttagaacattctctctggttttttgcttgggggtgggggtctggtgcagggtgctgggtctgtgtttggaggaggccagcccgtaggctgggggcctgagacactgtgcactggcgtgatgcgtctgccgcccatcaccagcttgcaggggcatccacggctgaatcctctgctcttccaggaaagacttatgcttctcatggtcctagttctcatgctgatctttctacttggcaaaattcaccaagggtgacttgggtttttggtggcaactctgggaacatttggcttgaaaaattgttcatttaagagattctttagagaagaaaatgagtaagattccctaggcctaaatgcagaggcctccaaatgaatttctgaataaaaaagtatttcgctaagaaaaaaatt

SEQ ID NO: 36838 - DNA, 383 bp, Homo sapiens
agtactgtaagttatcccatctctagttttagttccaaacttctgatgattgcacatttaccattatttgacaaaaactaaaaagtgttctgcccagattcttctagtgtctcatctttaacaggctcccccttggagaatatggagatatttattttcttccaatgttggcagtttttcaaacctgcaattgttcatttcctgttgaccaaagaattaaccttgtcagccgataattagtgagatggaagagaggcgtagtgatttggacccccagtggttggcagagtgggtttacaggggaagaaaccaacagttgggctgtttcattcattgtttggttgggagccccattgtggaagagatgggtggttacatgtgat

SEQ ID NO: 36839 - DNA, 324 bp, Homo sapiens
aacaaaagtgctgttcttagataagcatttgtgattttatctttttatggagactttggaaagatttgctctgatttccaacctcgaatactcttggaaaatatctgtattatttttactctattggattttaatgtgtgttttagaaaacaacatctgcagatagatggtgttgcacaacaatgtgaatatccttaataccacaaaactgcacttaaaaatggttacaatggtaacttttatgttatgtgtgttttacagcaattaaaaaataagacaataacagaactgtggtttgtattaaagatctagtaactctaatta

SEQ ID NO: 36840 - DNA, 352 bp, Homo sapiens
gaacagcaaaagcattaagctaagtgaacaaagctggacacaaataattatagaattccatttttatgacatactagagagtatgggacaaaagtcagatcagtggttgctcagggctgggagctggaggatgggattgcaaagggtggaaagaaactttttgtaaatatgtaaatatcttgtatcttgattttggtggaagttaacaactctggatattgttaaaactcatcaatgtacgttttaaaagggtgaattttactgtatataactcatacctcaataaacttgaataaaaaatacagtaatttttccttgtaattctagcagacttgtagtaaaaataaccttt

SEQ ID NO: 36841 - DNA, 168 bp, Homo sapiens
tggacagtgctgttgtgagcccccaagaggcagaaacagacacatggcccctccaaagggggaacaccaatgacctctccttccactgatgtgggggaagagactgaaggggagaaggtgtcaggttaggcccagcggcttttggccaacgtgtgtccactgtctttc

SEQ ID NO: 36842 - DNA, 882 bp, Homo sapiens
gatgatgaagtaaatcttatgtcagggagccacctgaagaagtcacatgagaactcagctattgtcactctgcctgtgtagctctgtttttctcagtctctgctttcaccatgaggctttctacaaatatcctggttgcactataccgtatggggcattaccaaggaagtacatgctctcactatcaattttatggaatagggaaaattcttaccatcatctaaattcaaggaacatttagccttacagagctggatcgagaaaaatgcacacatattctttattttaatagcttctattcatgacagtgtagtgattactggtggctttggtaccagacagagcctgggtttgaattacaattccagcacttactagatatgggttcttggacaaatgacttcacctccctcagtctcagtttcctcctctaaagggacatttgaaggctctgaaatatccagcatgcagtaactatgtggccttgagtaaatcatcaaatttttctgtgcttcagcttttgcatctgttaaatgaaagcaataacaatacctacctcatagggttgttgtgggaattaaatgagataatgcagtctgggcacagtggctcacgcctgtaatcccagcactttgagagactgatgcaggagaattgcttgaggctaggagttcaataccagcctggggaacatagagagatcctgtctctacaaaaaaaatgtaaaaattagctgggcatggtggtgcacatctgtagtcctagctacttgggaggctgaggtgggaggattgcttgagcccaggagtttgaggttacagtgagctgtgattgcaccactgtactctagcctgagtgacagagcaagaccctgactcaaaa

SEQ ID NO: 36843 - DNA, 330 bp, Homo sapiens
cccaccctggaggttcaggggtgggactgaaaattcaaagtttcttattaaggcttggcctttccggcaactagccctcatcctgaagctatctagaggcccaccaagagtcatctcattgaaacaaaagacactcccgtcaccctcagtactcagaaaattcttagggaattaggagctctgtgccaagaatggggacaaagaccaaatatctttctgtgataccacatacatacacttacacacagttatttcattatgtacggaaaagtatataaatgataaacagctcagtaaaacattgcaaagtgaatatatctatgagatgac

SEQ ID NO: 36844 - DNA, 392 bp, Homo sapiens
gcaatatggtgtgtatgtatacacacacacacaaaatggaataatagccacagaaaaaggaagtactgacatttgcaacaacatggatgaacctggaggatattatattaaatgaaataagccagacacagaaagacaaatattatataacctcatatttgcaatctaaaacaagtgaaactcctagaaacagaggtagaacggtggttaccaggggcttgagtgggagaaatggggagatgttggtcaaagggtgcaaattctcagttatataatgaacaagttctagaaatctaatgttcagtatgggcagtaatggatttgttaatttggttgcaataataatcatacaatgtatatgtgtattaaattatcatgatgtatgccatgca

SEQ ID NO: 36845 - DNA, 490 bp, Homo sapiens
tcaccccttcttcatttccctaaattcttatattccaaagccaattattctgggtatctaaagaatatatacctagcctcaaagtcccaaaaaatttggttgcatcaatggttgaaagagcatttttgaaatgctaatttcaaagcctacccaaagaatctcttttgcaaaatctctctgaggtgattctcacatgcatctgggtctgtcaccactagcccagttactagccttcattttacacatgagaaagctgagcccctatcccgtcaaaaaggggaagtaatttaatcaaaacaaaaagtgagttagggctgtgaaatcctaagattaatttcatttcaagatgtgacctggtcctctttctaaaaccccactgaaatgacagaattttataaaagagagtaagtcagctgcagcagcagcaaaacaacaaatacaaaaagaatacccttagtgaaccaaaactataaggacatgctagaagata

SEQ ID NO: 36846 - DNA, 420 bp, Homo sapiens
gtaataatagtgcaatatagcttcaaactgctgtgctcaagctatcctcctgcctcagcctcctgagtagctggaaatacaggtacagaccaccatgcctggctaatttttatatttttagtagagacagggtttcaccatgttggccaggctggtcttgaactcctgacctcaggtgatccacccaccttggcctcccaaagtgctgggattacaggcatgagccaccatgcccagccactcccttctgcatttttgatgctctggagagcgtcggcttcatactcaccattatggctgctgggttgcctcagtctcccaagctcccagcactgctgcagcaacggggagctgcatggcccacctggccaccatccgcgatgcttcccgccgccctggcggaggtgcggcctcagccct

SEQ ID NO: 36847 - DNA, 323 bp, Homo sapiens
cactttgtaactacaattgtcattatctgaactaaggtaagggctggaggcagagccagagcttcaagaaggaattggctaacacaaaagcaagaacatggattcttctgagaagtaaagaaagatgtttcccaaaagcaagcactttgtaggtggcgatgtgttgatgtgctgggtctgataaaaagtgatcccaacagaaagttcctctcatctccagcctaggaaatctttaggccttcactcagatcttcactcaggccttcccggaccaccctctcaaaaattttcaaccgctttctcctgcacacttgaactctccc

SEQ ID NO: 36848 - DNA, 2182 bp, Homo sapiens
accctctgagccagtagtgccagcagtgatgatggccacccatgagcccagtgctgacctggcacccaagaaaaagcccaggaagtcaagcatgcctgtgaagattgagaaggaaattattgataccgccgatgagtttgatgatgaagatgatgaccccaatgatggtggagctgtggtcaatgacatgagccatgacaatcattgtcactcccaagaggagatgagcccaggcatgtctgtgaaggacttttctaagcataacaggacccggtgcatttcaaggactgaaataaggagggccgacagcatgacttctgaagaccaagaacctgagcgggactatgagaacgagtctgagtcttcggagcccaaactgggcgaggaatccatggaaggggatgagcacattcacagcgaagtgagtgaaaaagtcctgatgaatagtgagaggcctgatgagaaccacagtgagccctctcaccaggacgtcatcaaggtgaaggaagaatttacagaccccacttacgacatgttttacatgagccagtatggactgtacaatggtgggggtgccagcatggccgccttgcatgagagctttacatcgtctctgaattatggcagccctcaaaagttctccccagaaggtgacctatgttctagcccagaccccaaaatctgttatgtgtgcaagaagagtttcaaaagctcctacagtgtgaaacttcactacaggaacgttcacttgaaagagatgcacgtctgcacagtggctggttgcaatgctgcattcccctctcgccgaagccgagacagacacagtgccaacataaacctacatcgtaaactgttgaccaaagaactcgatgacatgggcctggactcgtcgcagccctcccttagcaaggacctccgcgatgaatttttggtgaagatatatggtgcccagcaccccatggggctcgatgtcagggaagacgcctcctctcccgcagggactgaagactcccacctgaacgggtatgggagaggcatggcagaggactacatggtccttgacttgagcaccacctccagcctccagtccagcagcagtatccattcctccagagaatccgacgcaggcagcgatgaggggattcttctcgatgacattgacggggcgagtgacagtggggagtcggcacacaaggccgaggcccctgccctccctggcagcctaggggctgaagtttcaggatctcttatgttcagcagcttgtctgggagcaatggtgggatcatgtgcaacatttgccacaaaatgtacagcaacaaggggaccctgagagtgcactacaaaactgtgcatttgagagaaatgcacaagtgcaaagtcccaggttgcaatatgatgttttcctctgtacgaagccgaaatcggcacagtcagaaccctaatctccacaaaaacattcccttcacttcagtagattagtctcagaatggacactacaaatgccagctctcaccagatggcctacgtgtttgaactgccatagtcagtgtgcgcttatgtacttttgtgggtgtgtgtgtgtgtgtgtgtgtgtgtgtgcatttatgtatgctctgtggctacatatacacacacgtatttccttgagataaacaagataaacactaggtgcttttgaatttttttcacttccctttatagttttgggaaaggagtgggatctttgatttcagggtgaaaacagagtacccctttaaacacacacacacacacatgcacatacacacacacacacacacacacacacacagtgtgcaactagccccagttttgacagaataattcttggtcttccccaaagagacaatttgttgtacccatgactgttgcctgcaaaaataaaagggaaaaaaaagaaaaaagaaacaaaaaggaacttcttatagttgtcttttgtgaactttaaggttttgaaagaatcttcaattaaagcatggcagattcacctgtaaatatttagccttgaggggccattgatgtaaaacaattgtattgatggttgtttaacttttttgtttaatttttacagttacatccagctgttagatatgcaggaaaagatagtttgctggctagctctattcatttatgttagcattaatgcacatttttaaaaaaaga

SEQ ID NO: 36849 - DNA, 2147 bp, Homo sapiens
accctctgagccagtagtgccagcagtgatgatggccacccatgagcccagtgctgacctggcacccaagaaaaagcccaggaagtcaagcatgcctgtgaagattgagaaggaaattattgataccgccgatgagtttgatgatgaagatgatgaccccaatgatggtggagctgtggtcaatgacatgagccatgacaatcattgtcactcccaagaggagatgagcccaggcatgtctgtgaaggacttttctaagcataacaggacccggtgcatttcaaggactgaaataaggagggccgacagcatgacttctgaagaccaagaacctgagcgggactatgagaacgagtctgagtcttcggagcccaaactgggcgaggaatccatggaaggggatgagcacattcacagcgaagtgagtgaaaaagtcctgatgaatagtgagaggcctgatgagaaccacagtgagccctctcaccaggacgtcatcaaggtgaaggaagaatttacagaccccacttacgacatgttttacatgagccagtatggactgtacaatggtgggggtgccagcatggccgccttgcatgagagctttacatcgtctctgaattatggcagccctcaaaagttctccccagaaggtgacctatgttctagcccagaccccaaaatctgttatgtgtgcaagaagagtttcaaaagctcctacagtgtgaaacttcactacaggaacgttcacttgaaagagatgcacgtctgcacagtggctggttgcaatgctgcattcccctctcgccgaagccgagacagacacagtgccaacataaacctacatcgtaaactgttgaccaaagaactcgatgacatgggcctggactcgtcgcagccctcccttagcaaggacctccgcgatgaatttttggtgaagatatatggtgcccagcaccccatggggctcgatgtcagggaagacgcctcctctcccgcagggactgaagactcccacctgaacgggtatgggagaggcatggcagaggactacatggtccttgacttgagcaccacctccagcctccagtccagcagcagtatccattcctccagagaatccgacgcaggcagcgatgaggggattcttctcgatgacattgacggggcgagtgacagtggggagtcggcacacaaggccgaggcccctgccctccctggcagcctaggggctgaagtttcaggatctcttatgttcagcagcttgtctgggagcaatggtgggatcatgtgcaacatttgccacaaaatgtacagcaacaaggggaccctgagagtgcactacaaaactgtgcatttgagagaaatgcacaagtgcaaagtcccaggttgcaatatgatgttttcctctgtacgaagccgaaatcggcacagtcagaaccctaatctccacaaaaacattcccttcacttcagtagattagtctcagaatggacactacaaatgccagctctcaccagatggcctacgtgtttgaactgccatagtcagtgtgcgcttatgtacttttgtgggtgtgtgtgtgtgtgtgtgtgtgtgtgtgcatttatgtatgctctgtggctacatatacacacacgtatttccttgagataaacaagataaacactaggtgcttttgaatttttttcacttccctttatagttttgggaaaggagtgggatctttgatttcagggtgaaaacagagtaccccacacacacacacacacacacacagtgtgcaactagccccagttttgacagaataattcttggtcttccccaaagagacaatttgttgtacccatgactgttgcctgcaaaaataaaagggaaaaaaaagaaaaaagaaacaaaaaggaacttcttatagttgtcttttgtgaactttaaggttttgaaagaatcttcaattaaagcatggcagattcacctgtaaatatttagccttgaggggccattgatgtaaaacaattgtattgatggttgtttaacttttttgtttaatttttacagttacatccagctgttagatatgcaggaaaagatagtttgctggctagctctattcatttatgttagcattaatgcacatttttaaaaaaaga

SEQ ID NO: 36850 - DNA, 484 bp, Homo sapiens
aaaaataaagaaagaattgagtgtttgataagagtagcattaggtattagtgggaaatgattggatttttcatttaagcattgttgggacaacttgttaaccatttggaaataaagcctaacctttgtcatcttaaaccattgtaaatgaaacctgactataagtagatttacaggaacatatataggagtatatgatgtgcagggagagaagggaagaattaactttgagagctacttatttaatctggttaaaggcaaagactggtttctccttttagaataagtcattgatagcttcctcaaggagttaaaaattcagtgcatcctatagtgaaataaagggatctggaagtgtagaataaaatttatttttgataataaatgatgattgaagccctgaaagttattcaaatgtttttgaaatgattggataaaaagcacattgaatgatctgaaaaatataagaaagtacaggttaagta

SEQ ID NO: 36851 - DNA, 368 bp, Homo sapiens
atgaaggatatataatacatagtaagaacttttaatgtacatataattggagtctcagaaagataggagagacagttaggcaggggcaatatttgacaagataaagatcaagaaattttgaaaactattgaaagatctcagctcaaagattaaagaaatttaatgaaacccaagcagaataactacaaagaagactacacacatgcatgttgatatagtttggatatttgtcctctggaaatctcatgttgaaatgcgatccccaatgttggaggtgtgacctagtgggagatgtttgggtcatgggagtggatccctcatgaatggcttggtgccatccccttcatgattagtgagtttttgctcta

SEQ ID NO: 36852 - DNA, 417 bp, Homo sapiens
ttttaaaacatttatttatttttatttttgtaaagatggggtcttgctatgttggagactaactatttttacttcacacctctgatactatgttggctggtttttaaaaaaatctctgggctgggcacagtggcacacccctgtaatcccagcattatggaaggctgaggcgggtggatcacttgatgtcaggagttcaagaccaacctggccaacatagcaaaaccctgtctctactaaaaatataaaaattagccaggcatgatggcgcagtcccagatagctgtagtcccagctactagagaggctgaggcaggagaatcgcttgaacctggaaggcggaggttgcagtgagccaagatcacgccactgtactccagcctgggtgacagagcgagactccacctcaaaaaaatt

SEQ ID NO: 36853 - DNA, 596 bp, Homo sapiens
agaatcgcttgaacctgagaggtggagattgcagtgagccaggatcgcgccactgcactccaacctgggtgacagagcgagactccatctcaaaaaacaaacaaaaacacatacagttcactctcttaaccatttttatgtgtacagtacagtagtgttaactatatgtacattgttgtatgacagatctctaaaactttttcatgtagcaaaactgaaactctgtacctattggataacagctcccagagagagcttttaaacattcatcatttcatgtcattcacttgcttaaatggctccaaagccttccttcttctctttcaataaaatccatgctacttacacaggcttcttagatcccatatgatctaatccccacctaccttctgaccttagcttattccactttctctatgccctacggtgcatcaggatctttgtactagctgttcttctgcctatagtgttctttcctggctttgcgcatggctggctcctggtcattcaggcctcaggtttaaccccctcaggtaggcctttgactacagatttaaaatacctgcctctatgtcattttcgggtcctcaagtcag

SEQ ID NO: 36854 - DNA, 380 bp, Homo sapiens
tttttccttcataaactacatcaacaaatccttgaagtcatctctatcatgtcttctgcataaataaatccagcccaagttatcatccttcacctagataattgtaataattcctttccagctcgttttcctgatctaggttcttcctcctccagttatctactacactgttcacagaagaaagttctgaaacacaaatctgatagtgccaacaccttgcttataaacttttaatggctgctgattacatataggacaaggagtatgtttttctttcattaattcctctcacctatccaaatgccacagtccagcagaaattgaggctgatactctggagaggggataacagctaaagccagaatctgaagtaagtgaac

SEQ ID NO: 36855 - DNA, 334 bp, Homo sapiens
cttctggtcagcagctactggttgttccttctttttccttctcctccctcattttccccattagaatgtaagcttcttgaaggaaaagggcttgtttattgctgtataactagaaaggatagtgccaggcacattcaacaatatttgttgaaagaatgaaaaactgaatgaaaaagtatttggcagctctctgaaaaccagctacttctgacacctagaaacccaggtaatctattgtgtatctgatgtttattgattgccctgatcttaccactgccatgtaacaggaaaatcctgccttctactagggagttgctgagaccccctaaacagg

SEQ ID NO: 36856 - DNA, 226 bp, Homo sapiens
gcatggggctcagctctgattctactggcttctacatagttggcttgttattctaccatttactaaagactctgtccttctttaatgtacttaaatttgagcagtttttatgttcaaacttttttttttttttttaaacagaaattatatttctggctgtatggcccaaggtgggttctgaaactctgtggttctcaagttaatccaccgcgacttcggacctccc

SEQ ID NO: 36857 - DNA, 530 bp, Homo sapiens
gcatggggctcagctctgattctactggcttctacatagttggcttgttattctaccatttactaaagactctgtccttctttaatgtacttaaatttgagcagtttttatgttcaaacttttttttttttttttaaacagaaattatgtcttgctgttttgcccaggctggtcttgaattcctggcctcaaacgaccctcctgcctcggcctcccaaaatgttaggattagaggcgtgagccactgcacctggccaattgagcaatttttatatacaactttttcttagttttgacgtctgcaaaaattcagaaagctactataagaaaatgacaatcaaccatctgcataaaaaaagaattagccacttaacacaactggtcctttttccattggaaaaatcgatcggaaattggatttctaattacatttgggctttccacggaaaccgcagagcagccggtcatctatatattcattaaatcctacaaactggagagttttttttttttttttttgagatggagtc

SEQ ID NO: 36858 - DNA, 253 bp, Homo sapiens
gcagttattggctatagtattgtagcctttaggtcatcattaagtcaagtttattaatcatgttttcaaattttctctgtcgatttttatgtgcttgttatatcagttattaagataagtgggttaaaacttatcttttatttccacttttatatgccttttctaagatgtgtatttttaaggtagcatatagacggacttcagccttgaatttcataataaacattaacatggaaaaaatgtacaaaggaaa

SEQ ID NO: 36859 - DNA, 729 bp, Homo sapiens
cccaaggagtaaattcaggagggagccacaaaggaagcacttttaagtttgtaagattagaaaatacatttgcacaatttatttcagttcaccattcagttcccaaattggtacagcttgttcacaaatgtgttgaaattttccttcctgcagcatgttgagtaatcgtagatgagtttttcttttacacttgatcttagccaaaaggccaagaagtgatgagtttttattttaataagttcttgtcatacagctttttgacagtgagctgtagtgtaagtacctggttgtcagttttttccagtgttctcagtaaaaaatcagaactgcctggccctctataaaggcatccgttgacttctttgatgggttatgtagtgacctaaaacccagaatcctgcaagagcagccactacaagctcaacactgaattagccatcatctcaactgtaaagatttgaaggagatagtctgtgatagatcccctacatgtgtatgcagatttcgtgtgaatgtgctttctttctggagtagtagttccatagctgcattcagtttctaataagaagctactacagccaggcacggtggctcatgcctgtaatcccagctactcgggaggctgaggcaggagaatcacttgaacctgggagacagaggtggcagtgagctgaaaatcgtgccactgcactccagccttagtgacagagtgggagtccgtctcaaaaa

SEQ ID NO: 36860 - DNA, 200 bp, Homo sapiens
tgcactgccccgaggagagacaggggagaaggggcatggccatgcgttcctgggagggtacttgctacatttctatgaggtgctcttgagaatgagatatgtgtggacctcactccccaccccacagctttgtgctcactctacttgcctgagtggtagcctgccctctctggtctcggcccaaggtgcatactgagagt

SEQ ID NO: 36861 - DNA, 327 bp, Homo sapiens
gcctcagcctcccaaagtgctgggattataggcatcagccaccatgcccggcctcattagaaaattctgccaagtattttaaaaagactgaaccaaatcctctataatatcttccagataataaaaacagaaagagcagcaagtggaatttattctaggaatgtatgactggtttaacatttaaaaagtaatcactctaaggctgggcatagtggctcacgcctgttatcccagcactttgggagcctgaggcaggtggattacctgaggttggagtttgagaccagcctggccaacatggtgaaaccctgtctctactaaaaatac

SEQ ID NO: 36862 - DNA, 385 bp, Homo sapiens
ggggactgaaggacagtatgataatgaggtgatcttgagtggatggctagagatgtgattaaaggtcaacatgaaaacataagcaacttcttcatgacctcttaagggaagggattatgcagcagaacaactgctggttccagagtcccacttccagctctgccactaactctatgtgactttgacaaagtgacttaacctctctggagtaaattccattaactataaaagactagagtaaaatgaaatgttctctaacttccttctaattctaatactccttgggtttacaaatcttctcttttggatacatgcacaatcaccaaaaatcagccatggctcaatcattctttggacattttcaccatcgatgcatttcctatgc

SEQ ID NO: 36863 - DNA, 493 bp, Homo sapiens
tcaaggttaaggttaagattccaggtgaaaatacataacggaaggacaccatttcagaaaccagaccactgatgagggctgcttaaagaatttttagaaagaagagataacttctgatgtcctttggtgtttaatgtttttaaaagaccatgggtctctgctctgatgaagaactacattgcaagtaatttgaatgtagtgactagaccacccttggcatctagtcttatatctagtacctatcaggcacttaaaatgactattgtaatgcacagactcatttgccagataaaacctggaactcagaagggtctccctgaaattcttaagaacatgacggtagaatggatgcatataaagaacaaatgagaaaagattaaaaaaaaaaccctcataactaaaactacaatataggaaaatttgaagtgtaaaattttgctcgaactgtttatgaaatggaggtaagaaatggggatgggacaaaggctttact

SEQ ID NO: 36864 - DNA, 911 bp, Homo sapiens
cgtatttatcactctattgattggttttatagttcattgaaaatcctcaaataaaatataattattactgaaatatgtttaatatttaaggggaaaagagactaatttcagttatacttttaagcttagaatgtatgttcatttccaaattttgtatcataagagttttcaacatagagaaaagctgaaaaaatgcaaagaataaccacatactttccatctaccttcctttgttaacgggttgtttatcatataataatttgttttgtcatatttgctttcactgtctattatctgtttaagtctcataactctatttttagtttgctgaagacttgaaagtgaatcgcatatatcatgacacttcttggagtgtcattaatgggcaggcttttctgttgaagagtggattccgtatgttcttcatagagagtgtttttcagattcttcattgggatattaaaatattagccaaatttctctctgttttatatatgtctgtttatttcagtttgtggtttctgcaaatttgtaactgcctctgttttaggagtataagtattacttccttgtggtctattgtgaagtaaaaagtagacccttgcatatactattcttgtttgtgttcatcttaatgtttttgtacagctaaatcaaatgtaatttatagagttagtttcatcaacctaatgaatgctagttaaatttgaattccttggaatttatcgtatattgtattcactgagattatgaagggacaaatgttaatcttttgtttccagaaaaagttgggctttcccaagcagttctattacccggttcagaattgcttcatccaaaaatcatctgatggtatagatggatcctagtccttttcattacctgatggtagaaataaaataattgatttt

SEQ ID NO: 36865 - DNA, 542 bp, Homo sapiens
caaatgaagaatctgaaaaacactctctatgaagaacatacggaatccactcttcaacagaaagtgtttttcagattcttcattgggatattaaaatattagccaaatttctctctgttttatatatgtctgtttatttcagtttgtggtttctgcaaatttgtaactgcctctgttttaggagtataagtattacttccttgtggtctattgtgaagtaaaaagtagacccttgcatatactattcttgtttgtgttcatcttaatgtttttgtacagctaaatcaaatgtaatttatagagttagtttcatcaacctaatgaatgctagttaaatttgaattccttggaatttatcgtatattgtattcactgagattatgaagggacaaatgttaatcttttgtttccagaaaaagttgggctttcccaagcagttctattacccggttcagaattgcttcatccaaaaatcatctgatggtatagatggatcctagtccttttcattacctgatggtagaaataaaataattgatttt

SEQ ID NO: 36866 - DNA, 1510 bp, Homo sapiens
cgtatttatcactctattgattggttttatagttcattgaaaatcctcaaataaaatataattattactgaaatatgtttaatatttaaggggaaaagagactaatttcagttatacttttaagcttagaatgtatgttcatttccaaattttgtatcataagagttttcaacatagagaaaagctgaaaaaatgcaaagaataaccacatactttccatctaccttcctttgttaacgggttgtttatcatataataatttgttttgtcatatttgctttcactgtctattatctgtttaagtctcataactctatttttagtttgctgaagacttgaaagtgaatcgcatatatcatgacacttcttggagtgtcattaatgggcaggcttttctgttgaagagtggattccgtatgttcttcatagagagtgtttttcagattcttcattgggatattaaaatattagccaaatttctctctgttttatatatgtctgtttatttcagtttgtggtttctgcaaatttgtaactgcctctgttttaggagtataagtattacttccttgtggtctattgtgaagtaaaaagtagacccttgcatatactattcttgtttgtgttcatcttaatgtttttgtacagctaaatcaaatgtaatttatagagttagtttcatcaacctaatgaatgctagttaaatttgaattccttggaatttatcgtatattgtattcactgagattatgaagggacaaatgttaatcttttgtttccagaaaaagttgggctttcccaagcagttctattacccggttcagaattgcttcatccaaaaatcatctgatggtatagatggatcctagtccttttcattacctgatggtagaaataaaataattgatttttaaaaaaaaaaaaaaaaaaaacaaaaaaaacaaaaaaaaaaaaaaaaaaaaaaaaaaaacagaaaaacacaaaacaaaaaaaaaccaaacaaaaaaaacaaaaaaaaaaaaaacaaaaaaaaaaaaaaaagaaaaaaaaaacaagcagaggggggcggcgcggccgccctcctccccccgcggggcgcccccccccctcgcccccccttccggagatggccgggccggctccatatgtgggtgacgtatatactcttaatcaaaagaaccgcgggccgggggcgagcacacatacactaaacttacagagacggctcgctgtggagcgcaagacaacacggaccggaattcggatgacaatatattgggtagaagaagaaaaaccatacttgtttagcgtctgtggactcaaataatgtcgtgtcaacaacacaaccaaatccgaatatatacagagttgcatcgaccgagaataaataatatacaagtgacgttgattattgtagtgaaaacacaacaccccaaggactagtttctcgcacggacgcaatagttgtccgtgcaggattctatgatcttcgcagaaaaaattatccgca

SEQ ID NO: 36867 - DNA, 480 bp, Homo sapiens
cgtatttatcactctattgattggttttatagttcattgaaaatcctcaaataaaatataattattactgaaatatgtttaatatttaaggggaaaagagactaatttcagttatacttttaagcttagaatgtatgttcatttccaaattttgtatcataagagttttcaacatagagaaaagctgaaaaaatgcaaagaataaccacatactttccatctaccttcctttgttaacgggttgtttatcatataataatttgttttgtcatatttgctttcactgtctattatctgtttaagtctcataactctatttttagtttgctgaagacttgaaagtgaatcgcatatatcatgacacttcttggagtgtcattaatgggcaggcttttctgttgaagagtggattccgtatgttcttcatagagagtgtttttcagattcttcattgggatattaaaatattagccaaatttc

SEQ ID NO: 36868 - DNA, 2775 bp, Homo sapiens
agcaggtacacccctcaaatgtgttcttgggagaagtgatacactcggcctcattatgtgaaacctgtgggtggggttggggtggagaagtagagagagggcaacagcttccacaactgcttcatctctgccaacactaatttttcccacactgtctttgtacatttcagagctttggtctcctgagtgggcctccttttcccactgtgccaggaaggtaggtttctctggctgactgagtactgtgagtgaggcaacactgatgccagcatgggtcttacttgactggggagtaggctgagtgaggggtagggtggggtaggtggggagtagtgtggccaggaactggaatccctggtggatttctgattcctgtggtgagaaggaaagctacaggacctggagaaggggatgcagaggcaggcctgctgaccaacttgttgcaatcacaaaggtgggggtcctggtgcaggcagtgaacaggcttctaatgtggggttcagtagtgccagcaagtgggggaaactttcagtattgcgctaggtcaacacttcctgctgcatttccttccctttgcacagcttgaagaaatagagtagacagaatcacacatcatgtggtgggcagatggaaataagtacctgtggtgaacaagtttctactgtagttggagatcattagaattgaattcagtttctcttagaatataatcaggtataaacctaagttaaactttttcccaaacaaggagcatccaaagacacagtgacttgagctatagatagtaaaaatcatacgagagttgaactgagtcaggtttaggaagcaagtttggttgcatcaattaagcaggctcttttcaattgactgatgctggggccttcagttttattctcagtatagattgccagtattgttaagagtatccaaaggcctttctagatggagacagaataactgacttgaacatacagtgtgcctgtaagtgtccaggctcagagctggtgaaaacccttctgttgggcgtgtgcagggttaaactcctgaagtaacttgtgaggacttcagtgcttgctggtgtcctgggcagcaccatgaatgcctttaccaagacatgccaagttggatcccccgaatgaagcagatgtggctgtggtgtgacccttgctccctgctacacagagcatcgcagggctggcctgtgtggtttccagatgagggtctgggtcccggaagcttgtgttgagagctcagtggacccaccccgcttgctgaaccctcacagttcttggggttgtccagcctggacttgtagcacacatgtcctgaagcaaagctccggtgactgcatgagccacctggccacagtcctcccatggagggcctgccgtgacgctcagtggagagggcagggcctgtgtctccacttaggccacacagtgatgaggaaaccacagatggagcttcttgccgataatactgactctagcccatgattgccttgcccaagccaaagaggaaggttaggttggcttgtcgagcccttgagcgttgggagatggggtgggaaggaggtgagcccctgcagagagttgggtagtgtccttcaggaatgaaaggaggggcaaaggagtcaccagaggtcctgcatttccatcagggtttccacagtcatcagggcttctctcttgagttgctgataggagatgtgagttatgcccagagatgtcttatcgtgaggaaaaagaaacttccttttgttcacattcaggactctcagtgccatatgaagtagcaaaaggcagtatcggccagatcagtgttacattgattctaaaattacagtgtccccattagacaactattttaggtgctggagtatgtttgaagagtgtgctgggaaaaaggaagcatttcttcattgatttaaatcagtatgaatattatatgcctaaataaaaaatttgcacaggtaaattctctcacttgtgaatgggagaagctgccccaggaatctgtgaggatggtattccctggagtctggctttgaaagatttcattgttggtagaaataacaggttgagaaagagggagttagcatcacctaaaacctgcacgtgaacaagggttgacatgatacactatggccttagaaaagggccaggtgaaaccccaagctaatcactgcggtctttcagagccggacagacaggtgccagcagagcccggggctcactctcctttcagtcattcctcagcccttcgaagggaagcccaaacactttgcacgctgtgctgcagacattctggcctggtgtgtctgaaagttgcatcagtcctcacggtgcaaacacagttgatttaggaagtcacacaatgacactgaaatcctacagaccaaaatccacttgtcagcaggagcagcagcccaggcccagcaccagcggtcttccggctcctctgagggctgccacgttgggcgaggggagccatgccaagggtccaggctgctttaggccatctgtgccccactcatctggggacagatggtttttctttattgtaaaattgtggacttttaaaacctgttgactaaacagtaattaatttatatttgtgaaaaatgccactgtcctagtgatttctgatgtaaataatgttgtttatatagtatgtattaaattttcctacattgtaaaactgctgtacttttgattcttgtatattaaaaagtgttactgagcatttttagaattgggctaacaaaaaaaaaaa

SEQ ID NO: 36869 - DNA, 2721 bp, Homo sapiens
agcaggtacacccctcaaatgtgttcttgggagaagtgatacactcggcctcattatgtgaaacctgtgggtggggttggggtggagaagtagagagagggcaacagcttccacaactgcttcatctctgccaacactaatttttcccacactgtctttgtacatttcagagctttggtctcctgagtgggcctccttttcccactgtgccaggaaggtaggtttctctggctgactgagtactgtgagtgaggcaacactgatgccagcatgggtcttacttgactggggagtaggctgagtgaggggtagggtggggtaggtggggagtagtgtggccaggaactggaatccctggtggatttctgattcctgtggtgagaaggaaagctacaggacctggagaaggggatgcagaggcaggcctgctgaccaacttgttgcaatcacaaaggtgggggtcctggtgcaggcagtgaacaggcttctaatgtggggttcagtagtgccagcaagtgggggaaactttcagtattgcgctaggtcaacacttcctgctgcatttccttccctttgcacagcttgaagaaatagagtagacagaatcacacatcatgtggtgggcagatggaaataagtacctgtggtgaacaagtttctactgtagttggagatcattagaattgaattcagtttctcttagaatataatcaggtataaacctaagttaaactttttcccaaacaaggagcatccaaagacacagtgacttgagctatagatagtaaaaatcatacgagagttgaactgagtcaggtttaggaagcaagtttggttgcatcaattaagcaggctcttttcaattgactgatgctggggccttcagttttattctcagtatagattgccagtattgttaagagtatccaaaggcctttctagatggagacagaataactgacttgaacatacagtgtgcctgtaagtgtccaggctcagagctggtgacttcagtgcttgctggtgtcctgggcagcaccatgaatgcctttaccaagacatgccaagttggatcccccgaatgaagcagatgtggctgtggtgtgacccttgctccctgctacacagagcatcgcagggctggcctgtgtggtttccagatgagggtctgggtcccggaagcttgtgttgagagctcagtggacccaccccgcttgctgaaccctcacagttcttggggttgtccagcctggacttgtagcacacatgtcctgaagcaaagctccggtgactgcatgagccacctggccacagtcctcccatggagggcctgccgtgacgctcagtggagagggcagggcctgtgtctccacttaggccacacagtgatgaggaaaccacagatggagcttcttgccgataatactgactctagcccatgattgccttgcccaagccaaagaggaaggttaggttggcttgtcgagcccttgagcgttgggagatggggtgggaaggaggtgagcccctgcagagagttgggtagtgtccttcaggaatgaaaggaggggcaaaggagtcaccagaggtcctgcatttccatcagggtttccacagtcatcagggcttctctcttgagttgctgataggagatgtgagttatgcccagagatgtcttatcgtgaggaaaaagaaacttccttttgttcacattcaggactctcagtgccatatgaagtagcaaaaggcagtatcggccagatcagtgttacattgattctaaaattacagtgtccccattagacaactattttaggtgctggagtatgtttgaagagtgtgctgggaaaaaggaagcatttcttcattgatttaaatcagtatgaatattatatgcctaaataaaaaatttgcacaggtaaattctctcacttgtgaatgggagaagctgccccaggaatctgtgaggatggtattccctggagtctggctttgaaagatttcattgttggtagaaataacaggttgagaaagagggagttagcatcacctaaaacctgcacgtgaacaagggttgacatgatacactatggccttagaaaagggccaggtgaaaccccaagctaatcactgcggtctttcagagccggacagacaggtgccagcagagcccggggctcactctcctttcagtcattcctcagcccttcgaagggaagcccaaacactttgcacgctgtgctgcagacattctggcctggtgtgtctgaaagttgcatcagtcctcacggtgcaaacacagttgatttaggaagtcacacaatgacactgaaatcctacagaccaaaatccacttgtcagcaggagcagcagcccaggcccagcaccagcggtcttccggctcctctgagggctgccacgttgggcgaggggagccatgccaagggtccaggctgctttaggccatctgtgccccactcatctggggacagatggtttttctttattgtaaaattgtggacttttaaaacctgttgactaaacagtaattaatttatatttgtgaaaaatgccactgtcctagtgatttctgatgtaaataatgttgtttatatagtatgtattaaattttcctacattgtaaaactgctgtacttttgattcttgtatattaaaaagtgttactgagcatttttagaattgggctaacaaaaaaaaaaa

SEQ ID NO: 36870 - DNA, 1765 bp, Homo sapiens
gcatcttgttctgctgctccaggaaccgtaccttgtctagagagcaccaccacttcagtgcttgctggtgtcctgggcagcaccatgaatgcctttaccaagacatgccaagttggatcccccgaatgaagcagatgtggctgtggtgtgacccttgctccctgctacacagagcatcgcagggctggcctgtgtggtttccagatgagggtctgggtcccggaagcttgtgttgagagctcagtggacccaccccgcttgctgaaccctcacagttcttggggttgtccagcctggacttgtagcacacatgtcctgaagcaaagctccggtgactgcatgagccacctggccacagtcctcccatggagggcctgccgtgacgctcagtggagagggcagggcctgtgtctccacttaggccacacagtgatgaggaaaccacagatggagcttcttgccgataatactgactctagcccatgattgccttgcccaagccaaagaggaaggttaggttggcttgtcgagcccttgagcgttgggagatggggtgggaaggaggtgagcccctgcagagagttgggtagtgtccttcaggaatgaaaggaggggcaaaggagtcaccagaggtcctgcatttccatcagggtttccacagtcatcagggcttctctcttgagttgctgataggagatgtgagttatgcccagagatgtcttatcgtgaggaaaaagaaacttccttttgttcacattcaggactctcagtgccatatgaagtagcaaaaggcagtatcggccagatcagtgttacattgattctaaaattacagtgtccccattagacaactattttaggtgctggagtatgtttgaagagtgtgctgggaaaaaggaagcatttcttcattgatttaaatcagtatgaatattatatgcctaaataaaaaatttgcacaggtaaattctctcacttgtgaatgggagaagctgccccaggaatctgtgaggatggtattccctggagtctggctttgaaagatttcattgttggtagaaataacaggttgagaaagagggagttagcatcacctaaaacctgcacgtgaacaagggttgacatgatacactatggccttagaaaagggccaggtgaaaccccaagctaatcactgcggtctttcagagccggacagacaggtgccagcagagcccggggctcactctcctttcagtcattcctcagcccttcgaagggaagcccaaacactttgcacgctgtgctgcagacattctggcctggtgtgtctgaaagttgcatcagtcctcacggtgcaaacacagttgatttaggaagtcacacaatgacactgaaatcctacagaccaaaatccacttgtcagcaggagcagcagcccaggcccagcaccagcggtcttccggctcctctgagggctgccacgttgggcgaggggagccatgccaagggtccaggctgctttaggccatctgtgccccactcatctggggacagatggtttttctttattgtaaaattgtggacttttaaaacctgttgactaaacagtaattaatttatatttgtgaaaaatgccactgtcctagtgatttctgatgtaaataatgttgtttatatagtatgtattaaattttcctacattgtaaaactgctgtacttttgattcttgtatattaaaaagtgttactgagcatttttagaattgggctaacaaaaaaaaaaa

SEQ ID NO: 36871 - DNA, 1323 bp, Homo sapiens
cgactagtcccaaccataccttcctctttggcttgggcaaggcaatcatgggctagagtcagtattatcggcaagaagctccatctgtggtttcctcatcactgtgtggcctaagtggagacacaggcccctgcagagagttgggtagtgtccttcaggaatgaaaggaggggcaaaggagtcaccagaggtcctgcatttccatcagggtttccacagtcatcagggcttctctcttgagttgctgataggagatgtgagttatgcccagagatgtcttatcgtgaggaaaaagaaacttccttttgttcacattcaggactctcagtgccatatgaagtagcaaaaggcagtatcggccagatcagtgttacattgattctaaaattacagtgtccccattagacaactattttaggtgctggagtatgtttgaagagtgtgctgggaaaaaggaagcatttcttcattgatttaaatcagtatgaatattatatgcctaaataaaaaatttgcacaggtaaattctctcacttgtgaatgggagaagctgccccaggaatctgtgaggatggtattccctggagtctggctttgaaagatttcattgttggtagaaataacaggttgagaaagagggagttagcatcacctaaaacctgcacgtgaacaagggttgacatgatacactatggccttagaaaagggccaggtgaaaccccaagctaatcactgcggtctttcagagccggacagacaggtgccagcagagcccggggctcactctcctttcagtcattcctcagcccttcgaagggaagcccaaacactttgcacgctgtgctgcagacattctggcctggtgtgtctgaaagttgcatcagtcctcacggtgcaaacacagttgatttaggaagtcacacaatgacactgaaatcctacagaccaaaatccacttgtcagcaggagcagcagcccaggcccagcaccagcggtcttccggctcctctgagggctgccacgttgggcgaggggagccatgccaagggtccaggctgctttaggccatctgtgccccactcatctggggacagatggtttttctttattgtaaaattgtggacttttaaaacctgttgactaaacagtaattaatttatatttgtgaaaaatgccactgtcctagtgatttctgatgtaaataatgttgtttatatagtatgtattaaattttcctacattgtaaaactgctgtacttttgattcttgtatattaaaaagtgttactgagcatttttagaattgggctaacaaaaaaaaaaa

SEQ ID NO: 36872 - DNA, 2697 bp, Homo sapiens
agcaggtacacccctcaaatgtgttcttgggagaagtgatacactcggcctcattatgtgaaacctgtgggtggggttggggtggagaagtagagagagggcaacagcttccacaactgcttcatctctgccaacactaatttttcccacactgtctttgtacatttcagagctttggtctcctgagtgggcctccttttcccactgtgccaggaaggtaggtttctctggctgactgagtactgtgagtgaggcaacactgatgccagcatgggtcttacttgactggggagtaggctgagtgaggggtagggtggggtaggtggggagtagtgtggccaggaactggaatccctggtggatttctgattcctgtggtgagaaggaaagctacaggacctggagaaggggatgcagaggcaggcctgctgaccaacttgttgcaatcacaaaggtgggggtcctggtgcaggcagtgaacaggcttctaatgtggggttcagtagtgccagcaagtgggggaaactttcagtattgcgctaggtcaacacttcctgctgcatttccttccctttgcacagcttgaagaaatagagtagacagaatcacacatcatgtggtgggcagatggaaataagtacctgtggtgaacaagtttctactgtagttggagatcattagaattgaattcagtttctcttagaatataatcaggtataaacctaagttaaactttttcccaaacaaggagcatccaaagacacagtgacttgagctatagatagtaaaaatcatacgagagttgaactgagtcaggtttaggaagcaagtttggttgcatcaattaagcaggctcttttcaattgactgatgctggggccttcagttttattctcagtatagattgccagtattgttaagagtatccaaaggcctttctagatggagacagaataactgacttgaacatacagtgtgcctgtaagtgtccaggctcagagctggtgaaaacccttctgttgggcgtgtgcagggttaaactcctgaagtaacttgtgaggacttcagtgcttgctggtgtcctgggcagcaccatgaatgcctttaccaagacatgccaagttggatcccccgaatgaagcagatgtggctgtggtgtgacccttgctccctgctacacagagcatcgcagggctggcctgtgtggtttccagatgagggtctgggtcccggaagcttgtgttgagagctcagtggacccaccccgcttgctgaaccctcacagttcttggggttgtccagcctggacttgtagcacacatgtcctgaagcaaagctccggtgactgcatgagccacctggccacagtcctcccatggagggcctgccgtgacgctcagtggagagggcagggcctgtgtctccacttaggccacacagtgatgaggaaaccacagatggagcttcttgccgataatactgactctagcccatgattgccttgcccaagccaaagaggaaggttaggttggcttgtcgagcccttgagcgttgggagatggggtgggaaggaggtgagcccctgcagagagttgggtagtgtccttcaggaatgaaaggaggggcaaaggagtcaccagaggtcctgcatttccatcagggtttccacagtcatcagggcttctctcttgagttgctgataggagatgtgagttatgcccagagatgtcttatcgtgaggaaaaagaaacttccttttgttcacattcaggactctcagtgccatatgaagtagcaaaaggcagtatcggccagatcagtgttacattgattctaaaattacagtgtccccattagacaactattttaggtgctggagtatgtttgaagagtgtgctgggaaaaaggaagcatttcttcattgatttaaatcagtatgaatattatatgcctaaataaaaaatttgcacaggtaaattctctcacttgtgaatgggagaagctgccccaggaatctgtgaggatggtattccctggagtctggctttgaaagatttcattgttggtagaaataacaggttgagaaagagggagttagcatcacctaaaacctgcacgtgaacaagggttgacatgatacactatggccttagaaaagggccaggtgaaaccccaagctaatcactgcggtctttcagagccggacagacaggtgccagcagagcccggggctcactctcctttcagtcattcctcagcccttcgaagggaagcccaaacactttgcacgctgtgctgcagacattctggcctggtgtgtctgaaagttgcatcagtcctcacggtgcaaacacagttgatttaggaagtcacacaatgacactgaaatcctacagaccaaaatccacttgtcagcaggagcagcagcccaggcccagcaccagcggtcttccggctcctctgagggctgccacgttgggcgaggggagccatgccaagggtccaggctgctttaggccatctgtgccccactcatctggggacagatggtttttctttattgtaaaattgtggacttttaaaacctgttgactaaacagtaattaatttatatttgtgaaaaatgccactgtcctagtgatttctgatgtaaataatgttgtttatatagtatgtattaaattttcctacattgta

SEQ ID NO: 36873 - DNA, 3037 bp, Homo sapiens
agcaggtacacccctcaaatgtgttcttgggagaagtgatacactcggcctcattatgtgaaacctgtgggtggggttggggtggagaagtagagagagggcaacagcttccacaactgcttcatctctgccaacactaatttttcccacactgtctttgtacatttcagagctttggtctcctgagtgggcctccttttcccactgtgccaggaaggtaggtttctctggctgactgagtactgtgagtgaggcaacactgatgccagcatgggtcttacttgactggggagtaggctgagtgaggggtagggtggggtaggtggggagtagtgtggccaggaactggaatccctggtggatttctgattcctgtggtgagaaggaaagctacaggacctggagaaggggatgcagaggcaggcctgctgaccaacttgttgcaatcacaaaggtgggggtcctggtgcaggcagtgaacaggcttctaatgtggggttcagtagtgccagcaagtgggggaaactttcagtattgcgctaggtcaacacttcctgctgcatttccttccctttgcacagcttgaagaaatagagtagacagaatcacacatcatgtggtgggcagatggaaataagtacctgtggtgaacaagtttctactgtagttggagatcattagaattgaattcagtttctcttagaatataatcaggtataaacctaagttaaactttttcccaaacaaggagcatccaaagacacagtgacttgagctatagatagtaaaaatcatacgagagttgaactgagtcaggtttaggaagcaagtttggttgcatcaattaagcaggctcttttcaattgactgatgctggggccttcagttttattctcagtatagattgccagtattgttaagagtatccaaaggcctttctagatggagacagaataactgacttgaacatacagtgtgcctgtaagtgtccaggctcagagctggtgaaaacccttctgttgggcgtgtgcagggttaaactcctgaagtaacttgtgaggacttcagtgcttgctggtgtcctgggcagcaccatgaatgcctttaccaagacatgccaagttggatcccccgaatgaagcagatgtggctgtggtgtgacccttgctccctgctacacagagcatcgcagggctggcctgtgtggtttccagatgagggtctgggtcccggaagcttgtgttgagagctcagtggacccaccccgcttgctgaaccctcacagttcttggggttgtccagcctggacttgtagcacacatgtcctgaagcaaagctccggtgactgcatgagccacctggccacagtcctcccatggagggcctgccgtgacgctcagtggagagggcagggcctgtgtctccacttaggccacacagtgatgaggaaaccacagatggagcttcttgccgataatactgactctagcccatgattgccttgcccaagccaaagaggaaggttaggttggcttgtcgagcccttgagcgttgggagatggggtgggaaggaggtgagcccctgcagagagttgggtagtgtccttcaggaatgaaaggaggggcaaaggagtcaccagaggtcctgcatttccatcagggtttccacagtcatcagggcttctctcttgagttgctgataggagatgtgagttatgcccagagatgtcttatcgtgaggaaaaagaaacttccttttgttcacattcaggactctcagtgccatatgaagtagcaaaaggcagtatcggccagatcagtgttacattgattctaaaattacagtgtccccattagacaactattttaggtgctggagtatgtttgaagagtgtgctgggaaaaaggaagcatttcttcattgatttaaatcagtatgaatattatatgcctaaataaaaaatttgcacaggtaaattctctcacttgtgaatgggagaagctgccccaggaatctgtgaggatggtattccctggagtctggctttgaaagatttcattgttggtagaaataacaggttgagaaagagggagttagcatcacctaaaacctgcacgtgaacaagggttgacatgatacactatggccttagaaaagggccaggtgaaaccccaagctaatcactgcggtctttcagagccggacagacaggtgccagcagagcccggggctcactctcctttcagtcattcctcagcccttcgaagggaagcccaaacactttgcacgctgtgctgcagacattctggcctggtgtgtctgaaagttgcatcagtcctcacggtgcaaacacagttgatttaggaagtcacacaatgacactgaaatcctacagaccaaaatccacttgtcagcaggagcagcagcccaggcccagcaccagcggtcttccggctcctctgagggctgccacgttgggcgaggggagccatgccaagggtccaggctgctttaggccatctgtgccccactcatctggggacagatggtttttctttattgtaaaattgtggacttttaaaacctgttgactaaacagtaattaatttatatttgtgaaaaatgccactgtcctagtgatttctgatgtaaataatgttgtttatatagtatgtattaaattttcctacattgtaaaactgctgtacttttgattcttgtatatttttttttttttttttttatggggcaggtatggagtttcactcttgtcacccaggctggagtgccgtggcgcgatctcggctcactgcaacctcagtctccagggttcaagcgattctcctgtctcagcctcccatgtagctgggattataggcgcatgccaccatgcccagctaatttttatatttttagtaaagacggggttttcatcatattggacaggctggtctggaacacctgacctcaggtgatccgcctgaggcctcccaaagtgctgggattccaggtgggagccacagcgcccggcctctc

SEQ ID NO: 36874 - DNA, 733 bp, Homo sapiens
tccgagctcgttggacgatactgatggccgaacacggttgagaaagagggagttagcatcacctaaaacctgcacgtgaacaagggttgacatgatacactatggccttagaaaagggccaggtgaaaccccaagctaatcactgcggtctttcagagccggacagacaggtgccagcagagcccggggctcactctcctttcagtcattcctcagcccttcgaagggaagcccaaacactttgcacgctgtgctgcagacattctggcctggtgtgtctgaaagttgcatcagtcctcacggtgcaaacacagttgatttaggaagtcacacaatgacactgaaatcctacagaccaaaatccacttgtcagcaggagcagcagcccaggcccagcaccagcggtcttccggctcctctgagggctgccacgttgggcgaggggagccatgccaagggtccaggctgctttaggccatctgtgccccactcatctggggacagatggtttttctttattgtaaaattgtggacttttaaaacctgttgactaaacagtaattaatttatatttgtgaaaaatgccactgtcctagtgatttctgatgtaaataatgttgtttatatagtatgtattaaattttcctacattgtaaaactgctgtacttttgattcttgtatattaaaaagtgttactgagcatttttagaattgggctaacaaaaaaaaaaa

SEQ ID NO: 36875 - DNA, 1682 bp, Homo sapiens
agcaggtacacccctcaaatgtgttcttgggagaagtgatacactcggcctcattatgtgaaacctgtgggtggggttggggtggagaagtagagagagggcaacagcttccacaactgcttcatctctgccaacactaatttttcccacactgtctttgtacatttcagagctttggtctcctgagtgggcctccttttcccactgtgccaggaaggtaggtttctctggctgactgagtactgtgagtgaggcaacactgatgccagcatgggtcttacttgactggggagtaggctgagtgaggggtagggtggggtaggtggggagtagtgtggccaggaactggaatccctggtggatttctgattcctgtggtgagaaggaaagctacaggacctggagaaggggatgcagaggcaggcctgctgaccaacttgttgcaatcacaaaggtgggggtcctggtgcaggcagtgaacaggcttctaatgtggggttcagtagtgccagcaagtgggggaaactttcagtattgcgctaggtcaacacttcctgctgcatttccttccctttgcacagcttgaagaaatagagtagacagaatcacacatcatgtggtgggcagatggaaataagtacctgtggtgaacaagtttctactgtagttggagatcattagaattgaattcagtttctcttagaatataatcaggtataaacctaagttaaactttttcccaaacaaggagcatccaaagacacagtgacttgagctatagatagtaaaaatcatacgagagttgaactgagtcaggtttaggaagcaagtttggttgcatcaattaagcaggctcttttcaattgactgatgctggggccttcagttttattctcagtatagattgccagtattgttaagagtatccaaaggcctttctagatggagacagaataactgacttgaacatacagtgtgcctgtaagtgtccaggctcagagctggtgaaaacccttctgttgggcgtgtgcagggttaaactcctgaagtaacttgtgaggacttcagtgcttgctggtgtcctgggcagcaccatgaatgcctttaccaagacatgccaagttggatcccccgaatgaagcagatgtggctgtggtgtgacccttgctccctgctacacagagcatcgcagggctggcctgtgtggtttccagatgagggtctgggtcccggaagcttgtgttgagagctcagtggacccaccccgcttgctgaaccctcacagttcttggggttgtccagcctggacttgtagcacacatgtcctgaagcaaagctccggtgactgcatgagccacctggccacagtcctcccatggagggcctcgccaacagaaaggtcacttattgaaacccaagtccctgcagtttgccagaccagagtcggctccagattccaacctgtggcttttaaaggcgcaggaccagctctgatgtgaggcgttgccttaactgaagccccctgcaccagtcctttctgtcatatctcatgggacccatttggtctcccagcccacctcaaatctgttctgatcagtgagcgggtggggaggagaaggtgcagctggattcagtgaaagttccatcctgcagaaacctgggcactaattgaggagctgttc

SEQ ID NO: 36876 - DNA, 475 bp, Homo sapiens
ccaaccagtctggttctgctacaaagcttgtctccatgttccatcttccacattttgttggtttttaatagtagaaggatgaacccatggtggtgtgcagagctggtcatgccatacctcatggagtgtgagatgtgtcatcttgtatttgtgagaacccaatgcccgactgttcattgcaattctggtagatatctaagaggttattttgttattttattttttttatttattatatgtgtttgttagagatagggtcttgctctgttgcccaggctggagtgcaatggctattcacaggcacaatcatagcacactacaacctcaaactcttggcttcaagcagttctctcgcctcaaccttttgtgtagctgggactacaggtgcatgccaccacacccaactctaggaagtcattttgaattgagattgctcttgaggtattttggagcatgtcatttgttatatgctttt

SEQ ID NO: 36877 - DNA, 708 bp, Homo sapiens
ctactcatgggcacttatctacccaagctctgcccccgatgcctaccttctcacacgtctgcctgcgcatttggggaagttgacagcttttctgtgcaggtggatgtggaggacggacaaacccaagactgaggctccacttaccaaacacataagatgctgccacacgtcaaagacacactggcatttgctctggtctctcagccccttctggcattcctctggggtgacattgctggaggcagtgactcccaaggtcagactggactgggtctgctgaccactctagaggccaccaggttggggaaatgctaacgatacttaagagctcactgcctagtcaaagagatctgaaacaagcagagaatgtcataaaacaccaagtccagctggcaaacgttgctgctgggaaagtaagcgccatggcatggcctcatccctgaagtgtcataggtctgaggggtgtgtaggaatgagacagagaagggacaggtgaggttattcctgacaccatgaccagctggaaattgaagaggtggagatgaggtagggcaaagagaaaagggaacccatgcttacccatgcaccagccatctgctttccacacgccattatgttaaacccaccgggactctgtttccctgttttacatgtgaagacgtcacatgtttggtcacagctccagtaggtagcagagcctgcctttgg

SEQ ID NO: 36878 - DNA, 386 bp, Homo sapiens
gtggggattgatcagaggaaagtgtgccaagtgggaagaggggttatcaatccggtccgtggatttacccaacacttgtagcttggctttcaggctttaaactgtctttggtttgcaggtggggtttcactggggccctgcccctatctgcctagggatttgtctgcctcctgccgctatcacatagactatcatatacttaatatttttgtttgaatccaatcattcttttacataaaataaactttattttgctatttcaaatataacgtagccataagataccttctgttgatggtaaacaaaattgttggtgcctgcagaagagcccaaaccctgctatttgttcaaaatcaagattaaaagcatttctacaacactacaac

SEQ ID NO: 36879 - DNA, 406 bp, Homo sapiens
ttgaggccaggagtttgaggccggcctgggcaatatagtgagaccccctctctaccaaaaactaacagatgtgttaatttttagccctagctacattgggaggctgaggtggaaggatcgcttgaggccaggagttcaaggctgcagtgagctatgatcatgccactgtattccagcctgagtgacagagtgagaccctgtctctaaaattaaaaaaagaggagtcacttgaatatctcttaatgaaaattgtaaagtgcagtttctagtgatgtccccgcaactgccaaagcagaaattaagtcgaattgacatatttgccaggtgcacttggcctgctcatgtgttttaaatagtatctatactaacctataactgcaagagaagagatagaccaaaaagacag

SEQ ID NO: 36880 - DNA, 837 bp, Homo sapiens
gacatttccatccacccaggttgctaagctctgaacccttgagtcatcaggaacgcctccctccccttcatctctccctagcttggacaccctgcccccaactaaagcctgggtccacctcctaaagcgcccgcatgtctgcttctccctacccccatgcctctcacctggattgttgttgtggcttcctaactgacctttaccctgcacactgccaccagcatgatttcttgaaaacataaatttcagtgggtcacttcctgaactcatagacaatagaaaattgtctatgagttccccaaaggcatcgcagtctagtaatgaagattcacactgcccaggttcaaggcctcgtgatgcttcttaccacctctggcttgggaatgtttttaacggctgtgtctcagtttactcatctctgaaacgggtgtgataatagcacttacctcacagataagttatgaaatgtaaatgagttaataggtgtgaagcactcataaccatgccggccacacagaaatcctcagtgaacattattcttgatctctctttcctttgtagaacaagctcatctttcttgtggctctccacaatagctcctacctccacctttctcagtgccaggcaaagcttgatcagcagacagacctctttgttagcaatctgcagctagataagtccatatttggtaatttttatagcaatttgaccatcattttacatctgttgaatctgattaggaactggacttgtattttgtcccatttttggcagttccttttcgctgaatttttatgaaagaattagtccatattgaattggaagtaaaaaaaaaaa

SEQ ID NO: 36881 - DNA, 816 bp, Homo sapiens
tgcaaataagaatttgcagggaaatctgctttttgttcagaaataagctgtaatgagtgtggcattttgcatacacactgtgttatttttgaagggaggaaagtttagggttttggaactgttctccctacccccatgcctctcacctggattgttgttgtggcttcctaactgacctttaccctgcacactgccaccagcatgatttcttgaaaacataaatttcagtgggtcacttcctgaactcatagacaatagaaaattgtctatgagttccccaaaggcatcgcagtctagtaatgaagattcacactgcccaggttcaaggcctcgtgatgcttcttaccacctctggcttgggaatgtttttaacggctgtgtctcagtttactcatctctgaaacgggtgtgataatagcacttacctcacagataagttatgaaatgtaaatgagttaataggtgtgaagcactcataaccatgccggccacacagaaatcctcagtgaacattattcttgatctctctttcctttgtagaacaagctcatctttcttgtggctctccacaatagctcctacctccacctttctcagtgccaggcaaagcttgatcagcagacagacctctttgttagcaatctgcagctagataagtccatatttggtaatttttatagcaatttgaccatcattttacatctgttgaatctgattaggaactggacttgtattttgtcccatttttggcagttccttttcgctgaatttttatgaaagaattagtccatattgaattggaagtaaaaaaaaaaa

SEQ ID NO: 36882 - DNA, 814 bp, Homo sapiens
actgtcagcgaggccattcctagcacactgcatttggagacctgaagtgcagtgccatctcctccccttgtaacatgtttgccctgcatacagaatttcctctcctagctcacaggcacccagggtcatacctgccgagagtcaagggcgaaattctggatccccgttcaaaacatctttgttttcaccagtccccatttagagggccctgctaaatacgagcagtccctgtgaactcctaaggaggactttccacccacatcattttctgcttattttcaaaagggaaacaaaaaatcgatgtgttatcaccatcagctacccagagctgggtccatgtccagcactcctgtttcctctccttttcgtacaaccctgacagcttggtcggtgccagccacaggcctatgacattctctgccaccaccaccaaaatctgataggacagagtggagccagcttaggagttgggtctgccatgaaaattcaaaattgctgttttcagcccagaataccttggcgcacatgaacgcccttactgttttcaactttaacaaattacttggtgcactgttaggtaattgttccactgcttagaaactgtcgaaacaaaagcaaatctgtggattaccacctctttcagaccaaactaatacctgcttttcctcgtgttccatttttcatcccatattaaatatcttgcacataaaacatatgaaaaaatggccaattaatctcctggagctggcaactgactccggggaaccgctttttgctgaaaggctcattccctagtgtatcacttgaggaaatc

SEQ ID NO: 36883 - DNA, 384 bp, Homo sapiens
tctaggcttgcttagccaccagaggctgaggatgcaagcaggggagagttcagctccaataggctggggaagaaaggttggatggggagggtgtagtggccctgagacttgagcagaaatagtgaaaggaaccacttcctgcagctgagaggcaggagccatcatgttctgttgtgggcattttctagaatgttccagccaggaccagcagctcaaatggctcttccctggtggtgggtagggcaataggagataggagggaccttcaatgtggcaactgtgaggtttggccaatcaacttacccatgctgagcttcggtttctcttcagtgaaatggggataattaatgatcgtatcagcttacatgacggttgtgagaatta

SEQ ID NO: 36884 - DNA, 438 bp, Homo sapiens
gtgcattttcataccaccaaaatgtctgacttctgcacaatggtagagatatttttacccacgcttttttcaactggacttttccaggccagtgcctggaaagtatgagtgaaattattggagtaatttctcttccatgcatatgtgtctctgtggatgcagtgggttaaaatgccagctgattaggcaacgggaaagggaagtgctgctcagaccggaaggggaggggccgcatcctcgaatctctctcagtgtaaagcaatagaaggttcaaggtcataatacaattcctgcctcaaagttcgcatcaggggtcagaaaagcttcacatgggatatgttctgtaaaagagaacagtgtttcctctcatttcccacccaactaagggacctgagctcaagtaggaaattttataattgttttaaccgtcctactcaa

SEQ ID NO: 36885 - DNA, 962 bp, Homo sapiens
acaaaagaccacctcatctgttctttaaattatttgagctcaactttggttagacggtaacctgaacacagccaggcgctgtggctcacacctgtaatcccagcactttggggatatgaaactgaaaaaccgttttccatactaaagacctacggaaacatggctatactgttaatttgtttttgttaaaaagtaagtcatcagataagaactcaggcaggcactcagctttgaactggcctcccgccttgtcctcctacatagctgggactgtaagcattagccaccacactcggctcaggagtttaatattagtttttcttggtaggaggagaggtacacagggtctcactctgccactcaggctagagtgcaatgacacaatcataggtcactgtaatctcgaactcctgggctccagcaatccttctgcctcagtcatgagtagctgggactacaggcttgcacagccatacccagcttttttttgttttttgtagagatggggatttgctacattgcccaggctgctaccacatccagcccagatttactttttaaaaatatatgttacatccttatgtaatttataattttttaatgtttttatttaacatcagatttatatctttttcttcagagaatctttttaataaaagtactccttgaggccgggcacggtggctcacgcctgtcatcccagcactttgggaggctgaggtgggcggatcacaaggtcaagagatcaagaccatcctggccaacatgatgaaaccctgtctctactaaaaatacaaaaattagctgggcgtggtggtgggtgcctgtagtcccacctacttgggggggcggtgctgaggcaggagaaccgcttgaaccgggaagcggaggttgcagtaagccgagttcactccactgcactccagcctgatgacagagtgagactccatctcaaaaaaaaa

SEQ ID NO: 36886 - DNA, 560 bp, Homo sapiens
gatctcctgacctcgtgatgtacccgcctcggcctctcaaagtgctaggattacggtgtgagccactgcatttggccactaccttgggtttcttaatgatagggcaccacaggcttggtagctcatacctataatcccagcatttagggaggccagggtgggaggatcacttgagtccaggagtttgagatcagcctgggtgacgtggagagaccctccccgccactgctctacaaaaaattaaaataaaaattagccaccatagggaccgggcatagtcgtcacgcctgtaatcttagcactttgggaggctgaggtgggcagatcacttgatgtcaggagtttgagaccagcctggccaacatggagaaaccccatctctactaaaaaatgcaaaaattagccaggcatggtgacgagcgcctgtaatctcagctactcaggaggctgagacatgagaatcgcctgaacccggggtggggggtgcagggctgaggttgcagtgagcagagatcacaccattgcacttcagcctgcacaaaagaatgagacattgtctc

SEQ ID NO: 36887 - DNA, 1294 bp, Homo sapiens
gaaatagttcagtcctcggtaatttgtcaacctcgtgctggctttaaaattctcctcccaccttctagtcctgactgagggggcccaaaagcaaactccccgggggcttaaacgctcggattcctgagaaacggcaagtgagaaaggagttgcagttgtacgaagaaggagcgaggaaaaggtgtttgtggagggagccccggatctgtcttcctacctgttagccgagaacaaaagggggctggcgtttcccgaagcgaaagggcgcagacagccactttctctgctaaacaaactgcagtcctgggcataacaagaaaattactcacgcagggggagcaaggggagcacagagaaacagaacctagattatgcggaaggcatcttaatttaattaactccttgggaaggcagaggcgctctgaaggggcaggaacttcgcagccgtttctctattcacctgatacagtctggccctaacaatctgtcctttaacaattttttttctttttaatgatcttctttgatctacttagtctatagctctctaatttatataaaattctgctgtggtttgggctgaaattcagtgagcctacctatccgaccatcagtcatttatctcatataccagtgcacaggttttagcagatgaaccctgactgtatattatttttagataattcagtgtaatattaccattaccaaagagcgaaactccttatcaagttacttcttaatttttttctccaatgttttgaaagcttcactgaactgaaataagtgtgtacacatcttccttggtgacagccagtcaagtaaattttacaaaatttctccacatgcctggaaattcctgtgaagaagactgatgaaagaaaagtagcctcagctccaccaacatatttatgacttttcattggtttaagtttctttccttgcaagattaaaagtaaccagtggtctgaaacgggacggtggagaaatgacagcagatgatgatcgctgttatttcctgaaagggagtgtgggaactacaaggctcagctctagacaaaacgaaagtactttaggatctctgcattcacttaaaatacttcttttgacatacatttccagcaactcaatgggagtgtggaaatttaaccttcctaattatttgtggcaagagccattggtggatatttaaggttgttctgtttgtaaaagggtttcaaaaggaccaatggtttgctcttcctctatgaagaaactatctgccctacaaattaaaacaaacaggtactatgaaata

SEQ ID NO: 36888 - DNA, 510 bp, Homo sapiens
aaccaggtgtggggagacaggaggacgatagtgagagacaggaggtgaagtggacagaggtgactgggtcagacagtggggagtctattgaaacttgcaggggagttcacaaattcggattcaccacttcaggtctcagtgatataaactaaggctggaacagaagggtttgcttatatgcagtgagaagtctagttttataactatcattactttaaaaaatgtttcattccagctgggcgtggtggctcacgcctgtaatcccaggactttcagaggccgaggtaggtagattgtttgagttcaggagttcaagaccagactgggcaacctagtgagaccctgtctctacccctaatacaaaaagttagtcgggcatggtggtgcacatctgtggtcccagctatactcgggaggccgaggtgggaggatcacttgagtccaggaggcagaggttgcagtgagccaagatcgtgccactgccctccctagtgagtccccgtctcaaaa

SEQ ID NO: 36889 - DNA, 463 bp, Homo sapiens
aagatctgtgaaaggagaaaaatagcaactggatggaaacatcttcatgcttaaagtaatggcactctaaggttaaagaattgttggattgattttaccccctggattattttaggaatcttggagaatgacattgatttcagatttcaaaaaaagttagcagaggttgtagtgagccgaaatcaagccactgcactccagcctgggcaacagagcgcgagactccatctcagaaaaaaaaatagtatgtaatcaaaatcatagtttgatataaggcaaattaccttgtataattgcatttgtggttcagtagttattaggaactgacctagatatgtatcatatatgaagtgaattacctatcccaagttctcttccttacaccaccccctccaaaaaaaaaaggaaagttagaaagctaatcaaatccactaaattcacaaagcattgtaagaaaaaaaaa

SEQ ID NO: 36890 - DNA, 635 bp, Homo sapiens
gatggggtttcaccatgttgtctagtctggtcttgaactcctggtctcaagcaatccacccgcctcagcttcccaaaatgttggggttacagatgtgagccactgcgcccagcctgttgctgtttttttcaaaacaactctttgctgacccttctaaatccatccagggcagccccagaggcccagattggctggattcgtgtaacccttctcaactctgtaactagaatcatgaagggtggcactcgctttttatagaagaggaaaccgagtcccagacagggaagaggccgcttgattgacagaaaggggccccagaggctgttgaaaatttcccttcagccgtcagtgggtggggctggtagggtctcaccttgctcccaagactgttgccattagcaaccaacttcccctgttggttctgggggccctggaggggaagagggaagaaggtgaagcaatgctgtcaggtggcagctgagtgtctgtgccaggaggttatgcgggtgacaccaggaagaggcccaggcacacagagtcaccgcgtgcacagcccgttggtttgctcttcatcattcccagccatggggaaattatataaagacattgcattttttacaaaaacatctccccct

SEQ ID NO: 36891 - DNA, 232 bp, Homo sapiens
agagcgagattccatcttaaataaataaataaaaatataatacagaggcaggaaagtacaattactggtcagctttcctcgaactagatccctcccaatgccaggtgaccattggacaaagtggagaggggatttattaatattctactgcttatttcccaagatgaggattagctcttagccactgctgtcttccaaatgcagttacatcagcatctttagtaaaaaaacg

SEQ ID NO: 36892 - DNA, 875 bp, Homo sapiens
  misc_feature (40)..(40): n is a, c, g, or t
  misc_feature (43)..(43): n is a, c, g, or t
  misc_feature (45)..(46): n is a, c, g, or t
  misc_feature (96)..(96): n is a, c, g, or t
  misc_feature (99)..(99): n is a, c, g, or t
  misc_feature (203)..(203): n is a, c, g, or t
ttgactctagcaggatcctgattatccccaacacaaatantcncnnagtacacaaacataaactggtcctggtatttccataaacagtgcagctanganacagtttagagaaaatttaacaggattcagattatatccattctgtcctctcggccctgagaggtaataattcccatatgggtcctagtcctccccaatggttntcccatctctgatggaagagtccttttacaaagtggtgttgggcgatacccaacacatatatactccacaaggattttgcatggaccccagtttaagaagcaacaatttagtggtcagtagcattggcgctttggcttctgacacactcagaccttgggcctgtttctcaactttttctgaacctcagtgtttttgtgtattcaacagggataatattaattgaataattaggaggaacaaatgcaataatgtacataaagcatgcatagtagtgtttataaatagcagccaccactgctttgattagaaataataacagctaacatttgaggatttactgtgtgccttgaacgctgctaagctcttgtatatacattacatattgagtggtagaatcaggattcaaatccagatctgactccaaagcgcatgcttttataaaacataatttaaatatagaatatcaatgtaaattgcttatttagaaagtttattttcttatattttctcaaaaatatttattgtcaaatcagtgattctgtagaggggtaaatagctaaatttccttttaaaaattgtatgatgtgctgatttcaaattgatgtgatatacagatttcatttaaaggcagtcatgccagattgtgctacagtaaaggaatattcagacca

SEQ ID NO: 36893 - DNA, 647 bp, Homo sapiens
  misc_feature (14)..(14): n is a, c, g, or t
  misc_feature (18)..(18): n is a, c, g, or t
tcgctctacaggancttntatcgcccaacacatatatactccacaaggattttgcatggaccccagtttaagaagcaacaatttagtggtcagtagcattggcgctttggcttctgacacactcagaccttgggcctgtttctcaactttttctgaacctcagtgtttttgtgtattcaacagggataatattaattgaataattaggaggaacaaatgcaataatgtacataaagcatgcatagtagtgtttataaatagcagccaccactgctttgattagaaataataacagctaacatttgaggatttactgtgtgccttgaacgctgctaagctcttgtatatacattacatattgagtggtagaatcaggattcaaatccagatctgactccaaagcgcatgcttttataaaacataatttaaatatagaatatcaatgtaaattgcttatttagaaagtttattttcttatattttctcaaaaatatttattgtcaaatcagtgattctgtagaggggtaaatagctaaatttccttttaaaaattgtatgatgtgctgatttcaaattgatgtgatatacagatttcatttaaaggcagtcatgccagattgtgctacagtaaaggaatattcagacca

SEQ ID NO: 36894 - DNA, 355 bp, Homo sapiens
ccagacaggtcagatggtgacagttttctggggatggagctcttcttcagagttccaaacctcctcatccccttttcatgatggttaggctgctaattttcacaaccactgtgaatacaaggctgctagttttcaaggttgccacagagttggctagagaggaatgagaatagggtgagttaaaacaacacaaagctcactcttcttaccaatattcagccattttcttcttaaataagcatgccttagtttgttgaaagcttcaggctaatttctagaattctgaaaaagttgtttttaacaattttttccagtgttctcatagtttcgtggaagagcagacttttggaagtgc

SEQ ID NO: 36895 - DNA, 386 bp, Homo sapiens
tctttgagacagagtttccctcgctcttgtcacccaggctgttgtgcaatggcatgatctcagcacactgcaacctccacctcctgggttcaagcgattctcctgcctcagcctcccgagtagctgggattacaggcgcccaccatcatgctcagctaatttttttgtatttttagtagagacagggtttcaccatgttggccaggctggtgtggaactcctaacctcaggtgatccacccgcctcggcctcccaaagtgctggaattacaggtgtgagtcattgtgcctagccaaatttatataacttttcttttgggacttccaggattgtgtcatacttcaaaaggccttcctctcctgaagattattaaaacaaataaaacc

SEQ ID NO: 36896 - DNA, 481 bp, Homo sapiens
aattggacaagagtttcttcttggcttccatatgacatcaggtctttcctaaataaaagcaatcaatgcaggaaaaaaaaaaattcaaagataggatgccactctctttcacaacgattagtagttttatatttccttccagtcttgttgatgtggatttaactagtacatatttttaaatgctaaaaattgtatgtatttctttttatacctcacattatatcataaacatatatgtttctatataacctttatatgactaattacatcataaacatatttgcatgtttctatataacctttacgaatttaacaactgtataatattccttcaagttgatataccccagtttcttaaactatttctcttctgttaagtgtttgtagtgtttccctaatataagtaatgttttgttttcacctaggtcttagaaaaaaaaataagtactgttaataaacttttttggtgtataaacccttt

SEQ ID NO: 36897 - DNA, 374 bp, Homo sapiens
tacaagacaagacaccgaacagagaccagccatcatcctcagccttgttatgatagctgcctcatgtgctgcccgtgcctggattcccgagtctgacatcgccctcgtaggtgccggacgggcagcctctcacgccgtgacccctgctcctagcacaccatttctaaaaggtggatcaccgccgagcagttagaatgatatggaactgctttgtctttttcttatgcatttaaaaatactttcaggccaggcgtggttgctcacgcctataatcctaacagtttgggaggccaaggcagaaggatcgcttgggccaagtagttcaagactgggcaacatggtgaaaccccatctctacaaatacagaaagaata

SEQ ID NO: 36898 - DNA, 98 bp, Homo sapiens
gaattttgcatgtaggtgaaaatgacttatgacttattttatgttttcatttggggcttcttaataccgtctcttgattccctttcatcatctttttc

SEQ ID NO: 36899 - DNA, 296 bp, Homo sapiens
ccgaaaggatcttgaggacccctgggtttccctggaccacacttcgtgaattgctgctgtagggctttgtcggcttcggtagaaattttgaacttcaataagcaaatagagagttatgagcagcatcccctgggctcatgttccttcctgaaaaatgccctcttgggccactgctgcatggagcaagggttattggggcaggatggggagctgggagacctgtcgggccaccttgggtgtctccccaggcaagagaggatgacgctcgaatggacatggtggccactgaggtggag

SEQ ID NO: 36900 - DNA, 1318 bp, Homo sapiens
taatttttaaaggcaatttagtatacatgatgagctagctttgaaatacagatttaaatgtttaaaaattaatttgagggcaagatttggtaccaaagtttcaaaaattttatttcactgcttataaaatactttatcagaacacttattttaaaaaataacatcttatttgaaaaactccaaatttgatgggatagttacaccatcatacaattttaaaggtagaattagctttctaatactttaaaatattttctgaaatgaacatttcacttggtttaggaccgtgtctgtaagtaaaagacaccaatgctaatagatatgacttacaaaaatgccacatatcgaaattgattgaggattgaaatatatatactttggcattgagaagagaggaagagaaaaaaataaaaaaagtgtgacattgtaatatttattgtatttaataaatcttgaagaaagaactcttgagcaatgaaccagtgacaggatataaaagcctgttttatttgatgacatcattaactgagttttctcatctatacattcatacatcgagaaggaactgtccttaaaaaccagtgtttctttttttttttaagttctagcgtacatgtgcagaatgtgcaggtttgttatataggtatacacgtgccatggtggtttgctgcacccatcaacctgtcatctacattaggtatttctcctaatgctatccctccccagtgatatttgttaatatgcttttttaaaaaagtgtctgccttgaaactggtaattaaaaaatatctcctagggcatttaattatttttcccaataaacaactcatagataacgggttgactaatgttatctttatttagaaaatttgtatgtaaactgtgtaaacttgtctgagttaaccaatagactaccggggttttagcatggtaaactgatatacagggagacccaaatacaggcttgctttgctgactacccagcgtgctttattacaggagatgcaaaaggtggaagaccagttacacctttttttttttttttttaaaacctggacatcctttctctggtgacaagagccatccttatggtaaggaaggtgagatagaaaatggagaacctttggtaatgttgatctttcttgtgggtgtccacctagcctaaaagccaagtgaagaagaacataaaaaagcagaagaggaaaaatgaagaaaagaggaaaaagagggtggggccagagaaataaagagtaggattagtaagtgaaagaaaaagttgctttgttgtgtggggggggtgttcttgcttgctatactc

SEQ ID NO: 36901 - DNA, 570 bp, Homo sapiens
ggactgtcaatactatttgctgaatttattcaaatcacacttcactctttccctctgtgctctggccacactggccttctttcactttctctaaattgtcatgtactgtttcatctcaaggcctttgtatgtgctgtttcctggcttacaatgctttccccctttatctacttctcattcttgagatcctagttactatttcctcaaagaactcttccccagactccagctcccataattcctcatgcttttggtgtatcgcacttttttcaatatatttttcaagttttactttgaatgatgttaattacagcatttgaaggggaggatctaaattcacacaaaatggaaggctctaaaatacacccattaaactgctaaaaaataaattgagtggtgagaatacaacggaagtccaatttagattctgagtgttgtcaccatgtgattcttccaagcttatatccagaactcctggaagctatttcatattctggtggggggggcacaaaaccacagcatgagaaggaattaagtcctgaattattggcttcatcatatccaccctct

SEQ ID NO: 36902 - DNA, 793 bp, Homo sapiens
ccacctcagcctcccaaagtgctgggattacaggcatgagccaccatgcctggcacacaattctgtatgatgtaaatatagcactcaaaattgtacatgttagtgtttttgccctcaattttatactttattatctagaaaaatattacatatacacagatgttatggatcttataccactttcttttctcagagttagagaatacattagtgaacatttctgtgttgaaaactattttattgaataatttcagtcattcatataagtcagaaccagctctctctactctctccattttaccttgagtcacattaaaagttctgcccatgaccaattggtaaatatatgtgtttgtgtgtgttttccagggagcattgacatttagggatgtggccatagaattctctctggaggagtggcaatgcctggattctacacagcagaatttatataggaatgtgatgttagagaactacagaaacctggtcttcctgggtattgctgcctttaagccagacctgatcatttttctggagcaaggaaaagagccctggaatatgaagagacatgagatggtggaagaacccccagttatatgttctcatttttcccaagagttttggccagagcaaggcatagaagattctttccaaaaaatgatattgagaagatatgacaaatgtggacatgagaatttacacttaaaaattagttgtaccaatgtggatgagtgtaacgtgcacaaaaaaggttataataaacttaaccagagtttaacaactaaaaaaaaca

SEQ ID NO: 36903 - DNA, 331 bp, Homo sapiens
attagggcctgtgtcatattgcaatgtcgtcttgcttatgtagtttgaataattttataggttagatttggaaactgtacttatctgagtctaatatgtagattaatttgttatttttatttcttttcagttatatgttctcatttttcccaagagttttggccagagcaaggcatagaagattctttccaaaaaatgatattgagaagatatgacaaatgtggacatgagaatttacacttaaaaattagttgtaccaatgtggatgagtgtaacgtgcacaaaaaaggttataataaacttaaccagagtttaacaactaaaaaaaaca

SEQ ID NO: 36904 - DNA, 243 bp, Homo sapiens
ggaaaaatataaaaattagatctattctgacaccattcatcagtataattttaaatgggccagaagtttaatgtaaaaactttaattattcaaatactataggaagcaaatgcttttataatgtggctacagattaaatttacatgactactagctaaaattcagaggcaatcagggagtaaagattgactaatttgattgcatagcagttttttaaaatggcaaaacattttcaccataagc

SEQ ID NO: 36905 - DNA, 964 bp, Homo sapiens
  misc_feature (6)..(6): n is a, c, g, or t
ggccgngagcctgtggcgggcaagcggggagaccccggcgcagcagaaccatggatggcccgacgcggggccatggactccgcaaaaagcggcggtcgcggtcgcagcgagaccgggagaggcgctcccggggcgggctgggggccggcgcggccggcggcggcggggctggccggacccgggcgctctcactcgcctcgtcgtcgggctccgacaaggaagacaatgggaagcccccgtcctccgccccgtcccggcccagacccccgcggaggaagcggagagagtccacctcggcagaagaggacatcattgatggatttgccatgaccagctttgtcacttttgaagcgctggagaaagatgtagcacttaagcctcaggaacgtgtggagaaacgccagacgcccctgaccaagaagaaacgagaagcacttaccaatggcttgtcctttcattcaaagaagagcagactcagccacccacaccactacagctcagatcgagaaaatgaccgcaatctctgccagcaccttgggaagagaaagaaaatgccgaaggcactcagacagctcaagccaggacagaacagctgcagggacagtgacagtgaaagtgccagtggagaatccaagggcttccaccggagcagctctcgggaaaggctcagtgatagttcagctccttccagcttgggaacaggctacttcagatcagggaagatgtgccttggagaggaagcatgtcttaaatctggaaatgatatgaagagggatgtcagcaacacttcatcctgggccagtaatagggagagtttcttttctctcgtcaaattgcttaaaggattctagttccgtttggtgtggtcactcacatttgaattctaatactctatgtgatatagattctgttgactactgttagcgtgaccccaatgagaaattaaacacttccctccttttca

SEQ ID NO: 36906 - DNA, 851 bp, Homo sapiens
  misc_feature (736)..(736): n is a, c, g, or t
ttatattttttatctttttaatttaatctaaataaatcaactttccccccacgagatcagggaagatgtgccttggagaggaagcatgtcttaaatctggaaatgatatgaagagggatgtcagcaacacttcatcctgggccagtaatagggagagtttcttttctctcgtcaaattgcttaaaggattctagttccgtttggtgtggtcactcacatttgaattctaatactctatgtgatatagattctgttgactactgttagcgtgaccccaatgagaaattaaacacttccctccttttcaaaaaaaaaatttttttttttacacaaaaacccaaaaccaaaaacaataaaaaaataccctccccccttcttacacacctcaatatcgtgcattagaagaacttataatatttattccctctcatcttaaatatgccttttctccttttatattccaaatcatctcctcacttttactcctcatttattcactgccttcttacttccacgttgattacattccacattcttttaccactctttccacgtctcttctacaattttccttcccttccctccattttttagtcttgtaccctacatcaaaattttcatccctctttttcccttatctatcttactcttaatcctgtctacccttcctacctccaatttctttcatttcctcccattcctttcccagtattatctctccacaatatcagtcgtnattctccctccccgtcatttcttctttttttcacttctttcctccccccccacactccccttactccctcatccgtcttctatcctcgcctccttcaaataatcctccaccctat

SEQ ID NO: 36907 - DNA, 1631 bp, Homo sapiens
  misc_feature (6)..(6): n is a, c, g, or t
ggccgngagcctgtggcgggcaagcggggagaccccggcgcagcagaaccatggatggcccgacgcggggccatggactccgcaaaaagcggcggtcgcggtcgcagcgagaccgggagaggcgctcccggggcgggctgggggccggcgcggccggcggcggcggggctggccggacccgggcgctctcactcgcctcgtcgtcgggctccgacaaggaagacaatgggaagcccccgtcctccgccccgtcccggcccagacccccgcggaggaagcggagagagtccacctcggcagaagaggacatcattgatggatttgccatgaccagctttgtcacttttgaagcgctggagaaagatgtagcacttaagcctcaggaacgtgtggagaaacgccagacgcccctgaccaagaagaaacgagaagcacttaccaatggcttgtcctttcattcaaagaagagcagactcagccacccacaccactacagctcagatcgagaaaatgaccgcaatctctgccagcaccttgggaagagaaagaaaatgccgaaggcactcagacagctcaagccaggacagaacagctgcagggacagtgacagtgaaagtgccagtggagaatccaagggcttccaccggagcagctctcgggaaaggctcagtgatagttcagctccttccagcttgggaacaggctacttcagatcagggaagatgtgccttggagaggaagcatgtcttaaatctggaaatgatatgaagagggatgtcagcaacacttcatcctgggccagtaatagggagagtttcttttctctcgtcaaattgcttaaaggattctagttccgtttggtgtggtcactcacatttgaattctaatactctatgtgatatagattctgttgactactgttagcgtgaccccaatgagaaattaaacacttccctccttttcatttgcagtgtgttttagtttaaccttcatttgtttctcttttctccattcctcatcccaattcaggtatcagatcctttgacaattgttaacctgcccagctgggatttttggcattaagctatgactgtaacgtttctactaataaattagattttttaaaagagtgctgcttgccaagaagcaaagtcattacatagtgtgtatatgttcaatgtatggctataaaagtctccttagccaaacataatcgacagttaaaataaatttaaaataaccgtgctacctctagattttaaaattgttaaggtgaagataggtggtctaattttactctatttccatttttcttattcacagggtatatttgttctgtaaaaccacatatgtatcttatagtctgcagctgatgtatttatctgcctaaatacacatttctccaatggaatattctgtaatatcaagcatttcttttttagatggaaattaattttataacagttgaacatcatctttgtcaatcagcagctttatctaccataaagaacaaaaacgtacttggcgtggcctgctttaacttttgtagttcctatgtttaaactgaacagaggaatattatgtgaacaaattggaaaattatataaagaaataaaaatctttttactatt

SEQ ID NO: 36908 - DNA, 1123 bp, Homo sapiens
  misc_feature (6)..(6): n is a, c, g, or t
ggccgngagcctgtggcgggcaagcggggagaccccggcgcagcagaaccatggatggcccgacgcggggccatggactccgcaaaaagcggcggtcgcggtcgcagcgagaccgggagaggcgctcccggggcgggctgggggccggcgcggccggcggcggcggggctggccggacccgggcgctctcactcgcctcgtcgtcgggctccgacaaggaagacaatgggaagcccccgtcctccgccccgtcccggcccagacccccgcggaggaagcggagagagtccacctcggcagaagaggacatcattgatggatttgccatgaccagctttgtcacttttgaagcgctggagaaagatgtagcacttaagcctcaggaacgtgtggagaaacgccagacgcccctgaccaagaagaaacgagaagcacttaccaatggcttgtcctttcattcaaagaagagcagactcagccacccacaccactacagctcagatcgagaaaatgaccgcaatctctgccagcaccttgggaagagaaagaaaatgccgaaggcactcagacagctcaagccaggacagaacagctgcagggacagtgacagtgaaagtgccagtggagaatccaagggcttccaccggagcagctctcgggaaaggctcagtgatagttcagctccttccagcttgggaacaggctacttcagatcagggaagatgtgccttggagaggaagcatgtcttaaatctggaaatgatatgaagagggatgtcagcaacacttcatcctgggccagtaatagggagagtttcttttctctcgtcaaattgcttaaaggattctagttccgtttggtgtggtcactcacatttgaattctaatactctatgtgatatagattctgttgactactgttagcgtgaccccaatgagaaattaaacacttccctccttttcatttgcagtgtgttttagtttaaccttcatttgtttctcttttctccattcctcatcccaattcaggtatcagatcctttgacaattgttaacctgcccagctgggatttttggcattaagctatgactgtaacgtttctactaataaattagatttttt

SEQ ID NO: 36909 - DNA, 2710 bp, Homo sapiens
  misc_feature (148)..(148): n is a, c, g, or t
  misc_feature (266)..(266): n is a, c, g, or t
ggtgtatgactacagcgccgccgacgaggacgaggtctccttccaggacggggacaccattgtcaacgtgcagcagatcgacgacggctggatgtacgggacggtggagcgcaccggcgacacggggatgctgccggccaactacgtngaggccatctgaacccgcagcgcccccatctgtcttcagcacattccacggcatcgcatccgtcctgggcgtgacccgtccattcttcagtgtctctgttttttaaaacctgcgacanttgtgattccacttcagtgttcatttttatttttctgaaagtaaagatactcctgtaaaatgccattgtccatagaaaaaatattaactcattaagtttaaagacagatgataccttaatattaacttacttacacgattttaaagacgcctactgagagaactcaaatttataaactctgttgcctaataattatggtttaattctatatcctcttgcttgttacagttatacttaatttgcagtagatttttaaatgaaattatttgaatgtattccagactattttatttaaaatcatcatacatcatatactttgaacctttattttctaatgcaatcataaacattttaagttttattaactcactagcatccccactgactatattctgttttgctttatctgctcaagcactttcgaccatattttattttaggatttttatttttatcttccacagctggatattgctatttcacttttatttcacatgcagctttaagacgtatgagcatcagcacagcaaaatggttccagcctacagaatgcagtctcccagggccctgccaagaacatatctgtatgtctggccctacaaatgacaaatggtaattcccttctattttagctcttaattagttgctttcactatttccgaatatacctgtggctaagtttttattgaaacactcaaaaataccacttctcagtatgaacacaattgctaagagcctaatttggttctggactatggtcaacctgtgtgccttgttagttctctccagcagctggtgagtaaggaaatgacccttcaatttcctcttctttttcctctgacctctgtgacttaatttttcttaatgtctccaagtcatcaagggcttaataatttatgaattttacaaaaagcatttaaggaataagaaagaggttctgtgatttttcagactctgaaaattcattttgattctacatattccagaaatatactgggttggatgctagagtgaagaaagccgtccagacaattctcccagtccattcatttcttcattcatttgttcattcagtagttattgagtgcttatttcctgggtgcctggctctaggctatgtcctgagacatacagtggacagggtctctaccctcctcacaacaccctcttcaccctccacgccaccccctactactcactctcaccctagcaaggagcttcgtgctaataagagagagtcttacctgaatggcaatcgcccagattaacagtggagacagtaatgcaatgcaggaagttaagtttttaaaggtgattctgtgcagtaaggtataaaacagatatataataaatagcctagcttagtctaacatctctttagaattacacagctaaaaaggaaaaaaaacaccaaaataagataaaataaaacaaatttaaacaccaaaataagatataataaaacatttgtttttgcaaaataaggcccaatgttatggcctaatgaaagctatatacttgtgctatctaaagcactactttgtaaagatgactacccaagattgtaaatacaaaatttaaaaaggtacttaaattttctggaatatccatgtttcagaggtaatatttactttctatttcagtggcttaaattataacgttttggcttaagtgtcttttatcaatacaatgataagacaccttaatcctgagagagaaaattaagtactgtatataggtgtactttgcttctcacaatgattgtgcaaaaagtcacgtgtaaattgaacttttgtaaatcaaattgtattttaaatgcattaggggagctgccatttagaggaaacttgtgaattctttcataaagcagaaaaccattttataatacaaataaccattctctgatttatctcttttgtatgtttggattttcaatatcgactttgcttaaaacagagcccacctgcatagtaactgtgttttgccaaggctgcttgtgctaccagtttgttggtggctaacggcttgtgcttgaaagtcttctgaagtctgatgtgaattgagctatcaagcaatgctatcatagcacagtagcagtcctgaacagtctgagcagccaacccatttcaacaaaattgaacacaggactcttctgctcagcagcatctcttttctcagatgtggccatgttacagtagagggtattccataagcacatattccataaagtgctcagagtcacaggttttataataaattatgttattatgtaaacgaattgcatgcatgttgaaattttttagcagtactttagcttgaaagtactcgtacaaatactgttagatttagttgcaaataattgttctcaagttattgcaataaatgtcaaatgaaacaagctcttgtgtaaatagacttctgtgcctaatagtgacattgtttca

SEQ ID NO: 36910 - DNA, 666 bp, Homo sapiens
ggccaggctagtcttaaactcctgacctcatgatctgcctggcttgacctcccaaagtgttgggattacaggcatgagccgttgcacctggccagggtgtgtcttattgaaattgaacaaaatacctaatttctagagcgtataagagaagtttaaaatgctttatggatgtgttgttttgacagcaaaatatctactcagaatcctatagctatttcaaaatccaagtaacttagaaaaaaaggaaaaagaaaacctatatagtcaaatcttttggtgattttgtattcaatgactgaaacttcccagtgattattgggctttttagctggaattgaacttgaatcggggcagagcagcacaatgcttcagaacttcagcgactctgagccctggttctgcaatgacctgccaagtagctttagtctacttgactgctctgaaccttaattttctcacctgtatgggaatcatagactctactttatgaggctgacgtaagcattacatgaaattttgtatacttatacataatgtgcttagcaccgaatacttggtgacagcagatgcccaatgagagttatcacagatattatttcagaatcgtgaagagtcagaagccaccaaattcttgatttctgtcaataaactgatattcatattctg

SEQ ID NO: 36911 - DNA, 285 bp, Homo sapiens
aaaagctataaatcagtcccttgatagtgctttgtaacatgtatgccaatatgtgaaattactttcatccatcagttataaatttaacaatggtatagtgtttatgtatgccttatatgagcataatcattccataaagatttgtgctaaattgtatattcagttgatgacatttatcatgaagcctgaaaacgtagtatgattttcagttagtacttactattggtagattattttactgtgtttgtacatgtgacaatcatgtttttgtttttcttttagttt

SEQ ID NO: 36912 - DNA, 384 bp, Homo sapiens
tactgggacaagcaacctgcaagagggtgagcttcctacctacaattccaaaataaatcccatctttctgaccagagatataaggaacagaaatccctgtaggccagaaagtgggaggagacttcagatagagctggagaaagggattctcacattctgtatacaaacccacaaaatcatggctcacttttgaggatgtgtgtgtatggaagagaaccaaaggtagcatagcaaaggctttagaaactgttctaagatttaaaatatcacccataatgattcctatgcaagatagactaaatcagcacatcaagacttttgaaaattgaacttcgattggaactatggtccacaggagttgtacagggccacatatataggaga

SEQ ID NO: 36913 - DNA, 488 bp, Homo sapiens
agtgatttttaaaatatgcagttctttatatcccaaaagtacttatatattttatttctatctcctcctggagacagattcaactagcctatcaaaattcttggatgcaattctttcttgtgaaagagcaagggaacttaaaaaatatccctgacctcgtgatccacccacctcagcctcccaaagtgctgggattacaggcgtgagccaccgcacccaaccatttgtcattttttattgtaggtacactagtgggtgttaagtgatatctgcttgtggttttgattttgcgttttcttgatggcttgtgatgttaggctttttcttcatgcgcttattggacactcttatatcttcttcacaaaaatgtctatttaaatattttgcctatttttatgtatttttcctttttactgttgagctgtaaaatttatttgtgcattttggatacagatttctaatcaaatatataagttgcaaacattttc

SEQ ID NO: 36914 - DNA, 750 bp, Homo sapiens
aagaaaccatctaaaagacaagttcacatagtgataagtactgcagagcaagaaaaaccaaggttatggggtagaaggagagaatctctgaacaggtgatatttgagttaagacctgaatatgagaagcaaccagttatgaaaagttatgaaaagctctgggagtaagaaataactctagcataaagactttgaagtggaaacaagcttcttgcctttgagaatagaaaaatgttagtatggctgtaatatatagtgaaaacagagaccatatttgaatcagaaaagagtgagatcagatagagcactgcttcttcattcttatttcattattgtcccctccccactagatgactttataaggatttttttctttttcctaattgtcccctcatgaaatttgaataccaatgatgtactgtatgatctagtcaataaatgcatgtatatctgtactttatacataatcaacctgtatgcaggatgaagtatgaataaaatttgaaggtagtagttaaattaaaaattagaaagctagcaatatctaacttaactgtataactgtatttgctaagtgacttttaatggaatttatgtacttacataaattataatgagtcaacttatgtatgcaaattggcaatttatgtaaatacataatagtaatgtaatcacatttaaaaaattattcacaacatttttctagcaaaggtgaaacaatggaaaacattaaattaatttcttcaaagtt

SEQ ID NO: 36915 - DNA, 483 bp, Homo sapiens
ggcagcacgtgttgcccgcccccggccagggccctacctggccacgacgcgctgcgccttctcggagacgttcccggaggtgggagcgcccaggctggatcactcgctttcctctagttctgctgctcgtgccagcgcgtccgagggcgcgcgggcctgggtccgcaatcgacaactgccaggcgcaggctctcttaaaaggttcagtaagggacctttgccgtccttcctttcgacacggcctgagggcgtgctgtgaggtcccgaggtgggtaggggccagctctcccggtggtcggggtgaggccagagtccttcgcccctggagcgcacgcggggcttgatttcgtttggcaacgacgaaatggcgcgcgctgagcaggggtcagatccatgatgagatcttgcggccaccgtcggatcctaagcttctttgcttccgaggcttggaattcattgttttgcacctcgccgggcggccgg

SEQ ID NO: 36916 - DNA, 368 bp, Homo sapiens
agatgatcactatatctgtcactcagatcttttgttgtgaaaatttgcatgtatttgtcttttttctccagctgggttaagtgctttcagggcagaggcactgtacctgtatttctgtgtattaactcctgcctctttaagtccccgttttgtttactaagataataggtgaaatctgggaaacattaaatcttcatctcgaaaaggaattcatccatttctaagagatgaccaaacaagatgattttgtatgttttaattttttagttttagagataggatgtggctctgtcacccaatctggagtgcagtggtgcgatcatagctcacttcagccaccaactcctaggctaaagtgatcctcctgc

SEQ ID NO: 36917 - DNA, 653 bp, Homo sapiens
agaagaatgtccagaatctacatttggagattttggagactccaaaaatctcagtgacacaaattgctttttctcctgaatcattaaattgcaatagtacttaaataacttgaatggtgactgtggcttttattctaatatattagaaattaagagcttttcttctctaacaaattctcagctatattttatagttcttgtagttgttcaatactgccttcttaaatttattttctcaataatctcaattcttataatgtattatcagaaggtataaaatatttgtatttgttcttatgcttttttaatgtaggttttacactcaaagtgatctttacaatgtgaactgtaatgaatattttaatttttattattacatgcaaaaaatcattaaaatagcagtttgacacaatatatttgacaatttcattttttcgtctctaagttatttcagaagtgaattcctgctttgaacactgaaaatgcaactctgaaagattcccaaaaaccttggatccagtcccaaacaaatcagaaacaggctgttggctttttttttttcctgtgtttccttgttttctcaattgccaatttgttttattatttgaagggaagaaggagacaaaagtccaaaaataaaagccctgcttgtt

SEQ ID NO: 36918 - DNA, 244 bp, Homo sapiens
ggagaatttttttttaagatttctgcaattaaactatttatactttcaatgtaaactctatacggggagggatttatttctgtcttgcttattgccatgtttcccatatctagatgctggtggatgctcaatgaatatttgttctacgaatacatgaaaaacataataggtagggcaatgccaacgaaaaaaggtgccttccgtcagtaattattattataaattgtttaattatctgccttgc

SEQ ID NO: 36919 - DNA, 431 bp, Homo sapiens
tgttttgttaaccttacttagaatccaacattagaccctttcttctaacctaacctgtaggaaggcacttcttgaggttttaagcctctctttaatgttttattgtaagttgtaccttgggagcatcattttttcatcttaaatcctctccagtttaagaaaaatttgaaatataaatggcaaaaactgttaatggcaacagacttctgatgtaaatgtaaattgagatggaaacaaaatgaaaagtagatttccctaggaattagttaaactgagataaatggtcctggatgtttttatagaaagttctcttagccaggtgcagtggcatgtacctgtaatcccaactactcggggggctgagttgggaggactgcttgagcccaggagtttcaggctggcaacatagcaagaccttgtctcttaaaaaa

SEQ ID NO: 36920 - DNA, 506 bp, Homo sapiens
gtgagccaagactgcaccactatactccaacctaggcaacagaatgaaaccccatctcaaaaaaatttttaaacaatttttttaaaaagattatatcctttatcgatttctgactagctataaactataaatagaaacacctcatttccatatccctaggtcattattttagttttcaacatttttatatacagcagagcctttatatttaaaaaggcatcaggattttagcctatcactagtactaacaattgtgagatggggcactatttgatgtatctgccagataagatgtccactctttgatgtaagtttctaggactcaaaaagaacaaaaacaacccaacacttttctaagggagaagaaataaggctcttaccaaaaagctaaaccaagattttaactagaacaaatttctatgtcttaatattatatttgtagagggaagcagagtgggaaatcaacttcattccaaacagcacataagaacacttagaatatcttc

SEQ ID NO: 36921 - DNA, 207 bp, Homo sapiens
aaacactagctatgagaccctgggcaggtttctcacctgtctgttcctcagtttccctgtatacaaaacagggataacaatagtacctacctcactgtactgttgtaatgattaaagtggttaataaagtaccttaaaacaatgtccagcacattgtaagtgctttttcttttcatcactttgggaaactaccattttaaagatcta

SEQ ID NO: 36922 - DNA, 278 bp, Homo sapiens
cacctcagccttccaaagtgctgagattacaggtgtgagccactgtgcccacccgacatgtcagtgttagtatttgtaaagtgacaggcacagttattacatgcttcctggatgtggctggtaaaacctgttcaatgactggtaaaacctatactaggctgaccctctggaaacattcctaagcattgattaatgttatacaataacatttagcactgtgcttcataaatagctaggcattgtactaaacatgttatataaatgaacttactaattct

SEQ ID NO: 36923 - DNA, 648 bp, Homo sapiens
ggtcagaagagggtaaggaggaaatggagactggacaggggcagcaagagggacccgcccacaggcaagccgccatgctgagctttggggccaggacgggcaaatatcaaaatttcgttacatgatgtgatgaaacctggggtggcggcggcaatgctggtaggtagctgttgggggtaagggagtttctactctgcctacaggtctcgggtgaattcacacaaactcttcggtatgggctgggggcatttccacttccgagcgtacacgtcaaagcctacaacaggaaagaagacccttttcctgcaaaagggcggtgtgttcggagactacttccaagggacagagcgccgcgctcaggcagggctcttggctgggtgtcccggctgggtgtccacccacgggtaaccctgtgagcctcagtgtccctagctgtcctccgggggggtgggggtgttgggccacacacgcgatgatattcaaggagtccaaggttctcaaaatgtactctggggccaggcgactcccgagacccttttggggtctgcaaggttcatttttgactttccttctcctgagtatatggtggagtgttccagagcctgacgtgtgatctgactgactgcagaagcagacatgagaacatga

SEQ ID NO: 36924 - DNA, 398 bp, Homo sapiens
caactctgatctaagcacaagagagacatcagtgaatgccatcatcaaaaagtctccctgtcctcatcttattaggtaaaaccatatgaaattgctgtttttctagttaaaccaattgaatataaataacacctactatctgatccagccattccactctcaggtatttaactaaaagaaataaaagcatacaccctcggatttgtacaccaatgtttgcagcacctgtatctgtaatagcccaaactagaaacagtccaaatgcaaaaacagtgatatgtccatagaatggaatactacacaacaataaaaaggagtgagatactgatatgtactacaacatgggtggacttcagaaacactattctacgtgaaacagatcgaatacataagaccac

SEQ ID NO: 36925 - DNA, 403 bp, Homo sapiens
gtaaaatcttacatttccttgtttagtatgtaattagctctgcattttttgttatatgtgacatttattggcttgaggtgcctttttcctatacctaaatttttcagagatttatcatgaggaaatgttgaattttgtcaagcttttattctgcatctatttaatgttaaaaatgtaaaatcacaatgaattctacataaattgaaaagttttcaaagactattatgaacatctctatgtatgcaaactaaaaaatttagagaaaactgataaagttttaactatacacaactttctaagattgaaccagtaagaaccagaagtcttaaccagagcaaaaatgtataaaatatataatgatattgaataagtaataaaaaagtatcaataataaaaagccttg

SEQ ID NO: 36926 - DNA, 350 bp, Homo sapiens
actcacttgtgtaatccacagtgaaggtcagcaaaattctcaatactactgactaagaatttagaattatggttatctaaagaacttgctttgcttgatctaaactagaaatatttaaaatttcaaacaattatttgtgattacagaaatttctcagatttcatgcagttcttctagagctctatctgtggaagtatagttgtgagtacatttatacttaagcagaattactcataggaaatggtaaggtcagccaaacacaatggctcacatctataatcccagcactctgggagaccaaggccagaggatcagttgagcccaggagtttgagaccagcctcagcaaca

SEQ ID NO: 36927 - DNA, 2469 bp, Homo sapiens
ggattacaggcatgcaccacaatgcccagctaattattgtatttttaatagagacgaggttttgctatgttgtccaggttggtctcgaactcctggcctcaattgatccgcctgccttggtctttcaaagtgctaggattataggcacgagccactgcacctggcctcaaaaatcatttttaaaagaagcagtatattagctctgggtcttctcatgactaaaatgactatttttaaacataagaccatattttataaatgtacagataattcaaatctattatctaatgtattaggttaatttctatttgttctatacttttttttttttttttttttgagatggagtcttgctctgtcgcccaggctggagtgcagtggtgcaatcttggctcactgcaagctccgcctcctgggttcatgccattctcctgcctcggccttccaagtagctgggactacaggtgcccgccccgacacctggctaatttttaaaaaaatatttttagtagagacagggtttcaccgtgttagccaggatggtctcgatctcctgacctcgtgatccgcccgctttggcctcccaaagtgctgggattacaggcgtgagccaccgcacccggcctattgacattttttaaggtttcagattttcttttgtgtgtctagtaattcgtcttttattgtcaaagataatttgcttatttgacttagaaaaatgatttgtgggcatacaatattgtatgtggtacctaaacgttgccatttagttactcttacagaacaactttcattacactgtatattaatataaattacttcttgagtaatcccagaattgtagaaccaattggtagaatcagaaactgtctttggacttgaggtttttcttcccttagggtaaattttaggttttctggttagtttccaggagttggcggacaagttcatatcactaaaggtgttcatatcactaaaatagtaatgctaatttgtttcatatttctattttaaaaagcaatcaataaagacatttcaatacatttcatttggaagcccccaagtgtatggtggttaataaggctcagcatgctggtaacccaccattctcttagctagtgactccactaaatagtgctagccgctgagatggttttgaccctttaacagcctttttttttttttgagacagagtttcactcttgttatccaggctggggtgcaatggtgcgatatctcggctcactgcaaccactgcctcccaggttcaagcgattctcctgcctcagcctgccaagtagctggattacaggcacgtgccatcacgcccagctaatttttgtatttttggtagagacggggtttccccacgttgaccaggctggtctcgaactcctcacctcaagtgatccacccgcctcggcctcccaaagtgctgggattacaggcgtgagccaccgcgactggcctacacagcttttaattgcttgatttatactttattaaagagaggaagcacaatgagcagtgatactaaaatataactaatatggcatgtgaaagtgatcattattcagatgatcttcaccaacactgcatttgcatatatctgaccaaactttatgcgacataggcaggtctctggcacttcaaaaatgaatgttaaatagaaaataataaataatagctgattagggtaatcatttatttaatcagaataaagattatatccataaaatttacttgcagagaagtactttctttttgttttaaagacagggtctcactctgtcacccaagctatggtgcagtggcacaatcacagctcactgcagcctggacctcctggcctcaaggggatgatcctcctacttcaggaattatgccaccatgcccggctagttgagaagtactttcaaatagcaacatgaagcctttcctttaccatttgaaaataaaacatagttgtaaacataaaccagtatgtctttgtaaagccaataatatatcattttataggagcattgtcttcttgtgtttttcaagttgactatgtagttcaatgtcagtctccattttaatatcttgtttgtttatcagcctgagcatatttcattttaaaatgtatttgttgagaagtcatggtggttttttgtttttcacaagtcaagtagcttgaacactatcacttgtccaatgggaaagttgatgcttatctttatggcaaatgcttggttgaataatatatttgcaaagatgttaattctacagagagctaaataaagttaagatacctgtaaaacagtttctccagatgactttaaaataagccttatttttgtaaatttatgttaaattttaggtgttaagttgtgaaatacctaatgatgtgggcctaaatttgcctcattcagactgagacagggctgttaaaattcatttctagctaataaactgtgctataacttc

SEQ ID NO: 36928 - DNA, 3450 bp, Homo sapiens
ggattacaggcatgcaccacaatgcccagctaattattgtatttttaatagagacgaggttttgctatgttgtccaggttggtctcgaactcctggcctcaattgatccgcctgccttggtctttcaaagtgctaggattataggcacgagccactgcacctggcctcaaaaatcatttttaaaagaagcagtatattagctctgggtcttctcatgactaaaatgactatttttaaacataagaccatattttataaatgtacagataattcaaatctattatctaatgtattaggttaatttctatttgttctatacttttttttttttttttttttgagatggagtcttgctctgtcgcccaggctggagtgcagtggtgcaatcttggctcactgcaagctccgcctcctgggttcatgccattctcctgcctcggccttccaagtagctgggactacaggtgcccgccccgacacctggctaatttttaaaaaaatatttttagtagagacagggtttcaccgtgttagccaggatggtctcgatctcctgacctcgtgatccgcccgctttggcctcccaaagtgctgggattacaggcgtgagccaccgcacccggcctattgacattttttaaggtttcagattttcttttgtgtgtctagtaattcgtcttttattgtcaaagataatttgcttatttgacttagaaaaatgatttgtgggcatacaatattgtatgtggtacctaaacgttgccatttagttactcttacagaacaactttcattacactgtatattaatataaattacttcttgagtaatcccagaattgtagaaccaattggtagaatcagaaactgtctttggacttgaggtttttcttcccttagggtaaattttaggttttctggttagtttccaggagttggcggacaagttcatatcactaaaggtgttcatatcactaaaatagtaatgctaatttgtttcatatttctattttaaaaagcaatcaataaagacatttcaatacatttcatttggaagcccccaagtgtatggtggttaataaggctcagcatgctggtaacccaccattctcttagctagtgactccactaaatagtgctagccgctgagatggttttgaccctttaacagcctttttttttttttgagacagagtttcactcttgttatccaggctggggtgcaatggtgcgatatctcggctcactgcaaccactgcctcccaggttcaagcgattctcctgcctcagcctgccaagtagctggattacaggcacgtgccatcacgcccagctaatttttgtatttttggtagagacggggtttccccacgttgaccaggctggtctcgaactcctcacctcaagtgatccacccgcctcggcctcccaaagtgctgggattacaggcgtgagccaccgcgactggcctacacagcttttaattgcttgatttatactttattaaagagaggaagcacaatgagcagtgatactaaaatataactaatatggcatgtgaaagtgatcattattcagatgatcttcaccaacactgcatttgcatatatctgaccaaactttatgcgacataggcaggtctctggcacttcaaaaatgaatgttaaatagaaaataataaataatagctgattagggtaatcatttatttaatcagaataaagattatatccataaaatttacttgcagagaagtactttctttttgttttaaagacagggtctcactctgtcacccaagctatggtgcagtggcacaatcacagctcactgcagcctggacctcctggcctcaaggggatgatcctcctacttcaggaattatgccaccatgcccggctagttgagaagtactttcaaatagcaacatgaagcctttcctttaccatttgaaaataaaacatagttgtaaacataaaccagtatgtctttgtaaagccaataatatatcattttataggagcattgtcttcttgtgtttttcaagttgactatgtagttcaatgtcagtctccattttaatatcttgtttgtttatcagcctgagcatatttcattttaaaatgtatttgttgagaagtcatggtggttttttgtttttcacaagtcaagtagcttgaacactatcacttgtccaatgggaaagttgatgcttatctttatggcaaatgcttggttgaataatatatttgcaaagatgttaattctacagagagctaaataaagttaagatacctgtaaaacagtttctccagatgactttaaaataagccttatttttgtaaatttatgttaaattttaggtgttaagttgtgaaatacctaatgatgtgggcctaaatttgcctcattcagactgagacagggctgttaaaattcatttctagctaataaactgtgctataacttcaaagcaacaacgaccacaaaccacacacccgcccaccccgaaccaaccacccaccacccaggcgccacaccccacacaacacacaagagcgggggcggctccccggaaactcccacccggggggggcgccccgatacaaccagcacacgccacagagcggacgagggggggtgccaacaaaaccggaggcgggtaaccaacaggtggctggtccagcactccgccgcgcggggaagaacgacaaaacaagaacgactcgcacaacacgacagctacctgtcgcagacacgataacactaaaacaacacgcactacgaaagaacaagaaacaagcgactgcaaaccagagaacagacacaacaagcactacaacaggaacgagaggagagaaaggggcggccaaagcagcagagggaaggggggagaggaagaggagacaagacaagagcgaggacagaaagcgacaagaagcaggaagagaagaaaaagagagcgaccgaaagcaagcgaaagggggaggggagaggagaggaggggagagaagcgggcagagaggaggggccagcgcagaaaagcacgtgaaaaccaggggaaagcagaacgggagggagagggaggaggcaaagcaagggcaagaagggacggaaagacggacaggacgcaaagggagaagggaggggcgaaagaaaggcaagagggcgcgagggaaggagcacagagagggacgacgggaagcaaggagaagagagcggagagagcgaggaggactgcacacacgcagaagcgacaaaagcagagacagagacagaaaggaccaaaaagagaggagcacgagcaataaaagacgcgacaaagaaacgagcagaaaaagcaggacaagacaaagcgcagaaaagaagcaagagaaaggaagacgagcgaaggaacaggcaaaaggacgacccaacgaagaagcgaaacacagagaaagagaaaagacaa

SEQ ID NO: 36929 - DNA, 1600 bp, Homo sapiens
ttgcttagaaaaagtgagcagaggcagggtaagaacagaaggtatcatgtaagaaaatgccccaggtgggaggacacttcatatcactaaaggtgttcatatcactaaaatagtaatgctaatttgtttcatatttctattttaaaaagcaatcaataaagacatttcaatacatttcatttggaagcccccaagtgtatggtggttaataaggctcagcatgctggtaacccaccattctcttagctagtgactccactaaatagtgctagccgctgagatggttttgaccctttaacagcctttttttttttttgagacagagtttcactcttgttatccaggctggggtgcaatggtgcgatatctcggctcactgcaaccactgcctcccaggttcaagcgattctcctgcctcagcctgccaagtagctggattacaggcacgtgccatcacgcccagctaatttttgtatttttggtagagacggggtttccccacgttgaccaggctggtctcgaactcctcacctcaagtgatccacccgcctcggcctcccaaagtgctgggattacaggcgtgagccaccgcgactggcctacacagcttttaattgcttgatttatactttattaaagagaggaagcacaatgagcagtgatactaaaatataactaatatggcatgtgaaagtgatcattattcagatgatcttcaccaacactgcatttgcatatatctgaccaaactttatgcgacataggcaggtctctggcacttcaaaaatgaatgttaaatagaaaataataaataatagctgattagggtaatcatttatttaatcagaataaagattatatccataaaatttacttgcagagaagtactttctttttgttttaaagacagggtctcactctgtcacccaagctatggtgcagtggcacaatcacagctcactgcagcctggacctcctggcctcaaggggatgatcctcctacttcaggaattatgccaccatgcccggctagttgagaagtactttcaaatagcaacatgaagcctttcctttaccatttgaaaataaaacatagttgtaaacataaaccagtatgtctttgtaaagccaataatatatcattttataggagcattgtcttcttgtgtttttcaagttgactatgtagttcaatgtcagtctccattttaatatcttgtttgtttatcagcctgagcatatttcattttaaaatgtatttgttgagaagtcatggtggttttttgtttttcacaagtcaagtagcttgaacactatcacttgtccaatgggaaagttgatgcttatctttatggcaaatgcttggttgaataatatatttgcaaagatgttaattctacagagagctaaataaagttaagatacctgtaaaacagtttctccagatgactttaaaataagccttatttttgtaaatttatgttaaattttaggtgttaagttgtgaaatacctaatgatgtgggcctaaatttgcctcattcagactgagacagggctgttaaaattcatttctagctaataaactgtgctataacttc

SEQ ID NO: 36930 - DNA, 2415 bp, Homo sapiens
ggattacaggcatgcaccacaatgcccagctaattattgtatttttaatagagacgaggttttgctatgttgtccaggttggtctcgaactcctggcctcaattgatccgcctgccttggtctttcaaagtgctaggattataggcacgagccactgcacctggcctcaaaaatcatttttaaaagaagcagtatattagctctgggtcttctcatgactaaaatgactatttttaaacataagaccatattttataaatgtacagataattcaaatctattatctaatgtattaggttaatttctatttgttctatacttttttttttttttttttttgagatggagtcttgctctgtcgcccaggctggagtgcagtggtgcaatcttggctcactgcaagctccgcctcctgggttcatgccattctcctgcctcggccttccaagtagctgggactacaggtgcccgccccgacacctggctaatttttaaaaaaatatttttagtagagacagggtttcaccgtgttagccaggatggtctcgatctcctgacctcgtgatccgcccgctttggcctcccaaagtgctgggattacaggcgtgagccaccgcacccggcctattgacattttttaaggtttcagattttcttttgtgtgtctagtaattcgtcttttattgtcaaagataatttgcttatttgacttagaaaaatgatttgtgggcatacaatattgtatgtggtacctaaacgttgccatttagttactcttacagaacaactttcattacactgtatattaatataaattacttcttgagtaatcccagaattgtagaaccaattggtagaatcagaaactgtctttggacttgaggtttttcttcccttagggtaaattttaggttttctggttagtttccaggagttggcggacaagttcatatcactaaaggtgttcatatcactaaaatagtaatgctaatttgtttcatatttctattttaaaaagcaatcaataaagacatttcaatacatttcatttggaagcccccaagtgtatggtggttaataaggctcagcatgctggtaacccaccattctcttagctagtgactccactaaatagtgctagccgctgagatggttttgaccctttaacagcctttttttttttttgagacagagtttcactcttgttatccaggctggggtgcaatggtgcgatatctcggctcactgcaaccactgcctcccaggttcaagcgattctcctgcctcagcctgccaagtagctggattacaggcacgtgccatcacgcccagctaatttttgtatttttggtagagacggggtttccccacgttgaccaggctggtctcgaactcctcacctcaagtgatccacccgcctcggcctcccaaagtgctgggattacaggcgtgagccaccgcgactggcctacacagcttttaattgcttgatttatactttattaaagagaggaagcacaatgagcagtgatactaaaatataactaatatggcatgtgaaagtgatcattattcagatgatcttcaccaacactgcatttgcatatatctgaccaaactttatgcgacataggcaggtctctggcacttcaaaaatgaatgttaaatagaaaataataaataatagctgattagggtaatcatttatttaatcagaataaagattatatccatctgtcacccaagctatggtgcagtggcacaatcacagctcactgcagcctggacctcctggcctcaaggggatgatcctcctacttcaggaattatgccaccatgcccggctagttgagaagtactttcaaatagcaacatgaagcctttcctttaccatttgaaaataaaacatagttgtaaacataaaccagtatgtctttgtaaagccaataatatatcattttataggagcattgtcttcttgtgtttttcaagttgactatgtagttcaatgtcagtctccattttaatatcttgtttgtttatcagcctgagcatatttcattttaaaatgtatttgttgagaagtcatggtggttttttgtttttcacaagtcaagtagcttgaacactatcacttgtccaatgggaaagttgatgcttatctttatggcaaatgcttggttgaataatatatttgcaaagatgttaattctacagagagctaaataaagttaagatacctgtaaaacagtttctccagatgactttaaaataagccttatttttgtaaatttatgttaaattttaggtgttaagttgtgaaatacctaatgatgtgggcctaaatttgcctcattcagactgagacagggctgttaaaattcatttctagctaataaactgtgctataacttc

SEQ ID NO: 36931 - DNA, 1241 bp, Homo sapiens
ggacgcgtgggtcgacccacgcgtccgcacagagcctgccgctctgtcagactcacctttgtcttctctgtgagaaggaccaggctcctgatttttggctgatttttcagtcaagcccagatggaaaattctagaaagggaggaggcttcatttggatttttaatttctgctgcaatctcagaatcctgggtcccttttgggacctaagccccatctcctggcaggattttctatcaccggaatacagtagattttccctccttttttttttttttccccagcaccttaactctcagcttcccagactttctccaatgacagagctgggtgggtggaggaggagaggggttgcaagaaagcttgccggctggggtgaggagactgtgtgtggagcaggcgtgagcgtgggccgcgtgggagagaatgcgaggctgccgtcaagcccagcgtccacacgaggaggcctgcgagggcgtctgagggagcaaggtaaaggtgagggccggagctcaagaggaagcctcagcgaggaccaggaaccgggacacacctcagccatcctgtgaggggcagcccactggagacttccagccgccctggaggtccttgcacccaagaactttcacctaccccaggagagaagcagaaaggcacttcgccactgtctccatcagtgctgttgaactcaaatactgccatgggtggaggccagcagggcagcgtgtccctagcaagacagcgactgggcaacgcacctgtgccaaaccctgccagaagcccagcacgtccaaggtgatcctgagggctgtggcggacaaggggacctgcaagtatgtgtccctggccaccctgaagaaggctgtttccaccacgggctacgacatggcccgaaatgcctatcacttcaagcgtgtgctcaaggggctggtggacaagggctcagcaggtgaccggcaggggggcctcaggctccttcaccctgggcaagaagcaggcctccaagtccaagctcaaggtcaagaggcaacgacagcagaggtggcgctctgggcagcgcccctttggacagcacaggtcactactgggctccaaacaggggcacaagcggcttatcaagggggttcgaagggtggccaagtgccactgcaattaatgaggcaggccaggcaagcagtcaggggtgccaagaccgccattggctcagtgcagtgggaataaaaggaacataacttatttcaca

SEQ ID NO: 36932 - DNA, 1282 bp, Homo sapiens
tcacagccgccctaaatacagccacccagacccgctccccgagaccctcactatctcctgcagggtgtcacagagcctgccgctctgtcagactcacctttgtcttctctgtgagaaggaccaggctcctgatttttggctgatttttcagtcaagcccagatggaaaattctagaaagggaggaggcttcatttggatttttaatttctgctgcaatctcagaatcctgggtcccttttgggacctaagccccatctcctggcaggattttctatcaccggaatacagtagattttccctccttttttttttttttccccagcaccttaactctcagcttcccagactttctccaatgacagagctgggtgggtggaggaggagaggggttgcaagaaagcttgccggctggggtgaggagactgtgtgtggagcaggcgtgagcgtgggccgcgtgggagagaatgcgaggctgccgtcaagcccagcgtccacacgaggaggcctgcgagggcgtctgagggagcaaggtaaaggtgagggccggagctcaagaggaagcctcagcgaggaccaggaaccgggacacacctcagccatcctgtgaggggcagcccactggagacttccagccgccctggaggtccttgcacccaagaactttcacctaccccaggagagaagcagaaaggcacttcgccactgtctccatcagtgctgttgaactcaaatactgccatgggtggaggccagcagggcagcgtgtccctagcaagacagcgactgggcaacgcacctgtgccaaaccctgccagaagcccagcacgtccaaggtgatcctgagggctgtggcggacaaggggacctgcaagtatgtgtccctggccaccctgaagaaggctgtttccaccacgggctacgacatggcccgaaatgcctatcacttcaagcgtgtgctcaaggggctggtggacaagggctcagcaggtgaccggcaggggggcctcaggctccttcaccctgggcaagaagcaggcctccaagtccaagctcaaggtcaagaggcaacgacagcagaggtggcgctctgggcagcgcccctttggacagcacaggtcactactgggctccaaacaggggcacaagcggcttatcaagggggttcgaagggtggccaagtgccactgcaattaatgaggcaggccaggcaagcagtcaggggtgccaagaccgccattggctcagtgcagtgggaataaaaggaacataacttatttcaca

SEQ ID NO: 36933 - DNA, 655 bp, Homo sapiens
caagagggggacatagctgttctctgaggaacagctactccgtcttgcaaaattccaatcttcaggggtttagtttttgttttagttttttatagactttatatagagtagttttagattcacagcaaaactgagcagaggtacagaaatttcccatgtgcctcctgccctcacacatgcacgacctccccgttatcaacatcgtccaccacagtggtgtatttgttatgactgatgaacctaccttgcacatcattatcacctgagtccatagtttatgttagggcttcctcttggtgttgtggtattggggggttagttttcagtcctatttctttctttttaaaaaattgtgggccagtcacaatggctcacgcctgtaatcccagcattttggggggccgaagcgggcggatcacgaggtcaggagatcgagaccctcctagctaacacgtgaaaccccgtctctactaaaaataccaaaaaaattagccgggcttggtggcgggtgcctgtagtcccagctacttgggaggctgaggcaggagaatggcgtgaacccgggaggcagagcttgcagtgagccgagatcgcaccactgcactccagcctgggcgacagagcgagactgtgtctaaaaaaaaaaaaattgcgg

SEQ ID NO: 36934 - DNA, 654 bp, Homo sapiens
cctccaggctgggcagagctgtctactttcccttgctatctgaggggaagttttattaggctgtcgactgtcttttctgaactatggcttatggtaaagtcccattatcagaccatctgacttggcactttaaaggaagattttaaaatttagaagtctttccacaaagcctctagcaactcaagagggttagcatggacccccaaggctgagcagcggcccatcgtccaggtggcgtccccttccacagggagaagtgggtctgtggctgggaaaccatagcatggcatgccttacaagggaaagagggaacagtggtttaagacgctcattggtgatacccctggcctacttatggaacatatgccccattacacacatacccctgtgtaatgggacttcccattttatacttaggggtgtatatttaaataagtgaggggggcatacaacaaatgaaagtactcttttctgaatgctgagaatatgcatgattttcactttttcttttactcatacacattttctgactttctacaaccagtatgttaccttaggatagaaataaaaaaataaaattggtaacattatatgttatataaaattttaattaaaatatatattcattaaatatatctaaaaagaaaaaaaaaa

SEQ ID NO: 36935 - DNA, 806 bp, Homo sapiens
aggctggagtgcagtggcatgatcttggctcacttcaagctccacctcccgggttcacaccattctcctgcctcagcctcccgagtagctgggactacaggtgcccgccatcacgcctggctaattttttgtatttttagtagagacggggtttcaccatgttagccaggatggtctcgatctcctgacctcgtgatccatccgcctcggcctcccaaagtgctgggattacaagcttgagccaccgctcccagctgttttaaataacgtaaaataacagtgctgagcagtaagaaaatgagatccagcccttgtaacacacccgacaaagcctctccaattgggcttttactttcctctccagtcttcttctcacaactcactcctgcctcttgctccagacattcctttttttcccccaagttcttcaaatatatctggttctctttaactccaggctatgacacaagtgattacctctgtttgaaatgatgtctcaattcctcctctaccaactatgcctgggccattctcccttcaggtctcgacagaaatctcagttcctcaggccaggcactgtggctcacttgaggtcaggagttcgagactagcctggccaacatggtgaaaccctgtgtttactaaaaatacaaaattagccaggtgtggtggcgttcacctgtaatcctagctacttgggaggctgaggcaggagaatcgcttgaacccaggaggcagagtttgcagtgacccgagatcgtgccattgtactccagcctgggcaacacgagcgaaactctgtctca

SEQ ID NO: 36936 - DNA, 323 bp, Homo sapiens
atagacaggtagagatttgatggttttcagaaatcctggctggactgttaggagtcgtgttatagacaattcaaatgtcactgctggccaccgtcttcatactctatggataaaacagaaattccagtcctgtaacttacctctgtagcgtcaataacgtgggaaatgatccaaaagggtcttgtagaaagaagactttttacataaacagaaagctgtgatttttgtgggaaacaaacctaccactaaaattgatgagaattcttgtctccatgtgtaatttctggctcatcagccaggaggtaaaatttcaataagaatca

SEQ ID NO: 36937 - DNA, 312 bp, Homo sapiens
catctggtgaactaactgaataccatgaaatgcaaggacatttagccttgtttaaacataagttttccacattccataccctctcaaactctgcttttcacttagcatttagagctggggaaatgaattcaagtaggagaggaggagtcttataagtccgaggtagcctgaggcgtgtcctcccataaagaagtaaagaaactataacatgaaggcttccaaaagaacatccaaattgagacttttttttttttaaatgaaaaggggaacattactcatatgctggaataataggcataaaccagggcatct

SEQ ID NO: 36938 - DNA, 1126 bp, Homo sapiens
gagatttatagtccaccaaatgagctctattggtttacagctgggaattggccataaaaacttcataatatcttttaaaaaaatattttctatctgattccacagagatattttggtctgcagcctttattttctgctcctttcttttctgcttttctactgagtagcttgtgaatttactttcacttacatttcttgctatgagttttctgattagaaatgtaaagccataagattttaaatttaagtggttagaaaaagcagtgtacaaaattgacagaggttataaatgttgtgaacaagaagagaagtatatattcacagaaagaaacctggacagatcataatgtttgcagtgattattcctgagtggtgggagcatggatgattttcagtttctttgtattttggttattttcaaatgttcagcaatgagctcaattacttttacataattacagaatatttggagtcaaacattcacctatttcccttttactaaaacttattggaattaacatcatttgatatagtgactatttctgagttaagaaaacataattaagaccgcaaaattacaataattattaagccactggcttattccatagcactgtataaacacagcatagaataagaagatgaagatcccagaatgtggaaacaaaaagctgacaagtgattgaggaatggtgagaagacacaggttctgaggactgctggacagcctttcctgtttttaaagaaaagctctcttatcatgagagaagagtcatgaaaaccaaaaggtttctgcatttaattcgttatttagagggctgaatttatgctttgacttactctttgattacaagcactggtggttatattttatctattttgtggaaatgagttagcacatgtagaaaactgccctgaaaggggctgaaatgaagccattaagaccgaagtgtactttttaaaactccaaacgtcatgatttatttcttgatcttggtgatacttatatgggtgtgttcactttgtaaacattcatcaaactctatacttaccacttgtgtacttttctgtatgtgtgttatacttcaattaaaaagtttacttgaaagaaaaaatcccaccacag

SEQ ID NO: 36939 - DNA, 547 bp, Homo sapiens
gcagattccagttaacactagcagcctttgtgtcacttggtatagcggctggaacaatattcttagctatggaatgtgttgcttccaaaacccagggtcctaccaagacactgcctctgtgatcttcacttcaaaggagttattctagtattcccctaagcactgaacctgcaaaagctttccctaagtgtccaaattcccaaatcttaatatggtttatctcataccccctgtagcacatgtgctttaccaagatctccaatattctagtaacaacttgtgtaacttgctctgtcattatgatgttatcaatgtaataaatcagtatgatgttttgagaaatgcttaggtggacaatatcttcattctatatttccttgggcaggaaaactaacatagtcttgagacataattgaaagtgaatacagtatcgttcatctcacatgaatgtaagtcatttctgatcctcttttctaaccgcaacagaaaataattcattccccaaatcactgactgtatcatatactggagaccttttaaatgattc

SEQ ID NO: 36940 - DNA, 364 bp, Homo sapiens
gttttgtttaatccttaaccactctgtgaactaggtgttattaactccattttagagatgataaaactataaatgagtggcttacttttgcttgtttaattaatctaaactctgctctgtcattcaatgctcccaccatttggctttagctcatgctgctagttcatgttatactgtatttccttactctatgctatagccaccccagacatgctcttcatatcttatcactgtgcccctgttccagataaatccttatcctggcatttctctgcttcccactttgcctgtaaaaatcaagccaggtttggtggttcatgcctataatctcagctacttggttgagacaggaggatcgcttgag

SEQ ID NO: 36941 - DNA, 632 bp, Homo sapiens
tagtggattactatgtgaaaagtatgtggacgtgtgtgtgcagtgtttatttggcagcaattttatcaggaacataatctaaactcagctttttaaccagaaaaatcagtaattcaaatagtatattttaaactagtaaccatcccctcctcatttccaataatgtgtttattacctagactcagaaatactttgatttatttcacatgtggtttatgggaatcagtatcttcgatgtaggattgttcaaggtttgcatcttttgcctgctttaccgttcctgaggatcctctttcacttctggaaatcagtagatacagttttcccaatctctcttctgaatgataaagcaagaatataaattatagcttttatatttttaccttttttatgtgaaggtagatgattgctagtgcttatgtagtttgatggaatgctaataaaaataaagagtgtcttcgataagttttcatctatattgttaaaattaaaacaagccctttagttatttggtttctggtttaagagttgtggatgtaacaatatagaatcattaacattaggggagacaagagaaaaaaaattaataaattttaccgcatatcatttgtaggacagataacaaaaatctt

SEQ ID NO: 36942 - DNA, 331 bp, Homo sapiens
aataatcttttaaggtactttagtattatcagccccattttatagatagaccctaaggctttgaggtgcaacttgccccaagtcatacaagcattcctagcagggctaggattagaattgggttgtgtaggccgggcgcggtggctcatgcctgtaatctcagcattttgggaggccgaggcgggtggatcacaaggtcaagagatcgagaccatcctggccaacatgatgaaaccacttctctactaaaaatacaaacattagctgggcgtggtggcacacgcctgtagtccagctactcaggaggctgaggcaggataatcgcttgaac

SEQ ID NO: 36943 - DNA, 422 bp, Homo sapiens
gtttgtggaaacctgatctactaaggttgatataatcaggctatttacaagttcactgtgggtcagacaacagtatttatattcatgcacacagaaaattcgattagatagtgccgaggaagagcacacaccgatgggccgattaccctgaattcaggcagctcagattctccattcgcttgaatgtcatattagctggggatatcccttttgtgacgcagaatcttgcagcgaaacagttgggtgtagcctcctgtgagaaagaaatgcttgcagcagggattttccaggccggcatctcaattgcacagaaaaacattttgggaatgtttccatcagcccggcagtctgaaggtttgagcggaatggtgagaaggttctaaccaggcgtccttgggggtggaggatgatgggccagggca

SEQ ID NO: 36944 - DNA, 939 bp, Homo sapiens
aagccttccctggccttcccctcctcccagggccttctccctgtccttcccctccagtaacctgtgaacttcccgtctcctcccattccagccttctgtgccctccagcctcagggatccttgttattgggacagcccagctggggttgacccacaggatggggcttaggagagctctgaggagtgagtgaacagacagcgccggagtgcacggtgggccggctctgctgatctacaccaggaactgaaatatcactggaatttattgtaaacggtgtgcctatgatgctggttctgttgccacctgggcacgcagcaccctcaagtggacatttctagaaaccgcttcttacttgctcctaattgattacttttgcacattgcacagaacccaacctcgaggcctgctccctgccagttgcctgaaatcagccctgaaattctgaaaccaaagagctgcttcctgagaacaagttatttaccttagaattgaaaatgtatatccttttatgggcctttccaaatctgattagaaaaaccacaaaaggaaacagaagagaaaataagagccacagaaagtacaatatgttttattaacaggaaagccagaaataagatattttaaacatatttttaatgagactttattgctatattccaacaggtcactcctattcttagagaatgtgaatgacttgtgtcacttcggagtgacagaaaaatcaggaactgaaagataattccagacaagttaaaatgttatgttacattcaaagctcttgttttcatcacaaataaggggatattcagtttttattaacagaaaacccattctcccatggccatggaataaatgccatgctatatttaaggagtttggtttgaagggtgcaaaattgtgagcctcctggctcttatgtctgtatccagccctgaata

SEQ ID NO: 36945 - DNA, 622 bp, Homo sapiens
gaacgccgtggtccctgggacggccaccaggccaggaggctgcagcaccagggaatctgtgctcacgtcttccaggacagtgcttcttctagaagctgacatggagctgaccacagctcttggaggcatggcctgaggcttagaaaatagacagagatcatctgagatttcagcagtggggccacgtggcagcgcccgaaggcctggagcaggagcgacccagggactcagagcagcatcttcttaggagacggaaggagagccgccggaggagcacggggcacctgcgatcgcgaagagcctcctgttctggatgggagcgaaggctccgagaggacctaaggttgctcagtgggccatggaaacggcagtgattggggtggtggtggtgctgttcgtggtgactgtggccatcacctgcgtcctctgctgcttcagctgtgactcaagggcccaggatcctcaggggggtcctggccgcagcttcacggtggccacgtttcgccaggaagcttctctcttcacggggcctgttcgccatgcccagccagtgccaagtgcccaggacttctggaccttcatgtgacgcccgagtccccaggatttgctgtgctgatgggtc

SEQ ID NO: 36946 - DNA, 834 bp, Homo sapiens
cgtcaccggagggccagcgctggctaggctgtctctgtgcaacgtcttctgacccctcctctccaccttctctgtgtccagggaatctgtgctcacgtcttccaggacagtgcttcttctagaagctgacatggagctgaccacagctcttggaggcatggcctgaggcttagaaaatagacagagatcatctgagatttcagcagtggggccacgtggcagcgcccgaaggcctggagcaggagcgacccagggactcagagcagcatcttcttaggagacggaaggagagccgccggaggagcacggggcacctgcgatcgcgaagagcctcctgttctggatgggagcgaaggctccgagaggacctaaggttgctcagtgggccatggaaacggcagtgattggggtggtggtggtgctgttcgtggtgactgtggccatcacctgcgtcctctgctgcttcagctgtgactcaagggcccaggatcctcaggggggtcctggccgcagcttcacggtggccacgtttcgccaggaagcttctctcttcacggggcctgttcgccatgcccagccagtgccaagtgcccaggacttctggaccttcatgtgacgcccgagtccccaggatttgctgtgctgatgggtcagactcacccgctcctcagcaagccttccctggccttcccctcctcccagggccttctccctgtccttcccctccagtaacctgtgaacttcccgtctcctcccattccagccttctgtgccctccagcctcagggatccttgttattgggacagcccagctggggttgacccacaggatgg

SEQ ID NO: 36947 - DNA, 108 bp, Homo sapiens
tcttacggcaggcagcagtggcgggagaaggtggaagatcctcaatgtgctggaaaatcaccaacctagcaccctgtgttgttcaagagtacaaataaaataaaaagg

SEQ ID NO: 36948 - DNA, 1023 bp, Homo sapiens
gaggattgatttgccctgacttgtatcttcatgtgtggtctataaggtctgccagattggcttatagtcacaaccagcatgtcctaagcaaaatgaaactatatgaacaaaaatcagctctcatttcactgctagactttggtgttttctttaagaagtagccttgttaatgcttagttttgccttgggggccttaatgtgtcattaactgcctggaaatacctttcatttaaaaaagtatactttagtacctaatgttcaatttagtatcgatctggatattttagcaaattttgacttttcaaagacaaagtttctgtcttgtaatgtttcttgggccggctatactgcctttcatctaaaactcactacagttcactggggccgtttggtaacagggtaacctggggcataattaggtgcttgattgacaagagagttaccagtaccagaagtcaggttctattttaaccccatcatttccaattgattgtttttctctccaccattattcactgtctctcaagtgttagcactctgagttgttgaacggaggtttgtatgctgcgcagagccctgtcgcaatgccccagcaagcttcttgttggcatgtggccactctaaattgtgctccaggatctgctatgggtccatgcttgcaggagaaacagctgtgtagaatttcctattgcatttcatttgtgggtttagaactcggttgcttatttcatattgtctcccttttcagtccttcaaggtacatttttccaacttctctaatgaattattacatttctgagtagctgatatgtttttatcttatctaagcagtatatttataattccttctttgcattggctaatctgattagtagttcagaacccaattttcagattgtctatagcaaactgtgaagaactgtgctgtcaagtagaaatagaatataagccacatatgtaatttaaacttttctaataccacattaaaaactataaaaggggaggaaatggaaaattagtaaa

SEQ ID NO: 36949 - DNA, 323 bp, Homo sapiens
ttatgatacagataaattaatgaacggaggctgccttgaggttgccaatagggcattggggagtaattaatatgacaaagatgtcatcttattaatgaaatgtattaatagtatgtctagtggattgggtcaatgcaaacattttagattagatatttgctgtttatcctctgaagttactgtttaaggaagtctggccaagttctaaagtgaagcatacatatttgcctcacgtgccatttttttttttcttcctggctttttcttagccatctggaaagctactatagggtttacctctaatggtagtcaagttactgtat

SEQ ID NO: 36950 - DNA, 401 bp, Homo sapiens
ggaaactacttacctacccagcatggaaggcagggaggaagttagtctcttttcatcaagattcaagagtacaggggcaatttattacactgcaatgtacaaaacaaaaggacctgtttctgttagagagtccatgttgaatatacaggtatgagaacaactgttgatatacaggtataatccaagtagaatgcttccacagtgcattagaaggtgcccaagctccacagggccaataatattagagtatatgtcatatagaataaggttaattaggagggtgattgtgaataatgagatttttaatttttttaagaaaaagctctcaaatgctaggctaataagttcatgattttaattcatgattttaattcatgattaaaattatttgattattgagt

SEQ ID NO: 36951 - DNA, 349 bp, Homo sapiens
tatgtcttggatgtaggaagaaaacaagtgaaaatatgttattttacaaccttgatacttctgacctcatggaaaaaacatacacacacagcgtagggtgagcaggtaggcaggaggaagggtcctagcacggggtgcgggcgccctcgcgtggccatgagaagtagtgccacacgcacacgttctctttcccagagaagcagacgtgctgcacaagtgcttggccaccgcctacactgaaactggaaagagctcactgaaaaggaatgcagttcataaaaagtcttccttctctacccaagacattcttgtcactcctagggctgtcattcttgaaaaggagaggctg

SEQ ID NO: 36952 - DNA, 429 bp, Homo sapiens
ttttaatctctgtttaagtgggtctactttgagtggtctttcttcagaatcaattatcatgggttaaggagttcttccattacctttgatgcctctgtcaggcactccaataactgcttgttcaacaaactaccggaagtccacgacggggactcaatacaagtattttaggctactcttttgtgccttattgacttactggactgggagtcctctacattaagccacattacattctaaacgccactgaagccctagatccattctggggatgggagacaccattacattaagaaatttcttttctgaacgaattccattccacagaggactaacgattaagcctaaaatcttaagattccatgatttgtgtacaaaacactgtgctcattgcggtagaggaggggaagtggagccacacagaggttt

SEQ ID NO: 36953 - DNA, 528 bp, Homo sapiens
gctgataaacaacttcagcaaagtctcaagatacaaaattgatgtgcaaaaatcactaacattcctatacaccagcaacattcaagctgagagccaaatcaggaacacaatcccattcacaacacacacacacacacacacacacacacaaactgtagtttgtgacagagcaataacacctgaccctcacccaggagtcaagctcatgtaagtcctgctgatatggttaggttttttgcccccacccaaatctcatcttgagttgtaatccccataatccccacgtgttgagggtgggactttgtgggaggtgattggatcatgggggccgtttcccccatgctgttcttgtgatagtgagtgagttttcatgaaatctgatggttttataagtgtttgtcatttccttctacacacttttctctcacctgccgccatgtaagatatgcctgcttccccttctggcatgattgtaagtttcctgagacctccccagccaagcagaattgtgagtcaattaaacctctt

SEQ ID NO: 36954 - DNA, 361 bp, Homo sapiens
gttcatattcctaaggactggaaaagaacaaatatgcacgtatttaaaaggtaaaaaagatgccccttcaaatagtagattggtcattttagcattgtcatttaaaatatatattaggaaaaaaatgatctaacagccgttttaaaacatacagatgcatagaatcatgaatattaattaatgtggatttgaaaacagcatatcattagccaggctcagtgacatgtgcctgtaatcccagctgctcgggaggctgaggcaggagaattgcttgaacccgggaagcggaggttgcagtgagccaagatcacaccactgcactccagcctgggtgacatctgtctcttaaaaaaaaaaaaaa

SEQ ID NO: 36955 - DNA, 452 bp, Homo sapiens
ttataggcttgttgcaagaattaaacgaaaggtataggtaaggttccgagctagcaggaagtagtaggtaccaaccaatagcagtgtccgttttcttcttctcatctgtctcctctcaacctctcccttcccttccctcttccccgctgccccctactgacagagtggtggtagagataaaagtatctaaaatccaaggccgagtgtggtcagttcctttagaatgtcgttttctggttcttccaccagaggctgggacaaacctgacagcagtgtagggtccctgtgaccctttgttgttacctaagctggccaaagaggatggccaggaggcaaatggcagcttggagcccaagagaggtacctatggtgtagaataaggtttgggtacaaggggtaagggagaagctattttaagaagaagtcaagaactcaggtctcatggaagttgg

SEQ ID NO: 36956 - DNA, 542 bp, Homo sapiens
acatacaagtgagcaaggccatcatcgatggcctcagccccctgggtgggcaggcagggcgggggcctcctgccaagatcagcctcctccatttacagcagtgcaccacacttataattttctatgtggaaaggctggatgcactaagctagagatgtatgactgaaaccgaatccaataaggtaatggctaaaactataaattggggtaaagactcaacatgtccttcacaattataaatggttcctcagagagtaaccctgtttcatatcttcagtatgttaaggtgagaggtaattataaagtaaaggctgccctaattagaaagaatattccatctttttttactcagaaaatgacatattaaattcaaatgtgaaggatgttaataacaaatctgcaaaaaccatctcaccagttaaatactgatcatttggtttaaaaatgcacacacatccgggaggcagaggttgcagtgagtcaagatcacaccactgcactgcagcctggcgacagaacgagactccgtctcaaaaaaaaaa

SEQ ID NO: 36957 - DNA, 579 bp, Homo sapiens
gcatattggggctggtttaatgatgtgtgtaaatcactttgcttcagttttttatattgtggcttataaacatggtacctcatgaatatttttagtcacctctagaggaaagctgaatgcttgcccaagctattggataatttgaattacataggaatgttaggccagagtattaattaaatgtgatcctctaaaattatttaagtgttctaggctcagcatggtggctcacacctgtaatcctagcactttaggaggctaaggcaggaggatcacctgaggcaaaaagttcaagaccagcctggacaacatagcaagaccttgtctatataaaagctttaaaaattagtagtacatggtggtgcacctgccttgctactcaggaagctgaggcgggaagatcactggggctcaggagtttgagggtgcaatgaattatgattgagccactgtactccagtctggggaacagagtgagaccctgtctctaaaaataaaataaaattataagcattctacagtgttcactaaactgccttggaatcagatgttaaaacatttcattttcttttatttatt

SEQ ID NO: 36958 - DNA, 1315 bp, Homo sapiens
tttgttcatttaacttgttttttggctccccacagaaagcaatatttttaaaatctagtttaaagacagtatggcagtttggttcctgttctttagggtaaaaagtaacttggccaggtgcggtggctcacacctggtgaaaccccgtctctattaaaaatacaaaaaattagctgggcacggtggtggtaccaattgttcacaactccattttcttattgaacaattgcaactacatctctctgtgagtatttttaaataaacttattttggacagtatgagctttgggaagggaatttatgtatatgactttaaaagattttccttattgttttcagatttcaatgttaacaaatagtttttttttaaagctatattttcagtgatggctttaatgtcagtgagaaaccaaaccctatatggttctcataagcaatctaaaccgtagaaatttatgagacttaaatgcatctttttattttattcttagaaatttgattttggtcttgaagtggcaggtccaaaatacaaaaacaaagattagaaaaaagaaattaaaaaaaagaaatttaattttgggctcttggcctttctatagtctcttcaaataatttcatgagcctggtgattgtgtttctcagttacgtggttaagctatacattgagttcagtattttgtcatcttcctctgtgctgatacttacttcttgatatgaacaattgagtttactggtggctgtagtttcttttcagcaaccctcgacccctgccacgtgtgcagaatgtagtgaagccaagtttgaggtttggatctagagccctccaacaatccctgcgatgtgccctccaacctgggggatagatcttcctggccctggagaaacccagttgagaattcataggattgttgtgctctcagcaagtgctttagtcttgtcctctggcagatgttttctttactgggcgtgaaaaccccatcaaaataatgctaagggaactgaaatatagagaaatacaaataagcaaagaagaagaaatattcaaaatgttcaggatggccaaagcaatagacttaaggatgatctagaagagagagaaatctagctgacttgtgttttctcacatccttctacatcttgagaagaagttttagcaaataaccctaaagtagtttttttttttaaattttaattataagctgtacttggtggctgatgtctataatcccagcactttggaggctgaggtgggaagatcacttgaggccaggaatttgagattagtgtgggcaacatagtaagactttgtctctac

SEQ ID NO: 36959 - DNA, 376 bp, Homo sapiens
tttggcctggagttctctctgcccagctctgcttctggctagctcttttccaaatgtcttgttttataacagaatttatctaattagtgtaaccttctttgatagcttcaggcaaatttaggagcttttccttctatgtcccttttatattttcagggtaccttatagcacttagcatagattgttacgatttttctggtatgtcgtctttctcattagacagtaagcatcttaatgacactaactgaatcttcttgtctttaaatcaacaatgtcatacagtccctgtcacatagtaaactctcatacaacaggtgtttaaagggtgaaccaataaatgagaggacatttgatttaaagccttcttcttgtcact

SEQ ID NO: 36960 - DNA, 375 bp, Homo sapiens
cctacacccagcttcgtaagaccagcttcataagaccacagccccacctttgccaagaattaatgtcaacatgggataatagactgggtacaaactgtgaccccacaagatgtttaaagcatcccccactgactttattggcgggtctttgcctcccttatgggcattgtgcctgggaaggaggaaaggtggccgcttgtgtactgccctccactgctcctcctttcccctttgtgcggttgatgattaaccctcaaaagctgagtggctgggcgcggtggctcacgcctataatcccagccctttgggaggccgaggcacgaggatcccttgagttcaggagttagagaccagcttggccaacatagtgagacc

SEQ ID NO: 36961 - DNA, 370 bp, Homo sapiens
ttttttttgcctccatattacaactcaatgaacttgcattagtagatatattttggatttttctaaaagtataagggtttttaaattatcaatgaaaagctgattaaatgaaagtggaattaatataaaatgttaattatttaaaaactgcagtaagacgagatcatggcatgttttaaatatacataaatattttcatatatagattgaagacaatctatatatgcactaatggtctttttctctgtgtctgtgggtctaattttgaatattgttaaggccctgcttggatgtcaacgtatccaagtagctttcaatgtttttctcccaaattaccaagcatattaatgtttctcatattgaattatat

SEQ ID NO: 36962 - DNA, 796 bp, Homo sapiens
tggggttttagcactcagaagtgtatctggttttagctgagcaaatgagcctcaaacacctgccaaacggatggatgacacattcaagtggctaggcaaaggctaagacaaactcagctagcaggaaagaatacaacaaggaaagtaatggagtaagaatagcaggtgttatctcaaaatattgctcaatttgcatgttgttaagtcatggtttactttttgaattcggtgtctttaattactactgctgtgtatgttttgtatactatttctgatctgcctccatccatttaggttgtcatattggttcatccaaaaataatacatgctggttcaatctaaattctgttttaaattatagattctatcctccaagtataataagccatgcagtataaagttgtctatttgtttttattagatggaagtaaatgactcttaaagagattacttataaaatcatctgcctttagtcccagttccaaaatcaacaataaaatacttgggtattcttgagctatttgtcatgcctagacactgctttggactttgacagctccatctagtggaagggaaactacaccagagaaagcacttcacacagagctaaatgggcatagggatgtcctgaaatgcaggaggggactccaggttggatgcacaaaatgtaaccactggccaggcctggtggtgtacacctatagttcgagctacgtgggaggccaaggtgggagggttgcttgaacccagaagttcaaggccagcctggagaacatagacctgtcccaaaaaaaaa

SEQ ID NO: 36963 - DNA, 644 bp, Homo sapiens
aaaaaatctatatacatgtacacacatacgtctgtatgtatatatatatacatctatatatgtcaggtactgtgctaagcattttacataccatttgttcttgcaacgattctgtgaaatagatacccttattgtccctaattctacagagaagagaaattgagccaaataaccagtaagtggcaaaaccccacctctcaaatgctatatatgtaaatctgtttagatcgtctaatctggcctgttaggttttctgctaataaaagaccagtgttgaaagagaaaccatgctcaatatttgttcctgagactggacagtaaaattaaaaagacaggtagagaaatactgagatgatacttctctgggacatgtacattactcagtaaaaattaagcatttatgtttgaaatactaataaagtcaacgcatgacttttgaatgctttttctgtgtcaggctgtttcaggcctggggatatagcagtgaataagacactgtccctgttctcttatagtttatgtgtagcagggagaaacagataaacaagtgaacatccgcaacaaggaacaacagaaaatttaaatcagttaatttgactgtgtgtgtgcttactttattgggttatcaaagtgatatttaggct

SEQ ID NO: 36964 - DNA, 496 bp, Homo sapiens
ctggtagagggaaggaaagttaaccaaatgcatatcagactcagccacagtcagggaagcaatgtatctgagaagaggagagagtagcttgtgtgcagcacacattcccggattattctctaccttctgtaccatggtgagtcactggggcttgatctcagtacccttctcctcctatagcacagcttagaagtgatgctatgaaaggaatgggaaggaaatgtctgtagctggtattattctggatcccagacagatcttcgttcgagcttatcaatgtgtcaaaccagggtgcactgagtctgcaagttagaatgctcagagaaaaccacagccacctctgtgtatggctgctgagccagtacccttcccaacatgtgaggcactactcagtccacaagccaaggagagttcctctggcttgaaatctgcactatccatctaataatgcctcatgagggagcaccaactagctgtccctaaccctaaaacaagt

SEQ ID NO: 36965 - DNA, 936 bp, Homo sapiens
  misc_feature (52)..(52): n is a, c, g, or t
tggagtcatgtgcgcctttattagctgagccattacttgagagggatgaagngggaggactgtgtgagcccagaagtttgaggccagcctgggctggtttaattaaattagctgggcatggtggcacacgcctgtggtctcagcgacttgggcggctgaggtagaaggattgtttgagcctgggtggttgaggctacagtgagctatgatcgcgccactgcattccatcctgggtgacagagcaagactctctcaaaaaacaaacaaacaaacctatacgaacaatggtaggaatgtcaaggaacccaggagtgaagatcggattagtcagatgctgtgagaggaggtggaaaaaaccagtgtagaatgggcaggcacctttgaaaaggctagaggaaaattttggaagggcattaaggaggagcatagcaaagaagtctagacctatgacttggagctgttctgttatataaataggatatccagagatagcaaactgctcactgcaggaaataggggaaatagaggataatttggaagaacaccccactgttattatttgtggcagttatgttctataaagtcgctgtggacataattagtgaatactgagccattgctcctaggggaacaatacagagttagattcctgtgagcctctggttataacgattttgtcagctgtcaaccgatcaatacatagccttgttttgcatgtgtttctgtttaaagataccttgtttaatatacattgttgattcattaacattgacctcatggcgaagagcactgtatctcatgcctaaatgaagcttagccaatgcgtctcttcttcctaaggcacatcatggccttgttgtgattaagaacattagacgacactaaggcatgatgtttggggctcattttaaacagcaaaatcaccaagaaacccac

SEQ ID NO: 36966 - DNA, 773 bp, Homo sapiens
ttttttgttttgttgttgtgtgagacggatccggctgctgtggcccaggccggactgcattccatcctgggtgacagagcaagactctctcaaaaaacaaacaaacaaacctatacgaacaatggtaggaatgtcaaggaacccaggagtgaagatcggattagtcagatgctgtgagaggaggtggaaaaaaccagtgtagaatgggcaggcacctttgaaaaggctagaggaaaattttggaagggcattaaggaggagcatagcaaagaagtctagacctatgacttggagctgttctgttatataaataggatatccagagatagcaaactgctcactgcaggaaataggggaaatagaggataatttggaagaacaccccactgttattatttgtggcagttatgttctataaagtcgctgtggacataattagtgaatactgagccattgctcctaggggaacaatacagagttagattcctgtgagcctctggttataacgattttgtcagctgtcaaccgatcaatacatagccttgttttgcatgtgtttctgtttaaagataccttgtttaatatacattgttgattcattaacattgacctcatggcgaagagcactgtatctcatgcctaaatgaagcttagccaatgcgtctcttcttcctaaggcacatcatggccttgttgtgattaagaacattagacgacactaaggcatgatgtttggggctcattttaaacagcaaaatcaccaagaaacccac

SEQ ID NO: 36967 - DNA, 1635 bp, Homo sapiens
  misc_feature (751)..(751): n is a, c, g, or t
gctcatgcctgcaatcctagtactttgagaggccaaggcaggaggatcacatgagcctgagaggttgagcctgcagtgagatgaaattgcgccagtgcacttcagcctgtgtgacagagcaagaccatgtctcaaaaggaaaaaaaaaaaaaaaaaaaatttattcattagttataaatgcacactgatgttcttataagtgaaaagatatattgttttggttttgctttaagattccagcaaatataaaacagaaaaagagggaatatattaaaaaggctggcaaaatatgtatcattgttgaagcttagtgatgggtgcattgtattcaatatagtattctcttttgtgtatatttgaagtttttcatgatagaaggtttaaaaatttagaacaaaaatgaatgtggaggttcaggatcctaccagatgtttctaaatgaactttaagtgacaatggggaaaaatgtccatatcatcctggagtttaaggcagggaattcttggtagggggctattgaaaaatagccaaactgttagtcaaaaatgtacatatgatctcatggccacagatagtaatgtagaagacagatcacgaaagtactaatccttgggtgaggaagaacaggagaaggcagcccaagaacttaactgaggccccaagaactaaggaaatctgttttgtaaaaggacctgtacggccaggtgtggtggctgacacctgtaatcccagcactttgggaggctgaggngggaggactgtgtgagcccagaagtttgaggccagcctgggctggtttaattaaattagctgggcatggtggcacacgcctgtggtctcagcgacttgggcggctgaggtagaaggattgtttgagcctgggtggttgaggctacagtgagctatgatcgcgccactgcattccatcctgggtgacagagcaagactctctcaaaaaacaaacaaacaaacctatacgaacaatggtaggaatgtcaaggaacccaggagtgaagatcggattagtcagatgctgtgagaggaggtggaaaaaaccagtgtagaatgggcaggcacctttgaaaaggctagaggaaaattttggaagggcattaaggaggagcatagcaaagaagtctagacctatgacttggagctgttctgttatataaataggatatccagagatagcaaactgctcactgcaggaaataggggaaatagaggataatttggaagaacaccccactgttattatttgtggcagttatgttctataaagtcgctgtggacataattagtgaatactgagccattgctcctaggggaacaatacagagttagattcctgtgagcctctggttataacgattttgtcagctgtcaaccgatcaatacatagccttgttttgcatgtgtttctgtttaaagataccttgtttaatatacattgttgattcattaacattgacctcatggcgaagagcactgtatctcatgcctaaatgaagcttagccaatgcgtctcttcttcctaaggcacatcatggccttgttgtgattaagaacattagacgacactaaggcatgatgtttggggctcattttaaacagcaaaatcaccaagaaacccac

SEQ ID NO: 36968 - DNA, 824 bp, Homo sapiens
acatttaggcatctttctattatcagtctacacagacctgccttttcttgtatatggtttcagagtattattttgtatgtctctaaaatgcattaataaatcccctacagataaatatttagactatttttagtcttttgctattaaaaacaatgctgcagttaaaaatcttgcatttatttctttgcacaggtataatttctctgcatgttaaattccctagctgcataattataaagcttgtttacttaaaactgtgtctatccccctcaggaaaagatgggtttcactggaattacactcacaccatataggtgtgagaagtacttttagctctgactctgacaaatactgtgtacgtcaaaccttgtaatctttgccagtctatgaaaggaaaaaaataatatcttggcagtagttaaaagttctaggtctgtgataactttctccaattaattatttaactatcccaattaaattttttttactttcaaaactgtgtttcacaaattttatcaaagatggaagcagagtgaccagaaaagacatcactgggcaaactgacctggcttccataaactagtgagagtaaaaccagtgctatatctaagtaagtgcttagtagttgctacaataattttatatcatttgaaaatttttgtttattataaaaactgtataaaatacggtggtcagacattagtattcctatcatacaaattagactgaatatttggacaatgttctttttacttcttcgttattatgatcatcaatttaaagaacttcaataaagaaacttgaagtttcttatctaaatttta

SEQ ID NO: 36969 - DNA, 284 bp, Homo sapiens
aaaaaaaaaaagaggaaatttgaacgtacgaagaggcatcaaggatgcatgcacaaaaagaaagaccacgtgaggacaagggaggagacggccatctgcaagccaaggagagagtctcaaggagataacaaacctgctgcctttaattttgggcatctagcttccagaactgtgagaacatacatttctgttatttaagccatccagcctgtgatatttagttatggcagacctagcaaagtaatagacactccagaactttcatttctctcttctctagattt

SEQ ID NO: 36970 - DNA, 356 bp, Homo sapiens
  misc_feature (83)..(83): n is a, c, g, or t
cagacctctgtgatctctgggtgataccctgccccctaacagctggatcagttgacgagtgtgatgtgagcacccgtgggganatgggccagctttccgtctatgccaagatgagtggtgtttttgtttgttttgttttttaaacaaaacactttggtgaaaatgatttcaaacatctcccgggcgtggtggcatgtgcctgtagtcccagctgcttgggagactgggaggatccgttgagcccaggaggtgggaggcttgcagtgagccgtgatggcattcacttgtgctccagggcttgccgacagagtgaaaccctgttttcaaaaacaacagcaacaagaactttttcaggg

SEQ ID NO: 36971 - DNA, 4155 bp, Homo sapiens
  misc_feature (654)..(654): n is a, c, g, or t
  misc_feature (1023)..(1023): n is a, c, g, or t
  misc_feature (2219)..(2219): n is a, c, g, or t
  misc_feature (2322)..(2322): n is a, c, g, or t
  misc_feature (3617)..(3617): n is a, c, g, or t
gggagaggtggcgcgttgcctgggtgctcatggacaccaggtctgctccccatgcacttgtcgtctgtgccacgctgcaggggccaggcagccacaggcatcgtttgggccccgagctggccaggctggagtcagggcccactaagccgcaggtgcctcttgcttgggggtgggggctgaagggtgtcttcctgccgtggagctatagctggtgcctgttccctctgtccagacacagctctgggcttgcagcctctgcctccctgatgggacagcaaccctgggcatcgctagaggctctgaggtctgcacggggcaccatcccgtattctgcagggtccagagacacagagagggaggccagcccagcaccattgtgggagaaaggccagtgatgtcatcagggggctaaggctggcagccaccttctagtggacattactgctgagaactggccaggtgcctgcactcgctgccatgagtaattgcccagtggcccgtgaggtgctggcagctcctccatttacaagttaggagacaggtacagagagaccaggtggcctgttccagcagcactgctctggctcttgaccaccaccacatcagcagcaaaaccgccagggctgaaatcaatacagatttatccattctcancaggctgcgggcgccttgcaggtctgtgctcctagctgggggcccagggagactctgcttccaggactgcccgagtgtggaaggaacccagctgccagctgcaggactgaggtcccatctcctccctggcctcgcacaggccctcctgcctgccaagcagcaagtgatgccgcacctcagtctctccctctgctctccagttccctggacccccagcccaagctccggtgattaccaggtaattcctgtcccaagacagccgcgccgagtgtcctaacacagttgccacacggctccatgtcctgtgcacaggccaggggttcgagtgggcatcagcaatgctcacttcagagcccctccgccacgacntggccatgtgcacacagctccgtggccagcgctggaaactgcgtctcctgcctccagctgcgttacttggagaagcaggaacctctccatcctcactttccatccgcacatccagggccgcccacgtgcacccacaccgtgcgctcactgtgtggcctgtcgagaacacagtgtcctctgcccctgatttcccaggagagtcgcacgtctgtgatggtggtctcccaggcacgcatggccatggagcacgggaacgtgtgcgcctgctgggagcacatgggaagactgcacgccgggtgctgaggcttcctgtgaaaaaaagaacctgaaacaagtcttcctgagacccaggctggtgtggacacaaggaagccccgccggagggccctctttacatggggaggcctgaaccctgagcagtcaaggaagttttggaagtgagtagctatggcttctccacctgctcctgcctggacggcgcccttcagaactcaagcccatccatgagacagcacccaccggggccagtgagtcactccatgaaggccaaagatcacctggacacgagtctcggggtaaccagcccccctgcagacctgcagaagcttggacagcaagtgggagtcagcagtcaggaaactcgggggctttgcacctggagggaagcccacctgatatgaaaatgctttcgaagcttgtggatcggagaggccagtggtgtaccgggtggtccaatcgatcagtcaggacgatcatcagccccatttctcaggtgcagtacagcacgtccacgtcctcccgacaccgtgagtgcggccacaccgaagccaggggagcaggtgcgcttctccataggtcctggtttaaagcaagcggaaacaccacaggctcgggattgaggtggtaagggacgtccagtcctcaggtgaggttaagtccttctacagagacagcactggggggacctcacagtgccccccgggaagcgctgtttgggcaggctgcaggagctgaggccagagtcctggcacggggctacggggcccttggtgtctttcactgctgtgacgggggctccctgctgccccggcacctgcgggccttggccagtcccgaacaccaggttgtggcagtggagacctggggggtggccagcggccccctatggaggttctgccgtgcgtgtcagggccccnggcagggctgtgcagcgccagcctcactatcagtgtggacacacatctgtgggaggggctctcgttttccccaccttccggtgagggaaccaaggcagactcngcaccaagcaggggtcaggccctggtggaggtggattttcttcactgtggcacagtcctgctcagtttctagtcctgatggaggtggtggaggccctggtggaggtggattttcttcaccgtggcacagtcctgctcagtccctggactgcccccctgcacccagcagcacaggccgcagagcccaggagatgtgggcaggagctttcccctcgcctgccccactcctgcccacccagtgggcaccccgtagatgggagcagctctccgtctagcacttggactgctgggctgagtcatggctgcaggcaacggcttagtggcatctcccaggtgccactgcagggatagcctctgtgtctccaggctctgctgtggccccgcggagccaagcttacccatgccgctgagtcgggggctgcagaggcctgtgcgggctgcggtggctagacctgggcctggctgctcagatgctgctggaaccctgctctcagcctggaggctggcaggtctgccaggggccaacgggcaggcatcgcccgtctgaagctctttgcctctgaaggagcttcagcgccagccaggggcagtttatgagaaattcagagaaacatgtaggcttctctgtgtcttctgaagaactgccaatgcctcacccacctctggccagaggactctggaaaacttgcgtttctggtatgtatagaaaagcgacatgctaagccgcaaagccgcccccttcaagacgcagcacacgcaaggctcaccctgccacgagcactggtaccggctcactttccgctctgctcggcgggactccggccaggcccagcgtgcagctgcagaaaggtttagagtgaggcttccacttcactctccggtccaagagttatactatctggtggaagtgtttctttttccttttttggacagttaagctacagcgatgggccaactggcaccagtgtggagagacaggtattcctcactttgtggcaccaacgtggttctggcaaagtggcctcttttccagtaaaacagtcttctcccctccctcgccttccattttaggaccagtggtttgtccctggggaagcaaccccaattacagccagctttgccatctgtggaaatagcctggtcaccagaggcacagaagccagatgcgtggccatgccggcggcagcacccggggcagcccctgcccccgacccatgaatctcagtgtcccccaggccgcccacgtcccactctgcccagcctacaccacctccctcaccgcaaagtgcccgctcngcagctccatgcccctgcccagtggagcctcagccccgtcccacctgcagcatgcccagcccaagtgcccgaaacccagagcctcggactcagggcaaaaggaagccgccccattccaccacatcagggtctccactgtgcttatttagagcagagcacaactctccttgcgtctgagtcccttcacacaggtgactgagaggctcaggacagagcattgcaggggagacagaggaggggctcggcctcgccaagcagctggctctattcatttagcagaaccgctgccccaccccctcccagcccctgcacggagggaggccactggggccggcccgtccccaacttctattttgttttcgccagagccgcctccagactccctcttcacattttatgtcaactctggggccctgctggctgaaagtgagttctgttttccggcagccctgtggcttttggactcggccttgaaattagttcatggcgacccaggcacacatcgcgctgggaagccacgtgggagccgtgcgggtga

SEQ ID NO: 36972 - DNA, 572 bp, Homo sapiens
gagtgatgtttcaaaacacaaacataataggtagagtcaattacttaggggagtctaaacctggaggtaacattagaaatagaaataataaaatgcagtgtttttggatttgtctgttaagattattttaatccagatcatatttaatggtttacatagttgtatatcaaatttggtttcagaaataaattatacagtaaatttaaaaatgcaaaaaatgtatattgttatacattctgtaacctatgaatccatataacttgggcaagaaaattatataattaaaaataaaacctttctgttctcaattatgttttagggacagctatatagttcacactcacaaaggaatcataaaaactctatgtataatcttggaagtaaaaatatctgttgtatcatatttatgaagtatacaattgattaaaaatgataatgtctgtcttctatccaacggcaataacagaagataatggcatataagtaggcctgtctccttttttttggcattgatttatatatctttactagctttgttgttttaactccaataaaagattatttagtaagcc

SEQ ID NO: 36973 - DNA, 755 bp, Homo sapiens
ggcagtaaagacaggacgcacccatgtcacaagaggagcacaggcaggggtgttggtgttggggcagccctcagggtctccagacccaagccccactcacacagcagcctaggaaggaagggcagagtcccaggtgtcagctggtgggtctcccaggagctgcccctccctggaagtcacaggacaggaatgacagatcagggaactgcaggaagctgccacctctggggtcagaatatgcccagcctgcgggggctctctatcggggtcttcgagagccagacagcctgccttgtgctgcatacctggctttgctctgtgcagaacccagcacacgtgattttgtgtgacatgccagcagcctggctcccaggacaggaggcctgccctgggggaggggctgcaggaggagggggggcaggcacccatgagtctgtccagccttgtcacagatgcatcgcccagcctgcggtcctgatttcagctcacctcagagtaaatcagaataaactgcacccagactttcacgaatgcatgttgacgctttcagttcacccctttctttgctaactttcttcctattttcttctaatgcgagagcttattaattccatatttatcattttgaataacttttctcctttttagtaacaaaatgtacttcactcttagtaaaatgtatttactattttagtaacaaaaatatacttgcctaatcatgtttaaaatatagtgatgtgaaaaattcagacgtc

SEQ ID NO: 36974 - DNA, 199 bp, Homo sapiens
gccctgcagcccaggcatgggactgaccacggacagcgaggggacagccagtggtgctgaggctgggagggagggccattgggcgtggggcacgcacggtgaattttctagggaaattgctgcagtcaacacctggagccctggtctgggagtggcctgtggggtccagtggcctcatgccctgtgcccatatgatgac

SEQ ID NO: 36975 - DNA, 406 bp, Homo sapiens
tttttttttgttgttgttttttaggatcttgctctgttgttaggtatgttgtaaactgctgcagaatcctcctcaaaacccagttgtagagattgagactgtctgtaaatacttcaaaggagaaagaaaaaggggataatgggacgcagaaaaacaaaaatgacaagaaacgttctgtcagcagcatgcgattaaaaaaccccatacagatctggcagagcatggttatttctgaaaatgacactcactttgaaggctgttcttttagtcagacctctgttaggctaaggacctctcccactgctgacatgatagatcaaaggaagcaccttgcactgtctgaggtgcatgactagcacaagtcactacagacacagaacaacagagcaggcaatggacgtgcagc

SEQ ID NO: 36976 - DNA, 567 bp, Homo sapiens
ttttttttttaatgatttctctgaattctattttttcctcaaatctgctaggattttagtttcctattcccttaaaacattttgaagcttgccttacttctttaaagagagggttttgttttataatctgtctgacaattatgaaaccttaagttgtgtggttctatttcggtggttggttgtttctgctggttcttatcctgggttcctagattccttgtatgcttgcttaaatttgaccgtgatttgcccaagttattcatggaactatttgggaattctcggaggcttaggactagcatttccttctaccacacacacacaaaagcaccacctgttcagaacaaccttaaactaaattcacacctagctctgttttaactgcctaggtaaggtgtatttaagcaatgagtccttgagaacaccagtgattggctaaaacttctcaaagatctgtttatttcatttggtttgattttggggccatcttctgctaagcactaaaatgactactcgtgcagtttcctgagacggccagaagagtttacttgtggttcaccattatcc

SEQ ID NO: 36977 - DNA, 796 bp, Homo sapiens
gacttgcttatgggttgtggggagggaagggcactggcatgattgcaatacattcctgggcaagacatctggcctctcccatttgcggttccttcatctataaaatgttaacacagtgtgtcaaaatgttgatgttctcgagtgacttttcctgagatctttgccaattctcaaatcaacatccttatggtcattgttgccaggatctcatttattgtgtacagtagcctaagaggaggcattttgttcttgcttgacacatgacaaaatcacacacatgccaccagagcacataattcccccttacaccgtaaatacaatcaagcacacctgaaaatctaagtgatttcttccttattgattccacgaataaaaggcagtagggatttctaaatttgttaaaggaaattcatcactgagtgtaaattctccctaacatggactagcaattttgtttctctgggagccataattcacaagccaacaggtatttctgtcacttcctaatacatggagggtacagcatcccctgcacactgggttccagcctgagtgtgaactctcttgcgtacgaagggactggcccctgtgtgcttcttactgcacgcacttcataattactccttagcagacttaggctgtttcatgtctaggaccttcggagttattctcaaaagtaaaaatcccaaatgttgattctgtaaataccaagggtcaactataatattagcaatgatccagggctgctggaggattcaatgagataaaatgctaagtgtccagcatcctaagtgtg

SEQ ID NO: 36978 - DNA, 580 bp, Homo sapiens
gacttgcttatgggttgtggggagggaagggcactggcatgattgcaatacattcctgggcaagacatctggcctctcccatttgcggttccttcatctataaaatgttaacacagtgtgtcaaaatgttgatgttctcgagtgacttttcctgagatctttgccaattctcaaatcaacatccttatggtcattgttgccaggatctcatttattgtgtacagtagcctaagaggaggcattttgttcttgcttgacacatgacaaaatcacacacatgccaccagagcacataattcccccttacaccgtaaatacaatcaagcacacctgaaaatctaagtgatttcttccttattgattccacgaataaaaggcagtagggatttctaaatttgttaaaggaaattcatcactgagtgtaaattctccctaacatggactagcaattttgtttctttgggaggctgaggtgggaggattggtggaggctgggaggtcgaggctgcagtgagctgtgattgagccactgcattccagcctgggtgacacagtgacaacttgtctcaggaaaaaaaaa

SEQ ID NO: 36979 - DNA, 330 bp, Homo sapiens
cactttttaggggaatagcagacaagaggaattaggtccaaaagtcatccttgacatctcttcctttatgctccatggccaattcatcagcacatggtgtaagattccctttccaaatgtgcacagaatctaatccatcactgccactgctcccaccttggtccaaacctggacaactacaatggcctcctacctcatcctaatggtcctcattttccatggataaatgcagggtgatcctttaaaatgtcagatcatttcacttctctgcttaaaatcctccaatggcaggccggccacggtagctcgtgcctgtaatcccagcacttt

SEQ ID NO: 36980 - DNA, 425 bp, Homo sapiens
ttttgagacagggtctcactctgccacccaggctggagtgcactggtgtaatcttgggctcactgcagccttgacctcctaggctgaagccattcttccgcctcagctcctctagtagctggggactacaggcatgtgccaccacacctggctaatttttttaaaaatttttgtaggacaaggtctcactatgttgtccaggctggtcttgaactcccaaactcaagcaatcctctcaccttagcctcccaaagggctgcgattataggcgtgggccaccgtgtccagcctgggattacactttgactctgtttcccaatgctatcactttcccctttccctaggaatctggtgtctcttattttcactttgagtaccctataagtatgtgttggtatttttattttgagcacatctcaatccta

SEQ ID NO: 36981 - DNA, 408 bp, Homo sapiens
tgcagtctttgatttccatagaaagtcaaaagtcattctagtaatacacacttaggaaatgtgaagtgctatgactcattttattttggctttgcacagtgtagaaaatttcttggctaggaagaaattccttttcaaactaccagtcctccccaaacaattctcctcccttctgaataggtagttctctctttgcacagacattcttctgggcttagctgctgtgtaacctcttaacccttcattaataatttcctgaggccagtttgttataaagaaatattgcagcacagacagtgtgtgagcaagagagagagagagaaagagcgagagagaaagagagagagacacacacacatactactttttaatgaccaactagaatggggttaatgctctgaaagaaat

SEQ ID NO: 36982 - DNA, 1149 bp, Homo sapiens
tttttcacatgtagaaaagaggctttattaagaaggctttgaagtcaaaaaataaaactcttgatacaatttttttaacccttaaatcagctcagcaaatatataatcagtaatttagctgtgtaagattaaaggtccattactttatttaaaataaaatatattttagttcttaaaatttattccataaagtacatatttccctataaattccctacatatacacaagaggtaaaaagtaaaagtaaaaaaaaaaaaaaaattaaaaaaattttaaaaatgacaacagaaaccgcagtaaaaaggggattaataattaacagaaagttagaaatttgattggaacgcccctcgcccccgcccccctgcccccctccggccgcgcacggttgatgtacaaaagcataaatggttagccccaaaaagggagtaaaaatgtcaccctcctcctctggaacgtctgtgcggcctgagaccggccggcgagaaaagtcaaatcagaaaacggcttcggacgaaaggaaaaaacgctgagcgctggaaaagtcgtgttttttgttttgcttttttaaagatcaccctggaggggaggggtgtctaaaaataagaaaactaaaaaaagtgcaagcggaccttttctctccggtttattgtaacctgaccactcaatactgtcgttgaagggctgaggcgccgccgggctgcggggtctccgtctccacgcctgaggcggcagttaaagctcatctgtaaacactggccgccgcccacccccctgccccctcggcctccgcccctcgccccctccccgtccctctcccaccccgggtcccgccccgtctcccgcgcccacccctggcccccgcagatggccccggccacgtggtggtccgcgctctaggaaaagatatgaatggcctgggtggccggcgtgcggcaggcgggacactcgggctcgctcttgccgcagatgcggacggcgcagtccatgcagaagaggttgtggccgcaggggaccagcgcagccatcacctcgccctcggcgcacaccacgcactctcgcgccagggccggggccgaggacgccgaagggggcttgcggctgttctcggaggcgccggagtccaggggggcgcaggcggcggccgc

SEQ ID NO: 36983 - DNA, 1195 bp, Homo sapiens
tttttcacatgtagaaaagaggctttattaagaaggctttgaagtcaaaaaataaaactcttgatacaatttttttaacccttaaatcagctcagcaaatatataatcagtaatttagctgtgtaagattaaaggtccattactttatttaaaataaaatatattttagttcttaaaatttattccataaagtacatatttccctcttgtgtatatgtagggaatttatagggaaatatgtactttatggaataaattccctacatatacacaagaggtaaaaagtaaaagtaaaaaaaaaaaaaaaattaaaaaaattttaaaaatgacaacagaaaccgcagtaaaaaggggattaataattaacagaaagttagaaatttgattggaacgcccctcgcccccgcccccctgcccccctccggccgcgcacggttgatgtacaaaagcataaatggttagccccaaaaagggagtaaaaatgtcaccctcctcctctggaacgtctgtgcggcctgagaccggccggcgagaaaagtcaaatcagaaaacggcttcggacgaaaggaaaaaacgctgagcgctggaaaagtcgtgttttttgttttgcttttttaaagatcaccctggaggggaggggtgtctaaaaataagaaaactaaaaaaagtgcaagcggaccttttctctccggtttattgtaacctgaccactcaatactgtcgttgaagggctgaggcgccgccgggctgcggggtctccgtctccacgcctgaggcggcagttaaagctcatctgtaaacactggccgccgcccacccccctgccccctcggcctccgcccctcgccccctccccgtccctctcccaccccgggtcccgccccgtctcccgcgcccacccctggcccccgcagatggccccggccacgtggtggtccgcgctctaggaaaagatatgaatggcctgggtggccggcgtgcggcaggcgggacactcgggctcgctcttgccgcagatgcggacggcgcagtccatgcagaagaggttgtggccgcaggggaccagcgcagccatcacctcgccctcggcgcacaccacgcactctcgcgccagggccggggccgaggacgccgaagggggcttgcggctgttctcggaggcgccggagtccaggggggcgcaggcggcggccgc

SEQ ID NO: 36984 - DNA, 1057 bp, Homo sapiens
tttttcacatgtagaaaagaggctttattaagaaggctttgaagtcaaaaaataaaactcttgatacaatttttttaacccttaaatcagctcagcaaatatataatcagtaatttagctgtgtaagattaaaggtccattactttatttaaaataaaatatattttagttcttaaaatttattccataaagtacatatttccctataaattccctacatatacacaagaggtaaaaagtaaaagtaaaaaaaaaaaaaaaattaaaaaaattttaaaaatgacaacagaaaccgcagtaaaaaggggattaataattaacagaaagttagaaatttgattggaacgcccctcgcccccgcccccctgcccccctccggccgcgcacggttgatgtacaaaagcataaatggttagccccaaaaagggagtaaaaatgtcaccctcctcctctggaacgtctgtgcggcctgagaccggccggcgagaaaagtcaaatcagaaaacggcttcggacgaaaggaaaaaacgctgagcgctggaaaagtcgtgttttttgttttgcttttttaaagatcaccctggaggggaggggtgtctaaaaataagaaaactaaaaaaagtgcaagcggaccttttctctccggtttattgtaacctgaccactcaatactgtcgttgaagggctgaggcgccgccgggctgcggggtctccgtctccacgcctgaggcggcagttaaagctcatctgtaaacactggccgtggagaaggcggcgccgcctgggaaggatacggggccgcgctctaggaaaagatatgaatggcctgggtggccggcgtgcggcaggcgggacactcgggctcgctcttgccgcagatgcggacggcgcagtccatgcagaagaggttgtggccgcaggggaccagcgcagccatcacctcgccctcggcgcacaccacgcactctcgcgccagggccggggccgaggacgccgaagggggcttgcggctgttctcggaggcgccggagtccaggggggcgcaggcggcggccgc

SEQ ID NO: 36985 - DNA, 824 bp, Homo sapiens
tttttcacatgtagaaaagaggctttattaagaaggctttgaagtcaaaaaataaaactcttgatacaatttttttaacccttaaatcagctcagcaaatatataatcagtaatttagctgtgtaagattaaaggtccattactttatttaaaataaaatatattttagttcttaaaatttattccataaagtacatatttccctataaattccctacatatacacaagaggtaaaaagtaaaagtaaaaaaaaaaaaaaaattaaaaaaattttaaaaatgacaacagaaaccgcagtaaaaaggggattaataattaacagaaagttagaaatttgattggaacgcccctcgcccccgcccccctgcccccctccggccgcgcacggttgatgtacaaaagcataaatggttagccccaaaaagggagtaaaaatgtcaccctcctcctctggaacgtctgtgcggcctgagaccggccggcgagaaaagtcaaatcagaaaacggcttcggacgaaaggaaaaaacgctgagcgctggaaaagtcgtgttttttgttttgcttttttaaagatcaccctggaggggaggggtgtctaaaaataagaaaactaaaaaaagtgcaagcggaccttttctctccggtttattgtaacctgaccactcaatactgtcgttgaagggctgaggcgccgccgggctgcggggtctccgtctccacgcctgaggcggcagttaaagctcatctgtaaacactggccgccgcccacccccctgccccctcggaggcgccggagtccaggggggcgcaggcggcggccgc

SEQ ID NO: 36986 - DNA, 962 bp, Homo sapiens
tttttcacatgtagaaaagaggctttattaagaaggctttgaagtcaaaaaataaaactcttgatacaatttttttaacccttaaatcagctcagcaaatatataatcagtaatttagctgtgtaagattaaaggtccattactttatttaaaataaaatatattttagttcttaaaatttattccataaagtacatatttccctataaattccctacatatacacaagaggtaaaaagtaaaagtaaaaaaaaaaaaaaaattaaaaaaattttaaaaatgacaacagaaaccgcagtaaaaaggggattaataattaacagaaagttagaaatttgattggaacgcccctcgcccccgcccccctgcccccctccggccgcgcacggttgatgtacaaaagcataaatggttagccccaaaaagggagtaaaaatgtcaccctcctcctctggaacgtctgtgcggcctgagaccggccggcgagaaaagtcaaatcagaaaacggcttcggacgaaaggaaaaaacgctgagcgctggaaaagtcgtgttttttgttttgcttttttaaagatcaccctggaggggaggggtgtctaaaaataagaaaactaaaaaaagtgcaagcggaccttttctctccggtttattgtaacctgaccactcaatactgtcgttgaagggctgaggcgccgccgggctgcggggtctccgtctccacgcgaatggcctgggtggccggcgtgcggcaggcgggacactcgggctcgctcttgccgcagatgcggacggcgcagtccatgcagaagaggttgtggccgcaggggaccagcgcagccatcacctcgccctcggcgcacaccacgcactctcgcgccagggccggggccgaggacgccgaagggggcttgcggctgttctcggaggcgccggagtccaggggggcgcaggcggcggccgc

SEQ ID NO: 36987 - DNA, 284 bp, Homo sapiens
attcttcagctgtaacatagcatgctctgcaaagccagtgtaaaaataaccagggcaggggtgtgtgtggcattttgcagctgggtaatctgatccgcagagatctgtccaaggtcaggggcttggcagcagctcctggccacgcctacagctcccaaccgtggacctctctgccctgtgtgtccagccctgctcccagcccgttgactttagcctctcaacagcactgcctccccgggttacccgatgaggtgggatttttctcctgttcatgctgcaaatct

SEQ ID NO: 36988 - DNA, 360 bp, Homo sapiens
cttaagccaggcattgtgcctgagggaagaaatagtggctcttatgagctctgctagaaaagtaacccttcaggccaggcgcggtggctcacgcctataatcccagcattttgggaggccgagacaggcggatcacctgaggttgggagtttgagaccagcctggccaacatggaaaaaccccctctctactaaaaatgcaaaattagccagtcatggtggcaggtgcctgtaatcccagctacttgggaggctgaggcaggagaattgcttgaacctgggaggcggcggttgcagtgagctgaaatcgtgccattgcactccagcctgggcgacaagagtgaaactccatctcaaaaaa

SEQ ID NO: 36989 - DNA, 153 bp, Homo sapiens
ttttttttaagtttcccagatatgaaggactgtgagactaaataaatcattatatattccacaagcaattctcctgcgacagcctttcaaaaaagaattaggaagcctgaatattaaatgccagcaacccatgactaggataaggtcagtttc

SEQ ID NO: 36990 - DNA, 472 bp, Homo sapiens
ggcttttttcaggtatctctaacttagtggagaagtttgaaaagctctgcttgccactgaaattagtccagaaggatctttgcttggctgtccgtacttatcacatcactgagaaaggtctaagtgtcttttaatgtagatggagagtgtccttgtcctacccaggtcctagaactggagggagctggtaacacaagaacatgctgaagatgaacattgaaaacactccttcattagcagaaacagaatgggccttgtcggagttgtgacagttactgactgggcagggggtttggatctggctaaatatagccaggggaaagaaactagtagtatagctggaaagatggtaatgattacacaaatgcatatgttttaatttgaaggtaaaagaggagagaatatcaatcagagatattactgaggtcccagcttaatattttaaatatttaaggagctctaaagaggaata

SEQ ID NO: 36991 - DNA, 744 bp, Homo sapiens
tactttgaggaaaaaaagtcaaagaaaaattgtatttgagggaaaaaaccatgaccaagtaaaggataaattcaaaaaatagcctcatgagacttggcatacacactcgtgggattccagttattatggagtgcttccatccctctccaccccttccccccaaaaggttttctttgcaagtgcttttggaactaagagctagtatcttggattaactgatgcctgctagtgctttctgattactcgcattctgtttcttgctttaaaagaagagtaaagacaagagtgttggaccagtattgcagttctgtagtgtcatttcttataaaaaacaaaacaacaacaataatttatcaaaattggcatatttaaagcctaacattctaataaaggcacaaatttctttttaatacttgtttcagcctctttaatctctttataagttaactaataaatctattttcttcagacttctgcaatagttctttaaaatcacaacagttagcaagctgacttttgtaatgtgctcaatacaaatacttgtgaacttttaatatgttgagtgctttcattttgataactggatctccatttgatattttcatttgtataactcatttgcagtctgaaaattttttttagtgccagtccctgaacatatcattgaaagttaattttctttgcattttaaaatatctggattatgaagaaaaagtgatgaaaataaattaaaactgaattacc

SEQ ID NO: 36992 - DNA, 1082 bp, Homo sapiens
tactttgaggaaaaaaagtcaaagaaaaattgtatttgagggaaaaaaccatgaccaagtaaaggataaattcaaaaaatagcctcatgagacttggcatacacactcgtgggattccagttattatggagtgcttccatccctctccaccccttccccccaaaaggttttctttgcaagtgcttttggaactaagagctagtatcttggattaactgatgcctgctagtgctttctgattactcgcattctgtttcttgctttaaaagaagagtaaagacaagagtgttggaccagtattgcagttctgtagtgtcatttcttataaaaaacaaaacaacaacaataatttatcaaaattggcatatttaaagcctaacattctaataaaggcacaaatttctttttaatacttgtttcagcctctttaatctctttataagttaactaataaatctattttcttcagacttctgcaatagttctttaaaatcacaacagttagcaagctgacttttgtaatgtgctcaatacaaatacttgtgaacttttaatatgttgagtgctttcattttgataactggatctccatttgatattttcatttgtataactcatttgcagtctgaaaattttttttagtgccagtccctgaacatatcattgaaagttaattttctttgcattttaaaatatctggattatgaagaaaaagtgatgaaaataaattaaaactgaattaccaaaaaaaaaaaaaaaaaaaattttgggggggcggggcctgaaaaaaatttttaaaccattgtttggggcgggccaattgttagtaacatgtggcctaagcgttgtcccaagaggaaaccgggcatggaacggtgggtggtttcccccaataaaaaacgcccgggcaccgggtgtttgacaatccaagtggttctcggcctctggtctctaacggtccaggtcgtaaccctcccccgctcacgctgttgaaacaaacagaggagatcgaaaaagaagaacagagaaagcgcaagaagaagcaaaaacacaaaagaagaatataagaacaaatgaagcac

SEQ ID NO: 36993 - DNA, 1098 bp, Homo sapiens
tactttgaggaaaaaaagtcaaagaaaaattgtatttgagggaaaaaaccatgaccaagtaaaggataaattcaaaaaatagcctcatgagacttggcatacacactcgtgggattccagttattatggagtgcttccatccctctccaccccttccccccaaaaggttttctttgcaagtgcttttggaactaagagctagtatcttggattaactgatgcctgctagtgctttctgattactcgcattctgtttcttgctttaaaagaagagtaaagacaagagtgttggaccagtattgcagttctgtagtgtcatttcttataaaaaacaaaacaacaacaataatttatcaaaattggcatatttaaagcctaacattctaataaaggcacaaatttctttttaatacttgtttcagcctctttaatctctttataagttaactaataaatctattttcttcagacttctgcaatagttctttaaaatcacaacagttagcaagctgacttttgtaatgtgctcaatacaaatacttgtgaacttttaatatgttgagtgctttcattttgataactggatctccatttgatattttcatttgtataactcatttgcagtctgaaaattttttttagtgccagtccctgaacatatcattgaaagttaattttctttgcattttaaaatatctggattatgaagaaaaagtgatgaaaataaattaaaactgaattaccttttctaatgtttttttttttaaagtaatgtaattctattttgtttttatgtatgtgatatctgtttctgttgagatttgggagttattgaaatctctgtaatgtgtatggtagaaaatttcttgtgaccttaaaattttaccagttatttatagaaagagaaaatgggaaatgttttataggctttttactagcagtatcagtgaacacttgaactccattattcatgaaaataacacgttaggattggaatacgtctattcaaaagtgaaagaatataaagtgtatagttttttgtttatactctaaagatagaattggggagtaaacttcagtttttgtttagagtggatc

SEQ ID NO: 36994 - DNA, 677 bp, Homo sapiens
tatgatctaaatattctggcaatccttcgtaaaaaataaaacatcatataatccacatcagtagttaaattgaccttttgttcagtgtcacgaatcaagtaaatctgaatagtgtgtttcagatttgttttggccctttaggtaatcagttctgatgcatattgatgaaagatatagtaatttttttttttagatggagtctcactcttgtcgcccaggctggagtgcaatggtgcgatctcagcgcaccgtaacctctacctcctaggttcaagtgattctcctgctccagcctcccgagtagctgggattacaggtgccccaccaccacgctaggctaatttttgtatttttagtagaaatggggtttcacccatgttggcccaggctagtctcgaactcctgacctcaggtgatctgcccacctcagccacccaaagtgctgggattacaggcgtgagcctaatttaattcacatatttaaatacttttatttccaaaggaggttaatggtaaatgtgatcatcaagtcaagcatgacactctgcttgtaaacacattgattttaaccagagttcagtgcatgtcctggctaggtgtggtggctcacacctgtaatcctactactttgggaggcctaggtgggaggatagcttgaggccaggagttcaagaccg

SEQ ID NO: 36995 - DNA, 705 bp, Homo sapiens
aactcatttttatacatttaggaaatcatggatcggatctacaaaaatgtcatgaataaagtcagtgaaatgagtagttttcaacgtaatctgtttattctggcctataattacaaaatggaacagatttcaaaaggacgtaatactccactgtgcgacagctttgttttccggaaagttcgaagcttgctagggggaaatattcgtctcctgttgtgtggtggcgctccactttctgcaaccacgcagcgattcatgaacatctgtttctgctgtcctgttggtcagggatacgggctcactgaatctgctggggctggaacaatttccgaagtgtgggactacaatactggcagagtgggagcaccattagtttgctgtgaaatcaaattaaaaaactgggaggaaggtggatactttaatactgataagccacaccccaggggtgaaattcttattgggggccaaagtgtgacaatggggtactacaaaaatgaagcaaaaacaaaagctgatttctttgaagatgaaaatggacaaaggtggctctgtactggggatattggagagtttgaacccgatggatgcttaaagattattgagatatggttcgagtttgcagaacttcccttgtcataaccttgggctttgcaaacggtttcatcttatggcatggatttgttgccaaatacaaggattaactct

SEQ ID NO: 36996 - DNA, 5715 bp, Homo sapiens
aggcccagccccgcacgcgccaccgctcgcgggccaatgggtggcagcctctctgcataggcaacgagtgccggccgggggtgagcgtcccaggcggttccgctcaacagacgctgctgtggctgcgccgggctgcgacactgcagttgtctacgcggccggggccgggacgaggaggcgttggacggggtcgcatacgttcgtcccctcgcattgcggccccgacagctgcgccaggatccccgggcggcggcgcggggcgtgaacgctctggggctcagccaggcctgcgcgggcccgaggccggaggaacccggactccggcgtagcggttttgacacaagggcgcatatcttcaaagcacctagtacctcctaccattgtcaactgatacagaattcgttgttgggaaggactggggaaacagctgtaacatttgccaccctcagaagctgctggtcctgtgtcacaccaccttagcctcttgatcgaggaagattctcgctgaagtctgttaattctactttttgagtacttatgaataaccacgtgtcttcaaaaccatctaccatgaagctaaaacataccatcaaccctattcttttatattttatacattttctaatatcactttatactattttaacatacattccgttttattttttctccgagtcaagacaagaaaaatcaaaccgaattaaagcaaagcctgtaaattcaaaacctgattctgcatacagatctgttaatagtttggatggtttggcttcagtattataccctggatgtgatactttagataaagtttttacatatgcaaaaaacaaatttaagaacaaaagactcttgggaacacgtgaagttttaaatgaggaagatgaagtacaaccaaatggaaaaatttttaaaaaggttattcttggacagtataattggctttcctatgaagatgtctttgttcgagcctttaattttggaaatggattacagatgttgggtcagaaaccaaagaccaacatcgccatcttctgtgagaccagggccgagtggatgatagctgcacaggcgtgttttatgtataattttcagcttgttacattatatgccactctaggaggtccagccattgttcatgcattaaatgaaacagaggtgaccaacatcattactagtaaagaactcttacaaacaaagttgaaggatatagtttctttggtcccacgcctgcggcacatcatcactgttgatggaaagccaccgacctggtccgagttccccaagggcatcattgtgcataccatggctgcagtggaggccctgggagccaaggccagcatggaaaaccaacctcatagcaaaccattgccctcagatattgcagtaatcatgtacacaagtggatccacaggacttccaaagggagtcatgatctcacatagtaacattattgctggtataactgggatggcagaaaggattccagaactaggagaggaagatgtctacattggatatttgcctctggcccatgttctagaattaagtgctgagcttgtctgtctttctcacggatgccgcattggttactcttcaccacagactttagcagatcagtcttcaaaaattaaaaaaggaagcaaaggggatacatccatgttgaaaccaacactgatggcagcagttccggaaatcatggatcggatctacaaaaatgtcatgaataaagtcagtgaaatgagtagttttcaacgtaatctgtttattctggcctataattacaaaatggaacagatttcaaaaggacgtaatactccactgtgcgacagctttgttttccggaaagttcgaagcttgctagggggaaatattcgtctcctgttgtgtggtggcgctccactttctgcaaccacgcagcgattcatgaacatctgtttctgctgtcctgttggtcagggatacgggctcactgaatctgctggggctggaacaatttccgaagtgtgggactacaatactggcagagtgggagcaccattagtttgctgtgaaatcaaattaaaaaactgggaggaaggtggatactttaatactgataagccacaccccaggggtgaaattcttattgggggccaaagtgtgacaatggggtactacaaaaatgaagcaaaaacaaaagctgatttctttgaagatgaaaatggacaaaggtggctctgtactggggatattggagagtttgaacccgatggatgcttaaagattattgatcgtaaaaaggaccttgtaaaactacaggcaggggaatatgtttctcttgggaaagtagaggcagctttgaagaatcttccactagtagataacatttgtgcatatgcaaacagttatcattcttatgtcattggatttgttgtgccaaatcaaaaggaactaactgaactagctcgaaagaaaggacttaaagggacttgggaggagctgtgtaacagttgtgaaatggaaaatgaggtacttaaagtgctttccgaagctgctatttcagcaagtctggaaaagtttgaaattccagtaaaaattcgtttgagtcctgaaccgtggacccctgaaactggtctggtgacagatgccttcaagctgaaacgcaaagagcttaaaacacattaccaggcggacattgagcgaatgtatggaagaaaataattattctcttctggcatcagtttgctacagtgagctcagatcaaataggaaaatacttgaaatgcatgtctcaagctgcaaggcaaactccattcctcatattaaactattacttctcatgacgtcaccatttttaactgacaggattagtaaaacattaagacagcaaacttgtgtctgtctcttctttcattttccccgccaccaacttactttaccacctatgactgtacttgtcagtatgagaatttttctgaatcatattggggaagcagtgattttaaaacctcaagtttttaaacatgatttatatgttctgtataatgttcagtttgtaactttttaaaagtttggatgtatagagggataaataggaaatataagaattggttatttgggggcttttttacttactgtatttaaaaatacaagggtattgatatgaaattatgtaaatttcaaatgcttatgaatcaaatcattgttgaacaaaagatttgttgctgtgtaattattgtcttgtatgcatttgagagaaataaatatacccatacttatgttttaagaagttgagatcttgtgaatatatgcctgtcagtgtcttctttatatatttattttttattagaaaaaatgaagtttggttggtgatgcatgaaacaaaatagcaagagagggttatagtttaatagtaagggagataacacagcatgtgtagcaccagttgataattggtctctagtagcttactgtcaaaatgttcaatgaagtcttctgttcatctgttgaaactaggaaaatacccaaacttaaatggaagaattctgaaagagaggatagaatttaaagaacaagagtatataaagttattctttgaatatttcgttgactatatgtacattgagttatctatatttgtaaacaaattagtcatggaaaattattctattccaaagtctccttttagtctagataatcattatttcattttaaaattagtgtttttcatagtttgcactgatgcgtgtatggatgtgtgtgagtcagtggtagcttatttaaaaagcaccttatcctttctcccataacctttgtacactaaaaaatgaaagaatttagaatgtatttgatgatagcattctcactaagacacatgagaatttaactttataaccgcgtgagttaagatttaattcataggttttgatgtcattgttgaagttatttgtaattcagaaaccttgcttgtgtgatacatagtaagtctcttcatttattactgcttgtctgttgttatatctggattatcaaaagcaatagtgcaccaattaagatgtgctcaaatcaggacttaaatcataggcaccacatttttcatgtcagactagttactttgttgattctcagttactgtaggcatcaaaaggcaaaaatcaaaaaaaaaaaaacaaaaacaaacaaaaaaaaagatgaacctaggtctgtgtaaagtaaggggagtgttaggagcagccaggactgtgtagtgtgtgtttggttgcatcacaaacatcgtatgtggagacattgcaatacagtgttttttgttttcaacttttcttgtattcttgtatatttgtattatgttttgaatgcttttctcttttcataattaaatattaatgtttgggataactgccaagaagaagtaaaaatattgaatggaacttctatatgaggatgctgtgatctaaaaattaaatctcagtgggcggagagaatttgtttctgatgccttgtctttagaataattgtttgctttcagatgattaaaaaaaggagattgtatctaggaaaaaagtgtgaatgcttcaaaggagagatactgataattgtgacttgaaatagtgtcagatgaattatgtagctgatcactgatggaaccatctaatgaggcaggcttaaactctatttagtttcgtttgttttctcatatgaagtttataattcctttcagtcctaaaatgtcagatgccaggtgtcaaatgccacagtagaacgtgaaattaagtagagtccccttttaaacaaatttctctgtaagcaaaactatctttagtgacttaaaaaataatatcctctaaaattaccctttcaagaggaaaaaactgttcaatgaaaaaaccactcaattatgactcatataagaaatactggtttaaccaggagatatttggggagcaaaattttaaggaatttcaaattgctaaatctaatacaaatatctgacaataagatacagatctaaaagaatggttcttaagaactattgtttactgggaataaactaagctctatgaagaattcgtaagcattacatgttccagtaagtttagcaacttagagccaagactggtggccacctccatttatttccccactgctcctccactgacatccttcttagcagaaacttcatgaaaaagtttttgctgacacagaacaaacctgaaagtagtatctactttctaaatactactttgcttttcagtagtggatttgatatttataatgttctctaaagcttgcaactttttcagcaacgtttaaaaatagattaacctggaataacttacttgtttgctgctaaaatactcaagattttgccatttttaaacaaccagtccctgtgatacaactttgaaaaaacttttaaaaatctctgatgtatgggctctttttttcccataagaattatgtacatctgtgatgttttacagggggatccgcttttaaacagtgtacatattggaccacactgaaatgtcatatatcctttctctacttaaaattggttatttactgtgagttcatttccgatgtgttcttggttgttgctgttttctgcctgaagacgtgtatcataaagagctacatggtatggactatttatttgtaatttgacataaagtttgaagaataaagatctataaaagttgaagtttctgatattaaagctcttaatatattggcttt

SEQ ID NO: 36997 - DNA, 5608 bp, Homo sapiens
aggcccagccccgcacgcgccaccgctcgcgggccaatgggtggcagcctctctgcataggcaacgagtgccggccgggggtgagcgtcccaggcggttccgctcaacagacgctgctgtggctgcgccgggctgcgacactgcagttgtctacgcggccggggccgggacgaggaggcgttggacggggtcgcatacgttcgtcccctcgcattgcggccccgacagctgcgccaggatccccgggcggcggcgcggggcgtgaacgctctggggctcagccaggcctgcgcgggcccgaggccggaggaacccggactccggcgtagcggttttgacacaagggcgcatatcttcaaagcacctagtacctcctaccattgtcaactgattctcgctgaagtctgttaattctactttttgagtacttatgaataaccacgtgtcttcaaaaccatctaccatgaagctaaaacataccatcaaccctattcttttatattttatacattttctaatatcactttatactattttaacatacattccgttttattttttctccgagtcaagacaagaaaaatcaaaccgaattaaagcaaagcctgtaaattcaaaacctgattctgcatacagatctgttaatagtttggatggtttggcttcagtattataccctggatgtgatactttagataaagtttttacatatgcaaaaaacaaatttaagaacaaaagactcttgggaacacgtgaagttttaaatgaggaagatgaagtacaaccaaatggaaaaatttttaaaaaggttattcttggacagtataattggctttcctatgaagatgtctttgttcgagcctttaattttggaaatggattacagatgttgggtcagaaaccaaagaccaacatcgccatcttctgtgagaccagggccgagtggatgatagctgcacaggcgtgttttatgtataattttcagcttgttacattatatgccactctaggaggtccagccattgttcatgcattaaatgaaacagaggtgaccaacatcattactagtaaagaactcttacaaacaaagttgaaggatatagtttctttggtcccacgcctgcggcacatcatcactgttgatggaaagccaccgacctggtccgagttccccaagggcatcattgtgcataccatggctgcagtggaggccctgggagccaaggccagcatggaaaaccaacctcatagcaaaccattgccctcagatattgcagtaatcatgtacacaagtggatccacaggacttccaaagggagtcatgatctcacatagtaacattattgctggtataactgggatggcagaaaggattccagaactaggagaggaagatgtctacattggatatttgcctctggcccatgttctagaattaagtgctgagcttgtctgtctttctcacggatgccgcattggttactcttcaccacagactttagcagatcagtcttcaaaaattaaaaaaggaagcaaaggggatacatccatgttgaaaccaacactgatggcagcagttccggaaatcatggatcggatctacaaaaatgtcatgaataaagtcagtgaaatgagtagttttcaacgtaatctgtttattctggcctataattacaaaatggaacagatttcaaaaggacgtaatactccactgtgcgacagctttgttttccggaaagttcgaagcttgctagggggaaatattcgtctcctgttgtgtggtggcgctccactttctgcaaccacgcagcgattcatgaacatctgtttctgctgtcctgttggtcagggatacgggctcactgaatctgctggggctggaacaatttccgaagtgtgggactacaatactggcagagtgggagcaccattagtttgctgtgaaatcaaattaaaaaactgggaggaaggtggatactttaatactgataagccacaccccaggggtgaaattcttattgggggccaaagtgtgacaatggggtactacaaaaatgaagcaaaaacaaaagctgatttctttgaagatgaaaatggacaaaggtggctctgtactggggatattggagagtttgaacccgatggatgcttaaagattattgatcgtaaaaaggaccttgtaaaactacaggcaggggaatatgtttctcttgggaaagtagaggcagctttgaagaatcttccactagtagataacatttgtgcatatgcaaacagttatcattcttatgtcattggatttgttgtgccaaatcaaaaggaactaactgaactagctcgaaagaaaggacttaaagggacttgggaggagctgtgtaacagttgtgaaatggaaaatgaggtacttaaagtgctttccgaagctgctatttcagcaagtctggaaaagtttgaaattccagtaaaaattcgtttgagtcctgaaccgtggacccctgaaactggtctggtgacagatgccttcaagctgaaacgcaaagagcttaaaacacattaccaggcggacattgagcgaatgtatggaagaaaataattattctcttctggcatcagtttgctacagtgagctcagatcaaataggaaaatacttgaaatgcatgtctcaagctgcaaggcaaactccattcctcatattaaactattacttctcatgacgtcaccatttttaactgacaggattagtaaaacattaagacagcaaacttgtgtctgtctcttctttcattttccccgccaccaacttactttaccacctatgactgtacttgtcagtatgagaatttttctgaatcatattggggaagcagtgattttaaaacctcaagtttttaaacatgatttatatgttctgtataatgttcagtttgtaactttttaaaagtttggatgtatagagggataaataggaaatataagaattggttatttgggggcttttttacttactgtatttaaaaatacaagggtattgatatgaaattatgtaaatttcaaatgcttatgaatcaaatcattgttgaacaaaagatttgttgctgtgtaattattgtcttgtatgcatttgagagaaataaatatacccatacttatgttttaagaagttgagatcttgtgaatatatgcctgtcagtgtcttctttatatatttattttttattagaaaaaatgaagtttggttggtgatgcatgaaacaaaatagcaagagagggttatagtttaatagtaagggagataacacagcatgtgtagcaccagttgataattggtctctagtagcttactgtcaaaatgttcaatgaagtcttctgttcatctgttgaaactaggaaaatacccaaacttaaatggaagaattctgaaagagaggatagaatttaaagaacaagagtatataaagttattctttgaatatttcgttgactatatgtacattgagttatctatatttgtaaacaaattagtcatggaaaattattctattccaaagtctccttttagtctagataatcattatttcattttaaaattagtgtttttcatagtttgcactgatgcgtgtatggatgtgtgtgagtcagtggtagcttatttaaaaagcaccttatcctttctcccataacctttgtacactaaaaaatgaaagaatttagaatgtatttgatgatagcattctcactaagacacatgagaatttaactttataaccgcgtgagttaagatttaattcataggttttgatgtcattgttgaagttatttgtaattcagaaaccttgcttgtgtgatacatagtaagtctcttcatttattactgcttgtctgttgttatatctggattatcaaaagcaatagtgcaccaattaagatgtgctcaaatcaggacttaaatcataggcaccacatttttcatgtcagactagttactttgttgattctcagttactgtaggcatcaaaaggcaaaaatcaaaaaaaaaaaaacaaaaacaaacaaaaaaaaagatgaacctaggtctgtgtaaagtaaggggagtgttaggagcagccaggactgtgtagtgtgtgtttggttgcatcacaaacatcgtatgtggagacattgcaatacagtgttttttgttttcaacttttcttgtattcttgtatatttgtattatgttttgaatgcttttctcttttcataattaaatattaatgtttgggataactgccaagaagaagtaaaaatattgaatggaacttctatatgaggatgctgtgatctaaaaattaaatctcagtgggcggagagaatttgtttctgatgccttgtctttagaataattgtttgctttcagatgattaaaaaaaggagattgtatctaggaaaaaagtgtgaatgcttcaaaggagagatactgataattgtgacttgaaatagtgtcagatgaattatgtagctgatcactgatggaaccatctaatgaggcaggcttaaactctatttagtttcgtttgttttctcatatgaagtttataattcctttcagtcctaaaatgtcagatgccaggtgtcaaatgccacagtagaacgtgaaattaagtagagtccccttttaaacaaatttctctgtaagcaaaactatctttagtgacttaaaaaataatatcctctaaaattaccctttcaagaggaaaaaactgttcaatgaaaaaaccactcaattatgactcatataagaaatactggtttaaccaggagatatttggggagcaaaattttaaggaatttcaaattgctaaatctaatacaaatatctgacaataagatacagatctaaaagaatggttcttaagaactattgtttactgggaataaactaagctctatgaagaattcgtaagcattacatgttccagtaagtttagcaacttagagccaagactggtggccacctccatttatttccccactgctcctccactgacatccttcttagcagaaacttcatgaaaaagtttttgctgacacagaacaaacctgaaagtagtatctactttctaaatactactttgcttttcagtagtggatttgatatttataatgttctctaaagcttgcaactttttcagcaacgtttaaaaatagattaacctggaataacttacttgtttgctgctaaaatactcaagattttgccatttttaaacaaccagtccctgtgatacaactttgaaaaaacttttaaaaatctctgatgtatgggctctttttttcccataagaattatgtacatctgtgatgttttacagggggatccgcttttaaacagtgtacatattggaccacactgaaatgtcatatatcctttctctacttaaaattggttatttactgtgagttcatttccgatgtgttcttggttgttgctgttttctgcctgaagacgtgtatcataaagagctacatggtatggactatttatttgtaatttgacataaagtttgaagaataaagatctataaaagttgaagtttctgatattaaagctcttaatatattggcttt

SEQ ID NO: 36998 - DNA, 5881 bp, Homo sapiens
gccgttttgtttactgttactttcgcagtgcttagaacgatatctaacatagtggattttcaataaatctgatgaatgcaaagtacagaatgaccaaagtatactgctttcttgcgtcatagtttaacctaacttgaaaactatctgtagagccattgtggaaaatgaattttttgtgtttgcaaactccagttgcttgttgctgactagagtgagaatggggctcacagggaaggaatgtggtgattatttggcagtggctgctggggctgtgagagaggatggatgtgttgtatttgtaaagtacttgccatccctaatgcagtgagatgctaaagcacaggaaatgggtaaatttttggtcttcccccaaccctctttctgacttgctccctttttactactgggaaatgtttgtggatacttaaggttttggttggaacagccgcctgtttacagtatgatgtggaaacttttcttgtaattccgttgttaatagatattgtacaaatgagtctcttagaaatatcaagacattgtaggggaccagtgtggtagctgctgcctgatagaaaaaaaaaaatcttcatttgccgatgtaacttttctttaaattattttaaaatgattttgaactaacgcctttctttttcttcctcctagattctcgctgaagtctgttaattctactttttgagtacttatgaataaccacgtgtcttcaaaaccatctaccatgaagctaaaacataccatcaaccctattcttttatattttatacattttctaatatcactttatactattttaacatacattccgttttattttttctccgagtcaagacaagaaaaatcaaaccgaattaaagcaaagcctgtaaattcaaaacctgattctgcatacagatctgttaatagtttggatggtttggcttcagtattataccctggatgtgatactttagataaagtttttacatatgcaaaaaacaaatttaagaacaaaagactcttgggaacacgtgaagttttaaatgaggaagatgaagtacaaccaaatggaaaaatttttaaaaaggttattcttggacagtataattggctttcctatgaagatgtctttgttcgagcctttaattttggaaatggattacagatgttgggtcagaaaccaaagaccaacatcgccatcttctgtgagaccagggccgagtggatgatagctgcacaggcgtgttttatgtataattttcagcttgttacattatatgccactctaggaggtccagccattgttcatgcattaaatgaaacagaggtgaccaacatcattactagtaaagaactcttacaaacaaagttgaaggatatagtttctttggtcccacgcctgcggcacatcatcactgttgatggaaagccaccgacctggtccgagttccccaagggcatcattgtgcataccatggctgcagtggaggccctgggagccaaggccagcatggaaaaccaacctcatagcaaaccattgccctcagatattgcagtaatcatgtacacaagtggatccacaggacttccaaagggagtcatgatctcacatagtaacattattgctggtataactgggatggcagaaaggattccagaactaggagaggaagatgtctacattggatatttgcctctggcccatgttctagaattaagtgctgagcttgtctgtctttctcacggatgccgcattggttactcttcaccacagactttagcagatcagtcttcaaaaattaaaaaaggaagcaaaggggatacatccatgttgaaaccaacactgatggcagcagttccggaaatcatggatcggatctacaaaaatgtcatgaataaagtcagtgaaatgagtagttttcaacgtaatctgtttattctggcctataattacaaaatggaacagatttcaaaaggacgtaatactccactgtgcgacagctttgttttccggaaagttcgaagcttgctagggggaaatattcgtctcctgttgtgtggtggcgctccactttctgcaaccacgcagcgattcatgaacatctgtttctgctgtcctgttggtcagggatacgggctcactgaatctgctggggctggaacaatttccgaagtgtgggactacaatactggcagagtgggagcaccattagtttgctgtgaaatcaaattaaaaaactgggaggaaggtggatactttaatactgataagccacaccccaggggtgaaattcttattgggggccaaagtgtgacaatggggtactacaaaaatgaagcaaaaacaaaagctgatttctttgaagatgaaaatggacaaaggtggctctgtactggggatattggagagtttgaacccgatggatgcttaaagattattgatcgtaaaaaggaccttgtaaaactacaggcaggggaatatgtttctcttgggaaagtagaggcagctttgaagaatcttccactagtagataacatttgtgcatatgcaaacagttatcattcttatgtcattggatttgttgtgccaaatcaaaaggaactaactgaactagctcgaaagaaaggacttaaagggacttgggaggagctgtgtaacagttgtgaaatggaaaatgaggtacttaaagtgctttccgaagctgctatttcagcaagtctggaaaagtttgaaattccagtaaaaattcgtttgagtcctgaaccgtggacccctgaaactggtctggtgacagatgccttcaagctgaaacgcaaagagcttaaaacacattaccaggcggacattgagcgaatgtatggaagaaaataattattctcttctggcatcagtttgctacagtgagctcagatcaaataggaaaatacttgaaatgcatgtctcaagctgcaaggcaaactccattcctcatattaaactattacttctcatgacgtcaccatttttaactgacaggattagtaaaacattaagacagcaaacttgtgtctgtctcttctttcattttccccgccaccaacttactttaccacctatgactgtacttgtcagtatgagaatttttctgaatcatattggggaagcagtgattttaaaacctcaagtttttaaacatgatttatatgttctgtataatgttcagtttgtaactttttaaaagtttggatgtatagagggataaataggaaatataagaattggttatttgggggcttttttacttactgtatttaaaaatacaagggtattgatatgaaattatgtaaatttcaaatgcttatgaatcaaatcattgttgaacaaaagatttgttgctgtgtaattattgtcttgtatgcatttgagagaaataaatatacccatacttatgttttaagaagttgagatcttgtgaatatatgcctgtcagtgtcttctttatatatttattttttattagaaaaaatgaagtttggttggtgatgcatgaaacaaaatagcaagagagggttatagtttaatagtaagggagataacacagcatgtgtagcaccagttgataattggtctctagtagcttactgtcaaaatgttcaatgaagtcttctgttcatctgttgaaactaggaaaatacccaaacttaaatggaagaattctgaaagagaggatagaatttaaagaacaagagtatataaagttattctttgaatatttcgttgactatatgtacattgagttatctatatttgtaaacaaattagtcatggaaaattattctattccaaagtctccttttagtctagataatcattatttcattttaaaattagtgtttttcatagtttgcactgatgcgtgtatggatgtgtgtgagtcagtggtagcttatttaaaaagcaccttatcctttctcccataacctttgtacactaaaaaatgaaagaatttagaatgtatttgatgatagcattctcactaagacacatgagaatttaactttataaccgcgtgagttaagatttaattcataggttttgatgtcattgttgaagttatttgtaattcagaaaccttgcttgtgtgatacatagtaagtctcttcatttattactgcttgtctgttgttatatctggattatcaaaagcaatagtgcaccaattaagatgtgctcaaatcaggacttaaatcataggcaccacatttttcatgtcagactagttactttgttgattctcagttactgtaggcatcaaaaggcaaaaatcaaaaaaaaaaaaacaaaaacaaacaaaaaaaaagatgaacctaggtctgtgtaaagtaaggggagtgttaggagcagccaggactgtgtagtgtgtgtttggttgcatcacaaacatcgtatgtggagacattgcaatacagtgttttttgttttcaacttttcttgtattcttgtatatttgtattatgttttgaatgcttttctcttttcataattaaatattaatgtttgggataactgccaagaagaagtaaaaatattgaatggaacttctatatgaggatgctgtgatctaaaaattaaatctcagtgggcggagagaatttgtttctgatgccttgtctttagaataattgtttgctttcagatgattaaaaaaaggagattgtatctaggaaaaaagtgtgaatgcttcaaaggagagatactgataattgtgacttgaaatagtgtcagatgaattatgtagctgatcactgatggaaccatctaatgaggcaggcttaaactctatttagtttcgtttgttttctcatatgaagtttataattcctttcagtcctaaaatgtcagatgccaggtgtcaaatgccacagtagaacgtgaaattaagtagagtccccttttaaacaaatttctctgtaagcaaaactatctttagtgacttaaaaaataatatcctctaaaattaccctttcaagaggaaaaaactgttcaatgaaaaaaccactcaattatgactcatataagaaatactggtttaaccaggagatatttggggagcaaaattttaaggaatttcaaattgctaaatctaatacaaatatctgacaataagatacagatctaaaagaatggttcttaagaactattgtttactgggaataaactaagctctatgaagaattcgtaagcattacatgttccagtaagtttagcaacttagagccaagactggtggccacctccatttatttccccactgctcctccactgacatccttcttagcagaaacttcatgaaaaagtttttgctgacacagaacaaacctgaaagtagtatctactttctaaatactactttgcttttcagtagtggatttgatatttataatgttctctaaagcttgcaactttttcagcaacgtttaaaaatagattaacctggaataacttacttgtttgctgctaaaatactcaagattttgccatttttaaacaaccagtccctgtgatacaactttgaaaaaacttttaaaaatctctgatgtatgggctctttttttcccataagaattatgtacatctgtgatgttttacagggggatccgcttttaaacagtgtacatattggaccacactgaaatgtcatatatcctttctctacttaaaattggttatttactgtgagttcatttccgatgtgttcttggttgttgctgttttctgcctgaagacgtgtatcataaagagctacatggtatggactatttatttgtaatttgacataaagtttgaagaataaagatctataaaagttgaagtttctgatattaaagctcttaatatattggcttt

SEQ ID NO: 36999 - DNA, 5549 bp, Homo sapiens
aggcccagccccgcacgcgccaccgctcgcgggccaatgggtggcagcctctctgcataggcaacgagtgccggccgggggtgagcgtcccaggcggttccgctcaacagacgctgctgtggctgcgccgggctgcgacactgcagttgtctacgcggccggggccgggacgaggaggcgttggacggggtcgcatacgttcgtcccctcgcattgcggccccgacagctgcgccaggatccccgggcggcggcgcggggcgtgaacgctctggggctcagccaggcctgcgcgggcccgaggccggaggaacccggactccggcgtagcgattctcgctgaagtctgttaattctactttttgagtacttatgaataaccacgtgtcttcaaaaccatctaccatgaagctaaaacataccatcaaccctattcttttatattttatacattttctaatatcactttatactattttaacatacattccgttttattttttctccgagtcaagacaagaaaaatcaaaccgaattaaagcaaagcctgtaaattcaaaacctgattctgcatacagatctgttaatagtttggatggtttggcttcagtattataccctggatgtgatactttagataaagtttttacatatgcaaaaaacaaatttaagaacaaaagactcttgggaacacgtgaagttttaaatgaggaagatgaagtacaaccaaatggaaaaatttttaaaaaggttattcttggacagtataattggctttcctatgaagatgtctttgttcgagcctttaattttggaaatggattacagatgttgggtcagaaaccaaagaccaacatcgccatcttctgtgagaccagggccgagtggatgatagctgcacaggcgtgttttatgtataattttcagcttgttacattatatgccactctaggaggtccagccattgttcatgcattaaatgaaacagaggtgaccaacatcattactagtaaagaactcttacaaacaaagttgaaggatatagtttctttggtcccacgcctgcggcacatcatcactgttgatggaaagccaccgacctggtccgagttccccaagggcatcattgtgcataccatggctgcagtggaggccctgggagccaaggccagcatggaaaaccaacctcatagcaaaccattgccctcagatattgcagtaatcatgtacacaagtggatccacaggacttccaaagggagtcatgatctcacatagtaacattattgctggtataactgggatggcagaaaggattccagaactaggagaggaagatgtctacattggatatttgcctctggcccatgttctagaattaagtgctgagcttgtctgtctttctcacggatgccgcattggttactcttcaccacagactttagcagatcagtcttcaaaaattaaaaaaggaagcaaaggggatacatccatgttgaaaccaacactgatggcagcagttccggaaatcatggatcggatctacaaaaatgtcatgaataaagtcagtgaaatgagtagttttcaacgtaatctgtttattctggcctataattacaaaatggaacagatttcaaaaggacgtaatactccactgtgcgacagctttgttttccggaaagttcgaagcttgctagggggaaatattcgtctcctgttgtgtggtggcgctccactttctgcaaccacgcagcgattcatgaacatctgtttctgctgtcctgttggtcagggatacgggctcactgaatctgctggggctggaacaatttccgaagtgtgggactacaatactggcagagtgggagcaccattagtttgctgtgaaatcaaattaaaaaactgggaggaaggtggatactttaatactgataagccacaccccaggggtgaaattcttattgggggccaaagtgtgacaatggggtactacaaaaatgaagcaaaaacaaaagctgatttctttgaagatgaaaatggacaaaggtggctctgtactggggatattggagagtttgaacccgatggatgcttaaagattattgatcgtaaaaaggaccttgtaaaactacaggcaggggaatatgtttctcttgggaaagtagaggcagctttgaagaatcttccactagtagataacatttgtgcatatgcaaacagttatcattcttatgtcattggatttgttgtgccaaatcaaaaggaactaactgaactagctcgaaagaaaggacttaaagggacttgggaggagctgtgtaacagttgtgaaatggaaaatgaggtacttaaagtgctttccgaagctgctatttcagcaagtctggaaaagtttgaaattccagtaaaaattcgtttgagtcctgaaccgtggacccctgaaactggtctggtgacagatgccttcaagctgaaacgcaaagagcttaaaacacattaccaggcggacattgagcgaatgtatggaagaaaataattattctcttctggcatcagtttgctacagtgagctcagatcaaataggaaaatacttgaaatgcatgtctcaagctgcaaggcaaactccattcctcatattaaactattacttctcatgacgtcaccatttttaactgacaggattagtaaaacattaagacagcaaacttgtgtctgtctcttctttcattttccccgccaccaacttactttaccacctatgactgtacttgtcagtatgagaatttttctgaatcatattggggaagcagtgattttaaaacctcaagtttttaaacatgatttatatgttctgtataatgttcagtttgtaactttttaaaagtttggatgtatagagggataaataggaaatataagaattggttatttgggggcttttttacttactgtatttaaaaatacaagggtattgatatgaaattatgtaaatttcaaatgcttatgaatcaaatcattgttgaacaaaagatttgttgctgtgtaattattgtcttgtatgcatttgagagaaataaatatacccatacttatgttttaagaagttgagatcttgtgaatatatgcctgtcagtgtcttctttatatatttattttttattagaaaaaatgaagtttggttggtgatgcatgaaacaaaatagcaagagagggttatagtttaatagtaagggagataacacagcatgtgtagcaccagttgataattggtctctagtagcttactgtcaaaatgttcaatgaagtcttctgttcatctgttgaaactaggaaaatacccaaacttaaatggaagaattctgaaagagaggatagaatttaaagaacaagagtatataaagttattctttgaatatttcgttgactatatgtacattgagttatctatatttgtaaacaaattagtcatggaaaattattctattccaaagtctccttttagtctagataatcattatttcattttaaaattagtgtttttcatagtttgcactgatgcgtgtatggatgtgtgtgagtcagtggtagcttatttaaaaagcaccttatcctttctcccataacctttgtacactaaaaaatgaaagaatttagaatgtatttgatgatagcattctcactaagacacatgagaatttaactttataaccgcgtgagttaagatttaattcataggttttgatgtcattgttgaagttatttgtaattcagaaaccttgcttgtgtgatacatagtaagtctcttcatttattactgcttgtctgttgttatatctggattatcaaaagcaatagtgcaccaattaagatgtgctcaaatcaggacttaaatcataggcaccacatttttcatgtcagactagttactttgttgattctcagttactgtaggcatcaaaaggcaaaaatcaaaaaaaaaaaaacaaaaacaaacaaaaaaaaagatgaacctaggtctgtgtaaagtaaggggagtgttaggagcagccaggactgtgtagtgtgtgtttggttgcatcacaaacatcgtatgtggagacattgcaatacagtgttttttgttttcaacttttcttgtattcttgtatatttgtattatgttttgaatgcttttctcttttcataattaaatattaatgtttgggataactgccaagaagaagtaaaaatattgaatggaacttctatatgaggatgctgtgatctaaaaattaaatctcagtgggcggagagaatttgtttctgatgccttgtctttagaataattgtttgctttcagatgattaaaaaaaggagattgtatctaggaaaaaagtgtgaatgcttcaaaggagagatactgataattgtgacttgaaatagtgtcagatgaattatgtagctgatcactgatggaaccatctaatgaggcaggcttaaactctatttagtttcgtttgttttctcatatgaagtttataattcctttcagtcctaaaatgtcagatgccaggtgtcaaatgccacagtagaacgtgaaattaagtagagtccccttttaaacaaatttctctgtaagcaaaactatctttagtgacttaaaaaataatatcctctaaaattaccctttcaagaggaaaaaactgttcaatgaaaaaaccactcaattatgactcatataagaaatactggtttaaccaggagatatttggggagcaaaattttaaggaatttcaaattgctaaatctaatacaaatatctgacaataagatacagatctaaaagaatggttcttaagaactattgtttactgggaataaactaagctctatgaagaattcgtaagcattacatgttccagtaagtttagcaacttagagccaagactggtggccacctccatttatttccccactgctcctccactgacatccttcttagcagaaacttcatgaaaaagtttttgctgacacagaacaaacctgaaagtagtatctactttctaaatactactttgcttttcagtagtggatttgatatttataatgttctctaaagcttgcaactttttcagcaacgtttaaaaatagattaacctggaataacttacttgtttgctgctaaaatactcaagattttgccatttttaaacaaccagtccctgtgatacaactttgaaaaaacttttaaaaatctctgatgtatgggctctttttttcccataagaattatgtacatctgtgatgttttacagggggatccgcttttaaacagtgtacatattggaccacactgaaatgtcatatatcctttctctacttaaaattggttatttactgtgagttcatttccgatgtgttcttggttgttgctgttttctgcctgaagacgtgtatcataaagagctacatggtatggactatttatttgtaatttgacataaagtttgaagaataaagatctataaaagttgaagtttctgatattaaagctcttaatatattggcttt

SEQ ID NO: 37000 - DNA, 4980 bp, Homo sapiens
gttctttttcacattgtaaagccaagtggccaacaattaagaatttgaagtcttagaaatcagttataattccttcacaatgtggtagtcccagagtaacatctgtaagtgaaacaaaataaaaatttaaatatcttcatctttaaaaattggaaatcttggggcatttaggggaggatgagtaggtgtaatgttgattagtatgataagataactttaaaaaacataacacttatagactgtggatttaacagtttagggctcctaatgcgttattatgattcatctccacattcagagactttacatttgtagttaaatgtttgaatatttgactggctgctgcttttccttttagttgttacattatatgccactctaggaggtccagccattgttcatgcattaaatgaaacagaggtgaccaacatcattactagtaaagaactcttacaaacaaagttgaaggatatagtttctttggtcccacgcctgcggcacatcatcactgttgatggaaagccaccgacctggtccgagttccccaagggcatcattgtgcataccatggctgcagtggaggccctgggagccaaggccagcatggaaaaccaacctcatagcaaaccattgccctcagatattgcagtaatcatgtacacaagtggatccacaggacttccaaagggagtcatgatctcacatagtaacattattgctggtataactgggatggcagaaaggattccagaactaggagaggaagatgtctacattggatatttgcctctggcccatgttctagaattaagtgctgagcttgtctgtctttctcacggatgccgcattggttactcttcaccacagactttagcagatcagtcttcaaaaattaaaaaaggaagcaaaggggatacatccatgttgaaaccaacactgatggcagcagttccggaaatcatggatcggatctacaaaaatgtcatgaataaagtcagtgaaatgagtagttttcaacgtaatctgtttattctggcctataattacaaaatggaacagatttcaaaaggacgtaatactccactgtgcgacagctttgttttccggaaagttcgaagcttgctagggggaaatattcgtctcctgttgtgtggtggcgctccactttctgcaaccacgcagcgattcatgaacatctgtttctgctgtcctgttggtcagggatacgggctcactgaatctgctggggctggaacaatttccgaagtgtgggactacaatactggcagagtgggagcaccattagtttgctgtgaaatcaaattaaaaaactgggaggaaggtggatactttaatactgataagccacaccccaggggtgaaattcttattgggggccaaagtgtgacaatggggtactacaaaaatgaagcaaaaacaaaagctgatttctttgaagatgaaaatggacaaaggtggctctgtactggggatattggagagtttgaacccgatggatgcttaaagattattgatcgtaaaaaggaccttgtaaaactacaggcaggggaatatgtttctcttgggaaagtagaggcagctttgaagaatcttccactagtagataacatttgtgcatatgcaaacagttatcattcttatgtcattggatttgttgtgccaaatcaaaaggaactaactgaactagctcgaaagaaaggacttaaagggacttgggaggagctgtgtaacagttgtgaaatggaaaatgaggtacttaaagtgctttccgaagctgctatttcagcaagtctggaaaagtttgaaattccagtaaaaattcgtttgagtcctgaaccgtggacccctgaaactggtctggtgacagatgccttcaagctgaaacgcaaagagcttaaaacacattaccaggcggacattgagcgaatgtatggaagaaaataattattctcttctggcatcagtttgctacagtgagctcagatcaaataggaaaatacttgaaatgcatgtctcaagctgcaaggcaaactccattcctcatattaaactattacttctcatgacgtcaccatttttaactgacaggattagtaaaacattaagacagcaaacttgtgtctgtctcttctttcattttccccgccaccaacttactttaccacctatgactgtacttgtcagtatgagaatttttctgaatcatattggggaagcagtgattttaaaacctcaagtttttaaacatgatttatatgttctgtataatgttcagtttgtaactttttaaaagtttggatgtatagagggataaataggaaatataagaattggttatttgggggcttttttacttactgtatttaaaaatacaagggtattgatatgaaattatgtaaatttcaaatgcttatgaatcaaatcattgttgaacaaaagatttgttgctgtgtaattattgtcttgtatgcatttgagagaaataaatatacccatacttatgttttaagaagttgagatcttgtgaatatatgcctgtcagtgtcttctttatatatttattttttattagaaaaaatgaagtttggttggtgatgcatgaaacaaaatagcaagagagggttatagtttaatagtaagggagataacacagcatgtgtagcaccagttgataattggtctctagtagcttactgtcaaaatgttcaatgaagtcttctgttcatctgttgaaactaggaaaatacccaaacttaaatggaagaattctgaaagagaggatagaatttaaagaacaagagtatataaagttattctttgaatatttcgttgactatatgtacattgagttatctatatttgtaaacaaattagtcatggaaaattattctattccaaagtctccttttagtctagataatcattatttcattttaaaattagtgtttttcatagtttgcactgatgcgtgtatggatgtgtgtgagtcagtggtagcttatttaaaaagcaccttatcctttctcccataacctttgtacactaaaaaatgaaagaatttagaatgtatttgatgatagcattctcactaagacacatgagaatttaactttataaccgcgtgagttaagatttaattcataggttttgatgtcattgttgaagttatttgtaattcagaaaccttgcttgtgtgatacatagtaagtctcttcatttattactgcttgtctgttgttatatctggattatcaaaagcaatagtgcaccaattaagatgtgctcaaatcaggacttaaatcataggcaccacatttttcatgtcagactagttactttgttgattctcagttactgtaggcatcaaaaggcaaaaatcaaaaaaaaaaaaacaaaaacaaacaaaaaaaaagatgaacctaggtctgtgtaaagtaaggggagtgttaggagcagccaggactgtgtagtgtgtgtttggttgcatcacaaacatcgtatgtggagacattgcaatacagtgttttttgttttcaacttttcttgtattcttgtatatttgtattatgttttgaatgcttttctcttttcataattaaatattaatgtttgggataactgccaagaagaagtaaaaatattgaatggaacttctatatgaggatgctgtgatctaaaaattaaatctcagtgggcggagagaatttgtttctgatgccttgtctttagaataattgtttgctttcagatgattaaaaaaaggagattgtatctaggaaaaaagtgtgaatgcttcaaaggagagatactgataattgtgacttgaaatagtgtcagatgaattatgtagctgatcactgatggaaccatctaatgaggcaggcttaaactctatttagtttcgtttgttttctcatatgaagtttataattcctttcagtcctaaaatgtcagatgccaggtgtcaaatgccacagtagaacgtgaaattaagtagagtccccttttaaacaaatttctctgtaagcaaaactatctttagtgacttaaaaaataatatcctctaaaattaccctttcaagaggaaaaaactgttcaatgaaaaaaccactcaattatgactcatataagaaatactggtttaaccaggagatatttggggagcaaaattttaaggaatttcaaattgctaaatctaatacaaatatctgacaataagatacagatctaaaagaatggttcttaagaactattgtttactgggaataaactaagctctatgaagaattcgtaagcattacatgttccagtaagtttagcaacttagagccaagactggtggccacctccatttatttccccactgctcctccactgacatccttcttagcagaaacttcatgaaaaagtttttgctgacacagaacaaacctgaaagtagtatctactttctaaatactactttgcttttcagtagtggatttgatatttataatgttctctaaagcttgcaactttttcagcaacgtttaaaaatagattaacctggaataacttacttgtttgctgctaaaatactcaagattttgccatttttaaacaaccagtccctgtgatacaactttgaaaaaacttttaaaaatctctgatgtatgggctctttttttcccataagaattatgtacatctgtgatgttttacagggggatccgcttttaaacagtgtacatattggaccacactgaaatgtcatatatcctttctctacttaaaattggttatttactgtgagttcatttccgatgtgttcttggttgttgctgttttctgcctgaagacgtgtatcataaagagctacatggtatggactatttatttgtaatttgacataaagtttgaagaataaagatctataaaagttgaagtttctgatattaaagctcttaatatattggcttt

SEQ ID NO: 37001 - DNA, 4493 bp, Homo sapiens
tcctcactttattcaggcctttgctaaacgaaactctacagagacggtctccaggcttttccatccaaatagcatctattgtcatcttctcaccttgtcttgcttcagttttcttcatagaaaaccaacctcatagcaaaccattgccctcagatattgcagtaatcatgtacacaagtggatccacaggacttccaaagggagtcatgatctcacatagtaacattattgctggtataactgggatggcagaaaggattccagaactaggagaggaagatgtctacattggatatttgcctctggcccatgttctagaattaagtgctgagcttgtctgtctttctcacggatgccgcattggttactcttcaccacagactttagcagatcagtcttcaaaaattaaaaaaggaagcaaaggggatacatccatgttgaaaccaacactgatggcagcagttccggaaatcatggatcggatctacaaaaatgtcatgaataaagtcagtgaaatgagtagttttcaacgtaatctgtttattctggcctataattacaaaatggaacagatttcaaaaggacgtaatactccactgtgcgacagctttgttttccggaaagttcgaagcttgctagggggaaatattcgtctcctgttgtgtggtggcgctccactttctgcaaccacgcagcgattcatgaacatctgtttctgctgtcctgttggtcagggatacgggctcactgaatctgctggggctggaacaatttccgaagtgtgggactacaatactggcagagtgggagcaccattagtttgctgtgaaatcaaattaaaaaactgggaggaaggtggatactttaatactgataagccacaccccaggggtgaaattcttattgggggccaaagtgtgacaatggggtactacaaaaatgaagcaaaaacaaaagctgatttctttgaagatgaaaatggacaaaggtggctctgtactggggatattggagagtttgaacccgatggatgcttaaagattattgatcgtaaaaaggaccttgtaaaactacaggcaggggaatatgtttctcttgggaaagtagaggcagctttgaagaatcttccactagtagataacatttgtgcatatgcaaacagttatcattcttatgtcattggatttgttgtgccaaatcaaaaggaactaactgaactagctcgaaagaaaggacttaaagggacttgggaggagctgtgtaacagttgtgaaatggaaaatgaggtacttaaagtgctttccgaagctgctatttcagcaagtctggaaaagtttgaaattccagtaaaaattcgtttgagtcctgaaccgtggacccctgaaactggtctggtgacagatgccttcaagctgaaacgcaaagagcttaaaacacattaccaggcggacattgagcgaatgtatggaagaaaataattattctcttctggcatcagtttgctacagtgagctcagatcaaataggaaaatacttgaaatgcatgtctcaagctgcaaggcaaactccattcctcatattaaactattacttctcatgacgtcaccatttttaactgacaggattagtaaaacattaagacagcaaacttgtgtctgtctcttctttcattttccccgccaccaacttactttaccacctatgactgtacttgtcagtatgagaatttttctgaatcatattggggaagcagtgattttaaaacctcaagtttttaaacatgatttatatgttctgtataatgttcagtttgtaactttttaaaagtttggatgtatagagggataaataggaaatataagaattggttatttgggggcttttttacttactgtatttaaaaatacaagggtattgatatgaaattatgtaaatttcaaatgcttatgaatcaaatcattgttgaacaaaagatttgttgctgtgtaattattgtcttgtatgcatttgagagaaataaatatacccatacttatgttttaagaagttgagatcttgtgaatatatgcctgtcagtgtcttctttatatatttattttttattagaaaaaatgaagtttggttggtgatgcatgaaacaaaatagcaagagagggttatagtttaatagtaagggagataacacagcatgtgtagcaccagttgataattggtctctagtagcttactgtcaaaatgttcaatgaagtcttctgttcatctgttgaaactaggaaaatacccaaacttaaatggaagaattctgaaagagaggatagaatttaaagaacaagagtatataaagttattctttgaatatttcgttgactatatgtacattgagttatctatatttgtaaacaaattagtcatggaaaattattctattccaaagtctccttttagtctagataatcattatttcattttaaaattagtgtttttcatagtttgcactgatgcgtgtatggatgtgtgtgagtcagtggtagcttatttaaaaagcaccttatcctttctcccataacctttgtacactaaaaaatgaaagaatttagaatgtatttgatgatagcattctcactaagacacatgagaatttaactttataaccgcgtgagttaagatttaattcataggttttgatgtcattgttgaagttatttgtaattcagaaaccttgcttgtgtgatacatagtaagtctcttcatttattactgcttgtctgttgttatatctggattatcaaaagcaatagtgcaccaattaagatgtgctcaaatcaggacttaaatcataggcaccacatttttcatgtcagactagttactttgttgattctcagttactgtaggcatcaaaaggcaaaaatcaaaaaaaaaaaaacaaaaacaaacaaaaaaaaagatgaacctaggtctgtgtaaagtaaggggagtgttaggagcagccaggactgtgtagtgtgtgtttggttgcatcacaaacatcgtatgtggagacattgcaatacagtgttttttgttttcaacttttcttgtattcttgtatatttgtattatgttttgaatgcttttctcttttcataattaaatattaatgtttgggataactgccaagaagaagtaaaaatattgaatggaacttctatatgaggatgctgtgatctaaaaattaaatctcagtgggcggagagaatttgtttctgatgccttgtctttagaataattgtttgctttcagatgattaaaaaaaggagattgtatctaggaaaaaagtgtgaatgcttcaaaggagagatactgataattgtgacttgaaatagtgtcagatgaattatgtagctgatcactgatggaaccatctaatgaggcaggcttaaactctatttagtttcgtttgttttctcatatgaagtttataattcctttcagtcctaaaatgtcagatgccaggtgtcaaatgccacagtagaacgtgaaattaagtagagtccccttttaaacaaatttctctgtaagcaaaactatctttagtgacttaaaaaataatatcctctaaaattaccctttcaagaggaaaaaactgttcaatgaaaaaaccactcaattatgactcatataagaaatactggtttaaccaggagatatttggggagcaaaattttaaggaatttcaaattgctaaatctaatacaaatatctgacaataagatacagatctaaaagaatggttcttaagaactattgtttactgggaataaactaagctctatgaagaattcgtaagcattacatgttccagtaagtttagcaacttagagccaagactggtggccacctccatttatttccccactgctcctccactgacatccttcttagcagaaacttcatgaaaaagtttttgctgacacagaacaaacctgaaagtagtatctactttctaaatactactttgcttttcagtagtggatttgatatttataatgttctctaaagcttgcaactttttcagcaacgtttaaaaatagattaacctggaataacttacttgtttgctgctaaaatactcaagattttgccatttttaaacaaccagtccctgtgatacaactttgaaaaaacttttaaaaatctctgatgtatgggctctttttttcccataagaattatgtacatctgtgatgttttacagggggatccgcttttaaacagtgtacatattggaccacactgaaatgtcatatatcctttctctacttaaaattggttatttactgtgagttcatttccgatgtgttcttggttgttgctgttttctgcctgaagacgtgtatcataaagagctacatggtatggactatttatttgtaatttgacataaagtttgaagaataaagatctataaaagttgaagtttctgatattaaagctcttaatatattggcttt

SEQ ID NO: 37002 - DNA, 5661 bp, Homo sapiens
aggcccagccccgcacgcgccaccgctcgcgggccaatgggtggcagcctctctgcataggcaacgagtgccggccgggggtgagcgtcccaggcggttccgctcaacagacgctgctgtggctgcgccgggctgcgacactgcagttgtctacgcggccggggccgggacgaggaggcgttggacggggtcgcatacgttcgtcccctcgcattgcggccccgacagctgcgccaggatccccgggcggcggcgcggggcgtgaacgctctggggctcagccaggcctgcgcgggcccgaggccggaggaacccggactccggcgtagcggttttgacacaagggcgcatatcttcaaagcacctagtacctcctaccattgtcaactgatacagaattcgttgttgggaaggactggggaaacagctgtaacatttgccaccctcagaagctgctggtcctgtgtcacaccaccttagcctcttgatcgaggaagattctcgctgaagtctgttaattctactttttgagtacttatgaataaccacgtgtcttcaaaaccatctaccatgaagctaaaacataccatcaaccctattcttttatattttatacattttctaatatcactttatactattttaacatacattccgttttattttttctccgagtcaagacaagaaaaatcaaaccgaattaaagcaaagcctgtaaattcaaaacctgattctgcatacagatctgttaatagtttggatggtttggcttcagtattataccctggatgtgatactttagataaagtttttacatatgcaaaaaacaaatttaagaacaaaagactcttgggaacacgtgaagttttaaatgaggaagatgaagtacaaccaaatggaaaaatttttaaaaaggttattcttggacagtataattggctttcctatgaagatgtctttgttcgagcctttaattttggaaatggattacagatgttgggtcagaaaccaaagaccaacatcgccatcttctgtgagaccagggccgagtggatgatagctgcacaggcgtgttttatgtataattttcagcttgttacattatatgccactctaggaggtccagccattgttcatgcattaaatgaaacagaggtgaccaacatcattactagtaaagaactcttacaaacaaagttgaaggatatagtttctttggtcccacgcctgcggcacatcatcactgttgatggaaagccaccgacctggtccgagttccccaagggcatcattgtgcataccatggctgcagtggaggccctgggagccaaggccagcatggaaaaccaacctcatagcaaaccattgccctcagatattgcagtaatcatgtacacaagtggatccacaggacttccaaagggagtcatgatctcacatagtaacattattgctggtataactgggatggcagaaaggattccagaactaggagaggaagatgtctacattggatatttgcctctggcccatgttctagaattaagtgctgagcttgtctgtctttctcacggatgccgcattggttactcttcaccacagactttagcagatcagtcttcaaaaattaaaaaaggaagcaaaggggatacatccatgttgaaaccaacactgatggcagcagttccggaaatcatggatcggatctacaaaaatgtcatgaataaagtcagtgaaatgagtagttttcaacgtaatctgtttattctggcctataattacaaaatggaacagatttcaaaaggacgtaatactccactgtgcgacagctttgttttccggaaagttcgaagcttgctagggggaaatattcgtctcctgttgtgtggtggcgctccactttctgcaaccacgcagcgattcatgaacatctgtttctgctgtcctgttggtcagggatacgggctcactgaatctgctggggctggaacaatttccgaagtgtgggactacaatactggcagagtgggagcaccattagtttgctgtgaaatcaaattaaaaaactgggaggaaggtggatactttaatactgataagccacaccccaggggtgaaattcttattgggggccaaagtgtgacaatggggtactacaaaaatgaagcaaaaacaaaagctgatttctttgaagatgaaaatggacaaaggtggctctgtactggggatattggagagtttgaacccgatggatgcttaaagattattgatcgtaaagcagcttttgaagaaatcttcacttagtgattacaattgtgcatttgcaaacgttatcattcttatgtcattggatttgttgtgccaaatcaaaaggaactaactgaactagctcgaaagaaaggacttaaagggacttgggaggagctgtgtaacagttgtgaaatggaaaatgaggtacttaaagtgctttccgaagctgctatttcagcaagtctggaaaagtttgaaattccagtaaaaattcgtttgagtcctgaaccgtggacccctgaaactggtctggtgacagatgccttcaagctgaaacgcaaagagcttaaaacacattaccaggcggacattgagcgaatgtatggaagaaaataattattctcttctggcatcagtttgctacagtgagctcagatcaaataggaaaatacttgaaatgcatgtctcaagctgcaaggcaaactccattcctcatattaaactattacttctcatgacgtcaccatttttaactgacaggattagtaaaacattaagacagcaaacttgtgtctgtctcttctttcattttccccgccaccaacttactttaccacctatgactgtacttgtcagtatgagaatttttctgaatcatattggggaagcagtgattttaaaacctcaagtttttaaacatgatttatatgttctgtataatgttcagtttgtaactttttaaaagtttggatgtatagagggataaataggaaatataagaattggttatttgggggcttttttacttactgtatttaaaaatacaagggtattgatatgaaattatgtaaatttcaaatgcttatgaatcaaatcattgttgaacaaaagatttgttgctgtgtaattattgtcttgtatgcatttgagagaaataaatatacccatacttatgttttaagaagttgagatcttgtgaatatatgcctgtcagtgtcttctttatatatttattttttattagaaaaaatgaagtttggttggtgatgcatgaaacaaaatagcaagagagggttatagtttaatagtaagggagataacacagcatgtgtagcaccagttgataattggtctctagtagcttactgtcaaaatgttcaatgaagtcttctgttcatctgttgaaactaggaaaatacccaaacttaaatggaagaattctgaaagagaggatagaatttaaagaacaagagtatataaagttattctttgaatatttcgttgactatatgtacattgagttatctatatttgtaaacaaattagtcatggaaaattattctattccaaagtctccttttagtctagataatcattatttcattttaaaattagtgtttttcatagtttgcactgatgcgtgtatggatgtgtgtgagtcagtggtagcttatttaaaaagcaccttatcctttctcccataacctttgtacactaaaaaatgaaagaatttagaatgtatttgatgatagcattctcactaagacacatgagaatttaactttataaccgcgtgagttaagatttaattcataggttttgatgtcattgttgaagttatttgtaattcagaaaccttgcttgtgtgatacatagtaagtctcttcatttattactgcttgtctgttgttatatctggattatcaaaagcaatagtgcaccaattaagatgtgctcaaatcaggacttaaatcataggcaccacatttttcatgtcagactagttactttgttgattctcagttactgtaggcatcaaaaggcaaaaatcaaaaaaaaaaaaacaaaaacaaacaaaaaaaaagatgaacctaggtctgtgtaaagtaaggggagtgttaggagcagccaggactgtgtagtgtgtgtttggttgcatcacaaacatcgtatgtggagacattgcaatacagtgttttttgttttcaacttttcttgtattcttgtatatttgtattatgttttgaatgcttttctcttttcataattaaatattaatgtttgggataactgccaagaagaagtaaaaatattgaatggaacttctatatgaggatgctgtgatctaaaaattaaatctcagtgggcggagagaatttgtttctgatgccttgtctttagaataattgtttgctttcagatgattaaaaaaaggagattgtatctaggaaaaaagtgtgaatgcttcaaaggagagatactgataattgtgacttgaaatagtgtcagatgaattatgtagctgatcactgatggaaccatctaatgaggcaggcttaaactctatttagtttcgtttgttttctcatatgaagtttataattcctttcagtcctaaaatgtcagatgccaggtgtcaaatgccacagtagaacgtgaaattaagtagagtccccttttaaacaaatttctctgtaagcaaaactatctttagtgacttaaaaaataatatcctctaaaattaccctttcaagaggaaaaaactgttcaatgaaaaaaccactcaattatgactcatataagaaatactggtttaaccaggagatatttggggagcaaaattttaaggaatttcaaattgctaaatctaatacaaatatctgacaataagatacagatctaaaagaatggttcttaagaactattgtttactgggaataaactaagctctatgaagaattcgtaagcattacatgttccagtaagtttagcaacttagagccaagactggtggccacctccatttatttccccactgctcctccactgacatccttcttagcagaaacttcatgaaaaagtttttgctgacacagaacaaacctgaaagtagtatctactttctaaatactactttgcttttcagtagtggatttgatatttataatgttctctaaagcttgcaactttttcagcaacgtttaaaaatagattaacctggaataacttacttgtttgctgctaaaatactcaagattttgccatttttaaacaaccagtccctgtgatacaactttgaaaaaacttttaaaaatctctgatgtatgggctctttttttcccataagaattatgtacatctgtgatgttttacagggggatccgcttttaaacagtgtacatattggaccacactgaaatgtcatatatcctttctctacttaaaattggttatttactgtgagttcatttccgatgtgttcttggttgttgctgttttctgcctgaagacgtgtatcataaagagctacatggtatggactatttatttgtaatttgacataaagtttgaagaataaagatctataaaagttgaagtttctgatattaaagctcttaatatattggcttt

SEQ ID NO: 37003 - DNA, 4293 bp, Homo sapiens
aggcccagccccgcacgcgccaccgctcgcgggccaatgggtggcagcctctctgcataggcaacgagtgccggccgggggtgagcgtcccaggcggttccgctcaacagacgctgctgtggctgcgccgggctgcgacactgcagttgtctacgcggccggggccgggacgaggaggcgttggacggggtcgcatacgttcgtcccctcgcattgcggccccgacagctgcgccaggatccccgggcggcggcgcggggcgtgaacgctctggggctcagccaggcctgcgcgggcccgaggccggaggaacccggactccggcgtagcggttttgacacaagggcgcatatcttcaaagcacctagtacctcctaccattgtcaactgatacagaattcgttgttgggaaggactggggaaacagctgtaacatttgccaccctcagaagctgctggtcctgtgtcacaccaccttagcctcttgatcgaggaagattcatgaacatctgtttctgctgtcctgttggtcagggatacgggctcactgaatctgctggggctggaacaatttccgaagtgtgggactacaatactggcagagtgggagcaccattagtttgctgtgaaatcaaattaaaaaactgggaggaaggtggatactttaatactgataagccacaccccaggggtgaaattcttattgggggccaaagtgtgacaatggggtactacaaaaatgaagcaaaaacaaaagctgatttctttgaagatgaaaatggacaaaggtggctctgtactggggatattggagagtttgaacccgatggatgcttaaagattattgatcgtaaaaaggaccttgtaaaactacaggcaggggaatatgtttctcttgggaaagtagaggcagctttgaagaatcttccactagtagataacatttgtgcatatgcaaacagttatcattcttatgtcattggatttgttgtgccaaatcaaaaggaactaactgaactagctcgaaagaaaggacttaaagggacttgggaggagctgtgtaacagttgtgaaatggaaaatgaggtacttaaagtgctttccgaagctgctatttcagcaagtctggaaaagtttgaaattccagtaaaaattcgtttgagtcctgaaccgtggacccctgaaactggtctggtgacagatgccttcaagctgaaacgcaaagagcttaaaacacattaccaggcggacattgagcgaatgtatggaagaaaataattattctcttctggcatcagtttgctacagtgagctcagatcaaataggaaaatacttgaaatgcatgtctcaagctgcaaggcaaactccattcctcatattaaactattacttctcatgacgtcaccatttttaactgacaggattagtaaaacattaagacagcaaacttgtgtctgtctcttctttcattttccccgccaccaacttactttaccacctatgactgtacttgtcagtatgagaatttttctgaatcatattggggaagcagtgattttaaaacctcaagtttttaaacatgatttatatgttctgtataatgttcagtttgtaactttttaaaagtttggatgtatagagggataaataggaaatataagaattggttatttgggggcttttttacttactgtatttaaaaatacaagggtattgatatgaaattatgtaaatttcaaatgcttatgaatcaaatcattgttgaacaaaagatttgttgctgtgtaattattgtcttgtatgcatttgagagaaataaatatacccatacttatgttttaagaagttgagatcttgtgaatatatgcctgtcagtgtcttctttatatatttattttttattagaaaaaatgaagtttggttggtgatgcatgaaacaaaatagcaagagagggttatagtttaatagtaagggagataacacagcatgtgtagcaccagttgataattggtctctagtagcttactgtcaaaatgttcaatgaagtcttctgttcatctgttgaaactaggaaaatacccaaacttaaatggaagaattctgaaagagaggatagaatttaaagaacaagagtatataaagttattctttgaatatttcgttgactatatgtacattgagttatctatatttgtaaacaaattagtcatggaaaattattctattccaaagtctccttttagtctagataatcattatttcattttaaaattagtgtttttcatagtttgcactgatgcgtgtatggatgtgtgtgagtcagtggtagcttatttaaaaagcaccttatcctttctcccataacctttgtacactaaaaaatgaaagaatttagaatgtatttgatgatagcattctcactaagacacatgagaatttaactttataaccgcgtgagttaagatttaattcataggttttgatgtcattgttgaagttatttgtaattcagaaaccttgcttgtgtgatacatagtaagtctcttcatttattactgcttgtctgttgttatatctggattatcaaaagcaatagtgcaccaattaagatgtgctcaaatcaggacttaaatcataggcaccacatttttcatgtcagactagttactttgttgattctcagttactgtaggcatcaaaaggcaaaaatcaaaaaaaaaaaaacaaaaacaaacaaaaaaaaagatgaacctaggtctgtgtaaagtaaggggagtgttaggagcagccaggactgtgtagtgtgtgtttggttgcatcacaaacatcgtatgtggagacattgcaatacagtgttttttgttttcaacttttcttgtattcttgtatatttgtattatgttttgaatgcttttctcttttcataattaaatattaatgtttgggataactgccaagaagaagtaaaaatattgaatggaacttctatatgaggatgctgtgatctaaaaattaaatctcagtgggcggagagaatttgtttctgatgccttgtctttagaataattgtttgctttcagatgattaaaaaaaggagattgtatctaggaaaaaagtgtgaatgcttcaaaggagagatactgataattgtgacttgaaatagtgtcagatgaattatgtagctgatcactgatggaaccatctaatgaggcaggcttaaactctatttagtttcgtttgttttctcatatgaagtttataattcctttcagtcctaaaatgtcagatgccaggtgtcaaatgccacagtagaacgtgaaattaagtagagtccccttttaaacaaatttctctgtaagcaaaactatctttagtgacttaaaaaataatatcctctaaaattaccctttcaagaggaaaaaactgttcaatgaaaaaaccactcaattatgactcatataagaaatactggtttaaccaggagatatttggggagcaaaattttaaggaatttcaaattgctaaatctaatacaaatatctgacaataagatacagatctaaaagaatggttcttaagaactattgtttactgggaataaactaagctctatgaagaattcgtaagcattacatgttccagtaagtttagcaacttagagccaagactggtggccacctccatttatttccccactgctcctccactgacatccttcttagcagaaacttcatgaaaaagtttttgctgacacagaacaaacctgaaagtagtatctactttctaaatactactttgcttttcagtagtggatttgatatttataatgttctctaaagcttgcaactttttcagcaacgtttaaaaatagattaacctggaataacttacttgtttgctgctaaaatactcaagattttgccatttttaaacaaccagtccctgtgatacaactttgaaaaaacttttaaaaatctctgatgtatgggctctttttttcccataagaattatgtacatctgtgatgttttacagggggatccgcttttaaacagtgtacatattggaccacactgaaatgtcatatatcctttctctacttaaaattggttatttactgtgagttcatttccgatgtgttcttggttgttgctgttttctgcctgaagacgtgtatcataaagagctacatggtatggactatttatttgtaatttgacataaagtttgaagaataaagatctataaaagttgaagtttctgatattaaagctcttaatatattggcttt

SEQ ID NO: 37004 - DNA, 3264 bp, Homo sapiens
aggcccagccccgcacgcgccaccgctcgcgggccaatgggtggcagcctctctgcataggcaacgagtgccggccgggggtgagcgtcccaggcggttccgctcaacagacgctgctgtggctgcgccgggctgcgacactgcagttgtctacgcggccggggccgggacgaggaggcgttggacggggtcgcatacgttcgtcccctcgcattgcggccccgacagctgcgccaggatccccgggcggcggcgcggggcgtgaacgctctggggctcagccaggcctgcgcgggcccgaggccggaggaacccggactccggcgtagcggttttgacacaagggcgcatatcttcaaagcacctagtacctcctaccattgtcaactgatacagaattcgttgttgggaaggactggggaaacagctgtaacatttgccaccctcagaagctgctggtcctgtgtcacaccaccttagcctcttgatcgaggaagattctcgctgaagtctgttaattctactttttgagtacttatgaataaccacgtgtcttcaaaaccatctaccatgaagctaaaacataccatcaaccctattcttttatattttatacattttctaatatcactttatactattttaacatacattccgttttattttttctccgagtcaagacaagaaaaatcaaaccgaattaaagcaaagcctgtaaattcaaaacctgattctgcatacagatctgttaatagtttggatggtttggcttcagtattataccctggatgtgatactttagataaagtttttacatatgcaaaaaacaaatttaagaacaaaagactcttgggaacacgtgaagttttaaatgaggaagatgaagtacaaccaaatggaaaaatttttaaaaaggttattcttggacagtataattggctttcctatgaagatgtctttgttcgagcctttaattttggaaatggattacagatgttgggtcagaaaccaaagaccaacatcgccatcttctgtgagaccagggccgagtggatgatagctgcacaggcgtgttttatgtataattttcagcttgttacattatatgccactctaggaggtccagccattgttcatgcattaaatgaaacagaggtgaccaacatcattactagtaaagaactcttacaaacaaagttgaaggatatagtttctttggtcccacgcctgcggcacatcatcactgttgatggaaagccaccgacctggtccgagttccccaagggcatcattgtgcataccatggctgcagtggaggccctgggagccaaggccagcatggaaaaccaacctcatagcaaaccattgccctcagatattgcagtaatcatgtacacaagtggatccacaggacttccaaagggagtcatgatctcacatagtaacattattgctggtataactgggatggcagaaaggattccagaactaggagaggaagatgtctacattggatatttgcctctggcccatgttctagaattaagtgctgagcttgtctgtctttctcacggatgccgcattggttactcttcaccacagactttagcagatcagtcttcaaaaattaaaaaaggaagcaaaggggatacatccatgttgaaaccaacactgatggcagcagttccggaaatcatggatcggatctacaaaaatgtcatgaataaagtcagtgaaatgagtagttttcaacgtaatctgtttattctggcctataattacaaaatggaacagatttcaaaaggacgtaatactccactgtgcgacagctttgttttccggaaagttcgaagcttgctagggggaaatattcgtctcctgttgtgtggtggcgctccactttctgcaaccacgcagcgattcatgaacatctgtttctgctgtcctgttggtcagggatacgggctcactgaatctgctggggctggaacaatttccgaagtgtgggactacaatactggcagagtgggagcaccattagtttgctgtgaaatcaaattaaaaaactgggaggaaggtggatactttaatactgataagccacaccccaggggtgaaattcttattgggggccaaagtgtgacaatggggtactacaaaaatgaagcaaaaacaaaagctgatttctttgaagatgaaaatggacaaaggtggctctgtactggggatattggagagtttgaacccgatggatgcttaaagattattgatcgtaaaaaggaccttgtaaaactacaggcaggggaatatgtttctcttgggaaagtagaggcagctttgaagaatcttccactagtagataacatttgtgcatatgcaaacagttatcattcttatgtcattggatttgttgtgccaaatcaaaaggaactaactgaactagctcgaaagaaaggacttaaagggacttgggaggagctgtgtaacagttgtgaaatggaaaatgaggtacttaaagtgctttccgaagctgctatttcagcaagtctggaaaagtttgaaattccagtaaaaattcgtttgagtcctgaaccgtggacccctgaaactggtctggtgacagatgccttcaagctgaaacgcaaagagcttaaaacacattaccaggcggacattgagcgaatgtatggaagaaaataattattctcttctggcatcagtttgctacagtgagctcagatcaaataggaaaatacttgaaatgcatgtctcaagctgcaaggcaaactccattcctcatattaaactattacttctcatgacgtcaccatttttaactgacaggattagtaaaacattaagacagcaaacttgtgtctgtctcttctttcattttccccgccaccaacttactttaccacctatgactgtacttgtcagtatgagaatttttctgaatcatattggggaagcagtgattttaaaacctcaagtttttaaacatgatttatatgttctgtataatgttcagtttgtaactttttaaaagtttggatgtatagagggataaataggaaatataagaattggttatttgggggcttttttacttactgtatttaaaaatacaagggtattgatatgaaattatgtaaatttcaaatgcttatgaatcaaatcattgttgaacaaaagatttgttgctgtgtaattattgtcttgtatgcatttgagagaaataaatatacccatacttatgtttta

SEQ ID NO: 37005 - DNA, 3755 bp, Homo sapiens
aaatgagatggggtttcgctctgttgcccaggctggagtgcagtagcacgatcatagctcactgcatcttcagatctcctgggctcaagtcatcctcccacctcagcctcctgagtaactggtactacaagcgtatgccactatacccagcttatattttttatttctattaaaaaatatttttaagttacttattttagagacaaggtctcgctatgttaccgaggctggccttgaattcctggcctcaagcgatcctcctgcctgagctttcagagttactgggattacaggcatgagccatcatgcctggctctaactcgttttcaatgacagaatatgtattctattttgttcctatatcatattttatttaactcattttcctcttgatggggacttgttaaatagtttattgttttacttatgtttgtattttgaggaatagattctttagaagtgacattcatggttcacttgttggttgtgcattttgatggatacgcaaaaagtggggaagttacaccatttgctaagaacttaaataccttttcttcttttctttttttttaatcatcttagcaagtctggaaaagtttgaaattccagtaaaaattcgtttgagtcctgaaccgtggacccctgaaactggtctggtgacagatgccttcaagctgaaacgcaaagagcttaaaacacattaccaggcggacattgagcgaatgtatggaagaaaataattattctcttctggcatcagtttgctacagtgagctcagatcaaataggaaaatacttgaaatgcatgtctcaagctgcaaggcaaactccattcctcatattaaactattacttctcatgacgtcaccatttttaactgacaggattagtaaaacattaagacagcaaacttgtgtctgtctcttctttcattttccccgccaccaacttactttaccacctatgactgtacttgtcagtatgagaatttttctgaatcatattggggaagcagtgattttaaaacctcaagtttttaaacatgatttatatgttctgtataatgttcagtttgtaactttttaaaagtttggatgtatagagggataaataggaaatataagaattggttatttgggggcttttttacttactgtatttaaaaatacaagggtattgatatgaaattatgtaaatttcaaatgcttatgaatcaaatcattgttgaacaaaagatttgttgctgtgtaattattgtcttgtatgcatttgagagaaataaatatacccatacttatgttttaagaagttgagatcttgtgaatatatgcctgtcagtgtcttctttatatatttattttttattagaaaaaatgaagtttggttggtgatgcatgaaacaaaatagcaagagagggttatagtttaatagtaagggagataacacagcatgtgtagcaccagttgataattggtctctagtagcttactgtcaaaatgttcaatgaagtcttctgttcatctgttgaaactaggaaaatacccaaacttaaatggaagaattctgaaagagaggatagaatttaaagaacaagagtatataaagttattctttgaatatttcgttgactatatgtacattgagttatctatatttgtaaacaaattagtcatggaaaattattctattccaaagtctccttttagtctagataatcattatttcattttaaaattagtgtttttcatagtttgcactgatgcgtgtatggatgtgtgtgagtcagtggtagcttatttaaaaagcaccttatcctttctcccataacctttgtacactaaaaaatgaaagaatttagaatgtatttgatgatagcattctcactaagacacatgagaatttaactttataaccgcgtgagttaagatttaattcataggttttgatgtcattgttgaagttatttgtaattcagaaaccttgcttgtgtgatacatagtaagtctcttcatttattactgcttgtctgttgttatatctggattatcaaaagcaatagtgcaccaattaagatgtgctcaaatcaggacttaaatcataggcaccacatttttcatgtcagactagttactttgttgattctcagttactgtaggcatcaaaaggcaaaaatcaaaaaaaaaaaaacaaaaacaaacaaaaaaaaagatgaacctaggtctgtgtaaagtaaggggagtgttaggagcagccaggactgtgtagtgtgtgtttggttgcatcacaaacatcgtatgtggagacattgcaatacagtgttttttgttttcaacttttcttgtattcttgtatatttgtattatgttttgaatgcttttctcttttcataattaaatattaatgtttgggataactgccaagaagaagtaaaaatattgaatggaacttctatatgaggatgctgtgatctaaaaattaaatctcagtgggcggagagaatttgtttctgatgccttgtctttagaataattgtttgctttcagatgattaaaaaaaggagattgtatctaggaaaaaagtgtgaatgcttcaaaggagagatactgataattgtgacttgaaatagtgtcagatgaattatgtagctgatcactgatggaaccatctaatgaggcaggcttaaactctatttagtttcgtttgttttctcatatgaagtttataattcctttcagtcctaaaatgtcagatgccaggtgtcaaatgccacagtagaacgtgaaattaagtagagtccccttttaaacaaatttctctgtaagcaaaactatctttagtgacttaaaaaataatatcctctaaaattaccctttcaagaggaaaaaactgttcaatgaaaaaaccactcaattatgactcatataagaaatactggtttaaccaggagatatttggggagcaaaattttaaggaatttcaaattgctaaatctaatacaaatatctgacaataagatacagatctaaaagaatggttcttaagaactattgtttactgggaataaactaagctctatgaagaattcgtaagcattacatgttccagtaagtttagcaacttagagccaagactggtggccacctccatttatttccccactgctcctccactgacatccttcttagcagaaacttcatgaaaaagtttttgctgacacagaacaaacctgaaagtagtatctactttctaaatactactttgcttttcagtagtggatttgatatttataatgttctctaaagcttgcaactttttcagcaacgtttaaaaatagattaacctggaataacttacttgtttgctgctaaaatactcaagattttgccatttttaaacaaccagtccctgtgatacaactttgaaaaaacttttaaaaatctctgatgtatgggctctttttttcccataagaattatgtacatctgtgatgttttacagggggatccgcttttaaacagtgtacatattggaccacactgaaatgtcatatatcctttctctacttaaaattggttatttactgtgagttcatttccgatgtgttcttggttgttgctgttttctgcctgaagacgtgtatcataaagagctacatggtatggactatttatttgtaatttgacataaagtttgaagaataaagatctataaaagttgaagtttctgatattaaagctcttaatatattggcttt

SEQ ID NO: 37006 - DNA, 2867 bp, Homo sapiens
aggcccagccccgcacgcgccaccgctcgcgggccaatgggtggcagcctctctgcataggcaacgagtgccggccgggggtgagcgtcccaggcggttccgctcaacagacgctgctgtggctgcgccgggctgcgacactgcagttgtctacgcggccggggccgggacgaggaggcgttggacggggtcgcatacgttcgtcccctcgcattgcggccccgacagctgcgccaggatccccgggcggcggcgcggggcgtgaacgctctggggctcagccaggcctgcgcgggcccgaggccggaggaacccggactccggcgtagcggttttgacacaagggcgcatatcttcaaagcacctagtacctcctaccattgtcaactgatacagaattcgttgttgggaaggactggggaaacagctgtaacatttgccaccctcagaagctgctggtcctgtgtcacaccaccttagcctcttgatcgaggaagattctcgctgaagtctgttaattctactttttgagtacttatgaataaccacgtgtcttcaaaaccatctaccatgaagctaaaacataccatcaaccctattcttttatattttatacattttctaatatcactttatactattttaacatacattccgttttattttttctccgagtcaagacaagaaaaatcaaaccgaattaaagcaaagcctgtaaattcaaaacctgattctgcatacagatctgttaatagtttggatggtttggcttcagtattataccctggatgtgatactttagataaagtttttacatatgcaaaaaacaaatttaagaacaaaagactcttgggaacacgtgaagttttaaatgaggaagatgaagtacaaccaaatggaaaaatttttaaaaaggttattcttggacagtataattggctttcctatgaagatgtctttgttcgagcctttaattttggaaatggattacagatgttgggtcagaaaccaaagaccaacatcgccatcttctgtgagaccagggccgagtggatgatagctgcacaggcgtgttttatgtataattttcagcttgttacattatatgccactctaggaggtccagccattgttcatgcattaaatgaaacagaggtgaccaacatcattactagtaaagaactcttacaaacaaagttgaaggatatagtttctttggtcccacgcctgcggcacatcatcactgttgatggaaagccaccgacctggtccgagttccccaagggcatcattgtgcataccatggctgcagtggaggccctgggagccaaggccagcatggaaaaccaacctcatagcaaaccattgccctcagatattgcagtaatcatgtacacaagtggatccacaggacttccaaagggagtcatgatctcacatagtaacattattgctggtataactgggatggcagaaaggattccagaactaggagaggaagatgtctacattggatatttgcctctggcccatgttctagaattaagtgctgagcttgtctgtctttctcacggatgccgcattggttactcttcaccacagactttagcagatcagtcttcaaaaattaaaaaaggaagcaaaggggatacatccatgttgaaaccaacactgatggcagcagttccggaaatcatggatcggatctacaaaaatgtcatgaataaagtcagtgaaatgagtagttttcaacgtaatctgtttattctggcctataattacaaaatggaacagatttcaaaaggacgtaatactccactgtgcgacagctttgttttccggaaagttcgaagcttgctagggggaaatattcgtctcctgttgtgtggtggcgctccactttctgcaaccacgcagcgattcatgaacatctgtttctgctgtcctgttggtcagggatacgggctcactgaatctgctggggctggaacaatttccgaagtgtgggactacaatactggcagagtgggagcaccattagtttgctgtgaaatcaaattaaaaaactgggaggaaggtggatactttaatactgataagccacaccccaggggtgaaattcttattgggggccaaagtgtgacaatggggtactacaaaaatgaagcaaaaacaaaagctgatttctttgaagatgaaaatggacaaaggtggctctgtactggggatattggagagtttgaacccgatggatgcttaaagattattgatcgtaaaaaggaccttgtaaaactacaggcaggggaatatgtttctcttgggaaagtagaggcagctttgaagaatcttccactagtagataacatttgtgcatatgcaaacagttatcattcttatgtcattggatttgttgtgccaaatcaaaaggaactaactgaactagctcgaaagaaaggacttaaagggacttgggaggagctgtgtaacagttgtgaaatggaaaatgaggtacttaaagtgctttccgaagctgctatttcagcaagtctggaaaagtttgaaattccagtaaaaattcgtttgagtcctgaaccgtggacccctgaaactggtctggtgacagatgccttcaagctgaaacgcaaagagcttaaaacacattaccaggcggacattgagcgaatgtatggaagaaaataattattctcttctggcatcagtttgctacagtgagctcagatcaaataggaaaatacttgaaatgcatgtctcaagctgcaaggcaaactccattcctcatattaaactattacttctcatgacgtcaccatttttaactgacaggattagtaaaacattaagacagc

SEQ ID NO: 37007 - DNA, 3210 bp, Homo sapiens
aggcccagccccgcacgcgccaccgctcgcgggccaatgggtggcagcctctctgcataggcaacgagtgccggccgggggtgagcgtcccaggcggttccgctcaacagacgctgctgtggctgcgccgggctgcgacactgcagttgtctacgcggccggggccgggacgaggaggcgttggacggggtcgcatacgttcgtcccctcgcattgcggccccgacagctgcgccaggatccccgggcggcggcgcggggcgtgaacgctctggggctcagccaggcctgcgcgggcccgaggccggaggaacccggactccggcgtagcggttttgacacaagggcgcatatcttcaaagcacctagtacctcctaccattgtcaactgatacagaattcgttgttgggaaggactggggaaacagctgtaacatttgccaccctcagaagctgctggtcctgtgtcacaccaccttagcctcttgatcgaggaagattctcgctgaagtctgttaattctactttttgagtacttatgaataaccacgtgtcttcaaaaccatctaccatgaagctaaaacataccatcaaccctattcttttatattttatacattttctaatatcactttatactattttaacatacattccgttttattttttctccgagtcaagacaagaaaaatcaaaccgaattaaagcaaagcctgtaaattcaaaacctgattctgcatacagatctgttaatagtttggatggtttggcttcagtattataccctggatgtgatactttagataaagtttttacatatgcaaaaaacaaatttaagaacaaaagactcttgggaacacgtgaagttttaaatgaggaagatgaagtacaaccaaatggaaaaatttttaaaaaggttattcttggacagtataattggctttcctatgaagatgtctttgttcgagcctttaattttggaaatggattacagatgttgggtcagaaaccaaagaccaacatcgccatcttctgtgagaccagggccgagtggatgatagctgcacaggcgtgttttatgtataattttcagcttgttacattatatgccactctaggaggtccagccattgttcatgcattaaatgaaacagaggtgaccaacatcattactagtaaagaactcttacaaacaaagttgaaggatatagtttctttggtcccacgcctgcggcacatcatcactgttgatggaaagccaccgacctggtccgagttccccaagggcatcattgtgcataccatggctgcagtggaggccctgggagccaaggccagcatggaaaaccaacctcatagcaaaccattgccctcagatattgcagtaatcatgtacacaagtggatccacaggacttccaaagggagtcatgatctcacatagtaacattattgctggtataactgggatggcagaaaggattccagaactaggagaggaagatgtctacattggatatttgcctctggcccatgttctagaattaagtgctgagcttgtctgtctttctcacggatgccgcattggttactcttcaccacagactttagcagatcagtcttcaaaaattaaaaaaggaagcaaaggggatacatccatgttgaaaccaacactgatggcagcagttccggaaatcatggatcggatctacaaaaatgtcatgaataaagtcagtgaaatgagtagttttcaacgtaatctgtttattctggcctataattacaaaatggaacagatttcaaaaggacgtaatactccactgtgcgacagctttgttttccggaaagttcgaagcttgctagggggaaatattcgtctcctgttgtgtggtggcgctccactttctgcaaccacgcagcgattcatgaacatctgtttctgctgtcctgttggtcagggatacgggctcactgaatctgctggggctggaacaatttccgaagtgtgggactacaatactggcagagtgggagcaccattagtttgctgtgaaatcaaattaaaaaactgggaggaaggtggatactttaatactgataagccacaccccaggggtgaaattcttattgggggccaaagtgtgacaatggggtactacaaaaatgaagcaaaaacaaaagctgatttctttgaagatgaaaatggacaaaggtggctctgtactggggatattggagagtttgaacccgatggatgcttaaagattattgatcgtaaaaaggaccttgtaaaactacaggcaggggaatatgtttctcttgggaaagtagaggcagctttgaagaatcttccactagtagataacatttgtgcatatgcaaacagttatcattcttatgtcattggatttgttgtgccaaatcaaaaggaactaactgaactagctcgaaagaaaggacttaaagggacttgggaggagctgtgtaacagttgtgaaatggaaaatgaggtacttaaagtgctttccgaagctgctatttcagcaagtctggaaaagtttgaaattccagtaaaaattcgtttgagtcctgaaccgtggacccctgaaactggtctggtgacagatgccttcaagctgaaacgcaaagagcttaaaacacattaccaggcggacattgagcgaatgtatggaagaaaataattattctcttctggcatcagtttgctacagtgagctcagatcaaataggaaaatacttgaaatgcatgtctcaagctgcataactgacaggattagtaaaacattaagacagcaaacttgtgtctgtctcttctttcattttccccgccaccaacttactttaccacctatgactgtacttgtcagtatgagaatttttctgaatcatattggggaagcagtgattttaaaacctcaagtttttaaacatgatttatatgttctgtataatgttcagtttgtaactttttaaaagtttggatgtatagagggataaataggaaatataagaattggttatttgggggcttttttacttactgtatttaaaaatacaagggtattgatatgaaattatgtaaatttcaaatgcttatgaatcaaatcattgttgaacaaaagatttgttgctgtgtaattattgtcttgtatgcatttgagagaaataaatatacccatacttatgtttta

SEQ ID NO: 37008 - DNA, 3081 bp, Homo sapiens
aggcccagccccgcacgcgccaccgctcgcgggccaatgggtggcagcctctctgcataggcaacgagtgccggccgggggtgagcgtcccaggcggttccgctcaacagacgctgctgtggctgcgccgggctgcgacactgcagttgtctacgcggccggggccgggacgaggaggcgttggacggggtcgcatacgttcgtcccctcgcattgcggccccgacagctgcgccaggatccccgggcggcggcgcggggcgtgaacgctctggggctcagccaggcctgcgcgggcccgaggccggaggaacccggactccggcgtagcggttttgacacaagggcgcatatcttcaaagcacctagtacctcctaccattgtcaactgatacagaattcgttgttgggaaggactggggaaacagctgtaacatttgccaccctcagaagctgctggtcctgtgtcacaccaccttagcctcttgatcgaggaagattctcgctgaagtctgttaattctactttttgagtacttatgaataaccacgtgtcttcaaaaccatctaccatgaagctaaaacataccatcaaccctattcttttatattttatacattttctaatatcactttatactattttaacatacattccgttttattttttctccgagtcaagacaagaaaaatcaaaccgaattaaagcaaagcctgtaaattcaaaacctgattctgcatacagatctgttaatagtttggatggtttggcttcagtattataccctggatgtgatactttagataaagtttttacatatgcaaaaaacaaatttaagaacaaaagactcttgggaacacgtgaagttttaaatgaggaagatgaagtacaaccaaatggaaaaatttttaaaaaggttattcttggacagtataattggctttcctatgaagatgtctttgttcgagcctttaattttggaaatggattacagatgttgggtcagaaaccaaagaccaacatcgccatcttctgtgagaccagggccgagtggatgatagctgcacaggcgtgttttatgtataattttcagcttgttacattatatgccactctaggaggtccagccattgttcatgcattaaatgaaacagaggtgaccaacatcattactagtaaagaactcttacaaacaaagttgaaggatatagtttctttggtcccacgcctgcggcacatcatcactgttgatggaaagccaccgacctggtccgagttccccaagggcatcattgtgcataccatggctgcagtggaggccctgggagccaaggccagcatggaaaaccaacctcatagcaaaccattgccctcagatattgcagtaatcatgtacacaagtggatccacaggacttccaaagggagtcatgatctcacatagtaacattattgctggtataactgggatggcagaaaggattccagaactaggagaggaagatgtctacattggatatttgcctctggcccatgttctagaattaagtgctgagcttgtctgtctttctcacggatgccgcattggttactcttcaccacagactttagcagatcagtcttcaaaaattaaaaaaggaagcaaaggggatacatccatgttgaaaccaacactgatggcagcagttccggaaatcatggatcggatctacaaaaatgtcatgaataaagtcagtgaaatgagtagttttcaacgtaatctgtttattctggcctataattacaaaatggaacagatttcaaaaggacgtaatactccactgtgcgacagctttgttttccggaaagttcgaagcttgctagggggaaatattcgtctcctgttgtgtggtggcgctccactttctgcaaccacgcagcgattcatgaacatctgtttctgctgtcctgttggtcagggatacgggctcactgaatctgctggggctggaacaatttccgaagtgtgggactacaatactggcagagtgggagcaccattagtttgctgtgaaatcaaattaaaaaactgggaggaaggtggatactttaatactgataagccacaccccaggggtgaaattcttattgggggccaaagtgtgacaatggggtactacaaaaatgaagcaaaaacaaaagctgatttctttgaagatgaaaatggacaaaggtggctctgtactggggatattggagagtttgaacccgatggatgcttaaagattattgatcgtaaaaaggaccttgtaaaactacaggcaggggaatatgtttctcttgggaaagtagaggcagctttgaagaatcttccactagtagataacatttgtgcatatgcaaacagttatcattcttatgtcattggatttgttgtgccaaatcaaaaggaactaactgaactagctcgaaagaaaggacttaaagggacttgggaggagctgtgtaacagttgtgaaatggaaaatgaggtacttaaagtgctttccgaagctgctatttcaggtgagtattcggttaaactgatactaaaaactgagatgggaagagagtacttacatgcattcaacctgttttaaggtttagggttcattactttctgctcagaaaccatttctaccgttagtatatggaagagtaaacttatcagtcccccattcaagccttgctacacaaattaaccactcccaccaaactgatgtacatgtatcttgaatgttcttgtctctgcaacctttgctttctgggttaccctttctcttatgtcagctgttcttcaaggccttgctcagttttctggccacactagcccatagtgatcaggccaaaactccttttgaaactttatacaatgttagagtactggtagttggttgtactaatagtttcataaccatttttggtggggtgaggagtgcccaagactagtttaatattgttggtctaataaaaacatctgtgtcttttgagttgttgtgtcaagcataaaacaagcgtgaattattttttattttatttatttttttaagagacagggtctcttc

SEQ ID NO: 37009 - DNA, 1278 bp, Homo sapiens
aggcccagccccgcacgcgccaccgctcgcgggccaatgggtggcagcctctctgcataggcaacgagtgccggccgggggtgagcgtcccaggcggttccgctcaacagacgctgctgtggctgcgccgggctgcgacactgcagttgtctacgcggccggggccgggacgaggaggcgttggacggggtcgcatacgttcgtcccctcgcattgcggccccgacagctgcgccaggatccccgggcggcggcgcggggcgtgaacgctctggggctcagccaggcctgcgcgggcccgaggccggaggaacccggactccggcgtagcggttttgacacaagggcgcatatcttcaaagcacctagtacctcctaccattgtcaactgatacagaattcgttgttgggaaggactggggaaacagctgtaacatttgccaccctcagaagctgctggtcctgtgtcacaccaccttagcctcttgatcgaggaagattctcgctgaagtctgttaattctactttttgagtacttatgaataaccacgtgtcttcaaaaccatctaccatgaagctaaaacataccatcaaccctattcttttatattttatacattttctaatatcactttatactattttaacatacattccgttttattttttctccgagtcaagacaagaaaaatcaaaccgaattaaagcaaagcctgtaaattcaaaacctgattctgcatacagatctgttaatagtttggatggtttggcttcagtattataccctggatgtgatactttagataaagtttttacatatgcaaaaaacaaatttaagaacaaaagactcttgggaacacgtgaagttttaaatgaggaagatgaagtacaaccaaatggaaaaatttttaaaaaggttattcttggacagtataattggctttcctatgaagatgtctttgttcgagcctttaattttggaaatggattacagatgttgggtcagaaaccaaagaccaacatcgccatcttctgtgagaccagggccgagtggatgatagctgcacaggcgtgttttatgtataattttcagcgtatgtagactttcttatcttctggaagaatgaacttaactgatatttattgaaatactttactctgaagaggttaaaattctgatgttaattttcacccagtgtccagttagtggagaactctgttgtgacttggaatttttggtttattttggaaaataaatcaattatatgacaaattgtac

SEQ ID NO: 37010 - DNA, 226 bp, Homo sapiens
aataatttgatagcaaattacttagagaatggccagtatttatatatgtattaaatgttactaatattattactcattgttttcccctctccacctttctttgttttgcagatcgtaaaaaggaccttgtaaaactacaggcaggggaatatgtttctcttgggaaagtagaggcagctttgaagaatcttccactagtagataacatttgtgcatatgcaaacag

SEQ ID NO: 37011 - DNA, 799 bp, Homo sapiens
cacctacagttgagctgaggctgcagggcattaacttgggcctagaagatgatggtgttgcagatgaatctgtgaaagggctggaaagccaggtgttggataaggaagaggaacagcctttatgggctgcaaatgagaattctgttcaaatgatgagaagtgaaatcaatacagaggtaaatgagaaagctggactattaccttgtcctgagccaacaataatcagtgctatcttgaaggatgataaccacagtcttacattttttcctgagtcaactgagcagaaacaatcagacataaagaaaccagaaaatacacaaccagaaaataaagaaaccatatctcaagcaacttcagagaaacttcccatgattttaacccagagatctgttgctttgggacaagacaaagttgcccttcagaaattaaatgatgcagccaccaagcttcaggcctgttggcggggattttatgccaggaactacaaccctcaagccaaagatgtgcgttacgaaatccggctacgcagaatgcaagagcacattgtctgcttaactgatgaaataaggagattacgaaaagaaagagatgaagaacgtattaaaaaatttgtacaagaagaagctttcagattcctttgggaaccaggtaaggtctctacaggtttggcaacagacagtggaccagcgtctaagttcctgggcatactgatgttcctcctatatcaagtactcttgtgccatcgaaacatccattatttacccaaagccaggagtcctcttgtgatcaaaatgctgat

SEQ ID NO: 37012 - DNA, 1568 bp, Homo sapiens
ggagaaggttgagtcaggtagcagaaagaccaagtgccacatccagcctgcttttccctttactagctgattctgccaaacctgactgcctgctgaccctggtgagcatgcctcagccactggggggctttcctgcagtttccccttgtcctctcccctcgcctggtgtgctgagggcgtcttcactggctgcaggctcctgggctttgttcccttgctggcatcaaggattggaaagcctctttctcccccatcttctgacgttggtcaaggctcaccattccacctctgccaaggagctccaggcgctctgagctgtctgctttctggcttcccactgagagtgcaagagctcacctgaggactgtcctgtgcctcttctcttgggctgtgctgcaggaacccaggcttgtagctcattccttatcccagcagaatgcccagagtggttcctccatcgcctttctggaaacaggatgcatctctggcctggccacacactgaagattcacaggctagctccttcatcaggaaagaagttcatcttcattgctctcgaggaaaggaagaaattgcagagtggtgaagatgtattttgtctttactcagtgaccacaagcacacaggggccaaatagataacaccatgttcctctcagtttctgcctggaatcctcgacttgaacggtagcattcacttgaaaccaagccccgaccattgaagggagagtcatttggcaaagttcctgctgaaactgccatccacttatgtctaagtggcattctggctccagccatccttccagatttccccgatatctgagccctcactgctgccaccagagccgccctgcttcttggccctgcctgggtttgaagacagctcctcagctgggctgcatgtctaaggaggtcttgaaggctcgatgccacagcagtccctgtctctggcaacaagtagccttggcttttgctgtcttgcccaaatcactctgagctttcttcagtggtgtgagcatcttgaagaatgaatgttgaggtctgcctatcccccagggtagcaggtgagatggggccggtgcatgtctattccagttcactgttgcagaactgagaaatgtgcggggactttctcctctgtgttcgctgcgttttcagcagccagtgctgggcacttagccttcttgcataggtgcggaaagctaaccggagttcctgttccttcctccgtgctggtccccgcagggcttgtggtggaggaccctgtggccatctcaccaactacaccgaaacgcatctgacttctgacgccacgcccgtgtgcggtgcagcctccctgctgggcccaggcctggccgcttggagatggtgccctcatcgtcctgggccttccaggctgcagagggtgcggggagcactgaggaactgcatagatggctgtgggaggtggtggcttttaaaaaattgtggtaaaatacatataacataaaaatatatgttagccattttaaaatgtacaactcaatggcactaggtataatacattcacagtgttacgtgaccatcaaa

SEQ ID NO: 37013 - DNA, 759 bp, Homo sapiens
gtccagggattatacaggtgtaggctactgggcctggccctgaattttttattttaaaaaattaccacagtatttccattcctttttttgacccatttacgttaatttcctaccggattctccttctttctccttcttttcaaaccctcagaatctctgtcagcattgatttatgaaaacattcttgatttataaagacattttaactcaattcaaacagtttaaaaataatcagagggtaagctgaaatacaaatacacatttagtttacaactcttgatgtatccttacaaatgaccactatgttgcagaaatgagggaaaattcactacatggtagaacagtgataggtggaagtttattgctagatcccaggaggaatgaaaagctaaaaggatgagagagaagagctagatatggaggacagggaacataaagctgtgtaacatatggataactcattttctgaagcataaaacaaaaactagaaattgctggcaaaacaataatcagagagatgctggagaaaacttctgcactaaaaaatacttgtgtgtgcaaactgctatattctaggaagaaaaatactcgatgtaaaaagacttacaaatctcagtctagcaatattttttaatattaaagataaaaaattaatcttgtaaatatccaggcagagaaaataagcttccagaagaatagttcagtttgttaagactgtaaagaattagtagcacccatggctatttaaggaaaaaaaaa

SEQ ID NO: 37014 - DNA, 756 bp, Homo sapiens
gcttcacattcagcccctgccctgagacaaatgcattattttcatcagccctgggtgcttatttttctaagctctcattttattactggagtcacaatttgtgtgtaggtgttgccgacaaaaatgataattaactttcccttgaggtgacacataactaaaatttcaaatctttagtatttctccctttcattttaaattcatatgcctaactataaaataactgtgactgagatacaagtacaaaccaaagcctggaattgcagcaggtgctgaggcatttgaaagtgaaatgtttctcttcgcaaaggactcttataccctcccctaaagaaatcaccatgccggtctcacccctactggctttgttacctaaggcttcacctctcagtgcttctggttccttccttatccttaaaatgagtgttaataattctctcgtggggtcattgtgcggaccacattgagtagtgcctgtaaaacagtgctggctacacggtaaatactcaataaatgttgacacgtttattacctgtctttaaaaatcactgggaagtgccagtgggagtcttgagtataaaatttctaaatacggagaaatgtttccctgtcagctctccgaatggatgcgctggcttctggacacctcatgccagcccatccttcctcctgcttgtctcagataattcaaatatttgttggataaacaaacaaacgagtcacgtgtgccttgtatcacaaattatctggtcgacg

SEQ ID NO: 37015 - DNA, 653 bp, Homo sapiens
cgcctatctttagcttggaggtatttctggaggggtcttgatcattagttctttagttctgcttgatccttgtagaagtctctcttaactcagagtgggagctgggcaggtttgagggcagagctgcaagttgtgatgattgtgacagatgggttggtcccccatggctcagaactaggtgtttcccttcaggtgcagcatcctgttcgctgcagtgggcgggccggcagggaatgcacatagccatctctattcagtaggtgttagatgaaagaatagctggtggcacttgctttgaggaacatcaccatttcccagaccaaatgtggttgtggccattcccttccagtctcttcttgaaaacccactccttgcaggaaatgcagtgattgggagcaatccttgtacagagtgaggatcgagagaaatttttttatgattgatctacctaggtttgccctccctggaggtttcaccagatccatttcccagtaaagattttgcaaaaaatttttgttctaacccagagggacatccagagaagattgaagcccataaacacaagccttttaaatttatttttatttgtttattttttttgagatgatgtctcactgtgctccagcctggggacagagtgagactccatctca

SEQ ID NO: 37016 - DNA, 183 bp, Homo sapiens
gtgaaatctgttgctggtctgctctgcaggtactgaagtttccttgccaggagctgcagttgctttacttccactacaccgagccctgcatggattcaagctggcatatttagaaagcagagtcatcttaaatcaaccaggaatccattcatttcagagcagtgggagaatcctgtttttatt

SEQ ID NO: 37017 - DNA, 363 bp, Homo sapiens
ctttgtgatatctccaaatatgaggaagagtaatatcacctagataactctaattagagtgtccaaattgtgagtattaaagggagactcttgaagttgctgcctccagttgaatgtgaaatgatgtcagttaccttgttctgacattacgagagactttgctgacaacaaataattgcatcatgtgctatagaattaaagtctcggccactttggcttattgttaacaggcctgaactgcacaatattaccttcatgccagagaatgaatcacagcctttgtggatcctggttctaaatttttaatgttttgaacaaatggcttatgaagcatgtatccagccattagaactttgacttgcc

SEQ ID NO: 37018 - DNA, 844 bp, Homo sapiens
ctagggcggggcgaggggaggacggctacgagctgtcaggagcctccagctttccccgtgacgaagctcaccctcgccctgatgtcgccactcacccagcagcgggctgcgagctggagcagacgttaacaccgagggaggactgaagggaacgtcttgatttttctccttaatttgccacagacacagggaaaaaaaaaaaaaaacaaaaacagcagacgcagctctacctttgcgctggctttaaagcttttaagctccccacgtcatcctaccccatgcaacagacttaccgaatagcaatgcccaccccacacacctgctaggtaactcgccttctggaaacctgcgcctggggtggggttgaagagacactgtctggtatcctaaagtcagagggcgtgaggagaccggcgcccttcgccccacccaggcgcgctgcaccctccggtccccgtctctagagtgcaccaaggcatcctgcgtcctgccggagaaaagagggtacggggcagaggcccgagttccagggagttgctgattccagtggagaaccgagacaccgcgtcctttctaattaataagcacgccaccccctacctccaacccccccccccgccccgcctttatttcttgttgacagcaaaggtgggggacgtgggagaaaggcaagagttgtctctaggttcgggatgttgggctgcgcggagggaagaggtgggatctcgaaatggaaacagtccccccttcctcccccctcccctcctcctcctcctcctcctcttcttctgtttacctcaagtttgaattttatctgcgcaacattagctggaatgcggacatt

SEQ ID NO: 37019 - DNA, 411 bp, Homo sapiens
tctacctttgcgctggctttaaagcttttaagctccccacgtcatcctaccccatgcaacagacttaccgaatagcaatgcccaccccacacacctgctaggtaactcgccttctggaaatcgggggccccacccaccccgccttctggaaacctgcgcctggggtggggttgaagagacactgtctggtatcctaaagtcagagggcgtgaggagaccggcgcccttcgccccacccaggcgcgctgcaccctccggtccccgtctctagagtgcaccaaggcatcctgcgtcctgccggagaaaagagggtacggggcagaggcccgagttccagggagttgctgattccagtggagaaccgagacaccgcgtcctttctaattaataagcacgccaccccctacctcc

SEQ ID NO: 37020 - DNA, 1205 bp, Homo sapiens
ggtaataggatgtgtaaagtctacttgggtttgtaagaccagcctttggttgaagaccttccttgggtcctagcagacagaaaccaggagagacagagacatctatatccggctacatagagaggttatctgtctaactctctgcctgttctctatctatatctgtctgtctgtctgtctgtctacctacctacctgtctctgtctgtctgtctgtctacctacctacctatctaatctacctacctacctacctatctgtctgatctacctacctacgtacctacctacttagaaattgagagatttactttgaggattgacccacatgattgtggggactagccaagtccaaaatctgcaggctggagatttagggagagctgatgttacagtttgagtctgaaggcagtctggaggcagaatttcttccttgagagagacccagtttttttctcacgaggccttcagctgattaaatgaggtgtatgtacccacagtatacaggttaatctactttattcagagtctactgatttaaatgttaatctcatttagaaaatcccttcatacatacatctaaactagtgttagatcaaatatctgggtactgtggctcatccaggctgacccataaaattaaccatcacacctgtgcaagcgcttttccctcctggatggtgtcctagggatgacagaggaggggaaagccaggtctctgcttcaaggagacaaaattatgcatacgaagaaattaagaatgctgctgtgtctgtggagtagccattcttttattcctttactttcttaacaaacttgcttttacttaaaaaaaaaaaagaaattaagaacaagaccatttatatttaagtgccaacttatgaaatgtaaaaagggatttagaggtgacaaggcaagtgagggctggaggatttggagagatttcatggtgtagggactgaataggagcttccagaacatggaggtttcagataagtgaggacacagaagtcttcacaaccagagtgggcaccacaggacaattctacatctatctaggactctgagtttttgaagggtttccatatgcattgtttggtttgctgcttgcaacaaccctgttgttttaactgaaggtcttagggcctagggattccccagaggccacacaacttgccagtggcaggggaaggtcttactcttcca

SEQ ID NO: 37021 - DNA, 7004 bp, Homo sapiens
  misc_feature (3894)..(3894): n is a, c, g, or t
agctactttgaagaaacctatcagagtagagggccttcattctgcttctggccttactctcacttgccttgggatctttatcaagtctgttgaatatctttgcactttagtgtctatatctgtaaagtggaaaatttttgtgtgtggttttttaaatatctcttaaatcctgataaacagctaaacagtatcaaaaggcagctaaattgtataaaaaaatacctgcaaaaaccatacaaatgcttaccagaaaaggcagtggcccattaccagcaggccatcaaacttagccccagtcatcacgtggccatggtgaacttgggaagactctacaggtcactgggagagaacagcatggctgaagaatggtacaagcgcgccctgcaggtggcacacaaagctgagatattgtcacctttgggagcactgtattacaacactggccgatacgaagaggctttgcagatttaccaggaagctgcagcacttcagccttctcagagggagctccgcttggcactggctcaggttttggccgtgatgggtcagacaaaagaagctgaaaagatgaccaatcacattgtgtcagaggagaccggatgccttgaatgctatcgcctcttgtcagccatctatagcaagcaggagaaccacgacaaggcacttgatgctatagacaaggctctccagctgaaaccaaaggacccaaaagtcatttctgaactttttttcacaaaaggaaaccaattaagagagcagaaccttctcgacaaagcttttgagagctatagagtggctgtgcaactaaacccagaccaagcacaggcctggatgaacatgggtggcatccaacacatcaagggaaaatatgtgtctgcaagagcttattatgagagagccttacagctggttccagacagcaaactgctgaaggaaaatcttgccaaattggatcgcctagaaaaacgattacaagaagttcgagaaaaggatcaaacatagcaccaccgtctgacccaacctcataggataatgtggtgcctctgaaaggggagtgatggaagccttgctttcacatcagcaggggcacaactaatgagattttctctcattccgagttcagggtgacacattttgggacatctgctggtagcccagtgctgaaggacttgcttttccatgaagaagacgaaaacagcaaacaagggcaagaaggtctgagagggaaggagaatgacatttacacattttacagatttttgtttggtttaactccagatttctcttgatatatctctgtgcttttgagacctggagatctaattctgtttagacattttttgtcccagaaatacagaagcttgaaatgctatgaaggcagagcttctattctttatgggatgaaatatttcaaaagaggataaatcctctgtggtaagccatttggaaaatcctaccaagaattggcttatttaattttccagaaccaggaatgagtatctaatagcttttgtagaaccttccagaatatgtggggaaaaagggctattgctaagtgagctttatctaatatcctcctaagagttttactagtgcttttttgaggaattacagggaagctcctggaattgtacatggatatctttatccctagggggaaatcaaggagctgggcacccctaattctttatggaagtgtttaaaactattttaattttattacaagtattactagagtagtggttctactctaagatttcaaaagtgcatttaaaatcatacatgttcccgcctgcaaatatattgttattttggtggagaaaaaaatagtatattctacataaaaaattaaagatattaactaagagaaatgtcctactttattatcttaatgttcagacatcatgagatttattatttttttgaaaaatatattgaaccattgaggaacctttatgatgtatcacagaaatcttcatagattctaactagatggaaaaagagctctatttatttgtgttcctaggcttaatgagaattctgggcttagaacatcaacgattaatacccagaattctttgttttgagaatattatggagaatgctctaaaaatctagggtaaagatctaaattcaaattttaaatatatatttatatttaagaaataggaaaggcaaagttgaactcacaatttgacatttatttttagtgttatttatttcataacttataaaatatttaatatatacatacacactcttcttttttctctgtacaaagtggttttaatatcagctttcaaaactgatcttataaaatgtaaatctaaattgtaaaatagttaagttttaacagtccctcccaaactttgtgttgattattcacttgctaaagagatgtgaggaatcagccttcagttttttggcagtagtatattttggaagtgaagaaattggaacacctgtttctaatttggtcttcatcattagagacaaaaccaaaacactccaggcagtactgtttatagtgctgagccaggtagcacacagacatagtagcctaaaggctcacataattcgcatgctcaggccagggcagggtaaaaatagccttctgcttctttcaacccagtatcaggaagcactaccccagtgttattatttgttttgtcaaggtaagtctaaataaacaagaaaaacttcttcggaaggcatggcgaagggagtattttaaatgaaaatgattacagaatttgaattagcatgcatctctttgtgtgcaacagtaatccaagaatgtatatgttaccactacaaccatttgtttctaatagttttttcatgttatataacataaatgtatccacaaccttaattaagaactattcttcccccaaaatcatagtcctagtgtcaagaaacatactccagtgtttattgtaaaataacaaccacaccctcaaattgaaaaaagtgaatgtctaggactttattacaacttttcagaataatctgtaatgaaaactcatgcttaaaaatttaatggaaaagactgagccccaaattttgaatagtgattacgccttacttgaagtgctaataaaggtaggagagtacatttgttggaataacagaaatggtgatttcagcctaaaagtttctgagggtaaaggatcacatgaccttcaggaaactctctgcctcctgtaggtgctttcctatctcccccatccttccctaccccttttcccttttccttcctctctttttctctcactgtcactctgtctacacacactggcatcttttgaacactaaaagtaagcactgttttttaaaaaagtaattatttgttggatcagatacttttatcccaagtgaataccttcactgagatgtggccaatgcaatagtttcacagtaaaaacagtgcctataagaaaatagatcacatactatttttcaatgatattaagtgtattttgtaactattttcatttggtccttgtaacatgaaataatacatggaacttacctttataataaaaatggagtgccctggttcatcatagaggtgcatctagtttgcccttaatggaagtatacttgctgtgtggattgatagcaccttcttgaaatggaggagctcagctggcctcatggatgtgcaatttttgcagtcccacagggccttgcatacagaagcaccccgagctcagttgaatgtctgtttgattttttcttatttatttttttgagacacagttccactttgtctttttgtcacccaggatggagttcagtggcacaaacatggctcactgtagcctcgacctccctggctgaagggatcctcccacctcagcctcccaagtaaccgagactacaggcatntgccagcatgtccagctaatttttgtattttttgtagagacagggtttcaccatgttgcccaggctggtctcaaactcctgggctcaagcgatctgcccacctctgcctcccaaagtgctgggattaaaggcataagccaccatgtccaactgaaattcttaataattaataatttttgagcaagaggtccacactttcattttgcactgggttcccaaacaggtcctgggtaggaaggatggctgaggataaaacaggagttgctttggcctggctgaacatttgaaccaatgatcagagtttcattttatgattgtgttactctgaacagatttgctatttttttccagctacatttagagttcctcatgtatatatcacccctctttttccagtccatctaacctctccttttttttgtgcctagaatcagttctccttgccttcaaaatccctgataagtgtccatttctttttgtatcctttgatgtagaagccacaagaatggctttagcagcttattttaatcttatgaattattcattcaggattttttaaatgattcagatgctttcagtctgttaacagtatttataaaacatgtttcagtgatacaacataggtgaactaaaccaaagatgcaaatgccttggaggaaaagaaattgtattatagagaatcctgagatatatccttttgggttgtttaatttaaagcctatcacaaaacaaagagaattgtcgcactttaattccaacctcctgcagtacttcacaacccttagcataagattctgaaatttgtaataggtggtacctagtttgatgcagggttttgcagcagttgtgcgaatgcctctgcgcaacggcctttcagtcagactaaatgagaaaatccaaactgtcctatcaaaactgacccacaataactgtactctgaggcgaaacagagcaaatgtgggtttcctgttttcattgtaaaacattccaggttctcagattgaagagctacattcagctgatagttgacatctgttccctcacacgtagtggctctcaacacgggctgcactttggaatcacctgaggacctttcggaatcttcggttgaatcatcctggctgtcctggtgatgcttcttatgtgcagctaggctggagaaccactacagggctgacacctggaatgggagcttgtaacttttacaaaataatagatgtttatcatcttttgcaatttttacttttaagtctatactaaaatgagccaaagaagtcttaacaatgatgtatggcacaattggttggttgaggctatcattccatgattacaaataggtggttatgtggggtggttttgcacttgtggcaattggactgcaatttggccttaaaatgacacaattcctcgttctcagatggagaggaattgccttgaaatttgcatgtaccagactaagtgccagtatatatatgactgatattttcgtgactcatagaaggtgtccatggtatagagtttatgcctacatctctatctttattttgggcacacatgagcttttgttaattatttctttgtacttgttagaatctgtttttgaaaaaaaaaaaaacttttgctttgatttgtggtggattcaccttcttaaaataataaatttagaggatattaggaatgacattcaaaacaaatatagtgagaggtgattttttaaaaatttttgttcctggtttccaaattatgtttactttgatttgattatatgttggtatctcccaaatataggttaacttagctatttaaatggtatcttttgacatttaaaaagaattaagtacctgtcaaatctagcattgaggttgcagttgaataagataaaagcttaggatgtcaaaaaataatatagagaaatattataagattttatgattattcttgacgtttttgatgcaaaaggaaaatatgctgaatagttcttccaaaaaatattatttccctcaatattttatttgtagccatgtaatttaaagagaacagaaaataactgcaatcaaaagtatggtttaatatcaatcaaagtggcacaacagaattgataagatctttataacaatcaattggctgatattaaaatattgattttaattgatcttttcaattaaaatctttagggcctgtaactcataaaatcagcatccaccacaatatatggtcattattggtttgtaagcatagatcaccattgactcctacctggagagacatgtctatttctaaaaatccagtagtttctttgcattctcagtagtacacgttgtatatatatatatgtaacaaatttggtagttttcagtatgtgtgatgtcctttgggggttatttatcttgctggtccataggaggggtacactaccccaagaatcaagacatctgagttctagttctagttctagctctgccactgaagagccaccttacctggggcaagttagccattgtctcccagtcatgtttaccacccatgaaaggactcgtcggtttgatgtttccattaagctcaatgagtaactctaatagttactcttgaatctggattgaaaaacaccatgcatctgatgagataattcataaatgttgccccttttttaaatgatacaaccctaaaagtgactgaattgcccaagtgcttgaacatggcagaggtagttactcttattttgcagtttgtgcacttaaaaattcctacagtgattgttactttactggggaaaaaagatgaggtgaaacttcctcccaaggaattaaaatatctgtagaagccatggcttgcttttataatgtggaaatcatttgatttgctgtaattcacgcagatccctccttttgtcagggggaaatgatttgcatcatgttcttttttcataatgcttttacttcctgtttggatcagttgtatgtaaatgtacatttttgttactttggctgtgcccgttagaatttatcttccataaagtatttctcccattgagtctaatgatgtatactttgcctaggtctttccaaaattaaatttatgtaaatgtctattttatataaaatatgattaaa

SEQ ID NO: 37022 - DNA, 6914 bp, Homo sapiens
  misc_feature (3804)..(3804): n is a, c, g, or t
gagtttgcagatgcatattcaagcttagcttcgttattggctgagcaggagcggtttaaagaagctgaagaaatataccaaactggaataaagaactgtccagacagctcagatttacacaacaactatggggttttcttagttgatactggcttaccagaaaaggcagtggcccattaccagcaggccatcaaacttagccccagtcatcacgtggccatggtgaacttgggaagactctacaggtcactgggagagaacagcatggctgaagaatggtacaagcgcgccctgcaggtggcacacaaagctgagatattgtcacctttgggagcactgtattacaacactggccgatacgaagaggctttgcagatttaccaggaagctgcagcacttcagccttctcagagggagctccgcttggcactggctcaggttttggccgtgatgggtcagacaaaagaagctgaaaagatgaccaatcacattgtgtcagaggagaccggatgccttgaatgctatcgcctcttgtcagccatctatagcaagcaggagaaccacgacaaggcacttgatgctatagacaaggctctccagctgaaaccaaaggacccaaaagtcatttctgaactttttttcacaaaaggaaaccaattaagagagcagaaccttctcgacaaagcttttgagagctatagagtggctgtgcaactaaacccagaccaagcacaggcctggatgaacatgggtggcatccaacacatcaagggaaaatatgtgtctgcaagagcttattatgagagagccttacagctggttccagacagcaaactgctgaaggaaaatcttgccaaattggatcgcctagaaaaacgattacaagaagttcgagaaaaggatcaaacatagcaccaccgtctgacccaacctcataggataatgtggtgcctctgaaaggggagtgatggaagccttgctttcacatcagcaggggcacaactaatgagattttctctcattccgagttcagggtgacacattttgggacatctgctggtagcccagtgctgaaggacttgcttttccatgaagaagacgaaaacagcaaacaagggcaagaaggtctgagagggaaggagaatgacatttacacattttacagatttttgtttggtttaactccagatttctcttgatatatctctgtgcttttgagacctggagatctaattctgtttagacattttttgtcccagaaatacagaagcttgaaatgctatgaaggcagagcttctattctttatgggatgaaatatttcaaaagaggataaatcctctgtggtaagccatttggaaaatcctaccaagaattggcttatttaattttccagaaccaggaatgagtatctaatagcttttgtagaaccttccagaatatgtggggaaaaagggctattgctaagtgagctttatctaatatcctcctaagagttttactagtgcttttttgaggaattacagggaagctcctggaattgtacatggatatctttatccctagggggaaatcaaggagctgggcacccctaattctttatggaagtgtttaaaactattttaattttattacaagtattactagagtagtggttctactctaagatttcaaaagtgcatttaaaatcatacatgttcccgcctgcaaatatattgttattttggtggagaaaaaaatagtatattctacataaaaaattaaagatattaactaagagaaatgtcctactttattatcttaatgttcagacatcatgagatttattatttttttgaaaaatatattgaaccattgaggaacctttatgatgtatcacagaaatcttcatagattctaactagatggaaaaagagctctatttatttgtgttcctaggcttaatgagaattctgggcttagaacatcaacgattaatacccagaattctttgttttgagaatattatggagaatgctctaaaaatctagggtaaagatctaaattcaaattttaaatatatatttatatttaagaaataggaaaggcaaagttgaactcacaatttgacatttatttttagtgttatttatttcataacttataaaatatttaatatatacatacacactcttcttttttctctgtacaaagtggttttaatatcagctttcaaaactgatcttataaaatgtaaatctaaattgtaaaatagttaagttttaacagtccctcccaaactttgtgttgattattcacttgctaaagagatgtgaggaatcagccttcagttttttggcagtagtatattttggaagtgaagaaattggaacacctgtttctaatttggtcttcatcattagagacaaaaccaaaacactccaggcagtactgtttatagtgctgagccaggtagcacacagacatagtagcctaaaggctcacataattcgcatgctcaggccagggcagggtaaaaatagccttctgcttctttcaacccagtatcaggaagcactaccccagtgttattatttgttttgtcaaggtaagtctaaataaacaagaaaaacttcttcggaaggcatggcgaagggagtattttaaatgaaaatgattacagaatttgaattagcatgcatctctttgtgtgcaacagtaatccaagaatgtatatgttaccactacaaccatttgtttctaatagttttttcatgttatataacataaatgtatccacaaccttaattaagaactattcttcccccaaaatcatagtcctagtgtcaagaaacatactccagtgtttattgtaaaataacaaccacaccctcaaattgaaaaaagtgaatgtctaggactttattacaacttttcagaataatctgtaatgaaaactcatgcttaaaaatttaatggaaaagactgagccccaaattttgaatagtgattacgccttacttgaagtgctaataaaggtaggagagtacatttgttggaataacagaaatggtgatttcagcctaaaagtttctgagggtaaaggatcacatgaccttcaggaaactctctgcctcctgtaggtgctttcctatctcccccatccttccctaccccttttcccttttccttcctctctttttctctcactgtcactctgtctacacacactggcatcttttgaacactaaaagtaagcactgttttttaaaaaagtaattatttgttggatcagatacttttatcccaagtgaataccttcactgagatgtggccaatgcaatagtttcacagtaaaaacagtgcctataagaaaatagatcacatactatttttcaatgatattaagtgtattttgtaactattttcatttggtccttgtaacatgaaataatacatggaacttacctttataataaaaatggagtgccctggttcatcatagaggtgcatctagtttgcccttaatggaagtatacttgctgtgtggattgatagcaccttcttgaaatggaggagctcagctggcctcatggatgtgcaatttttgcagtcccacagggccttgcatacagaagcaccccgagctcagttgaatgtctgtttgattttttcttatttatttttttgagacacagttccactttgtctttttgtcacccaggatggagttcagtggcacaaacatggctcactgtagcctcgacctccctggctgaagggatcctcccacctcagcctcccaagtaaccgagactacaggcatntgccagcatgtccagctaatttttgtattttttgtagagacagggtttcaccatgttgcccaggctggtctcaaactcctgggctcaagcgatctgcccacctctgcctcccaaagtgctgggattaaaggcataagccaccatgtccaactgaaattcttaataattaataatttttgagcaagaggtccacactttcattttgcactgggttcccaaacaggtcctgggtaggaaggatggctgaggataaaacaggagttgctttggcctggctgaacatttgaaccaatgatcagagtttcattttatgattgtgttactctgaacagatttgctatttttttccagctacatttagagttcctcatgtatatatcacccctctttttccagtccatctaacctctccttttttttgtgcctagaatcagttctccttgccttcaaaatccctgataagtgtccatttctttttgtatcctttgatgtagaagccacaagaatggctttagcagcttattttaatcttatgaattattcattcaggattttttaaatgattcagatgctttcagtctgttaacagtatttataaaacatgtttcagtgatacaacataggtgaactaaaccaaagatgcaaatgccttggaggaaaagaaattgtattatagagaatcctgagatatatccttttgggttgtttaatttaaagcctatcacaaaacaaagagaattgtcgcactttaattccaacctcctgcagtacttcacaacccttagcataagattctgaaatttgtaataggtggtacctagtttgatgcagggttttgcagcagttgtgcgaatgcctctgcgcaacggcctttcagtcagactaaatgagaaaatccaaactgtcctatcaaaactgacccacaataactgtactctgaggcgaaacagagcaaatgtgggtttcctgttttcattgtaaaacattccaggttctcagattgaagagctacattcagctgatagttgacatctgttccctcacacgtagtggctctcaacacgggctgcactttggaatcacctgaggacctttcggaatcttcggttgaatcatcctggctgtcctggtgatgcttcttatgtgcagctaggctggagaaccactacagggctgacacctggaatgggagcttgtaacttttacaaaataatagatgtttatcatcttttgcaatttttacttttaagtctatactaaaatgagccaaagaagtcttaacaatgatgtatggcacaattggttggttgaggctatcattccatgattacaaataggtggttatgtggggtggttttgcacttgtggcaattggactgcaatttggccttaaaatgacacaattcctcgttctcagatggagaggaattgccttgaaatttgcatgtaccagactaagtgccagtatatatatgactgatattttcgtgactcatagaaggtgtccatggtatagagtttatgcctacatctctatctttattttgggcacacatgagcttttgttaattatttctttgtacttgttagaatctgtttttgaaaaaaaaaaaaacttttgctttgatttgtggtggattcaccttcttaaaataataaatttagaggatattaggaatgacattcaaaacaaatatagtgagaggtgattttttaaaaatttttgttcctggtttccaaattatgtttactttgatttgattatatgttggtatctcccaaatataggttaacttagctatttaaatggtatcttttgacatttaaaaagaattaagtacctgtcaaatctagcattgaggttgcagttgaataagataaaagcttaggatgtcaaaaaataatatagagaaatattataagattttatgattattcttgacgtttttgatgcaaaaggaaaatatgctgaatagttcttccaaaaaatattatttccctcaatattttatttgtagccatgtaatttaaagagaacagaaaataactgcaatcaaaagtatggtttaatatcaatcaaagtggcacaacagaattgataagatctttataacaatcaattggctgatattaaaatattgattttaattgatcttttcaattaaaatctttagggcctgtaactcataaaatcagcatccaccacaatatatggtcattattggtttgtaagcatagatcaccattgactcctacctggagagacatgtctatttctaaaaatccagtagtttctttgcattctcagtagtacacgttgtatatatatatatgtaacaaatttggtagttttcagtatgtgtgatgtcctttgggggttatttatcttgctggtccataggaggggtacactaccccaagaatcaagacatctgagttctagttctagttctagctctgccactgaagagccaccttacctggggcaagttagccattgtctcccagtcatgtttaccacccatgaaaggactcgtcggtttgatgtttccattaagctcaatgagtaactctaatagttactcttgaatctggattgaaaaacaccatgcatctgatgagataattcataaatgttgccccttttttaaatgatacaaccctaaaagtgactgaattgcccaagtgcttgaacatggcagaggtagttactcttattttgcagtttgtgcacttaaaaattcctacagtgattgttactttactggggaaaaaagatgaggtgaaacttcctcccaaggaattaaaatatctgtagaagccatggcttgcttttataatgtggaaatcatttgatttgctgtaattcacgcagatccctccttttgtcagggggaaatgatttgcatcatgttcttttttcataatgcttttacttcctgtttggatcagttgtatgtaaatgtacatttttgttactttggctgtgcccgttagaatttatcttccataaagtatttctcccattgagtctaatgatgtatactttgcctaggtctttccaaaattaaatttatgtaaatgtctattttatataaaatatgattaaa

SEQ ID NO: 37023 - DNA, 1867 bp, Homo sapiens
agctactttgaagaaacctatcagagtagagggccttcattctgcttctggccttactctcacttgccttgggatctttatcaagtctgttgaatatctttgcactttagtgtctatatctgtaaagtggaaaatttttgtgtgtggttttttaaatatctcttaaatcctgataaacagctaaacagtatcaaaaggcagctaaattgtataaaaaaatacctgcaaaaaccatacaaatgcttaccagaaaaggcagtggcccattaccagcaggccatcaaacttagccccagtcatcacgtggccatggtgaacttgggaagactctacaggtcactgggagagaacagcatggctgaagaatggtacaagcgcgccctgcaggtggcacacaaagctgagatattgtcacctttgggagcactgtattacaacactggccgatacgaagaggctttgcagatttaccaggaagctgcagcacttcagccttctcagagggagctccgcttggcactggctcaggttttggccgtgatgggtcagacaaaagaagctgaaaagatgaccaatcacattgtgtcagaggagaccggatgccttgaatgctatcgcctcttgtcagccatctatagcaagcaggagaaccacgacaaggcacttgatgctatagacaaggctctccagctgaaaccaaaggacccaaaagtcatttctgaactttttttcacaaaaggaaaccaattaagagagcagaaccttctcgacaaagcttttgagagctatagagtggctgtgcaactaaacccagaccaagcacaggcctggatgaacatgggtggcatccaacacatcaagggaaaatatgtgtctgcaagagcttattatgagagagccttacagctggttccagacagcaaactgctgaaggaaaatcttgccaaattggatcgcctagaaaaacgattacaagaagttcgagaaaaggatcaaacatagcaccaccgtctgacccaacctcataggataatgtggtgcctctgaaaggggagtgatggaagccttgctttcacatcagcaggggcacaactaatgagattttctctcattccgagttcagggtgacacattttgggacatctgctggtagcccagtgctgaaggacttgcttttccatgaagaagacgaaaacagcaaacaagggcaagaaggtctgagagggaaggagaatgacatttacacattttacagatttttgtttggtttaactccagatttctcttgatatatctctgtgcttttgagacctggagatctaattctgtttagacattttttgtcccagaaatacagaagcttgaaatgctatgaaggcagagcttctattctttatgggatgaaatatttcaaaagaggataaatcctctgtggtaagccatttggaaaatcctaccaagaattggcttatttaattttccagaaccaggaatgagtatctaatagcttttgtagaaccttccagaatatgtggggaaaaagggctattgctaagtgagctttatctaatatcctcctaagagttttactagtgcttttttgaggaattacagggaagctcctggaattgtacatggatatctttatccctagggggaaatcaaggagctgggcacccctaattctttatggaagtgtttaaaactattttaattttattacaagtattactagagtagtggttctactctaagatttcaaaagtgcatttaaaatcatacatgttcccgcctgcaaatatattgttattttggtggagaaaaaaatagtatattctacataaaaaattaaagatattaactaaga

SEQ ID NO: 37024 - DNA, 7044 bp, Homo sapiens
  misc_feature (3894)..(3894): n is a, c, g, or t
agctactttgaagaaacctatcagagtagagggccttcattctgcttctggccttactctcacttgccttgggatctttatcaagtctgttgaatatctttgcactttagtgtctatatctgtaaagtggaaaatttttgtgtgtggttttttaaatatctcttaaatcctgataaacagctaaacagtatcaaaaggcagctaaattgtataaaaaaatacctgcaaaaaccatacaaatgcttaccagaaaaggcagtggcccattaccagcaggccatcaaacttagccccagtcatcacgtggccatggtgaacttgggaagactctacaggtcactgggagagaacagcatggctgaagaatggtacaagcgcgccctgcaggtggcacacaaagctgagatattgtcacctttgggagcactgtattacaacactggccgatacgaagaggctttgcagatttaccaggaagctgcagcacttcagccttctcagagggagctccgcttggcactggctcaggttttggccgtgatgggtcagacaaaagaagctgaaaagatgaccaatcacattgtgtcagaggagaccggatgccttgaatgctatcgcctcttgtcagccatctatagcaagcaggagaaccacgacaaggcacttgatgctatagacaaggctctccagctgaaaccaaaggacccaaaagtcatttctgaactttttttcacaaaaggaaaccaattaagagagcagaaccttctcgacaaagcttttgagagctatagagtggctgtgcaactaaacccagaccaagcacaggcctggatgaacatgggtggcatccaacacatcaagggaaaatatgtgtctgcaagagcttattatgagagagccttacagctggttccagacagcaaactgctgaaggaaaatcttgccaaattggatcgcctagaaaaacgattacaagaagttcgagaaaaggatcaaacatagcaccaccgtctgacccaacctcataggataatgtggtgcctctgaaaggggagtgatggaagccttgctttcacatcagcaggggcacaactaatgagattttctctcattccgagttcagggtgacacattttgggacatctgctggtagcccagtgctgaaggacttgcttttccatgaagaagacgaaaacagcaaacaagggcaagaaggtctgagagggaaggagaatgacatttacacattttacagatttttgtttggtttaactccagatttctcttgatatatctctgtgcttttgagacctggagatctaattctgtttagacattttttgtcccagaaatacagaagcttgaaatgctatgaaggcagagcttctattctttatgggatgaaatatttcaaaagaggataaatcctctgtggtaagccatttggaaaatcctaccaagaattggcttatttaattttccagaaccaggaatgagtatctaatagcttttgtagaaccttccagaatatgtggggaaaaagggctattgctaagtgagctttatctaatatcctcctaagagttttactagtgcttttttgaggaattacagggaagctcctggaattgtacatggatatctttatccctagggggaaatcaaggagctgggcacccctaattctttatggaagtgtttaaaactattttaattttattacaagtattactagagtagtggttctactctaagatttcaaaagtgcatttaaaatcatacatgttcccgcctgcaaatatattgttattttggtggagaaaaaaatagtatattctacataaaaaattaaagatattaactaagagaaatgtcctactttattatcttaatgttcagacatcatgagatttattatttttttgaaaaatatattgaaccattgaggaacctttatgatgtatcacagaaatcttcatagattctaactagatggaaaaagagctctatttatttgtgttcctaggcttaatgagaattctgggcttagaacatcaacgattaatacccagaattctttgttttgagaatattatggagaatgctctaaaaatctagggtaaagatctaaattcaaattttaaatatatatttatatttaagaaataggaaaggcaaagttgaactcacaatttgacatttatttttagtgttatttatttcataacttataaaatatttaatatatacatacacactcttcttttttctctgtacaaagtggttttaatatcagctttcaaaactgatcttataaaatgtaaatctaaattgtaaaatagttaagttttaacagtccctcccaaactttgtgttgattattcacttgctaaagagatgtgaggaatcagccttcagttttttggcagtagtatattttggaagtgaagaaattggaacacctgtttctaatttggtcttcatcattagagacaaaaccaaaacactccaggcagtactgtttatagtgctgagccaggtagcacacagacatagtagcctaaaggctcacataattcgcatgctcaggccagggcagggtaaaaatagccttctgcttctttcaacccagtatcaggaagcactaccccagtgttattatttgttttgtcaaggtaagtctaaataaacaagaaaaacttcttcggaaggcatggcgaagggagtattttaaatgaaaatgattacagaatttgaattagcatgcatctctttgtgtgcaacagtaatccaagaatgtatatgttaccactacaaccatttgtttctaatagttttttcatgttatataacataaatgtatccacaaccttaattaagaactattcttcccccaaaatcatagtcctagtgtcaagaaacatactccagtgtttattgtaaaataacaaccacaccctcaaattgaaaaaagtgaatgtctaggactttattacaacttttcagaataatctgtaatgaaaactcatgcttaaaaatttaatggaaaagactgagccccaaattttgaatagtgattacgccttacttgaagtgctaataaaggtaggagagtacatttgttggaataacagaaatggtgatttcagcctaaaagtttctgagggtaaaggatcacatgaccttcaggaaactctctgcctcctgtaggtgctttcctatctcccccatccttccctaccccttttcccttttccttcctctctttttctctcactgtcactctgtctacacacactggcatcttttgaacactaaaagtaagcactgttttttaaaaaagtaattatttgttggatcagatacttttatcccaagtgaataccttcactgagatgtggccaatgcaatagtttcacagtaaaaacagtgcctataagaaaatagatcacatactatttttcaatgatattaagtgtattttgtaactattttcatttggtccttgtaacatgaaataatacatggaacttacctttataataaaaatggagtgccctggttcatcatagaggtgcatctagtttgcccttaatggaagtatacttgctgtgtggattgatagcaccttcttgaaatggaggagctcagctggcctcatggatgtgcaatttttgcagtcccacagggccttgcatacagaagcaccccgagctcagttgaatgtctgtttgattttttcttatttatttttttgagacacagttccactttgtctttttgtcacccaggatggagttcagtggcacaaacatggctcactgtagcctcgacctccctggctgaagggatcctcccacctcagcctcccaagtaaccgagactacaggcatntgccagcatgtccagctaatttttgtattttttgtagagacagggtttcaccatgttgcccaggctggtctcaaactcctgggctcaagcgatctgcccacctctgcctcccaaagtgctgggattaaaggcataagccaccatgtccaactgaaattcttaataattaataatttttgagcaagaggtccacactttcattttgcactgggttcccaaacaggtcctgggtaggaaggatggctgaggataaaacaggagttgctttggcctggctgaacatttgaaccaatgatcagagtttcattttatgattgtgttactctgaacagatttgctatttttttccagctacatttagagttcctcatgtatatatcacccctctttttccagtccatctaacctctccttttttttgtgcctagaatcagttctccttgccttcaaaatccctgataagtgtccatttctttttgtatcctttgatgtagaagccacaagaatggctttagcagcttattttaatcttatgaattattcattcaggattttttaaatgattcagatgctttcagtctgttaacagtatttataaaacatgtttcagtgatacaacataggtgaactaaaccaaagatgcaaatgccttggaggaaaagaaattgtattatagagaatcctgagatatatccttttgggttgtttaatttaaagcctatcacaaaacaaagagaattgtcgcactttaattccaacctcctgcagtacttcacaacccttagcataagattctgaaatttgtaataggtggtacctagtttgatgcagggttttgcagcagttgtgcgaatgcctctgcgcaacggcctttcagtcagactaaatgagaaaatccaaactgtcctatcaaaactgacccacaataactgtactctgaggcgaaacagagcaaatgtgggtttcctgttttcattgtaaaacattccaggttctcagattgaagagctacattcagctgatagttgacatctgttccctcacacgtagtggctctcaacacgggctgcactttggaatcacctgaggacctttcggaatcttcggttgaatcatcctggctgtcctggtgatgcttcttatgtgcagctaggctggagaaccactacagggctgacacctggaatgggagcttgtaacttttacaaaataatagatgtttatcatcttttgcaatttttacttttaagtctatactaaaatgagccaaagaagtcttaacaatgatgtatggcacaattggttggttgaggctatcattccatgattacaaataggtggttatgtggggtggttttgcacttgtggcaattggactgcaatttggccttaaaatgacacaattcctcgttctcagatggagaggaattgccttgaaatttgcatgtaccagactaagtgccagtatatatatgactgatattttcgtgactcatagaaggtgtccatggtatagagtttatgcctacatctctatctttattttgggcacacatgagcttttgttaattatttctttgtacttgttagaatctgtttttgaaaaaaaaaaaaacttttgctttgatttgtggtggattcaccttcttaaaataataaatttagaggatattaggaatgacattcaaaacaaatatagtgagaggtgattttttaaaaatttttgttcctggtttccaaattatgtttactttgatttgattatatgttggtatctcccaaatataggttaacttagctatttaaatggtatcttttgacatttaaaaagaattaagtacctgtcaaatctagcattgaggttgcagttgaataagataaaagcttaggatgtcaaaaaataatatagagaaatattataagattttatgattattcttgacgtttttgatgcaaaaggaaaatatgctgaatagttcttccaaaaaatattatttccctcaatattttatttgtagccatgtaatttaaagagaacagaaaataactgcaatcaaaagtatggtttaatatcaatcaaagtggcacaacagaattgataagatctttataacaatcaattggctgatattaaaatattgattttaattgatcttttcaattaaaatctttagggcctgtaactcataaaatcagcatccaccacaatatatggtcattattggtttgtaagcatagatcaccattgactcctacctggagagacatgtctatttctaaaaatccagtagtttctttgcattctcagtagtacacgttgtatatatatatatgtaacaaatttggtagttttcagtatgtgtgatgtcctttgggggttatttatcttgctggtccataggaggggtacactaccccaagaatcaagacatctgagttctagttctagttctagctctgccactgaagagccaccttacctggggcaagttagccattgtctcccagtcatgtttaccacccatgaaaggactcgtcggtttgatgtttccattaagctcaatgagtaactctaatagttactcttgaatctggattgaaaaacaccatgcatctgatgagataattcataaatgttgccccttttttaaatgatacaaccctaaaagtgactgaattgcccaagtgcttgaacatggcagaggtagttactcttattttgcagtttgtgcacttaaaaattcctacagtgattgttactttactggggaaaaaagatgaggtgaaacttcctcccaaggaattaaaatatctgtagaagccatggcttgcttttataatgtggaaatcatttgatttgctgtaattcacgcagatccctccttttgtcagggggaaatgatttgcatcatgttcttttttcataatgcttttacttcctgtttggatcagttgtatgtaaatgtacatttttgttactttggctgtgcccgttagaatttatcttccataaagtatttctcccattgagtctaatgatgtatactttgcctaggtctttccaaaattaaatttatgtaaatgtctattttatataaaatatgattaaaataagtatgtctggtttcaatctctcaagtacttcatggt

SEQ ID NO: 37025 - DNA, 368 bp, Homo sapiens
ttgtagagacggggtttctccatgctgcccaggctggtcttgaactcctaagctcaatctgcctgcctcggcctctcaaagtgctgagattacaggtgtgaaccactgcacctggcccggttgattctaatatacattctactcccaaatgattagtccaaagtttcactgtctaatatggtggcaccagcaacatgtatctagtgaacacttaaaatgtggtaagctcaaacccaatttagatttgtatttcaaaagatctgttttttaatggaggaaaaaagaatgacgaatatctcattaattttaaattttgagttcatgttgaaatatttttaatatactgaataaaatatgctgttaaaatt

SEQ ID NO: 37026 - DNA, 330 bp, Homo sapiens
tgggatgggagctggtcttagaggggcctctcccctccccagacaccatggccaggttgggaattgaggcatctgtcacttccatgcagctctgcgcactcgggaagcccaggacaatgctcttaggtgcccaaagcacctgcatcaagtttgagctttcactggtcaggcacctcagtgatggtcaggaagctcctgggtggaagccctgcaggtccaaaaggactgcctctaagtcatctggccggtactgtcaggtggggctgcagaaagaaatttataaggctgcacatgctgtggctcatgcctgtaatcccagcactttaggag

SEQ ID NO: 37027 - DNA, 472 bp, Homo sapiens
tcagcacactcaccgaggatttgcttacattgcaagccctatagctacagagaaactgagcgttgcagataagatgaacccacacataactagactaacaggtaaatgaggaccagcatcccaagaagcacaaatccaaacagtacccatttcctgaacacctgcacatgctgttcatgttgcctcccaatagtccccaaagctaagtgctgtcaccccatataacagagaggttaaatgactaagacctcggtaccaaaaagtggggacacaggatgaacctccaaaacatgctaactaaaagaagccaaacgtaatatgggtccatttatatgaaatgtccaaaatacataaatccagagaacagttgccaggggctggagggcaggttgggaggtggtgactgcttcatgggtgtgagattttcttgggggctgatggaagtcttttggaactaggtagaggtgcttgc

SEQ ID NO: 37028 - DNA, 353 bp, Homo sapiens
gaccaatctagactgatgctgagaatcttctgtcaagacctgggccttaaacctggccatgaagaattagagacccctgttaattcaggatctcacatggcagtaaaacatctcacccagcagcttacaccacacctccctgttacatcttttattcttagcatatgtaataacagattcttgttaggagtaggcactgaattttatcaagatatttttaggggcatctattaaagggatcatatagttttcttctttacttttgggaagttgtgattaatacaactaccttgtttattatattaatagatattctaatgctgagacattgttgcctttcagattaagatttt

SEQ ID NO: 37029 - DNA, 649 bp, Homo sapiens
agacagatgaagtgtccattttttcttttattgtgtgcatgaagtatggggattacaagcagtagtttttatgtgctttttagtttttcatatacaaagataatgttaatattagctcatttacattttgaaacttttgtaatagtggtatagatttgcactgcataattcacattctctcagtctcctgcacacagttgtgagatgactggttaagagggcactttgtttcaaagttaaatgatccagatgagtattgaacctataagcttagctttgttcattatcatgaggttctgatcaacaaagcagttcaacagagaaccatgccatgctgtcatttctgcttgaaaataagccttttagaggtagaaggtacaaacatgcatatacacatgcaccaataaaaaaaggaaattgtgtatggttattaaggtagagttgaaacaggaaataacgtgcgtttataagtggtttaaaaataattcttttaataaaattttcagaaatacttgatatacgcatggaaaattaaatgttttatgaaataaactccaatcagtagacaagttaatggcttttttaaaagcactaatgacttatttacttaggctatataaatttaggttagataaatctgaaaaaaaaa

SEQ ID NO: 37030 - DNA, 564 bp, Homo sapiens
aagcagaatacattggtagggctgggaggggaataaaatattctgcctgccagtgttgtacttggcctttgggggaataaatgactttcaattagagtacttaaatatcttttaactttaataattattattagagcctcaacagaattttacttggaaaagagtaaaaaaaaaaaagatttcttctttgttttttgactttctaatttgatcaccttgtggatttgtgagattgtccttacctctttccttttttggtctctgcttttagcttctttgtagtaagcacacttatttacagcttcatcttgtgttgggctgtgtgtatgcaggtccactgttgttgacttgctgctgagcgtccagctaagtctgtgatctaagcctgtcaccagtcccacttctgggccctcccagccaaagccactagttcccatttgctacctggttctgctactgggaggctcccttccctaaattcagtcacggttctattttgttttctttcctctacttgatagctcttactgtttgtgttgttatcagtgttgaagaacaaatcca

SEQ ID NO: 37031 - DNA, 434 bp, Homo sapiens
tattatctatgaaaagtttatgaaccaaattagagtacaaataaagttatgtaacaaatttacctatttaagattaccatttgtttttaaggcctttagtacattgtgtgtgaatagctcctgctaattatacaatatttatgaaacctaaaattatctgaagttggaagcactttgttagcaactaattatatctacttgaaagaaagcatgtatgtatattttgtaaatacctcttaaattttttactgattcaagtaaggtttattacagttagtcaaaagtaacagggctactgtataccttataagaaagtatgtcgtggaggttggaacagaattatgcactgtattatagtttcttcgtgtgcatgtattgcattgttgtcctttgaatatagtatttggagtcagcttaaatcaaggatttgtttg

SEQ ID NO: 37032 - DNA, 515 bp, Homo sapiens
ctatcctgttttggaaggcttttcagatattcgaaaggacttgggtattgttgtctaagctgtatctgcactgggagcactgcaagcccagtaatgctgagattcttgcagagtcatagaggtactgccttgttggtcaattggtgagtctgattccaggctatgctcttagccagtatattacctgttgatctataagcaggataaagaaagtctgaaatggtagcaaagggaaaatttatttttactgaataagtcaaaaaaataataagtcaggaagccaaaaagaaactgctaaataccccccaccccaaacaaagaaaagcgctacaaatctataataaatattcacagagagataagagaataaacataaaagaaccaaatagtataaaaaaaggaacagtcagaggaaaggaaagttacaataactaaagtgaaatattcacaatttcggaagatagagtcaaggacatttctcaggaaatagaactaagcgacagagtaggaaaaaa

SEQ ID NO: 37033 - DNA, 267 bp, Homo sapiens
tcctcttctataaatagggttatttctgctaacctctgagagttgggaagaagctaaaatatgctaatatatgtaaggtgtctaacattggcccttaaatggttagtgcttcataaatgttaaatggttagtgcttcataaatgttaaattgttagtgcttcataaatgtttgcatcctttcaaaggctcttattgccccttggataaattctgcactgggaactacatttttctgcaatgtgtttcccaccaatctttgtttcttt

SEQ ID NO: 37034 - DNA, 463 bp, Homo sapiens
cacatcacaatggcagcacatcacaccacatgggagaaagaaaataactgaggaaacaatgactgacagtcctctttaattgagggaaaacataaatgtgcagatttagaaagcacaagaaattttaagcaactaaacacatccttgtaaaagtgaagattgccaaaagaaatcaaaagatcttaagagcagtcagggaaacaccagctacctgcaaattgactgccagttgatgtctcataagcaaaaatggaaaccaaagtatggtgaaataatatcttcaaagtgaagtaagagaaaataattatatatttactaagttattattcaagaagtgattcgaaataaaagcatttccagataagcaaagcagagcttatcgccaacagtctcttgactaaaggaacttctaaagcactaattcttaaccttgcttccacacacattggattcaacaagggag

SEQ ID NO: 37035 - DNA, 364 bp, Homo sapiens
ctacttacattgttttaaaatgcacattttcttttctaggaagagggagcaggcaggaatgttatacactttatccatgatgagtgtagcagcaggtgaaaccctgaggtgttggccacagaagtgcttatatatatatatctcatatatatatgagatatatatatttgagacagagtctggctgtgtcacccaggctggagtgcagtggcacgatcttggctcactgcaacctccgctcccaggtcccagtgattctcatgccccagcctcctgagtacttgggattacaggcatgcgtgaccacgcccagctaattttttgtatttttagtagagatggggtttcgctatgttgcccaggc

SEQ ID NO: 37036 - DNA, 1117 bp, Homo sapiens
acttctcaggccttttgctagtaaggaagtagctactgtctctttgggtcaaactagtctaggaccttgttcagtccatatcctagaaaggttggctacagatttgattctgtgcttcctagtagcaaaagcaaaaaagggaaataggatccgtttcaaattgccaaacatttagaattggaaactaatcagttatttaaggagaagcagatttttttcctggtactggaccccatgcaaaatttctttcataatttctttttttttttttttgagacggagtttcgctcttgttccccaggctggagtgcagtgacgcgatctcagctcactgcaacctctgcctcctgggttcaagcaattctcctgcctcagcctcccgagtagctgggattacaggcacatgccaccacacccagctaatttttgtatttttagtagagatggggtttcatcatattggtcaggttggtctggagctcctgacctcaggtgatctgcctgccttggccacccaaagtgctgggaattacaagtgtgagccaccgtgcccggcctcataatttctagtaagaagatgctagtgatatgataggcattgccctcaacgacatgataaaaaattatatttcatgttttaccatagccctttatgcataacccatccacagcactcatcagatgttatcataattattggtttactatgtaattctcttgttagactcagaatttcttgaaaatgatgaacaggatttgtatgctcagcccatagtacatattcagttaatatatttttgaattgaaacactgttttatctgcttattcaaaaggggaaaatttaatttattaacacttactgagtacttgctactctttactctgaaataaaaagagggatgaatcaaaagtccctgtccttgaggaaggtatgatttactgggaataaacatgtattaatagttatattgtactctagctggataattgctacatgatagaagtgtgaacattcttttgtgaaatgacttatagattgcttaaactacactctcattacagccagcttcaccttttagaatttggggtttggatctttaagccaagagaggcggg

SEQ ID NO: 37037 - DNA, 314 bp, Homo sapiens
acttctcaggccttttgctagtaaggaagtagctactgtctctttgggtcaaactagtctaggaccttgttcagtccatatcctagaaaggttggctacagatttgattctgtgcttcctagtagcaaaagcaaaaaagggaaataggatccgtttcaaattgccaaacatttagaatttttttcttctaatttcctcatttatctagtaaatctcttggtatctctcacatcttttggtaagcttcttgcatgcctttttgaaatgaaataagcaataaacaaataaataagatacataacaggttctgtgga

SEQ ID NO: 37038 - DNA, 433 bp, Homo sapiens
cgtgaggctgaagcgagtttatcactgggaacaagcttctagagcacagcatgttagaatttttgaaggagccccctccccgaaagtgatacgtaatcggggttttaaaaaatttgaattaggctgggcgcggtggctcacaactgtgatcccagcactctgagaggccgaggcgggcggatcacctgaggtcgggagttcgagaccagactgaccaacatggagaaaccgcgtcgctgcaaaaatacaaaaaaaattagccgggcgtggtggcacatgcctgtaatcccagctactcgggaggctgaggttaggagaatcgcttgaatctgggaggtggaggttgcggtgagccgagatcatgccattgcactccagcctgggcaacaagagtgaaaccccgtctcaaaataaataaatttgaatgtatata

SEQ ID NO: 37039 - DNA, 648 bp, Homo sapiens
gatcacagcttatgtatgtattcacgtgtaatctccacagtagctacgctaggtcattgcatgtacatgaaggtacgtgaaggaatggatggaattctcttacattagggaagatgctaacctcccagctgaattttggcgttagcatgacacttagcatctttcttggctgttaaaataaagcataacagggtggcaggagaggatgatataccaccactaaatacagttggatcccaaaggtgtgtacttggcctctctgtttctattggttcattgcctttttcttattcaaaaacatatttaaaattttgaagtatttaaaacaaaaaacaaatgcaagtaccacatacccattcctcatgccctcgccaaatggatctggggcaagttagaatgctgctccatttccttcaaatagttaattttcaaacaataagtaatgtgtaaaaactgtatctaaagcctctccctccatcacagagttagccacagctctgaagtcaggacggatgtctgctaagtttgcctatatttacctattttttcctatacttataggtacatgcgtgtacctgaaacaccgccaagcatccttttacattttcatgctttgaataaatgtcatcatttttccaaagtgtgtgt

SEQ ID NO: 37040 - DNA, 389 bp, Homo sapiens
tgaggacccagaggggtgggagatggaggtgtgagcagcatggtctgttgtggttttttcttgttgtggagtagagttagatcatgcatgaagctctctgggcataggtggagtagcagctgtccacaccattgctattcaaagtgtggtttgcacaccagtaatggaaaatcatctgtgcacactgtttagtttaactgatactttttttttcatagcaagattttcttaatgaaggaagtaatgtattgatttacattctgactcattgtctttatcttgtctttgatcagtttgtagactggcactggtccacactttgaataacactattcttcattctactttccatgtacccggatgccaggcaaacagggagttttacgctg

SEQ ID NO: 37041 - DNA, 1392 bp, Homo sapiens
  misc_feature (842)..(842): n is a, c, g, or t
gggaaaaagatttgatgtagtttttatatagagagattaagaaagaaaactgagatggtaaatattcgaagagacctggggtcaggaggataagaggctagagaattcttctaaacattcaaatatggttaccatttagagtgtactgcatattcagatagtttcaactatcatgttaaaagctctctggatgtattttttccctataacattaaagcttgtcaaactttttcactctttctgtttcttccaggaacaggacacactggcacatccttttcccaccaaaccacagaaaaacatttttaagtgaaggttgaagaaatggcaatttacagatgccagaagaaaggataaaaatcaaggcaagataagaaaaaaggaggctgatgttctgctggtccacttggtttactggcttctctgtctgattgtgcctaactctgacactgtgccttccctctagacactgtagatgatgtttagtcctagctcaatcagtctctccctttgcacatttccgttacaaccctgctcatgtgctcaagatattgctcctgctactctcccctctcttctgcatcaacagttctttctcatctactggacaattcgcatcagcctactatcatacacaaatacccccacctttaaaaacccctcccttggtcccacactagtcttcagattccatcccattttttgctccccttgacagcaaaaacctccaaagagtatctgtactcagtgtattttctcttcacccatcagcaaaatttgacttagttaccatctcctcctggaaacagcttcttcacctggcatccaagtggacctcgtcntacatcatacctacctcatcaagaacttctgctttgctgattcttcatccccttgatatccaaacatagcaatgtcccaaggctcagttctcaggtccaccaagcactctcccacttcacagcccttgtatttgcagccctttctgcctgtaagctctctcaaccctcttatcctcctgaccccaggtctcttcaaatatttaccatctcagttttctttcttaatctctctatataaaaaactacatcaaaatctttttcccttatcttgctttattttttctccatagcatttagcaccagctgatatattaccatgtttatttgtttgctgtttgtcctactagaatgctagttttttgaaggcaagggctctgtctgcttggttcctgctgttggccacttcgtaacccagattctggcacataacagacccttgctacatatttgttgaatagctgaactcttagacacaatatcctaagactttgatagagatcttacttctgatagattgggtaggtatgatgaaggacgggggtcctctaga

SEQ ID NO: 37042 - DNA, 1519 bp, Homo sapiens
  misc_feature (842)..(842): n is a, c, g, or t
gggaaaaagatttgatgtagtttttatatagagagattaagaaagaaaactgagatggtaaatattcgaagagacctggggtcaggaggataagaggctagagaattcttctaaacattcaaatatggttaccatttagagtgtactgcatattcagatagtttcaactatcatgttaaaagctctctggatgtattttttccctataacattaaagcttgtcaaactttttcactctttctgtttcttccaggaacaggacacactggcacatccttttcccaccaaaccacagaaaaacatttttaagtgaaggttgaagaaatggcaatttacagatgccagaagaaaggataaaaatcaaggcaagataagaaaaaaggaggctgatgttctgctggtccacttggtttactggcttctctgtctgattgtgcctaactctgacactgtgccttccctctagacactgtagatgatgtttagtcctagctcaatcagtctctccctttgcacatttccgttacaaccctgctcatgtgctcaagatattgctcctgctactctcccctctcttctgcatcaacagttctttctcatctactggacaattcgcatcagcctactatcatacacaaatacccccacctttaaaaacccctcccttggtcccacactagtcttcagattccatcccattttttgctccccttgacagcaaaaacctccaaagagtatctgtactcagtgtattttctcttcacccatcagcaaaatttgacttagttaccatctcctcctggaaacagcttcttcacctggcatccaagtggacctcgtcntacatcatacctacctcatcaagaacttctgctttgctgattcttcatccccttgatatccaaacatagcaatgtcccaaggctcagttctcaggtccaccaagcactctcccacttcacagcccttgtatttgcagccctttctgcctgtaagctctctcaaccctcttatcctcctgaccccaggtctcttcaaatatttaccatctcagttttctttcttaatctctctatataaaaaactacatcaaaatctttttcccttatcttgctttattttttctccatagcatttagcaccagctgatatattaccatgtttatttgtttgctgtttgtcctactagaatgctagttttttgaaggcaagggctctgtctgcttggttcctgctgttggccacttcgtaacccagattctggcacataacagacccttgctacatatttgttgaatagctgaactcttagacacaatatcctaagactttgatagagatcttacttctgatagattgttctttcctgcaacaatactgattcctatataaatctggggaaggaagaaaaggtgactgatcactttttacctctcatcttttgccaaggtaaggttttttgtggttgttaaatctgaatataattaaattaaaaactttggatacccgaggcagctaa

SEQ ID NO: 37043 - DNA, 185 bp, Homo sapiens
gtttatttgttagactaaaaagatgggcatattaaatccacatgcacaggcttataaagaacacacaatgaaataaatacagaaaactcaaatactgttaaccaataactacactcacatggatatttttacttatgtaaaatctcaatcagaagttgaacaaaatataaataggtaagtataaa

SEQ ID NO: 37044 - DNA, 240 bp, Homo sapiens
ggttttcaagtttttttcttccaaatgggtttaggttacaaaaaagattctgttgatattacttctagaatttctttattcttataagttcatttgggatcagttggcatcatttcagtagtctttgcagtctggaataacttctcatttttttcaacattcctttttatgttcttcagtaaagttttaaatgtgtttattttttattttaaaatgagatgggaagccattggagttggt

SEQ ID NO: 37045 - DNA, 703 bp, Homo sapiens
ctgcaatgttttaagacaaatccaaagtatcctattatttcacccacaaataatttagtacccacacttgttttatattgaagcactgtatgtttttaaaagaagcagtagctgaaagcccagagggctctggaagtggatagagtagggactttggtactagtgcttttggtttcctttaagttttgtggctttgagatgcccaaggactagaccttattccttaaattaaagcagggttttcatttcttaggcagtcagcttgctctttaaaactgaaatttttattttgggtaaaaaggactttgccatttgaatgtctgtaataggtagccacagaaccattattataatcaatgtaaattctaactctgagagataaataagtactagagaaaaatagactaacctactaggagagatatgaaaagacataaaacagaattaacaatgtagtactacatagagtgcctcaaattagcaatacaaaaaataggtgtgctcaatgacagcaagccaactatataaattggaaattgggatatgtaattcaggaaaagatttgttttctaatgtgcaacttattacaatcagtgatggatgcaccaagcttaattgtggtaattacttcactttatatgtacataaaattgtcacattgtacagcttaaacttatacatttttttgtcaattgtaactcaa

SEQ ID NO: 37046 - DNA, 2957 bp, Homo sapiens
  misc_feature (764)..(764): n is a, c, g, or t
  misc_feature (1001)..(1001): n is a, c, g, or t
  misc_feature (1902)..(1902): n is a, c, g, or t
  misc_feature (1964)..(1964): n is a, c, g, or t
agtctgtgagctgggagcctgttggcaggtccctctttttattttcgctgagagctttcttttactaaatgccaccatccttacctttcaaggtgtctgcgtgcctaatttttcctggttgttagacaagaacccggattttagttgaactctggagcaaaaatcctgcatcatttgtaggtaatgtttgttttctttggttgcttttatgaccttctctttattcctagtatttgggcatttcacaaaaacatttataaatctgaattaaaaaacaaactgaccttgccaaggaccctactgatcccttttcatataattctatctgctaggtcttgtgctgccttctaagttagttcatcagttctatacttcagtatttaattctatattcagccatgttatcaaatgtttatttcaacctttgagtttctcatttgtaatagtattttttcatttttatgtttttaaaagagttcttttcatattttactatttttgtttagtaactttcagtacttgttgcgtagattttatttcatctttatgtttttgagatgtttgcataacacatttaaagacaattacatattgttgtatgatttccatttccttggtcaagaattctcccatttgttgcatctctgaagagtttcccaaggtgggttaatcttgaatatggtaaacttgctgccctcagttttttagttttaatactttatcagttgtttcttgttctttttttttctgggcatattattacntcatttgaaaataatgacaattttggcctttctcttcgagattttgtaactcattttcttttcttttcacatagaatttgataaggcctccagtactttgtgatatagtagttgtggggatggtccttcttgtcttactgctgatctcaagtttatgtttgtagcaaatttttgctacatgaccattacaagtttaagaggttaccaagagtttttattacaaataccttaaatctnagcaaagactataaaaactgagataaacatgtttttcttctaaatagtaatcatttagacaaatcacaaatgtgatatcagattagtgcatcctacactgtatggaaactataaattcatgattttcaaaaattgtaggtaaatatttatttttcaaaataatttatccatcttgctttaccaaaaaaggcaaggtcttgtttttctttccctatacagtagtaatggctctttggtgtaaaaactttataggacctaaagtaaaaaagaagataaaaaccagtttgtctttcaaagtcttaaaatatttcattaacctcgtagtgcctgatctctgtcaccaagcaaatagtctgaactattatttccaagctcaattcaaacaggtaaagttttactacaattatatctggccatcactacagtgttttctccaatcacttccaaagcctaccccttttctttatcatacttccacctacattgcataatacagagcttagctagtgaggtacaagtgataaggattatctccccagagtctccgggccttggtaattcctagaccacagcaccatgcattaggttatagtcacaggcctctatatagtcttccacatatcccattacattttaaatcctatgcataccctttatatcctgcacttatctgtcaaaattctaaggtataagattttttttttacttatccctgctgtttaattttgaagaaagaaaaatataaaagaaaattttttaaaaagaggccttcatggatatcaaagaatgccaacaataatgctgaagaaagaagttattctacagcaatgagacacaaagaaaagaattttgtaaacattagcatcttggttactggagaactataacttttatgtagtcntgcttggaaaacactaaaagggaaatcgagtctgtttgacaatattctgtcttcactgttgntcacttcataatgtgttggaatataaagttctatacagttaatatgaagctctctttagcatttaaaacatgatttgcattttcatgaggcattttggctaattttattgatttccttatatttcatagtccttagccttatgagaatcttatgtttctgtgtgttttctatcatgtagcacaatttctgacacacaaaacatacaataaacttgtgttaatttttctatcaaagtcagaatttattcataaggaatctgaagtaaggtgtactaagcttgtttatgggttaagtgatatagccaaattcaaaactttactttttatgtcagtctagaaatatctcagattaaaacatatcacttcttagttccaattagataagggaaatcttttataataatgccaggattgctataatctgataggagacaacaatttcattttgctacaggaaaatttggaggacaaaaaaaaaaaaagaaaacataagatagaggagagaaaatagtcagatgaagaagcaaaaaacacaaacaaggcatttagatttgttaggaaggaattcaagtcagtcagtaaagtgataacttttgaattatctgagaaaaatatactcagaacaaaatcaggcacactaaaggtatccataatccacattatttactaggctaaaggtaagtacaaacaaatctacatggactaattgtatcacagaacaaaaagggtagcaaaatccagtaattccaatggagtaataaagttgcagacaaaggaaaattaacgtgtgcattgcttgagatatgactaaaatgtcattaaaataaattctaagttatgaatattcatttgaaaagttacaaagtacacactgatttatatttcagaagcaaggatatatgtttctatataatttagtcctaaatatagttcatttcctatgctaatgcttttttccttcttcttaccttcttaggtcaacaacaagaggcc

SEQ ID NO: 37047 - DNA, 1848 bp, Homo sapiens
agtctgtgagctgggagcctgttggcaggtccctctttttattttcgctgagagctttcttttactaaatgccaccatccttacctttcaaggtgtctgcgtgcctaatttttcctggttgttagacaagaacccggattttagttgaactctggagcaaaaatcctgcatcatttgtaggtgggtgtcattgtgactggctgctacctccccatgagtcttctaaaataaaacctgcaaattcacatcttccccatgcttccagagaatgcatattcttcctttgaaaaaagaaaaccagcactgttcataatagccaagatttggaagccacctaagtgtccatcaacagatgaatggagaaactgtggtacatatacacaacggagtgctattcagccataaaaaagaatgatactctgtcatctgcaacaacatgaatggaactggagatcattatgttgttaaataagccagacacagaaagacaaacatcacatattttcacttattttggggatataaaagtcaaaacaaactcatggagatagagaacagatagacggttaccagaggctaggaggaggagtggtggggggcagttagtgatggttaattggtacaaaaaaatggttagaaataataaataagacctagtattagataggacaacaggaggactatagtcaaaaataatttatttgtacatttcaaagtaactaaaagagtgtaattgtattatttgtagcacataggataaatgcttgaggtgacggataccccatttaccctgatgtgattattacacatcgtatgcctgtaccaaaagatctcatgtacctcataaatacatacacctactatatacccacacaaattaaaaattaaaaaaatttaaagaaattacagtttgttggttttgaatatttgaccaaattttttactaagcacagatagattgaatataattttattgtccttttgacattatgataatgaaggtatctacacagaagtctgagatgagaaaaaaatgatataatatccacctactacatagtgggtagtttatatactaaagttattgttatgagaaagaatggcttaggaatattatttaaaattaattaaggggtgttaaaaataaaataccaagtgtaaaaatgacaaaggcaagaagaaacagtatataatgtgagtaaatcttaatctttccaagagaggagacagtacataatgtctaaaattgttaaaccatgaaatagaaatatagttattttattcataattaaggagataactactatagcacgaaatcgtgccaaaaatggttgcctctgggaaatgtgattatagatattataatattttggactgtaaaaatctgcttttaagactgaggaaatacaaataggacaatatttatttgaaatttgtatcctcagggagtgtaaagaaattaatgtatccacaaaataataatagctgctatttgaaaacatagttttcttgaaagttaaaatagtaatagtcttctaaaaattttgttagttttggttttctctttaatctgagttatgtagaaaagtgcttatttcaaattaggtaggcttgttttattcctttttctgtcttttttctatcaactagtgttttattgtgttcagaaaatgccatgcattaaaagactacttttgagaatttctagagattttctttgttactaaagagatttttgtaattgttacatgggattttaaaaagaatgtaaattatcctttttgtcaagtataatgatttctgaaacctagctgtgtcagaatactgtataatactgtaatagtatgt

SEQ ID NO: 37048 - DNA, 652 bp, Homo sapiens
  misc_feature (395)..(395): n is a, c, g, or t
  misc_feature (614)..(614): n is a, c, g, or t
  misc_feature (640)..(640): n is a, c, g, or t
  misc_feature (642)..(642): n is a, c, g, or t
agtctgtgagctgggagcctgttggcaggtccctctttttattttcgctgagagctttcttttactaaatgccaccatccttacctttcaaggtgtctgcgtgcctaatttttcctggttgttagacaagaacccggattttagttgaactctggagcaaaaatcctgcatcatttgtaggtgggtgtcattgtgactggctgctacctccccatgagtcttctaaaataaaacctgcaaattcacatcttccccatgcttccagagaatgcatattcttcctttgaaaaaagaaaaccaggtagtcgtacagtgtccagaaggcaaaaggacaagtatgcactgccctacttacctactttccacactgctgcacaggaaaatctgacagaggncaataacaaacatctcaccagctcatgcgttcttttttgatcctaattccgagagactcaccaaagacatgaagagaaaacaaacaatacttttcttggaaatattgtaattgctggtacatttgttgttctggcataaagtagaaattgtcaggtaaacattgcttccttttggatcaaaaagaaatttaaccaaataaatgcaagaggtatgaggcnagataatgggaaataaatgagatttnanaaatcaaaaa

SEQ ID NO: 37049 - DNA, 552 bp, Homo sapiens
agtctgtgagctgggagcctgttggcaggtccctctttttattttcgctgagagctttcttttactaaatgccaccatccttacctttcaaggtgtctgcgtgcctaatttttcctggttgttagacaagaacccggattttagttgaactctggagcaaaaatcctgcatcatttgtaggtgtctgagtagatttggaaatgcccattcagccctcagagctcctctgctttaagggtgatggacttcctgtaccactacgtagtgcatgagtgccagccactggtatctagaactgtgattagtgaggaaacactaggaggaacaaacaacccaactctttttatctaatctgttgactccaaagggaccttctgcttattccagttaaaactcaagctgcaattcaaaatgaaatcagtatcttttttctctacttttcagcaaagcaagatgctaccttataattaccacgtaacaatcaatcgcatagtggttcaacttctctttagctacatattgcctggcagctgctgacttacttgtgttttt

SEQ ID NO: 37050 - DNA, 446 bp, Homo sapiens
acatctgacttctcaatagatatgatggaagccagaattcagttgaattacatctttaaataaatggctgttaaggaaataattgttcacctagaattctattcccagaaaaactatccttcaaatgtaaaggaaaaagacattcccagacaaacaaaaactgaaagaaatcagcagcagacatgcaccaaaaataaaatgaaacaaaacaaaaataaaaagctagatacagaagaaaattattctagcaaaagaaaaacacttcccacaaaagaaaataattcaagagataaacatggaaatgtagaaaggaatgaagatgaatggggaaatatgtgaataaatatagaatactttttaggatttaaaaaacatataaatataaagcaaatactaggctagttatgaaaataatacaactatcgtaatgttagttgtgagctaaa

SEQ ID NO: 37051 - DNA, 307 bp, Homo sapiens
taaacttatagattcctttgcctatgcttttgctccagaagcaaggccagggcccctgtgaattacggggatcagtgggagcccatggctgtctacctacttgttcacctgcttttagttatctggagacattgtgcctcctgaactgtacacatatgaaaaaatgtcaaggtcatcaatatttacctcttatgaacccaaaggtcccattaaaaaggtatcagttatttgtgggaatgttttagtcacctgacatgatgggagaggaggaagagcttggaactattaacattttattgtaatctct

SEQ ID NO: 37052 - DNA, 482 bp, Homo sapiens
cagcaggagggatgagttgggtttctgtaactacaagggccaagaagagggagaggatgatctgggaaggagagtggctttgggccagcatttgggccagcaggactcagaggcgagggaggtggtaagatcccttgcttgggatgagaggcagatggggaaactgaggcttggagcagagggaggggcagggcctgggcccccagcaggtcccagttcatgatggcatgctgcttctgcatgagtgagacatgagggggtcacagacgcccggaagcatcggcatcatcagatcatccgactcgataatagaaaaattaaaatttaaagtcactgaaagtgacgagtgacagaaatgttcctagaaactggagattgggtgctcagcggatctcaggatagatgatatcagacacaatgtcccctgggctgaggtttttttttgttttttgtttttttatgtttcagaattctaaggcaag

SEQ ID NO: 37053 - DNA, 373 bp, Homo sapiens
tctataaaaaaaaaaaaaaaaaagaatagtgtgtgtgtgcacacatgcttgctcacctgcatacacatgcacttgcacttattgtatgtaccgagcatgtggtaactgtggttgtcactgaggagagcaactgaattgcataggggcaggagtgacaggaaaacttacttttaaactttatattattttgtagcttgtgaatttaaagccatgtacatgtatcacctattcaaaaaataagttgaattaaaaaaactgaaaattggggaaatgataattttcactgtgaaaaattaaattattgcttgaaacagatctgaatcattcttcaatcacagatgaatgtgcactgccctgaaaaatgtacacattc

SEQ ID NO: 37054 - DNA, 323 bp, Homo sapiens
tggttagtattactttggctatgtaggcacttttttgatccatattaattttagggttttttttctagttctgtgaagaatactggtggtattttcatggaaattgcattaaatctgtcatgaagttgttcatttgaatttttttatgtagacacttttagttataaacttttagtactgcttttactgtaaatcctaagtatttccattgtgacatattacagaaatatttcaatttatttattaatatccccattgacccactggcctttcaggagcatattgtttaaattctatgtgtttgtatagtttcaaaaatttgt

SEQ ID NO: 37055 - DNA, 660 bp, Homo sapiens
cagaacccagaagttttaaaatgacttctttggataaaatggataggtcaatgccttcagaaatggaatccagtagaaatgatgccaaagatgatcttggtaatttaaatgtgcctgattcatctctccctgctgaaaatgaagcaactggccctggccttattcctccacctcttgctccaatcagcggtccattgtttccagtggatacaaggggcccgttcatgagaagaggacctcctttccccccacctcctccaggaaccatgtttggagcttctcgaggttattttccaccaagggatttcccaggtccaccacatgctccatttgcaatgagaaacatctatccaccgaggggtttacctccttaccttcatccgagacctggattttaccccaaccccacattctgaaggtagaagcgagttcccttcaggattgattccgccttcaaaggagcctgctactggacatccagaaccacagcaagaaacctgacaatattgttgctttcttcaaaagtaattttgactgatctcattttcagtttaagtaactgctgttacttaagtgattgcacttttctcaaattgaagtttaatggaataatagttctcaggatagtatttcgtaaataaagatggtttgaatatgaat

SEQ ID NO: 37056 - DNA, 342 bp, Homo sapiens
caggtgagtccaaacacactttccaaggaacagaaaatccctatattactttagttgtatcagaaaataaaagataagaaaaagttgcccaactcatttcattctaaaagtggattgaataggtataataaataaaagtaaattatagaccaatgtttaagacataggtacaaaaatcccagactttatattatttaaaagtaattacagcaatatgtataggaattaatacatcattatcaagttcaatttattccaggtatgtaaatatacttcaactttggtacaagtttggtacaacttcagacacattatctttcaggtaatttgctaatgttacta

SEQ ID NO: 37057 - DNA, 351 bp, Homo sapiens
ttttgttcctagtatgccacccagaaaccaaccccaagggccatacgtgattccctataaactccactccctgcagaaaggtgattttgccattctccccagtgtccacagcacctccagacctctgtggtcttcctgcttgtcttgtcattgaaataggcatctcagttgacatagtgccagtgcactgcctccctccctccctctctcctaaagatcttccaaatgcaatctcctctgcaattctctggaagaaggacacaatttttatgaaaagtgggcaacagacctaacaaaagacaggcatcattttatttttaaggcatcatgtggatttatctgatttgaaag

SEQ ID NO: 37058 - DNA, 213 bp, Homo sapiens
acccccaggtgctgtgctggcaggtggggcccacactctgggacttgcctctttagcctctgcacacaatctccagcagggcaaagaggacccagccttaggtgggcaccagtttttcagggcactcttgcttgagccacaaaagttttccctgagaaaggtgacattcagagaattacttcatctttaactttccaaactatttctaccata

SEQ ID NO: 37059 - DNA, 362 bp, Homo sapiens
agtcagcaataggtagatagatggatgaaggggttaggtagaatagatgggagtatgtagctttattagcatctttgcataatttattgcttgggctatgtggggtacctgcttggggactcttcttggaaactatcaaagagcaacatgaatccctcggtcatagctgggaagcttaggaattgtgactgtgcccagaacctgggtttcccattcttataatcctcttataaacacactcactcaactttggctggcattgttttcttgcctccctgcatgccctgaaagatgcttggagttttcagtgggttggggtggcagctcctctggtctggagcaccctcttgcgccacaggtcc

SEQ ID NO: 37060 - DNA, 406 bp, Homo sapiens
ggacccagaaggccccctgggacccaggcccccaagcctctgtaagaggccttgagcctcttcctcttaaaagataaaacactagccatgcgaggatttcctgagatgcctggacatcggtcctcactaagagtcagacagttctcgatccatcttcccatgggaccagggcacagccatgggtgttggtttcaaggagtttctcaggagtgtgaaggggagcacggaccagcacaaaaacagaattctgagtctgaaataaaggattagaaaccccttcttggccattaaaacctaaataactagaagatttgtttcctactttcttttaaaacaaaactaggcattgttgtgttgttgtttgttctttttgtttttgtttgtttgtttgtttttgagacagagt

SEQ ID NO: 37061 - DNA, 586 bp, Homo sapiens
acttaaaaactgctgccaaaaactgatttcttttcaatttcttttttaaaacaattttttaatgttatatttttattgcttttcatagagatggggtctctccccatgttgcccaggctggtgttaaactcctgggctcaaataatcctcccacctaggcctcccaaagttctaggattacagatatgagccaccgtgcctgtccctctcttcagtttcttatgaatgaatgagccttcatatagtgaacacattaataataggttcagccaggttctgcttatatcttttgcttaaagacacaagctgtaaactgtaggatttggaaaactttatagcaaagcggatggtggaccatagcatagtttcatttttatttacaaaacagacgaaatttatgggattttatacccagaagtagttggaaaggatagcaataatttattttcaacaaatatttattaatctctttctctgggctggatattgctccagagctgagaatacaactctggtcaaaaagagcttctgccttccagttggcagaaacagacacccataataaaatatcatattaaaaaaaaaa

SEQ ID NO: 37062 - DNA, 462 bp, Homo sapiens
ggcatcatcaacttgtgctatcaaatatatttgagtggtaaaaatatcttgtaatatactaagacaatgaaaatattcatttttgaaaactgatacatggcaaacaaattaaatgttgaatatgtttggtatttatattcagtaaaattttatttgggtgctttaaatatgtgtcaaggccaagcgcagtggctcctgcctgtaatcccagcactttgggaggccaaggcaggcagagcacttgaggccaggagttcaagaccaacctggccaacatgacgaaacccatctctactaaaaatacaaaaattagccaggcatggtgacacacacctgtattcccagctacttgggaggctgaggcaggagagttgcttgaacgtgggaggaggaggtcgcagtgagccaagatcttgctactgcactccagcctgggtggtagagtaagactccatctcaaaa

SEQ ID NO: 37063 - DNA, 358 bp, Homo sapiens
ccaaatgtcaagataacgacctaataatactcactggggatataaatagtgtggtctgggccacatagatccatttaccaccagtttaggaatttaccatcagtttaagaatttaccagttctttctccttaaggggcatctttggacagccttgaattggaagaaatggctgtctggagtctagcccaaagggccaggttggaggaagcagagaaggtggttattaaaatcaacaacattcgcaggagattggatcacttgctttcttcagtaaacagaaagagtagagctttggctgtgaattttttggtggttaatttttgctgtttttttctgccagcccctattgccaatctc

SEQ ID NO: 37064 - DNA, 573 bp, Homo sapiens
ccccctcttgctgcacagcacaccctctccagcatctcaggtgactttcactgctctacccattcccagaaaagctcctgtgtatcagcaaggctagcccagtatggcccaaacactcacattcaaggctcccaagtcatacaaatggtcccagggatattgactctagggccttggtggaaaatgcctactcacccacaggagtgggttgctgggatcatctgaagggcctgttattaccaagagaattctgtctcatatggattcatagtagatatggaattagcccagagtttcagacctggtcctgtcctgggtttcctgtcacctgtttaagtaccccacaggctctacacaacaggaggcctaggaaagcaccaaggtttggggtgggagcacaagtgcagggactaaagcagaagtttcccaagcccctagaggtgttcaaaagtagtcaaggtggcccatgagcccttttcaatatttcaaagaaatggtgctgaaaagaacacctttacctgtaataagcctgcctgagttaataaaaatatcactttttttttgctttaaact

SEQ ID NO: 37065 - DNA, 348 bp, Homo sapiens
ttgagatggagtcttgcttcttcacccaggctggagtgcagtagcgtgatcttggctcaccacaacctccatctcctgggttcaagcaattctcctgcctcagcctccccagtagctgggattacaggcaccaccacctatgcctggctaatttttgaatttttagtagagatggggtttcaccatgttggccaggctggtcttgaactcctgacctcaagtgatccgcctgccttggcctcccaaagtgctcgattacaggcttgagccatcacgctcagcctatgattttgttttcaatgaaaattaaacacaccagtttactcaagataaaagttttcagtcata

SEQ ID NO: 37066 - DNA, 211 bp, Homo sapiens
gagatgaagtcttgctatgttgctcaaggtggccacaaagtcctgggcttaagccatcctcccgcctcagcctcctgagtagttggaatataggtactcataaccacgtgtgggtgattattattagtttttaaacaaaaatggggctgggcgcagtagctcacgcccgtattcctaacactttgggaggctgaggcagcagatcacttga

SEQ ID NO: 37067 - DNA, 469 bp, Homo sapiens
tcctgtttgaatacccactagacatttaaagttctacaataaacccatcgaagatgcaaaaaaaagcgccctctgcaaaaacaaaaaaaccccacaatcaagcatccatcgactccccccaagtaaacaaaatggtaatatcaaaaaaacagataaagctgtcatcccacccaaaaaagcggagctgccgaccctggggtcccactaaagaagctgacacagttagctaaaaaaagcctaaaaaaacaagggtaatacaaactctagaaaatatactggttacagctttgataattgtatcaacggtggtaagtctcctcatgtctgcagaaacagctgcagctaattatacttactgggcctatgtgcctttcctgtccttaatttgggcagtcacatggataaataatcctattaaagaatatgttaataatagtgcgtgggtaccaggccccacagatgatcgttg

SEQ ID NO: 37068 - DNA, 495 bp, Homo sapiens
agaattgagctccttaaggtcctttatttgtctattttatttaatattttgccttttctccttttgaaaaaaattacaccaaacagattttaataccatactacatattaagataggaatatttgaatcaaatacccacagtatatttcttttatggatatgttttaaaaatctcttttcactgattctggggaaccaagtaaaatttgccactgtctcagtcataatagagtcaatgtggccaaccttgttcactgcctatgggaggatgtatgcagaccattattatttccaatcttgctccatggtttgcctgagcagccatcacacctaaaaggtttccaagatttgctacatatttatatatgtagttttccatatttgctacatatttatatacctttcttgaatataaaatccataacataaagtgtgttattgaactgaaagttcccaactgtcttgtggaaaggtataggtaaaatttaaagaaga

SEQ ID NO: 37069 - DNA, 133 bp, Homo sapiens
aaaagaacaaatttatgtgttgtgcatttggcgtaaaaaataaagtctatggtcataaaataattccaaaagggtatagaaaattgaagcttgtagggattttgtcaagtgacttgatcattttcattttctc

SEQ ID NO: 37070 - DNA, 361 bp, Homo sapiens
cacgatctcggctcactacaacctccacctccctggttcaagtgattctcctgcctcagcctcccgagtagctgggattataggcatgcaccaccacgtctggctaatttttgtgtttttagtagagacgaggtttcatcatgttggtcaggctagtctcgaacttctgacctcgtgatccacctgccttggcttcccaaagtgctgggattataggcgtaagccaccgcgcctggcctttcttcccttttcttttccttcctgctagtatgtgaatgtattatccctccccaggcctcatgcgctatccattggttaatttattcaagcaaatacttggtactaggatcaatataaaggc

SEQ ID NO: 37071 - DNA, 364 bp, Homo sapiens
attcatataccttctcgacgacctctgatttgttcagtacattttcagaatcactaacagtatacgggtctattaaagtgttaaatttgggtcactggctcatgtctgtaatcctggcacttcgggaggccaaagcaggagggttgcttgagaccaggagtttgagatcagcctggacaacatagccagaccccatctctataaaaattaaaaagttaaccaggcatagtggcacacgcctgtagtcccagctgttccagaggctgaagtaggaggaccacttgagcccaggtattcaaggttacagtgaactgtgattgaccggtgcactccagcctggggaacaaagtaagaccctgtctct

SEQ ID NO: 37072 - DNA, 648 bp, Homo sapiens
ggagggaattcgcaagtgccgccgacatcgcagctaaatctacaatcaaaagagttatgtggttacatctacctttcttcttcattcatatttaattacctgttggttattgagtcacgcaaatgccacaaggtcttactcatccttacaaactcaaggtcgccaagctgcacacactgggccgctgtggctgaaggtgcatagtcgcggatcataaacagagccatcttcgtgattgttaggctgagtctggatcttaaatagaagattttcctttaagtgaagtggctggaaggattggaccttctgtccggccaagatctgtttgccaaaaatgtgtcagtgcccccaggccaggctgtgcaggggaggcccttgggcccctgcaagcaggcgctgtggaggggcaggtctcggggcttcctgcttggcaccactgccggttaaccccttcagcaggctcgtgtggcccacaggcctcactctggggtgttcaccgtctgaccaggagagttttgttccgggtgaggatgcaccctttgtgtttaccgaggattataaatcagggaaatttcaaaacatgatggggctggcctccagctttctctcagaggaggctcatgttgttgattttgctttataaattat

SEQ ID NO: 37073 - DNA, 655 bp, Homo sapiens
gaatccatgagaaacaatcatagaagcatctgcttctgcttctaagacacatcaaaggtggtgagaaaaaagatgtcattgaaggagctctttccttagtgtattttatttgtaggcaggatagaagtatcctgctaaagtcataaaatagaatagtattttagaattagaaggagcttgactagtccagccccttcttgctttacagatgaggaaactgaggtcccaaaatgtggagtgatgtcacattgtgctggggatgtggagaggggtgtttgtcatcacgtggatggccacgtggctggctggggggcctcagaggggaccttctattccctctttatacaggagcccctgtctgtcttaagcacatggcttgcttcttgaaagctttcctggactccccaggcagtatttcctttgtgcattttaaactaaattttgactaaattaaaagcaatgaaatccaggcctcctggaagggtatttagttttcctttttagcagaacagttaagctaatgacagtgttagaagcctcaaccaccccatccagtgattgatatacatgcccccaaatttttgtagtgaaatataaaaacagtctataatctgattttgtaatcaaggtctagccaattacagtacatctcaaa

SEQ ID NO: 37074 - DNA, 541 bp, Homo sapiens
tcgtcgacatgaaatctggagattttcttgtacatttagctttctatgaaaaagacataaattgttaacccatgaattcatatcacttaataaattgacagccagaatgatatttctgaggcatttttacaataagaactcattggttaaaaagtcatgtaccttaggtgagataaaagtactaagtaaaggacctggggagacttggtaaagaaatcgttagaaaataaaggtggagccaggcgcagtggctcatgcctgtaatcccagcactttgggaggccgaggtgggtggatcatggggtcaaaagatcgagaccatcctggccaacatggtgaaattctgtctctactaaaaatacaaaaaattagccaggcatggtggcacccgcgcctgtagtcctagctacttgggaggctgaggcaggagaatcgcttgaacctgggaggcagaggttgcagtgagccgagatcgcgccactgcacactccagcctggcgacagattaagactctgtctgaaaaaaaaaaaaaaaaaaagg

SEQ ID NO: 37075 - DNA, 271 bp, Homo sapiens
gtaaacattagggctctttaaataagttatgactctctccagttggtgtttcaggattattcaattatccatggtgaaaggatacaactgtcattacctaacacaggcaaaatgcattattatttataaaaatattttcagaaacaaatttattattatttcctcaatcagcaaatttctaacctggcattaactatattcttgaaatattcaaacaaatccaaagaaaaatggttaactgctatccataaagattcctgaaataaacaga

SEQ ID NO: 37076 - DNA, 1092 bp, Homo sapiens
tttgcaaccagccagaatctctagtttaaactggcagttataacaaaagagaccctcaaatattagacagctgcagtgcagctttctgggtgcaggtgtcactctctgccacctatcactattctttttctgttcagtttttctctcaggtgtttgctgggaaattaacactggaactgacccttttctggcagtgaatgtaagctctagctcccccatctactataaagaaatgtcttcgagatgtagaaataaggaatattctgaaaataaaaattatacagtagtaaagataattcagaaagaaaaagctacctgttagaatttccagtctaaatggcacagggtagttacggagaaaaggggatggagaaggagaaactatgactaaagatgagaggtatgaacgagttgtcaggttcctatgggcttaagctaggacaatcaggccctaaactccaaatttggataaaatatctctttgcattcttcttggccacctgcatagtctgacacatacgtatgtacagttagacttgcaggctgcaggagtgccctgcattgttttcttttaattagaaataaaaagtattagtctaaatgtggttctggtgctggtgccctgtatatatgtaacaatataggacccctccaaataggttttgcttctggtgaatcttggtcattgggttagtatatgactgtctataatattttccatttgtattattatattggggaaaacattttttatcattttctattaagaaaatggaaaacttaaatatggtgttaaaaatggaaatatatgtgatatttgcattattaaacccctttgcagatctaaagtctcagggttccactattagtggttaaagtactgaataatgtctgggtctatttccatctgtaaaataagaatatttgtctcacgtgtctgtcatgaatagcaaatgagaaaatgtatataaaagcactttgtaaattgtaaaagtagtacagatgtgagcttctatttgtttagaagcataaatgtgaattatatacagtttgaattttgcataaattttttgtgtctaattttaaaaaaaa

SEQ ID NO: 37077 - DNA, 944 bp, Homo sapiens
tttgcaaccagccagaatctctagtttaaactggcagttataacaaaagagaccctcaaatattagacagctgcagtgcagctttctgggtgcaggtgtcactctctgccacctatcactattctttttctgttcagtttttctctcaggtgtttgctgggaaattaacactggaactgacccttttctggcagtgaatgtaagctctagctcccccatctactataaagaaatgtcttcgagatgtagaaataaggaatattctgaaaataaaaattatacagtagtaaagataattcagaaagaaaaagctacctgttagaatttccagtctaaatggcacagggtagttacggagaaaaggggatggagaaggagaaactatgactaaagatgagaggtatgaacgagttgtcaggttcctatgggcttaagctaggacaatcaggccctaaactccaaatttggataaaatatctctttgcattcttcttggccacctgcatagtctgacacatacgtatgtacagttagacttgcaggctgcaggagtgccctgcattgttttcttttaattagaaataaaaagtattagtctaaatgtggttctggtgctggtgccctgtatatatgtaacaatataggacccctccaaataggttttgcttctggtgaatcttggtcattgggttagtatatgactgtctataatattttccatttgtattattatattggggaaaacattttttatcattttctattaagaaaatggaaaacttaaatatggtgttaaaaatggaaatatatgtgatatttgcattattaaacccctttgcagatctaaagtctcagggttccactattagtggttaaagtactgaataatgtctgggtctatttccatctactaaataagatattcgacgtggagtaactctagt

SEQ ID NO: 37078 - DNA, 1675 bp, Homo sapiens
ccagccacaaagtaaacttcattttcaggcagtgtttctgggggaggttatggagggaagaaaaaagaaaaatcgatagtgagtgactgattgcttcattttatcaggcgggcccattgtgaaagagctcaggggaaatgtggaggttaaatatatttccagagttgtccagcagaaagaaagtggcactttgaagagaactagggaagtacatatcttcagatatccctatatagttctctaccttcagttttagtaacaattatgaagaattatttgtgctgacagcagcagttaaactttgtttctctaatagctttttttttacataaaaaaagacccaggaacttaatagtgtatgcataagactgtgttttttagcacacagatacccacagcatacactgacgatctccacgcagtagacaggttttgtcttcactagctcatttgtttatcaagtcatatttagggtcccacaccctcttttcctgtaatttattgcagaatacaccactttgacttggacagctttctgccccctctttcactaaggaaggcaaatgaagtgaaaaaaaaaaatgccattttcaatccttcctttctcccctttgttaatagtttaagtgaatttttgaccttatcttaatggaaaacggttaactccaaacacaaaagactctactggaaagtgtaggtgaaaaaacttgtaactgtattgaaaataaataccattaaactgtgatcagttaaaatttaaaagaaaaatcagcacaaaagggcgctaaaagggaaaacactttttattaatcttaaaagttgggggttttttccagttaggtattagataaatttttattttaaaaaatgaaagtctcactaccataaaattatggttcagcatcagattagcattgcactcagtagtctttaaggttttaggaaatatgctttatattgtcttttcaaacacctgtgattgtttcattttccatgtttttgcaagataaatggtgacttataatgggcatatttatttgcctgtatttcatttcccccaatgaatgtcacaaggagatgggcacggagctgcttcgggtgcatcacgctgctcgttcctgaggtatgggaactggcctttagtgaagctatccagagcagggcaaatagccactggtaaagggaggaaatgaatttccagatacttattaccaagtaggtaaggtcagaagctggagttcagagaatgtgtctacagcttctctgactcttataggtttactaagatgaaagttaccactgaaccttaccactatgtatatatgtttaatatctgtcttttgaaatgcagaaatagtttaaatgtttctttgtctatttttctttttttttaatgctacccagggaaatattttcatatcatttttaagtggcctgcctcaatgtatatttatttcttttgaaacaaaaaggttctggaaactgtttttctgtagctttaaatgaataggtgagcaaaatctatatgggatgtaatttttttgttcagtctcttaaaaaatactttgttttggtacatttggttgtgcttgtggggaaaataaaaacgcagagatccttatatatttatgttaaagtaatattttattatctacataaaacagaaatgcacaat

SEQ ID NO: 37079 - DNA, 969 bp, Homo sapiens
  misc_feature (15)..(15): n is a, c, g, or t
  misc_feature (80)..(80): n is a, c, g, or t
  misc_feature (89)..(89): n is a, c, g, or t
  misc_feature (96)..(96): n is a, c, g, or t
  misc_feature (105)..(105): n is a, c, g, or t
ccagggtatgctgcnattcacattataaccttttaaatacctatgccccttggatatgaggcattcactaaccctggaancatggatcntaaacangataatatngaatatctgaaccattggacttgtcctttagagtatatggcctttagttcttgtggaactaaatacagtgattctaagatcaaaagtcttagtgtttggggtttttttttcctctttttggatatggggtgtttttttttgtttttttgttttttttttttaagcataatgctgtaaaaactgtccaagcttatgttttgctggtgattggtttaaaactgatttttatgtatccaaatgctagcataaattagattgactatcctggtgactgtagtagttaatgtaacacattttgtataaagtacagtttatatagtatttaaactaattcagatgaagttttatttcttgaaaacagttatttcctttttgtttattagcatgtgtataaacacaaatcacatgttcataaataaagttaacattcttttagccttgtgtgttccggcatgtctgtattacatttataagaagcagtttatttaagcttatttaggtttctcttttcttttcttttttttttaatactttaaaattggctttaatttttaggtagaattatctgaaatagagatattagataaccttgttgtccccatcatttatttgcttggggtacatttgctggcatttaagatgagaatatattcatcaagcataattagtgcccatcttaggagatttagagtcacgtggattgtacacattcacaaaagcaaagtaaatagaggcgctaagccaaatttttcttatcctgattagtaaagtaaatgtatagttttggtaatggaagcgaactctaatcaagaatggatggctgtttccatatttcccagtcttgtttttagtcatccatccatg

SEQ ID NO: 37080 - DNA, 413 bp, Homo sapiens
gatgcacctaacatgtcacgagggatgaatgtttcttgctgggagctggtagggcagggccttgcagaatagttgagctttaaacatgtgacaacctgaggatggaggagtagtagaaggaattctaatggggaggaatggcctgagcaaatgcagaagtcaaaacaaaggtcagggtacgcagagaggagagaaggtggtatactctagctggatggacaagagaatgtgatggggagtagtaggagccgaggtgtggaaggcaagatgacattagactgtcaaggtccctgaatgcctggctttggggttagagccttactcactcagcagagaaaagccaaggaggggatttggagtgggagaatcataggtcagaggtgcactcaggaacatggattttgttgttgggt

SEQ ID NO: 37081 - DNA, 401 bp, Homo sapiens
tttttaatatggagtctcagtctcttgccagtctgaagtgcagtggtgcagtctcggctcactgcaacctctgcttcctgggttcaagcaattctcctgcctcagcctcccgagtaagtgggattacaggggtgctctaccacacctggctaatttttgtatttttagtacagacagggtttcaccatgttggtcaggctggcctcgaactcctgacctcgtgatccacccgcctcggcctcccaaagtgctgggattacaggcatgagccactgcgcctggccaaataaaacatatttttaacgaataaaaattaaggacaaagaagagcattccttatagaatgataaaggacacaattcaaccagaagacctagcctaaatatgtacacacccaacat

SEQ ID NO: 37082 - DNA, 295 bp, Homo sapiens
tttagaggagcgcaggatctggcagttaggattcatgtaggctaaactggagaaggaagagatctccagtgtatatttcagtgtgacttcccactaccgttcagtacttaatctggacagagagataatgggcattcaacaaattcctatggaattaataatgaggcagaaataacgatctggtagaaacactggggccaaagcattgttgacaatgagttggaggcttataaatttgagatggaggtaataattgaaattacaagggaatgaaaacttgaagaaaaaagagaaa

SEQ ID NO: 37083 - DNA, 552 bp, Homo sapiens
ggctttgaacaaacaagcagcggaaacatgcagaatgcctgcagaaaaactgaggcacaggcagcggcacaaggaattttatttttagagtccaccctgtgaacagggtcttgtgatgttcatgggcaggatggtaggtgtgctgggagtcactgcattcctctactcccagctcaaagaaggggagaaagagccattcagtggggagcgttcccagcatcctcctccctgccacagcagccagaggcagggagctggccggcctttcctttaactctttgagtgccctgacaaaaccttttttctaggtcacgtcagtgttcttgtattttcaaaaagtgtattcgtgtgttgagagttgaacatggagagaaaattaattttcttcccaacaatttgtgttggtgaaatacatgattatatttatcccatttttaatactctgatataggaaagggaaaaatagtcatcttcgtctattcaatttaaaggaacttttctaaacaagatacataatagatgccgaagctccaattaagttgctcaaaaaaa

SEQ ID NO: 37084 - DNA, 2227 bp, Homo sapiens
cagcggagcacagcagtgacgacacacaaggtttcggggactgagtgggtttcagactttctctcaggatttccgctggcttcaggttccggtcaggcgtcgggacagagcctgatccaggcttcggcggccggtggcagctctcgatcagctctcgcagtcggagaggcggctaaggaaaggtgccacagcagagacgcgaaggagaggccctagaaccttttcaaagaagaatggaagaaaccatgaagcttgctacgatggaagacacagtggagtactgcctgttcctgataccagatgagtcaagggactcagataaacataaagagattcttcagaagtacattgagagaataatcactcggtttgcacctatgctggtcccctacatctggcagaatcagcctttcaatcttaaatataaacctgggaaaggaggtgttcctgctcatatgtttggcgtgacaaagtttggggataacattgaggatgaatggtttattgtttatgtaataaagcagatcacaaaggaatttccagagttagtagcaaggattgaagacaatgatggtgaattcttgttaatagaagctgctgactttctccctaaatggctggatcctgaaaatagcaccaatagggtatttttctgccatggggaattgtgtattatccctgcaccaagaaaatctggagcagaatcttggttacccaccacacccccaacaattccacaagcattgaatataatcacagcacattcagaaaaaatacttgcttcagaatctatacgagctgctgtgaataggcgcatcagagggtacccagaaaaaattcaggcctcacttcatcgagcacactgcttccttccagctggcattgtggcagtgctaaagcagcgccccagattggtggctgcagcagtccaggcattttacctacgagaccctattgacctgcgagcttgtcgtgttttcaagacattcttgcctgaaacacgaataatgacatcggtcacattcactaaatgtctatatgcacaattggtgcaacaaaggtttgtgccagaccggcggagtggatacaggctgcctcctccatctgatccccagtaccgagcccatgaattgggcatgaaattggctcatggatttgagatcttatgctccaaatgtagcccacatttttctgactgcaagaaatcccttgtgactgcctcaccactctgggccagtttccttgaaagtctgaaaaagaatgattactttaagggactgatagaaggttctgctcagtaccgggaaaggctagaaatggcagagaattacttccagctctcagtagactggccagaaagttctcttgctatgagccctggtgaagaaatcttaaccttattacagacaataccatttgatatagaagaccttaagaaagaagcagctaatcttcccccagaggatgatgaccagtggttagatctctcaccagatcagctggaccagctgctgcaggaagctgttggcaaaaaagaatccgagtctgtttccaaggaggagaaggagcagaactatgacttaactgaagtctcagagagcatgaaagctttcatatccaaagtctcaacccacaagggagcagagctgcctcgagaaccttctgaggctccaatcacttttgatgcagattcttttcttaattattttgataagattttagggccaaggcctaatgagtcagattctgatgatctggatgatgaagactttgaatgtttagatagtgatgatgacttggactttgaaacacacgaacctggcgaagaggcttccctgaaaggaacacttgataatctcaagtcatacatggcccagatggaccaggaactagcacacacctgcatcagcaaaagtttcaccactaggaaccaagtggaacctgtatcccagactaccgataacaattcagatgaggaagattctggtacgggagaatctgttatggcaccagtagatgtagacctgaacctggtttcaaatatattggaatcctatagctcccaagctggactggcaggacctgcttccaatcttttacaaagcatgggagtgcagctgcctgacaacaccgatcacagaccaacaagtaagccaacaaaaaattaaccagcacatttagcttctcttttttctttttaaataaatattgaatatgattctgttca

SEQ ID NO: 37085 - DNA, 681 bp, Homo sapiens
aacagtgttcatagaaccatctaaaagagttcagatgttacttctgcattgttctatgtggtttatattttggaactttaaacatagttttcaaagaagaatggaagaaaccatgaagcttgctacgatggaagacacagtggagtactgcctgttcctgataccagatgagtcaagggactcagataaacataaagagattcttcagaagtacattgagagaataatcactcggtttgcacctatgctggtcccctacatctggcagaatcagcctttcaatcttaaatataaacctgggaaaggtaaggctcttttacttgtttggattagtgtgacttttaatgttatcctgacaacagtgatgtgtaatagtccacgcttcattcagtgttgccaggaagagattaatacacaaaaaaaatcatattaatgaaaactttctaaatttgccttaggaattagcatatactaaacattattaaactcatggctattcttttgaactttagttactacactatgccataatgtatctaagtatctatactaaatattttgtatttttagtagagatggggtttcaccatgttggccaggctggtctcaaactcctgacctcagatgatctgcccaccttggcctcccaaagtgttgggattacaggcatgaaccaccatg

SEQ ID NO: 37086 - DNA, 3099 bp, Homo sapiens
cagcggagcacagcagtgacgacacacaaggtttcggggactgagtgggtttcagactttctctcaggatttccgctggcttcaggttccggtcaggcgtcgggacagagcctgatccaggcttcggcggccggtggcagctctcgatcagctctcgcagtcggagaggcggctaaggaaaggtgccacagcagagacgcgaaggagaggccctagaaccttttcaaagaagaatggaagaaaccatgaagcttgctacgatggaagacacagtggagtactgcctgttcctgataccagatgagtcaagggactcagataaacataaagagattcttcagaagtacattgagagaataatcactcggtttgcacctatgctggtcccctacatctggcagaatcagcctttcaatcttaaatataaacctgggaaaggaggtgttcctgctcatatgtttggcgtgacaaagtttggggataacattgaggatgaatggtttattgtttatgtaataaagcagatcacaaaggaatttccagagttagtagcaaggattgaagacaatgatggtgaattcttgttaatagaagctgctgactttctccctaaatggctggatcctgaaaatagcaccaatagggtatttttctgccatggggaattgtgtattatccctgcaccaagaaaatctggagcagaatcttggttacccaccacacccccaacaattccacaagcattgaatataatcacagcacattcagaaaaaatacttgcttcagaatctatacgagctgctgtgaataggcgcatcagagggtacccagaaaaaattcaggcctcacttcatcgagcacactgcttccttccagctggcattgtggcagtgctaaagcagcgccccagattggtggctgcagcagtccaggcattttacctacgagaccctattgacctgcgagcttgtcgtgttttcaagacattcttgcctgaaacacgaataatgacatcggtcacattcactaaatgtctatatgcacaattggtgcaacaaaggtttgtgccagaccggcggagtggatacaggctgcctcctccatctgatccccagtaccgagcccatgaattgggcatgaaattggctcatggatttgagatcttatgctccaaatgtagcccacatttttctgactgcaagaaatcccttgtgactgcctcaccactctgggccagtttccttgaaagtctgaaaaagaatgattactttaagggactgatagaaggttctgctcagtaccgggaaaggctagaaatggcagagaattacttccagctctcagtagactggccagaaagttctcttgctatgagccctggtgaagaaatcttaaccttattacagacaataccatttgatatagaagaccttaagaaagaagcagctaatcttcccccagaggatgatgaccagtggttagatctctcaccagatcagctggaccagctgctgcaggaagctgttggcaaaaaagaatccgagtctgtttccaaggaggagaaggagcagaactatgacttaactgaagtctcagagagcatgaaagctttcatatccaaagtctcaacccacaagggagcagagctgcctcgagaaccttctgaggctccaatcacttttgatgcagattcttttcttaattattttgataagattttagggccaaggcctaatgagtcagattctgatgatctggatgatgaagactttgaatgtttagatagtgatgatgacttggactttgaaacacacgaacctggcgaagaggcttccctgaaaggaacacttgataatctcaagtcatacatggcccagatggaccaggaactagcacacacctgcatcagcaaaagtttcaccactaggaaccaagtggaacctgtatcccagactaccgataacaattcagatgaggaagattctggtacgggagaatctgttatggcaccagtagatgtagacctgaacctggtttcaaatatattggaatcctatagctcccaagctggactggcaggacctgcttccaatcttttacaaagcatgggagtgcagctgcctgacaacaccgatcacagaccaacaagtaagccaacaaaaaattaaccagcacatttagcttctcttttttctttttaaataaatattgaatatgattctgttcatttctagtttagattactcatttagtaaaaatgtttcttcattacaagttttacagattgacttctccatgagccccaaatgtggccctcttggcacaagtctttgtgatctcagctgtgggttatacacaggttttgaactcggcagggtagaatctagcccctagacaaccttgagatgaaattcacacacttcatgctaaagacataccctaccacaatatacccttggagtaattctaaatatttaaatttctcccttactgctattcatcctcagatcaaaatttcaagttgacaaatttggatttgaaaactcattcactttttcaatttttttaatgaggcataacatgcatatggttaagtgcacaaatcttaagtgtacagtcagtgaatttttgcatgtatgtatgtacctgaagcaagatatagaacttatttacttgtaaataacagctatattgatatgtcacataccaaaaaatttaccctttaaattatacaattcagtggtttttagtatatttacaaaattgtgcaaccatccctaccatctaattctagaatattagaaaccccatactcactaatagtctctcattcccttctactcccagcccctagaaaccactagtctactttctgtctctatggatttgcctattttggatatttcatacctgatactgtacttaattgttttaattaattaattggtttgatatttaatataactgatatatcttttgctaagatgaaatgtttatttcttaaaatgatgctcatattcctcctaaaataaatcaagtattatctatatatcataaaattcaccattaaaagcaaaaaaaaagtcttctttacagaca

SEQ ID NO: 37087 - DNA, 2164 bp, Homo sapiens
ggctggtacggtccgaaggtcgttagatgtcaggcgtcgggacagagcctgatccaggcttcggcggccggtggcagctctcgatcagctctcgcagtcggagaggcggctaaggaaaggtgccacagcagagacgcgaaggagaggccctagaaccttttcaaagaagaatggaagaaaccatgaagcttgctacgatggaagacacagtggagtactgcctgttcctgataccagatgagtcaagggactcagataaacataaagagattcttcagaagtacattgagagaataatcactcggtttgcacctatgctggtcccctacatctggcagaatcagcctttcaatcttaaatataaacctgggaaaggaggtgttcctgctcatatgtttggcgtgacaaagtttggggataacattgaggatgaatggtttattgtttatgtaataaagcagatcacaaaggaatttccagagttagtagcaaggattgaagacaatgatggtgaattcttgttaatagaagctgctgactttctccctaaatggctggatcctgaaaatagcaccaatagggtatttttctgccatggggaattgtgtattatccctgcaccaagaaaatctggagcagaatcttggttacccaccacacccccaacaattccacaagcattgaatataatcacagcacattcagaaaaaatacttgcttcagaatctatacgagctgctgtgaataggcgcatcagagggtacccagaaaaaattcaggcctcacttcatcgagcacactgcttccttccagctggcattgtggcagtgctaaagcagcgccccagattggtggctgcagcagtccaggcattttacctacgagaccctattgacctgcgagcttgtcgtgttttcaagacattcttgcctgaaacacgaataatgacatcggtcacattcactaaatgtctatatgcacaattggtgcaacaaaggtttgtgccagaccggcggagtggatacaggctgcctcctccatctgatccccagtaccgagcccatgaattgggcatgaaattggctcatggatttgagatcttatgctccaaatgtagcccacatttttctgactgcaagaaatcccttgtgactgcctcaccactctgggccagtttccttgaaagtctgaaaaagaatgattactttaagggactgatagaaggttctgctcagtaccgggaaaggctagaaatggcagagaattacttccagctctcagtagactggccagaaagttctcttgctatgagccctggtgaagaaatcttaaccttattacagacaataccatttgatatagaagaccttaagaaagaagcagctaatcttcccccagaggatgatgaccagtggttagatctctcaccagatcagctggaccagctgctgcaggaagctgttggcaaaaaagaatccgagtctgtttccaaggaggagaaggagcagaactatgacttaactgaagtctcagagagcatgaaagctttcatatccaaagtctcaacccacaagggagcagagctgcctcgagaaccttctgaggctccaatcacttttgatgcagattcttttcttaattattttgataagattttagggccaaggcctaatgagtcagattctgatgatctggatgatgaagactttgaatgtttagatagtgatgatgacttggactttgaaacacacgaacctggcgaagaggcttccctgaaaggaacacttgataatctcaagtcatacatggcccagatggaccaggaactagcacacacctgcatcagcaaaagtttcaccactaggaaccaagtggaacctgtatcccagactaccgataacaattcagatgaggaagattctggtacgggagaatctgttatggcaccagtagatgtagacctgaacctggtttcaaatatattggaatcctatagctcccaagctggactggcaggacctgcttccaatcttttacaaagcatgggagtgcagctgcctgacaacaccgatcacagaccaacaagtaagccaacaaaaaattaaccagcacatttagcttctcttttttctttttaaataaatattgaatatgattctgttca

SEQ ID NO: 37088 - DNA, 2173 bp, Homo sapiens
  misc_feature (25)..(25): n is a, c, g, or t
acgggctaggtgagccggcggtgantcggccgaggcggccaggcgtcgggacagagcctgatccaggcttcggcggccggtggcagctctcgatcagctctcgcagtcggagaggcggctaaggaaaggtgccacagcagagacgcgaaggagaggccctagaaccttttcaaagaagaatggaagaaaccatgaagcttgctacgatggaagacacagtggagtactgcctgttcctgataccagatgagtcaagggactcagataaacataaagagattcttcagaagtacattgagagaataatcactcggtttgcacctatgctggtcccctacatctggcagaatcagcctttcaatcttaaatataaacctgggaaaggaggtgttcctgctcatatgtttggcgtgacaaagtttggggataacattgaggatgaatggtttattgtttatgtaataaagcagatcacaaaggaatttccagagttagtagcaaggattgaagacaatgatggtgaattcttgttaatagaagctgctgactttctccctaaatggctggatcctgaaaatagcaccaatagggtatttttctgccatggggaattgtgtattatccctgcaccaagaaaatctggagcagaatcttggttacccaccacacccccaacaattccacaagcattgaatataatcacagcacattcagaaaaaatacttgcttcagaatctatacgagctgctgtgaataggcgcatcagagggtacccagaaaaaattcaggcctcacttcatcgagcacactgcttccttccagctggcattgtggcagtgctaaagcagcgccccagattggtggctgcagcagtccaggcattttacctacgagaccctattgacctgcgagcttgtcgtgttttcaagacattcttgcctgaaacacgaataatgacatcggtcacattcactaaatgtctatatgcacaattggtgcaacaaaggtttgtgccagaccggcggagtggatacaggctgcctcctccatctgatccccagtaccgagcccatgaattgggcatgaaattggctcatggatttgagatcttatgctccaaatgtagcccacatttttctgactgcaagaaatcccttgtgactgcctcaccactctgggccagtttccttgaaagtctgaaaaagaatgattactttaagggactgatagaaggttctgctcagtaccgggaaaggctagaaatggcagagaattacttccagctctcagtagactggccagaaagttctcttgctatgagccctggtgaagaaatcttaaccttattacagacaataccatttgatatagaagaccttaagaaagaagcagctaatcttcccccagaggatgatgaccagtggttagatctctcaccagatcagctggaccagctgctgcaggaagctgttggcaaaaaagaatccgagtctgtttccaaggaggagaaggagcagaactatgacttaactgaagtctcagagagcatgaaagctttcatatccaaagtctcaacccacaagggagcagagctgcctcgagaaccttctgaggctccaatcacttttgatgcagattcttttcttaattattttgataagattttagggccaaggcctaatgagtcagattctgatgatctggatgatgaagactttgaatgtttagatagtgatgatgacttggactttgaaacacacgaacctggcgaagaggcttccctgaaaggaacacttgataatctcaagtcatacatggcccagatggaccaggaactagcacacacctgcatcagcaaaagtttcaccactaggaaccaagtggaacctgtatcccagactaccgataacaattcagatgaggaagattctggtacgggagaatctgttatggcaccagtagatgtagacctgaacctggtttcaaatatattggaatcctatagctcccaagctggactggcaggacctgcttccaatcttttacaaagcatgggagtgcagctgcctgacaacaccgatcacagaccaacaagtaagccaacaaaaaattaaccagcacatttagcttctcttttttctttttaaataaatattgaatatgattctgttca

SEQ ID NO: 37089 - DNA, 2120 bp, Homo sapiens
cagcggagcacagcagtgacgacacacaaggtttcggggactgagtgggtttcagactttctctcaggatttccgctggcttcaggttccggtcaggcgtcgggacagagcctgatccaggcttcggcggccggtggcagctctcgatcagctctcgcagtcggagaggcggctaaggaaaggtgccacagcagagacgcgaaggagaggccctagaaccttttcaaagaagaatggaagaaaccatgaagcttgctacgatggaagacacagtggagtactgcctgttcctgataccagatgagtcaagggactcagataaacataaagagattcttcagaagtacattgagagaataatcactcggtttgcacctatgctggtcccctacatctggcagaatcagcctttcaatcttaaatataaacctgggaaaggaggtgttcctgctcatatgtttggcgtgacaaagtttggggataacattgaggatgaatggtttattgtttatgtaataaagcagatcacaaaggaatttccagagttagtagcaaggattgaagacaatgatggtgaattcttgttaatagaagctgctgactttctccctaaatggctggatcctgaaaatagcaccaatagggtatttttctgccatggggaattgtgtattatccctgcaccaagaaaatctggagcagaatcttggttacccaccacacccccaacaattccacaagcattgaatataatcacagcacattcagaatggcattgtggcagtgctaaagcagcgccccagattggtggctgcagcagtccaggcattttacctacgagaccctattgacctgcgagcttgtcgtgttttcaagacattcttgcctgaaacacgaataatgacatcggtcacattcactaaatgtctatatgcacaattggtgcaacaaaggtttgtgccagaccggcggagtggatacaggctgcctcctccatctgatccccagtaccgagcccatgaattgggcatgaaattggctcatggatttgagatcttatgctccaaatgtagcccacatttttctgactgcaagaaatcccttgtgactgcctcaccactctgggccagtttccttgaaagtctgaaaaagaatgattactttaagggactgatagaaggttctgctcagtaccgggaaaggctagaaatggcagagaattacttccagctctcagtagactggccagaaagttctcttgctatgagccctggtgaagaaatcttaaccttattacagacaataccatttgatatagaagaccttaagaaagaagcagctaatcttcccccagaggatgatgaccagtggttagatctctcaccagatcagctggaccagctgctgcaggaagctgttggcaaaaaagaatccgagtctgtttccaaggaggagaaggagcagaactatgacttaactgaagtctcagagagcatgaaagctttcatatccaaagtctcaacccacaagggagcagagctgcctcgagaaccttctgaggctccaatcacttttgatgcagattcttttcttaattattttgataagattttagggccaaggcctaatgagtcagattctgatgatctggatgatgaagactttgaatgtttagatagtgatgatgacttggactttgaaacacacgaacctggcgaagaggcttccctgaaaggaacacttgataatctcaagtcatacatggcccagatggaccaggaactagcacacacctgcatcagcaaaagtttcaccactaggaaccaagtggaacctgtatcccagactaccgataacaattcagatgaggaagattctggtacgggagaatctgttatggcaccagtagatgtagacctgaacctggtttcaaatatattggaatcctatagctcccaagctggactggcaggacctgcttccaatcttttacaaagcatgggagtgcagctgcctgacaacaccgatcacagaccaacaagtaagccaacaaaaaattaaccagcacatttagcttctcttttttctttttaaataaatattgaatatgattctgttca

SEQ ID NO: 37090 - DNA, 3045 bp, Homo sapiens
cagcggagcacagcagtgacgacacacaaggtttcggggactgagtgggtttcagactttctctcaggatttccgctggcttcaggttccggtcaggcgtcgggacagagcctgatccaggcttcggcggccggtggcagctctcgatcagctctcgcagtcggagaggcggctaaggaaaggtgccacagcagagacgcgaaggagaggccctagaaccttttcaaagaagaatggaagaaaccatgaagcttgctacgatggaagacacagtggagtactgcctgttcctgataccagatgagtcaagggactcagataaacataaagagattcttcagaagtacattgagagaataatcactcggtttgcacctatgctggtcccctacatctggcagaatcagcctttcaatcttaaatataaacctgggaaaggaggtgttcctgctcatatgtttggcgtgacaaagtttggggataacattgaggatgaatggtttattgtttatgtaataaagcagatcacaaaggaatttccagagttagtagcaaggattgaagacaatgatggtgaattcttgttaatagaagctgctgactttctccctaaatggctggatcctgaaaatagcaccaatagggtatttttctgccatggggaattgtgtattatccctgcaccaagaaaatctggagcagaatcttggttacccaccacacccccaacaattccacaagcattgaatataatcacagcacattcagaaaaaatacttgcttcagaatctatacgagctgctgtgaataggcgcatcagagggtacccagaaaaaattcaggcctcacttcatcgagcacactgcttccttccagctggcattgtggcagtgctaaagcagcgccccagattggtggctgcagcagtccaggcattttacctacgagaccctattgacctgcgagcttgtcgtgttttcaagacattcttgcctgaaacacgaataatgacatcggtcacattcactaaatgtctatatgcacaattggtgcaacaaaggtttgtgccagaccggcggagtggatacaggctgcctcctccatctgatccccagtaccgagcccatgaattgggcatgaaattggctcatggatttgagatcttatgctccaaatgtagcccacatttttctgactgcaagaaatcccttgtgactgcctcaccactctgggccagtttccttgaaagtctgaaaaagaatgattactttaagggactgatagaaggttctgctcagtaccgggaaaggctagaaatggcagagaattacttccagctctcagtagactggccagaaagttctcttgctatgagccctggtgaagaaatcttaaccttattacagacaataccatttgatatagaagaccttaagaaagaagcagctaatcttcccccagaggatgatgaccagtggttagatctctcaccagatcagctggaccagctgctgcaggaagctgttggcaaaaaagaatccgagtctgtttccaaggaggagaaggagcagaactatgacttaactgaagtctcagagagcatgaaagctttcatatccaaagtctcaacccacaagggagcagagctgcctcgagaaccttctgaggctccaatcacttttgatgcagattcttttcttaattattttgataagattttagggccaaggcctaatgagtcagattctgatgatctggatgatgaagactttgaatgtttagatagtgatgatgacttggactttgaaacacacgaacctggcgaagaggcttccctgaaaggaacacttgataatctcaagtcatacatggcccagatggaccaggaactagcacacacctgcatcagcaattcagatgaggaagattctggtacgggagaatctgttatggcaccagtagatgtagacctgaacctggtttcaaatatattggaatcctatagctcccaagctggactggcaggacctgcttccaatcttttacaaagcatgggagtgcagctgcctgacaacaccgatcacagaccaacaagtaagccaacaaaaaattaaccagcacatttagcttctcttttttctttttaaataaatattgaatatgattctgttcatttctagtttagattactcatttagtaaaaatgtttcttcattacaagttttacagattgacttctccatgagccccaaatgtggccctcttggcacaagtctttgtgatctcagctgtgggttatacacaggttttgaactcggcagggtagaatctagcccctagacaaccttgagatgaaattcacacacttcatgctaaagacataccctaccacaatatacccttggagtaattctaaatatttaaatttctcccttactgctattcatcctcagatcaaaatttcaagttgacaaatttggatttgaaaactcattcactttttcaatttttttaatgaggcataacatgcatatggttaagtgcacaaatcttaagtgtacagtcagtgaatttttgcatgtatgtatgtacctgaagcaagatatagaacttatttacttgtaaataacagctatattgatatgtcacataccaaaaaatttaccctttaaattatacaattcagtggtttttagtatatttacaaaattgtgcaaccatccctaccatctaattctagaatattagaaaccccatactcactaatagtctctcattcccttctactcccagcccctagaaaccactagtctactttctgtctctatggatttgcctattttggatatttcatacctgatactgtacttaattgttttaattaattaattggtttgatatttaatataactgatatatcttttgctaagatgaaatgtttatttcttaaaatgatgctcatattcctcctaaaataaatcaagtattatctatatatcataaaattcaccattaaaagcaaaaaaaaagtcttctttacagaca

SEQ ID NO: 37091 - DNA, 2139 bp, Homo sapiens
cagcggagcacagcagtgacgacacacaaggtttcggggactgagtgggtttcagactttctctcaggatttccgctggcttcaggttccggtcaggcgtcgggacagagcctgatccaggcttcggcggccggtggcagctctcgatcagctctcgcagtcggagaggcggctaaggaaaggtgccacagcagagacgcgaaggagaggccctagaaccttttcaaagaagaatggaagaaaccatgaagcttgctacgatggaagacacagtggagtactgcctgttcctgataccagatgagtcaagggactcagataaacataaagagattcttcagaagtacattgagagaataatcactcggtttgcacctatgctggtcccctacatctggcagaatcagcctttcaatcttaaatataaacctgggaaaggaggtgttcctgctcatatgtttggcgtgacaaagtttggggataacattgaggatgaatggtttattgtttatgtaataaagcagatcacaaaggaatttccagagttagtagcaaggtatttttctgccatggggaattgtgtattatccctgcaccaagaaaatctggagcagaatcttggttacccaccacacccccaacaattccacaagcattgaatataatcacagcacattcagaaaaaatacttgcttcagaatctatacgagctgctgtgaataggcgcatcagagggtacccagaaaaaattcaggcctcacttcatcgagcacactgcttccttccagctggcattgtggcagtgctaaagcagcgccccagattggtggctgcagcagtccaggcattttacctacgagaccctattgacctgcgagcttgtcgtgttttcaagacattcttgcctgaaacacgaataatgacatcggtcacattcactaaatgtctatatgcacaattggtgcaacaaaggtttgtgccagaccggcggagtggatacaggctgcctcctccatctgatccccagtaccgagcccatgaattgggcatgaaattggctcatggatttgagatcttatgctccaaatgtagcccacatttttctgactgcaagaaatcccttgtgactgcctcaccactctgggccagtttccttgaaagtctgaaaaagaatgattactttaagggactgatagaaggttctgctcagtaccgggaaaggctagaaatggcagagaattacttccagctctcagtagactggccagaaagttctcttgctatgagccctggtgaagaaatcttaaccttattacagacaataccatttgatatagaagaccttaagaaagaagcagctaatcttcccccagaggatgatgaccagtggttagatctctcaccagatcagctggaccagctgctgcaggaagctgttggcaaaaaagaatccgagtctgtttccaaggaggagaaggagcagaactatgacttaactgaagtctcagagagcatgaaagctttcatatccaaagtctcaacccacaagggagcagagctgcctcgagaaccttctgaggctccaatcacttttgatgcagattcttttcttaattattttgataagattttagggccaaggcctaatgagtcagattctgatgatctggatgatgaagactttgaatgtttagatagtgatgatgacttggactttgaaacacacgaacctggcgaagaggcttccctgaaaggaacacttgataatctcaagtcatacatggcccagatggaccaggaactagcacacacctgcatcagcaaaagtttcaccactaggaaccaagtggaacctgtatcccagactaccgataacaattcagatgaggaagattctggtacgggagaatctgttatggcaccagtagatgtagacctgaacctggtttcaaatatattggaatcctatagctcccaagctggactggcaggacctgcttccaatcttttacaaagcatgggagtgcagctgcctgacaacaccgatcacagaccaacaagtaagccaacaaaaaattaaccagcacatttagcttctcttttttctttttaaataaatattgaatatgattctgttca

SEQ ID NO: 37092 - DNA, 2452 bp, Homo sapiens
cagcggagcacagcagtgacgacacacaaggtttcggggactgagtgggtttcagactttctctcaggatttccgctggcttcaggttccggtcaggcgtcgggacagagcctgatccaggcttcggcggccggtggcagctctcgatcagctctcgcagtcggagaggcggctaaggaaaggtgccacagcagagacgcgaaggagaggccctagaaccttttcaaagaagaatggaagaaaccatgaagcttgctacgatggaagacacagtggagtactgcctgttcctgataccagatgagtcaagggactcagataaacataaagagattcttcagaagtacattgagagaataatcactcggtttgcacctatgctggtcccctacatctggcagaatcagcctttcaatcttaaatataaacctgggaaaggaggtgttcctgctcatatgtttggcgtgacaaagtttggggataacattgaggatgaatggtttattgtttatgtaataaagcagatcacaaaggaatttccagagttagtagcaaggattgaagacaatgatggtgaattcttgttaatagaagctgctgactttctccctaaatggctggatcctgaaaatagcaccaatagggtatttttctgccatggggaattgtgtattatccctgcaccaagaaaatctggagcagaatcttggttacccaccacacccccaacaattccacaagcattgaatataatcacagcacattcagaaaaaatacttgcttcagaatctatacgagctgctgtgaataggcgcatcagagggtacccagaaaaaattcaggcctcacttcatcgagcacactgcttccttccagctggcattgtggcagtgctaaagcagcgccccagattggtggctgcagcagtccaggcattttacctacgagaccctattgacctgcgagcttgtcgtgttttcaagacattcttgcctgaaacacgaataatgacatcggtcacattcactaaatgtctatatgcacaattggtgcaacaaaggtttgtgccagaccggcggagtggatacaggctgcctcctccatctgatccccagtaccgagcccatgaattgggcatgaaattggctcatggatttgagatcttatgctccaaatgtagcccacatttttctgactgcaagaaatcccttgtgactgcctcaccactctgggccagtttccttgaaagtctgaaaaagaatgattactttaagggactgatagaaggttctgctcagtaccgggaaaggctagaaatggcagagaattacttccagctctcagtagactggccagaaagttctcttgctatgagccctggtgaagaaatcttaaccttattacagacaataccatttgatatagaagaccttaagaaagaagcagctaatcttcccccagaggatgatgaccagtggttagatctctcaccagatcagctggaccagctgctgcaggaagctgttggcaaaaaagaatccgagtctgtttccaaggaggagaaggagcagaactatgacttaactgaagtctcagagagcatgaaagctttcatatccaaagtctcaacccacaagggagcagagctgcctcgagaaccttctgaggctccaatcacttttgatgcagattcttttcttaattattttgataagattttagggccaaggcctaatgagtcagattctgatgatctggatgatgaagactttgaatgtttagatagtgatgatgacttggactttgaaacacacgaacctggcgaagaggcttccctgaaaggaacacttgataatctcaagtcatacatggcccagatggaccaggaactagcacacacctgcatcagcaaaagtttcaccactaggaaccaagtggaacctgtatcccagactaccgataacaattcagatgaggaagattctggtacgggagaatctgttatggcaccagtagatgtagacctgaacctggtttcaaatatattggaatcctatagctcccaagctggactggcaggacctgcttccaatcttttacaaagcatgggagtgcagctgcctgacaacaccgatcacagaccaacaaacggagtctctctctgttgcccaggctggagtgcagtggcgctatcttggctcaatgcaagctccacctcccgggttcacgccattctcctgcctcagcctcctgagtagctgggactgcagcgcccgccaccatgcccggctaattttttgtattttttagtagagacagggtttcaccgtgtcagccaggatggtctcgatctcctgatcttgtgatccacccgccttggccccccaaagtgctgggattacaggtgtgagccactgtgcccggccgagttaaatatatttctaacatagta

SEQ ID NO: 37093 - DNA, 1955 bp, Homo sapiens
  misc_feature (25)..(25): n is a, c, g, or t
acgggctaggtgagccggcggtgantcggccgaggcggccaggcgtcgggacagagcctgatccaggcttcggcggccggtggcagctctcgatcagctctcgcagtcggagaggcggctaaggaaaggtgccacagcagagacgcgaaggagaggccctagaaccgaggtgttcctgctcatatgtttggcgtgacaaagtttggggataacattgaggatgaatggtttattgtttatgtaataaagcagatcacaaaggaatttccagagttagtagcaaggattgaagacaatgatggtgaattcttgttaatagaagctgctgactttctccctaaatggctggatcctgaaaatagcaccaatagggtatttttctgccatggggaattgtgtattatccctgcaccaagaaaatctggagcagaatcttggttacccaccacacccccaacaattccacaagcattgaatataatcacagcacattcagaaaaaatacttgcttcagaatctatacgagctgctgtgaataggcgcatcagagggtacccagaaaaaattcaggcctcacttcatcgagcacactgcttccttccagctggcattgtggcagtgctaaagcagcgccccagattggtggctgcagcagtccaggcattttacctacgagaccctattgacctgcgagcttgtcgtgttttcaagacattcttgcctgaaacacgaataatgacatcggtcacattcactaaatgtctatatgcacaattggtgcaacaaaggtttgtgccagaccggcggagtggatacaggctgcctcctccatctgatccccagtaccgagcccatgaattgggcatgaaattggctcatggatttgagatcttatgctccaaatgtagcccacatttttctgactgcaagaaatcccttgtgactgcctcaccactctgggccagtttccttgaaagtctgaaaaagaatgattactttaagggactgatagaaggttctgctcagtaccgggaaaggctagaaatggcagagaattacttccagctctcagtagactggccagaaagttctcttgctatgagccctggtgaagaaatcttaaccttattacagacaataccatttgatatagaagaccttaagaaagaagcagctaatcttcccccagaggatgatgaccagtggttagatctctcaccagatcagctggaccagctgctgcaggaagctgttggcaaaaaagaatccgagtctgtttccaaggaggagaaggagcagaactatgacttaactgaagtctcagagagcatgaaagctttcatatccaaagtctcaacccacaagggagcagagctgcctcgagaaccttctgaggctccaatcacttttgatgcagattcttttcttaattattttgataagattttagggccaaggcctaatgagtcagattctgatgatctggatgatgaagactttgaatgtttagatagtgatgatgacttggactttgaaacacacgaacctggcgaagaggcttccctgaaaggaacacttgataatctcaagtcatacatggcccagatggaccaggaactagcacacacctgcatcagcaaaagtttcaccactaggaaccaagtggaacctgtatcccagactaccgataacaattcagatgaggaagattctggtacgggagaatctgttatggcaccagtagatgtagacctgaacctggtttcaaatatattggaatcctatagctcccaagctggactggcaggacctgcttccaatcttttacaaagcatgggagtgcagctgcctgacaacaccgatcacagaccaacaagtaagccaacaaaaaattaaccagcacatttagcttctcttttttctttttaaataaatattgaatatgattctgttca

SEQ ID NO: 37094 - DNA, 1143 bp, Homo sapiens
ggaagtgacaatgaagaaaagaagcatcttgctgcaagtaaccaacaagccattaactgaggctcatggatttgagatcttatgctccaaatgtagcccacatttttctgactgcaagaaatcccttgtgactgcctcaccactctgggccagtttccttgaaagtctgaaaaagaatgattactttaagggactgatagaaggttctgctcagtaccgggaaaggctagaaatggcagagaattacttccagctctcagtagactggccagaaagttctcttgctatgagccctggtgaagaaatcttaaccttattacagacaataccatttgatatagaagaccttaagaaagaagcagctaatcttcccccagaggatgatgaccagtggttagatctctcaccagatcagctggaccagctgctgcaggaagctgttggcaaaaaagaatccgagtctgtttccaaggaggagaaggagcagaactatgacttaactgaagtctcagagagcatgaaagctttcatatccaaagtctcaacccacaagggagcagagctgcctcgagaaccttctgaggctccaatcacttttgatgcagattcttttcttaattattttgataagattttagggccaaggcctaatgagtcagattctgatgatctggatgatgaagactttgaatgtttagatagtgatgatgacttggactttgaaacacacgaacctggcgaagaggcttccctgaaaggaacacttgataatctcaagtcatacatggcccagatggaccaggaactagcacacacctgcatcagcaaaagtttcaccactaggaaccaagtggaacctgtatcccagactaccgataacaattcagatgaggaagattctggtacgggagaatctgttatggcaccagtagatgtagacctgaacctggtttcaaatatattggaatcctatagctcccaagctggactggcaggacctgcttccaatcttttacaaagcatgggagtgcagctgcctgacaacaccgatcacagaccaacaagtaagccaacaaaaaattaaccagcacatttagcttctcttttttctttttaaataaatattgaatatgattctgttca

SEQ ID NO: 37095 - DNA, 615 bp, Homo sapiens
tgcacagctatggtcccagctactggggaggctgaggtgggaagaaccttctgaggctccaatcacttttgatgcagattcttttcttaattattttgataagattttagggccaaggcctaatgagtcagattctgatgatctggatgatgaagactttgaatgtttagatagtgatgatgacttggactttgaaacacacgaacctggcgaagaggcttccctgaaaggaacacttgataatctcaagtcatacatggcccagatggaccaggaactagcacacacctgcatcagcaaaagtttcaccactaggaaccaagtggaacctgtatcccagactaccgataacaattcagatgaggaagattctggtacgggagaatctgttatggcaccagtagatgtagacctgaacctggtttcaaatatattggaatcctatagctcccaagctggactggcaggacctgcttccaatcttttacaaagcatgggagtgcagctgcctgacaacaccgatcacagaccaacaagtaagccaacaaaaaattaaccagcacatttagcttctcttttttctttttaaataaatattgaatatgattctgttca

SEQ ID NO: 37096 - DNA, 521 bp, Homo sapiens
cttgggatctgtgtagggccaaggcctaatgagtcagattctgatgatctggatgatgaagactttgaatgtttagatagtgatgatgacttggactttgaaacacacgaacctggcgaagaggcttccctgaaaggaacacttgataatctcaagtcatacatggcccagatggaccaggaactagcacacacctgcatcagcaaaagtttcaccactaggaaccaagtggaacctgtatcccagactaccgataacaattcagatgaggaagattctggtacgggagaatctgttatggcaccagtagatgtagacctgaacctggtttcaaatatattggaatcctatagctcccaagctggactggcaggacctgcttccaatcttttacaaagcatgggagtgcagctgcctgacaacaccgatcacagaccaacaagtaagccaacaaaaaattaaccagcacatttagcttctcttttttctttttaaataaatattgaatatgattctgttca

SEQ ID NO: 37097 - DNA, 433 bp, Homo sapiens
tttttttttggcacagggtcttgctctattaacccaggctagagtgcagtggcatgatcacagctcactgtagccatgactgcccaggctcaagtgatcctccccaattcagcttcccaagtagctgggactacaggtgtgcaccagaatccctggctaaattttttgttgttgttttttgtagagacaggatctcgctatattgcccaggctgatctcgagctcctggccttaagcaatcctcccaccttggccacccaaagtactgggattacaggcaggagcaatgcactcagctcagtttttttttttttttggggggggggttccagcggtatattttatttctttagaacatcggttgcaaagctgtttagatctttcaaaaacatcaactcttctttttgacgacaaaatggtgaataaattcaga

SEQ ID NO: 37098 - DNA, 213 bp, Homo sapiens
caacccttaacagagctatcctcatgcaacagagaggcgtggaagagagtggttaagaatacggatttggtcgggtgtggtggctcacacctgtaatcccagcagtttggaaggctgaagtgggaggattgctggagcccaggagtttgagaccagcctgggcaacatagcgagaccctgtctctactttcaaattttttttaaataacaatt

SEQ ID NO: 37099 - DNA, 1892 bp, Homo sapiens
  misc_feature (1257)..(1257): n is a, c, g, or t
  misc_feature (1858)..(1858): n is a, c, g, or t
  misc_feature (1879)..(1879): n is a, c, g, or t
  misc_feature (1887)..(1889): n is a, c, g, or t
  misc_feature (1892)..(1892): n is a, c, g, or t
acggcgtcggttgcccgggcaatgggccgcacgctacgaggcccacacacccagaaggtggagccccggccgggttacgaggaccacccagctgtctggagagatgaagaaaatgaggttcaaagagatgaagtctcttgcctaaagtcagtgacagaaagtgacagagctgggatgtgaatcctggtctgactctacagtcccacatggtagatggaacctccgagcaacacctaaacaaagggagttgatgcctccgaacagagtaatgtcgctggagacactaagcatcgtcggcccctggcaggagctccctaaatatgtgttggatggatggaagaaaggatggatagttcagagtacttcagccttgattcctccgcaacagacacctgaaacttgaccctacattggttcttggccatcgtgatcttccttggacagaatcacctttcagctccggtcatcagactttcccagggccctcagaaagcccttcagagttgttactcacaggcaggctgagggattccttacggggtctgcagctctcctcacctcatccacaagtaggaccgtggcctgttcctcactactgccccaggatcactctgttcccagcccagtccagcaatcacttgtctagctttctggaaccttgagtactttcttgaaccatgagtcctgtgaccaccctagcagctctaaccctcccttatctgaaaggaagtgtgaggtgaccttgcaggtcccagagttgattgaagaccccatccagaaagaaggcaccctgtgggagagattgcaaggcctaggtctgaatccggaagcttccaccccatggagaagggctggcaccagcctggggctggcagtggagctgagctttggagccaaggactgtactgcagtgcagggagagtgaggccagaaaggctgagacaactcagggaaagaaaacctcccttctggctaatagtcaagcaccgcctgagtagaccaacactctcctgtccacaggggcagcagatgaagacacaaccagagaggactaacaggccccctcagctctcagtcagagggcagagcaacacagaatagacattaaaggaacagactttgaggccaggcagccttgggtgtgcatctgtccctactaagccatgtgacattaaacaagtgagtccacctctctgagcctcaggttcctcatctgtaaaatggggattataagagttcttgtttctcagggacaangtgaggattaagtgagatgatacacatagagaatgtggtgcagtactgggcacatggcaaagatcagtgatgctagctaccacttatcattagtgttcctgtagaccaggacttctcaaccttggcactattcaccttttgggccagaaagttttttttgttgttgttgtggggagctgtcctatgcatttgaggatgtttaacagcacccctggcctctacccactagatgccaatcacaccacacccccagtttcaacaaccaaaaatgtctgcagatggtgccgaatgtcttctggagggtgaaatcactccccagcagttgaaaagcaccaccctaaacaatctggactgaatttgaatgtcacagatcccaagctcacagctccatgtaaaggccacaaggcaggcaggcctacttgcagatgaaggaacggaaagagcaacaattacagatcaagcggctagctccggtgtagactaagaggcgggatctgtagtctgctctaggagctaacaaggcctctgtgactcagtaggtgacctcagtgtcactctttaattatatgcaaagtggtcttgtgttaactcttaattattntagggctccaaacaagaaaanaggtagtnnntan

SEQ ID NO: 37100 - DNA, 1874 bp, Homo sapiens
  misc_feature (1239)..(1239): n is a, c, g, or t
  misc_feature (1840)..(1840): n is a, c, g, or t
  misc_feature (1861)..(1861): n is a, c, g, or t
  misc_feature (1869)..(1871): n is a, c, g, or t
  misc_feature (1874)..(1874): n is a, c, g, or t
acggcgtcggttgcccgggcaatgggccgcacgctacgaggcccacacacccagaaggtggagccccggccgggttacgaggaccacccagctgtctggagagatgaagaaaatgaggttcaaagagatgaagtctcttgcctaaagtcagtgacagaaagtgacagagctgggatgtgaatcctggtctgactctacagtcccacatggtagatggaacctccgagcaacacctaaacaaagggagttgatgcctccgaacagagtaatgtcgctggagacactaagcatcgtcggcccctggcaggagctccctaaatatgtgttggatggatggaagaaaggatggatagttcagagtacttcagccttgattcctccgcaacagacacctgaaacttgaccctacattggttcttggccatcgtgatcttccttggacagaatcacctttcagctccggtcatcagactttcccagggccctcagaaagcccttcagagttgttactcacaggcaggctgagggattccttacggggtctgcagctctcctcacctcatccacaagtaggaccgtggcctgttcctcactactgccccaggatcactctgttcccagcccagtccagcaatcacttgtctagctttctggaaccttgagtactttcttgaaccatgagtcctgtgaccaccctagcagctctaaccctcccttatctgaaaggaagtgtgaggtgaccttgcaggtcccagagttgattgaagaccccatccagaaagaaggcaccctgtgggagagattgcaaggcctaggtctgaatccggaagcttccaccccatggagaagggtggcagtggagctgagctttggagccaaggactgtactgcagtgcagggagagtgaggccagaaaggctgagacaactcagggaaagaaaacctcccttctggctaatagtcaagcaccgcctgagtagaccaacactctcctgtccacaggggcagcagatgaagacacaaccagagaggactaacaggccccctcagctctcagtcagagggcagagcaacacagaatagacattaaaggaacagactttgaggccaggcagccttgggtgtgcatctgtccctactaagccatgtgacattaaacaagtgagtccacctctctgagcctcaggttcctcatctgtaaaatggggattataagagttcttgtttctcagggacaangtgaggattaagtgagatgatacacatagagaatgtggtgcagtactgggcacatggcaaagatcagtgatgctagctaccacttatcattagtgttcctgtagaccaggacttctcaaccttggcactattcaccttttgggccagaaagttttttttgttgttgttgtggggagctgtcctatgcatttgaggatgtttaacagcacccctggcctctacccactagatgccaatcacaccacacccccagtttcaacaaccaaaaatgtctgcagatggtgccgaatgtcttctggagggtgaaatcactccccagcagttgaaaagcaccaccctaaacaatctggactgaatttgaatgtcacagatcccaagctcacagctccatgtaaaggccacaaggcaggcaggcctacttgcagatgaaggaacggaaagagcaacaattacagatcaagcggctagctccggtgtagactaagaggcgggatctgtagtctgctctaggagctaacaaggcctctgtgactcagtaggtgacctcagtgtcactctttaattatatgcaaagtggtcttgtgttaactcttaattattntagggctccaaacaagaaaanaggtagtnnntan

SEQ ID NO: 37101 - DNA, 156 bp, Homo sapiens
ttactgaccatattggcttatgaatacagatgcaaaaattctgaataaaatattcagtagcatatgaaaagaatgtgaacatgaacagtttgttttagaaaggccagaatgagtttgatcagaagatcttttagggtaataaattaaaggaggaaa

SEQ ID NO: 37102 - DNA, 353 bp, Homo sapiens
cctgccccttgttctaaaagttaactattaaaccatgtgcggttcatcctgatttggtttactcaattctagaaacaaggacatgctgatcagattgccctgggcaattgaatacctactgaagcctttgggaagacagtgttcttcccaccacccctacttaaaaggcttctgttaccagactatcaattctgtgttactggtgaaggatagaaagtatcttcttttgaaggacaagtttttcactcactgagttttctgctttgggtatatactcaacatgttaagtgcttaatcttttttcccccattcccctttttctactgtagtgtgttttgtttgtttgttttttg

SEQ ID NO: 37103 - DNA, 707 bp, Homo sapiens
tttcggcacaggggacacaaatccaaaccatattagtgtacttgaaaagaatgtgttttctatattgttggtgcaatattttatggaccaagttagttaatcatgtttttcaatcttctatatcttactgatttttttcttttttgaaacagagtcttgctctgtcgccgaggctggagtgcagtggcgcgatctcggctcactgcaagctccgcctcctgggttcatgccattctcctgcctcagcctcccgagtagctgggactacaggtgcccaccaccatgcccggctaattttttgtatatttttttagtagagatggggtttcactgtgttaggccagggatggtctcaatctcctgacctcgtgatctgcctgcctcagccttcccaaagtgctggggattacaggtgtgagccactgcacccagccttactgatgtttttgtatgcttttgctatcagttactcagagaagttgttaaaatctctaactatgtaaatggaatgttatccctgtttttagttctgtcaagttctcctttacatattttgaacctgtattattaggtacatgttaattttttaatgtatacgattgttagccctcttaataaggtataatatctcttgtaatatttcttgtcttagagtctactttgttttatattaataaagcacaactgttttcttttggatagtgttt

SEQ ID NO: 37104 - DNA, 428 bp, Homo sapiens
tgacaagcacctaagactgactgtccccaaaataacctgtaaaaattattataaaatacacataacaaaatttgccatcttaatcatttctaagtgtaccattcaggagtgttaagtacatccacttttttgtacggccaatctccggaactcttttcctcttgcaaaactgaatctctatccccattaaacaacaccccatttcccccctaccccgacccctggcaaccaccattctgctttctgtctcaaaaataaaataagataagataaaaaaataaaatataaaaatatcatttaaaaaataatattttctgtttggattgtcacaacaatagttgttggaataagggtgatgttaatttccttttttagattgaatgcctacttgtataatttaatatagttttaaaatgagcaaaaaaaac

SEQ ID NO: 37105 - DNA, 1265 bp, Homo sapiens
ttgactaaacacactgtctcctagggacacagttctgtgtagttaacaggaaatatttattgagtttctatgtggcaggccctgaactaagctttcttttgtatgatttcatttgctccttaaagcaaccctgtgaaatttatatattgtcatcactcccattcgacaggtaaagcattcgaggcttggagagttcaagccactttccctcctcactcagccagtaagtggtagagccaggttcaaacccaggcctgcctccctccaaagtccactttatcatgcttccccagaagaaaatggccacttataataaaaaggtaaattagggccaggtgcagtggctcccgcctgtaatcccagagctttgggagaccaaggcaagaggatcatttgagcccaggtgttcaaggccagcctaggcaacataacgagaccctatctctacaaaaaaaaataataataataatttttctttaattagccaggcatggtggcaagctcctgtagtagtagctactcaggaggctgaggtgggaggattgctggagcccaggtcaaggctgcagtgagctgtgattgtgccactgcactccagcttgggtgacagagcaagaccctgtcccaaataaataagcattatggtttatgagtcagcctcttaagcattcagtgaccagaatgaaggaggaaatagtaaattccttgagcttacaaaacggagccccatatcctgagtgtagggtgaccccactaaggtgtagccaggttcctggtctcttcctagactctctccttaccttcctatggccagcctccgttgtcaaaagaaaaaaaaaaaaaaaaaaaaaaaaaaaaaaaaaaaaaaaaaaaaaaaaaaaaaaaaaaaaaaaaaaaaaaagaaaaaaaaaaaagaaaaaaacaaaaaaaaagagagaagagggggcggcgagcagagaaaacaacaaccgcagcgagaggccacacagatcaggccgacacacagatatcagagagacaggagaaagaaagaggcggaaatataagagagagcgcgggggcgaataaaaagcagcgcggccagagaacacgcgccagacgaaacgagcggaaaagacaccacaccgcggggggggcacagaaaggagagcaacacaacagagaagaaagcacccgcagagagagagaaacaagaggagagaagaaggcaacccacacaaaacgccgggaggagaatacggcaccgaggggataaaaaaatacgg

SEQ ID NO: 37106 - DNA, 494 bp, Homo sapiens
gggagatgaggagagaaagatcagggaggaccatattgtgaaatgcatgccttgaattgctggctaaaggttagggggctgggggttttcagtactagcttagacagtagatacgaattttagtcccgactctaaaatgtagtagtacctcatatggttagggctttgtcacttgtctgggagctgtaaaatcgagcaaataatgtgtcatatctgttttcataggttgttgtgaggctttaatgagataatgggtgaacatgaaagctctgtaaattacagtcatctctcagtatccatggggggttgattccaggacccccctcaggtaccaaaatccccaggtgctgaagtctcctgtgataaaatggcatagtatttgcatataacctacatatgtcttcccatatattttaaattatctcttgattacttgtagtaactaatacagtgtaaatagttgttatactgtattgtttagggaataatgacaa

SEQ ID NO: 37107 - DNA, 387 bp, Homo sapiens
  misc_feature (11)..(11): n is a, c, g, or t
  misc_feature (54)..(54): n is a, c, g, or t
tgagacagagntactggagtgcggttgtacaatattggctcactgcagcctctnctttctgtgcccaggaattctcttgcctgcaggagaattgcttgaacctgggaggcagaggttgcagtgtgccaagatcgtgcccctgcactccagcctgggtaacaaagcgagactctgtctcagaaaaaaaaaaagaaagttatctctaaaaataaggaattgcttaaaagcattattgtttttgattgagttactctttattaaaactaaaattttgtagttattctatttaattttaattgaatgtaatatcaaataatctaaccagtgatctgttggtgtgatggcctaatggcaaataaagtctttgcatacaagtttataatgatt

SEQ ID NO: 37108 - DNA, 785 bp, Homo sapiens
cttttagctatgaaatattttggattgcgtagggtcttgcgcagccgcgaaaagtagcgtgggccaggacagcgggaggtaagtcgccaagaaaagggttgggaagagctcagaatcggacggctaggaagaaatgaccaaaaggagcctgatagccccctattctgcacgctgttcctggaaaccgcctttgcaaagacagtgagagaaatctaacatggctcactccatcttgcttctagcctcgcaggccggctgtcttcgctcattcctgggcataaaccaagctaaccatgggagaatttatagtttaacttttaagcaaggatgatcatagtcccttccttaaacagggcccctccttgtttgggggctgaaactgcctttataaaactaatgaaagaccgggaggttaggattatgaggggagaattctgctaaaatgtagtaaacgataaccagccattgtttcggaggacatcggatgtgtaacttccccaattattcctgtagataacgttatcgtagcacctaagattggtcttttgaggcatttttcagactttcgcattctggcaactaactgaccccacccagactcgtgacccatgacccaaccgcttcttctgtcccactcctcccccaagaggcggactcagctgttgaggagtgtagtccacacccctgtgattgcatctccaaccaatcagcagcatccattccctagtgccctgcccacaccaaactatgaaataccctaacctctgagctgacccttcaggaaa

SEQ ID NO: 37109 - DNA, 1321 bp, Homo sapiens
tgcggccgctggcgacactaggcgcactgaagcccgagccgagccgagcccgagccgccgccgccgccgccgctgctgcgcaccgctcccgggctccctcccagcgcgccggccggggtgtggggggcggcgggccggaggggcgagggcgggccagggggcgcacacgggggttggcgcggaagacaggaccctcagcctcgagggagcccctaggtgaccaggcaaaatggcagttccttccagctggtcctcagatgggcacatctattagcctctgctcttgtaagaagttagctgcagaacccacatgtgaatccttgtaggactctggagaagatcaaatgggagcttagatgtggaagctctttggaaaccaagaaacactctgaaaatgaaaagggaacagtttgtggacttgcgctggcccttggaccacacttcgagtgacattgttatagatgacacggtctcttataggaaaatgcacagtctttcttagattctctacctccctcttccatctcattcccaacatagatctgggtacatgagtggggtcttattataatcttgtgacacccttggatcatgcactaccctctaaataatcaatagtttctactatagagaggctcaatttatcttctccctggaattgggaccactgaaatataactagaacccaactgatcttttgagatgttgtgtgcttgcccttactgctactgccgtagttctgaacatttccccaagcatcaaaaaggccccatggcctcttttcccctagacctctgccagtccaccaacactctcagtggggaagtaagaagcctggtggatcctgcttcccacacaaaggccatgatgagacagatgctttctaagtccgatatatctacccactttctgctgtcacctctgtacctcctgagtcacatggaatgtggtgctgagccaaatggtcagtcttctagaagcagtggaatgttggaggcagcttataccttagctgattcttaaattttcaggaattttgtgagccagtttttaaacacagccattgttgaaaattaaacaatataaacttataatcaaatatattaaaaataaagataatgccctcaactcaaaaaaaaaaaaaaccaacacaaaaaaactacaacaacaaccacaacaaccatcaccgcacccacagcgaaccacacagccgaaacagcaaaacaaagacgcacgcataaagcaccataaccaccataatgcaagatactcacaagtggcgggtctcgcccaacccacccgggcgtcgcctcatctccgt

SEQ ID NO: 37110 - DNA, 616 bp, Homo sapiens
tgcggccgctggcgacactaggcgcactgaagcccgagccgagccgagcccgagccgccgccgccgccgccgctgctgcgcaccgctcccgggctccctcccagcgcgccggccggggtgtggggggcggcgggccggaggggcgagggcgggccagggggcgcacacgggggttggcgcggaagacaggaccctcagcctcgagggagcccctaggtgaccaggcaaaatggcagttccttccagctggtcctcagatgggcacatctattagcctctgctcttgtaagaagttagctgcagaacccacatgtgaatccttgtaggactctggagaagatcaaatgggagcttagatgtggaagctctttggaaaccaagaaacactctgaaaatgaaaagggtggaagagtaaactgttcctgtttctccatcttgacaggaagcagaagttctccttagctgatttttcttcttgccttatactgggttctttaacaccagaacaaaaataaataaataaaagaatcttccagaaattcatgaagagacttcaggtcaggaaagcctgaactttctcatccaacacccgttcaagtcggaggatgctgattaa

SEQ ID NO: 37111 - DNA, 763 bp, Homo sapiens
tgcggccgctggcgacactaggcgcactgaagcccgagccgagccgagcccgagccgccgccgccgccgccgctgctgcgcaccgctcccgggctccctcccagcgcgccggccggggtgtggggggcggcgggccggaggggcgagggcgggccagggggcgcacacgggggttggcgcggaagacaggaccctcagcctcgagggagcccctaggtgaccaggcaaaatggcagttccttccagctggtcctcagatgggcacatctattagcctctgctcttgtaagaagttagctgcagaacccacatgtgaatccttgtaggactctggagaagatcaaatgggagcttagatgtggaagctctttggaaaccaagaaacactctgaaaatgaaaaggcataagaatgtttatcacagcatggcatatattggaagtttagtaaatgaagatacatccaatctgacattctattcacaaccacaaagagataatgtagaaacatatttagtaatgtgagaaaatactaaatattaagtgaaaaaggtggaagagtaaactgttcctgtttctccatcttgacaggaagcagaagttctccttagctgatttttcttcttgccttatactgggttctttaacaccagaacaaaaataaataaataaaagaatcttccagaaattcatgaagagacttcaggtcaggaaagcctgaactttctcatccaacacccgttcaagtcggaggatgctgattaa

SEQ ID NO: 37112 - DNA, 193 bp, Homo sapiens
ccaaaatgctgaaaattacctttttaaagtgctctattgctgcgatttgtagcagacctttttctcctcaggcaaattgatgggtggaagctgagaaatgtatggtaaatgtcacagagctacaaccattcacagacaccaaatctttaggagaataaaaagcacattatctttttctatcagaaaaaaacaa

SEQ ID NO: 37113 - DNA, 487 bp, Homo sapiens
atttgcatttctctgatgaccagtgatgttgagcaccttttcatatgtctgctagccatttgtttgtcctcttttgagaaatgtctattcaaatattttgcccattttttgattggattattatattttttccaatggagttgtttgagttcctcatatattctgattcttaatcccacttcagatgggtagtttgcagatattttcttctgaaagcacttttattatgatattaaacctactgaggaaggtggagccctcatggcctaatcacctcttaaaggctccatctcccaaggattagttggcctttctgagttaatgataatacaggatcctggaagaaaaatataaatgaatggtgtctgctatgggttaaatgtttgttccccccaaaactcacgttgaaatttaattgccaatgtaatggtattgggagatggagcctttaagaggtgatgtcgacgcggccgcgaatttagtagta

SEQ ID NO: 37114 - DNA, 490 bp, Homo sapiens
cccttctcttggttctgtttactaaaacatatcagtgcctgactatgcctgaatgatccatcttccttaaggctgctacaccataactaggagctttaaaaaaaaggggggggcatttactctctgaggcactcaaaaaagcacatgcttttaattgagggatgggggtgacaatggatcattctgttgattttaactatctcatatttgttaacagcatcatttccatggatagctttctgaaagactgcctatccacttagaggtgaggagaagtaataggggaggaaaccctgccgagctgcaaaaagttctaaatccagtcctttaattatcttgcttaaaattctttattggctctttgataccctcagaataaagcaaactgcttaaacatgacttacaaagtaattgctatagtttgaatattgtcccccaaatcacatgttgaaattgattcctagtgtcagaggcggggactgtgagaggt

SEQ ID NO: 37115 - DNA, 456 bp, Homo sapiens
gtactccactggtctcagcctcctaagtagctaggactacaggtgtgtgccaccatgcctggctaatttttaaattttttatggagaagggtcttgctatgttgcccaggctgttctcaaactctggccttcagtaatcctcctgccttagcttcccaaagtactgggattatagacatgagctactgtgcccagccactagacagtcttgaagagaaacaaaatgagcagacttgttttaccagatatctaggcctgctagaaagctgagtaattgggacagtgtgggtgtttgttcaggaatgcaacattagaccctcagaactgaacagaaaacccagaaatagacccaaggcatccacatctacttaatggactcagaggtagtattgcaggccagtgaggaaggatggctactgaataaatgatgcaggctaactggtcatccatatgaaa

SEQ ID NO: 37116 - DNA, 523 bp, Homo sapiens
cagtgcttatttgaaatggacacacacaaacacacacacacacacacacacacacacacacagagattcttatagtctaacacatgaacttgaaccaaatatgtttgagagtcagaagtagttcttatatacaagacactccattgataatcttttgaattatatctctctcctccatccagaccagatatagaaatgagattgggtgaaagcaggtgctgataaaattgtattgaaaatgttggtcaggcatggtgactcagggctgtaatctcagcactttgggaggctgagttgggcagatcacctgaggtcaggagttcgagaccagcctgacagacaagttaaaaacctgtctctactaaaaatacaaaattagctgggcatggtggcacgtgcctgtaatcccagctactcaggaggctgaggcaggagaattacttgaatctgggaagcggaggttgcagtgagctgagattgtgccattgcactccagcctaggcaaaaagcaaaactccatctc

SEQ ID NO: 37117 - DNA, 308 bp, Homo sapiens
ctgtctgatgaaaaatgctaaaggatctaacatatcttttgctggaatcccatacatcttatcttctgcttagctttttgccgccacactattgatccttcatttatagcagggcttagcagattatttgcttttatatggtttacaagctgagaatttgtgttcttaaaaagttgtgaaaatagttgggcacggtgactcataccagtaatcccagcactttgggagagtgagacgggaggatcgcttgagcccaggagtttgagaccagcctgggccacatagcaagacactgtttctaccaaaaa

SEQ ID NO: 37118 - DNA, 164 bp, Homo sapiens
aggccgcccaaagcactggaattataggcatgagccactgcacctggcctgcttgcctttcttaaatgacctcatgtcattgtccagtgaggaatttgtttcagctgaccctgagtgttggtcccgaagttccagccacagctcctctccccaccactgactgt

SEQ ID NO: 37119 - DNA, 432 bp, Homo sapiens
atgaatttctctctgaattccacataattgtcttaaaattatgcaccatttattgttaagagtgaaagattatgtgtcatttattgtagtggtagaagaaaataaaaccaaaacagaatccaatccaaaagcttaggtttttgttgctactacagtaattacatcttcatatacgaaggacagcacattattactgtccaagaatggtgcctcggacaactggttgcttacactgttttcagagatgaaataggaacataagcaggaagatttttgtctaaatatgaagcaagaaaggcttaaatgtctttattcaggggattaggcatcataagtttttttttttttggagaaattgttttcatgatatttcctatctccttttgtcactttgcttttgtcggtaaattttacaactaaataaggattacc

SEQ ID NO: 37120 - DNA, 856 bp, Homo sapiens
cgttcctttaaacttcactggcagacgtttttataattattcacccatagatctgaaatttaaactgctgtaaagtctcctggttactatagactgtagcaatagctgctcctcagcagtaagaacaacatgcctgaaagaaaaatggcctgtagtgatctctttataaaacttcttaagtagttagaaaaatacattactttcaagtactatctataaatgtgttgttgtttcttcttcatatacatttgaacttcaccgtgtcttaaaagtgaatttacacagagctcttcagtttccgttttttaaacattctactccatagtaaactagttaaatgttttttaagaagtttaatcatttttttttcttagtataagatataggactgggcactgtggctcactcctgtaatcccaacactttgggaggctgaggcaggaggattgcttgaggctgggtgtttgcgaccagcctgggcaacatagtgaggcccccctccccatctctaccaaaaaaaaaaaaaaagatataatggaatctcacctcagaaaagattagttttgaaagtcagaaagtgaggcaaaagttgtataaagttaaaattaccctagaaatccctgaggtcatccacaaactacaataatacatgatttagtgcatacaattacatatggcagttcttatgcattttaaaatttaactactgagctgtacttagaaggcagaatggagaattggcattgtaaaaaaatccagaaattaaaatctgctgtttaatataactacaaaatctcatgtagtgaactagggagttggagagaattcagaagtacttttacttcgtgtaagattt

SEQ ID NO: 37121 - DNA, 607 bp, Homo sapiens
ggagtctcactctgttgctaaggctggagtgcaatggcatgatcttggctcactgcaacctctgcctcttggtttcaagtgattctcctgtctcagcctcctgaatatctgagattacaggtgcccaccaccatgcccaggtaattttttgtatttttactagagatgggatttcaccatgtgaaccaggctggtctcaaactcctgacctcaagtgatccacccacctcagcctcccaaagtgctgggattacaggcatgagccccactgtgcccaacctttttctctttccatactacttgttttctttctttatagctggctcacatttcctttccaatttaaaggagtgtatttaacattgcatcttaagacaatgcaatagccatgaagtctttatgagagcaaggtaagaaggaagttaatctataatgaaagtcagcagtgcagagggaagcaatcttccctggcacccttcaataatttgtataacatgttagaaaacaatgcgtgtggctgggtgcagtggctcatgcctgtaatcccatactcacatttttttaaggctcacagtaatttggaattccaacaacttacattttaaat

SEQ ID NO: 37122 - DNA, 1043 bp, Homo sapiens
tctgccttggtccattgaaagaaatatttagtttcatataatgtgaacaaaaaccttaattttgaatgaacatttgatacataggaactcattcaaatcattgattttctggttaactttgttagtagtttgtttttttctgagtcttttgttttaatccagatagtcagtctttttctcctttttacatgcttgaaatgggtaaaaatgaaatatttttacttattcttaaaaatatttccagaatgtcttacacacacatacacttaggaaacaaatacaaatatatagtgatattctctcacattttacagagaaaagcgtagtatacatactttgttttttaatttcacagtagatcttagaggtcttttaatattagcatactgagaactttctcatttttttcataatagtattgtttattccattgtgatgaatatgctattgtttttgaaactagtcccatattggtggacatttaggttgtttccaggtccactattacagataatactacagtgaataagtttgtacatgtatcatttcatatgtatgccaatatttctgcaggataatttcccaaaagtgaaattgctgaatcaaaagatatatccacctgaaatttgattacccatatttttaagcataaaggaagagataaagggaaataaatagaaaaaaaagaaactatagattttcaaaaactttgtttatagatgaaaaaatggaggattagaacttttaagtaattgtccatggtcatgcactccacagaggactgggcatggtgggattcggtggggggggcggggggctgtgtcaggatgctaacccaggtgttcctgattttaaataagctgctatccttcctgttatattcatactgcatgttatgagcaaaaggggagagaagtcgccaactttttggagaaaaagaataaaatcccagactttatttttgggatcatctgaggtgggaagatggcttgggcccaggagtttgagaccagcctgggcaacatgaagagaccccctgtctc

SEQ ID NO: 37123 - DNA, 1355 bp, Homo sapiens
aatatttctggaagaaaatttaatctggcaatatagactaaaaaaaaaaagataagagtatcttgcacagcaggtgcaggtttcccagcagctcaggcaagagtccgatgtttgtgccatctgatcctgatgtctggagagatagccatgtgtgagcctgaatttggcaatgacaaggccagggagccgagcgtgggtggcaggtggcgagtgtcctggtacgaacggtttgtgcagccatgtctggtcgaactgctgggctctgctctcttcatcttcatcgggtgcctgtcggtcattgagaatgggacggacactgggctgctgcagccggccctggcccacgggctggctttggggctcgtgattgccacgctggggaatatcagtggtggacacttcaaccctgcggtgtccctggcagccatgctgatcggaggcctcaacctggtgatgctcctcccgtactgggtctcacagctgctcggggggatgctcggggctgccttggccaaggcggtgagtcctgaggagaggttctggaatgcatctggggcggcctttgtgacagtccaggagcaggggcaggtggcaggggcgttggtggcagagatcatcctgacgacgctgctggccctggctgtatgcatgggtgccatcaatgagaagacaaagggccctctggccccgttctccatcggctttgccgtcaccgtggatatcctggctgggggccctgtgtctggaggctgcatgaatcccgcccgtgcttttggacctgcggtggtggccaaccactggaacttccactggatctactggctgggcccactcctggctggcctgcttgttggactgctcattaggtgcttcattggagatgggaagacccgcctcatcctgaaggctcggtgaagcagagctcgtgggattcctgctgctccaggtgtcctcagctcacctgtcccagactgaggacaggggagttcctgcatttcctgccagggcagaggcccagaggagcgaccccctgcttccactgcttgggcctgctttctcagatagactgactgctgaggaggctctaggttcttggaattcctttgtgctcatcagagaccccagcctggggaacacgctgcccgcactgcccagagagcagtgcaaacaccacaacacgagcgtgtttcttgagaggaatgtccccgagttggacaaggaggctgtttctgcacatcagctcatttcccgcaccccatttctttcttgattgctttgttgggggcctggccacttccttgcttctcaagctgacaattctcactttgcaataaatagtccagtgtttccttcca

SEQ ID NO: 37124 - DNA, 669 bp, Homo sapiens
  misc_feature (36)..(36): n is a, c, g, or t
tcttatctttagtgacatcacccagggaaaaaaaantccaccctagggccctgtgtctggaggctgcatgaatcccgcccgtgcttttggacctgcggtggtggccaaccactggaacttccactggatctactggctgggcccactcctggctggcctgcttgttggactgctcattaggtgcttcattggagatgggaagacccgcctcatcctgaaggctcggtgaagcagagctcgtgggattcctgctgctccaggtgtcctcagctcacctgtcccagactgaggacaggggagttcctgcatttcctgccagggcagaggcccagaggagcgaccccctgcttccactgcttgggcctgctttctcagatagactgactgctgaggaggctctaggttcttggaattcctttgtgctcatcagagaccccagcctggggaacacgctgcccgcactgcccagagagcagtgcaaacaccacaacacgagcgtgtttcttgagaggaatgtccccgagttggacaaggaggctgtttctgcacatcagctcatttcccgcaccccatttctttcttgattgctttgttgggggcctggccacttccttgcttctcaagctgacaattctcactttgcaataaatagtccagtgtttccttcca

SEQ ID NO: 37125 - DNA, 673 bp, Homo sapiens
  misc_feature (39)..(39): n is a, c, g, or t
cccaccatcctcccccctatcgcgatgcgggacaagacngacgccctgagggccctgtgtctggaggctgcatgaatcccgcccgtgcttttggacctgcggtggtggccaaccactggaacttccactggatctactggctgggcccactcctggctggcctgcttgttggactgctcattaggtgcttcattggagatgggaagacccgcctcatcctgaaggctcggtgaagcagagctcgtgggattcctgctgctccaggtgtcctcagctcacctgtcccagactgaggacaggggagttcctgcatttcctgccagggcagaggcccagaggagcgaccccctgcttccactgcttgggcctgctttctcagatagactgactgctgaggaggctctaggttcttggaattcctttgtgctcatcagagaccccagcctggggaacacgctgcccgcactgcccagagagcagtgcaaacaccacaacacgagcgtgtttcttgagaggaatgtccccgagttggacaaggaggctgtttctgcacatcagctcatttcccgcaccccatttctttcttgattgctttgttgggggcctggccacttccttgcttctcaagctgacaattctcactttgcaataaatagtccagtgtttccttcca

SEQ ID NO: 37126 - DNA, 678 bp, Homo sapiens
ataacatctaatattatttattaattaataaatgttataacattgtcatctaaggggccctgtgtctggaggctgcatgaatcccgcccgtgcttttggacctgcggtggtggccaaccactggaacttccactggatctactggctgggcccactcctggctggcctgcttgttggactgctcattaggtgcttcattggagatgggaagacccgcctcatcctgaaggctcggtgaagcagagctcgtgggattcctgctgctccaggtgtcctcagctcacctgtcccagactgaggacaggggagttcctgcatttcctgccagggcagaggcccagaggagcgaccccctgcttccactgcttgggcctgctttctcagatagactgactgctgaggaggctctaggttcttggaattcctttgtgctcatcagagaccccagcctggggaacacgctgcccgcactgcccagagagcagtgcaaacaccacaacacgagcgtgtttcttgagaggaatgtccccgagttggacaaggaggctgtttctgcacatcagctcatttcccgcaccccatttctttcttgattgctttgttgggggcctggccacttccttgcttctcaagctgacaattctcactttgcaataaatagtccagtgtttccttcca

SEQ ID NO: 37127 - DNA, 658 bp, Homo sapiens
cccccacctctacgccgcaaaggcaccccccttcgggccctgtgtctggaggctgcatgaatcccgcccgtgcttttggacctgcggtggtggccaaccactggaacttccactggatctactggctgggcccactcctggctggcctgcttgttggactgctcattaggtgcttcattggagatgggaagacccgcctcatcctgaaggctcggtgaagcagagctcgtgggattcctgctgctccaggtgtcctcagctcacctgtcccagactgaggacaggggagttcctgcatttcctgccagggcagaggcccagaggagcgaccccctgcttccactgcttgggcctgctttctcagatagactgactgctgaggaggctctaggttcttggaattcctttgtgctcatcagagaccccagcctggggaacacgctgcccgcactgcccagagagcagtgcaaacaccacaacacgagcgtgtttcttgagaggaatgtccccgagttggacaaggaggctgtttctgcacatcagctcatttcccgcaccccatttctttcttgattgctttgttgggggcctggccacttccttgcttctcaagctgacaattctcactttgcaataaatagtccagtgtttccttcca

SEQ ID NO: 37128 - DNA, 1633 bp, Homo sapiens
  misc_feature (1362)..(1362): n is a, c, g, or t
  misc_feature (1364)..(1364): n is a, c, g, or t
aatatttctggaagaaaatttaatctggcaatatagactaaaaaaaaaaagataagagtatcttgcacagcaggtgcaggtttcccagcagctcaggcaagagtccgatgtttgtgccatctgatcctgatgtctggagagatagccatgtgtgagcctgaatttggcaatgacaaggccagggagccgagcgtgggtggcaggtggcgagtgtcctggtacgaacggtttgtgcagccatgtctggtcgaactgctgggctctgctctcttcatcttcatcgggtgcctgtcggtcattgagaatgggacggacactgggctgctgcagccggccctggcccacgggctggctttggggctcgtgattgccacgctggggaatatcagtggtggacacttcaaccctgcggtgtccctggcagccatgctgatcggaggcctcaacctggtgatgctcctcccgtactgggtctcacagctgctcggggggatgctcggggctgccttggccaaggcggtgagtcctgaggagaggttctggaatgcatctggggcggcctttgtgacagtccaggagcaggggcaggtggcaggggcgttggtggcagagatcatcctgacgacgctgctggccctggctgtatgcatgggtgccatcaatgagaagacaaagggccctctggccccgttctccatcggctttgccgtcaccgtggatatcctggctgggggccctgtgtctggaggctgcatgaatcccgcccgtgcttttggacctgcggtggtggccaaccactggaacttccactggatctactggctgggcccactcctggctggcctgcttgttggactgctcattaggtgcttcattggagatgggaagacccgcctcatcctgaaggctcggtgaagcagagctcgtgggattcctgctgctccaggtgtcctcagctcacctgtcccagactgaggacaggggagttcctgcatttcctgccagggcagaggcccagaggagcgaccccctgcttccactgcttgggcctgctttctcagatagactgactgctgaggaggctctaggttcttggaattcctttgtgctcatcagagaccccagcctggggaacacgctgcccgcactgcccagagagcagtgcaaacaccacaacacgagcgtgtttcttgagaggaatgtccccgagttggacaaggaggctgtttctgcacatcagctcatttcccgcaccccatttctttcttgattgctttgttgggggcctggccacttccttgcttctcaagctgacaattctcactttgcaataaatagtccagtgtttccttccaaaaaaananaaaactggctccgtggcctccctggggaactctgcggccgcttcctttcatggaggttaatcaatgacctcctccctgcctcatggcctggcccgccggttgagggaccgtgtcaactcctcacggggggaaccggttccccacataggggcatccccgaacaactccaccaaaggcctcacggccgaaccggaaaggcgcgctgtggcgtatttctagtctcccccctgaagaaatacgaataccatctcagctgaggggcgaccccc

SEQ ID NO: 37129 - DNA, 381 bp, Homo sapiens
ttttgagctggagtctcgctcttggtgccccaggctggagtgcaatgatgcgatcttggctcactgcaacctccgcctcccgggttcaagagattctcctgcctcagcctcccaagtagctgggactacaggtgcgcgccacactcccggctaatttttgtatttttagtagagatgatgtttcaccatgttggccaggatggtcttaatctcttgacctcgtgatccacccgccttggccttccaaagtgctgggattacaggcatgtgccaccgtgcctggccaagagtttttattattctacagcggcttttaaaaattgtaaatattggtcaggtttggtggctcatgcctgtaatccagcactttggaaggcagac

SEQ ID NO: 37130 - DNA, 402 bp, Homo sapiens
  misc_feature (354)..(354): n is a, c, g, or t
  misc_feature (357)..(357): n is a, c, g, or t
gttgaccaaagcatcattatgaggcatatgactatatcttctctgccatcatgcctggagaaaacagattttcatcatctctcaaaccctaaacacttccctggaattattactctgcaaattcatttgaattcacctgaaaggagaaataagactaaaagcttttagagttgggtttatacacacctatactgagcataaactctttccatatggcaaacatcttattgaacgctctagagtaggaataaagtctatatcatgcctaccattcaggcatcttggggatgggaaattaggatttgtgtgtacccaacctattaaatatttcaagggcctggctggtattcaatncanggcccctggtttttacaatttactttttccctggttattaaattt

SEQ ID NO: 37131 - DNA, 431 bp, Homo sapiens
agtttcagtatagtttgggctactaggtagaaatagaattgttaaaatattgaatgtaaatattcttaaaacaggttttaactaaataggcatatagttatgatgtacactaacaaatttaactatatatgtcagtattttgaagacttaaattcaccaaagctttcacaaaacaagatgtgaacagtcatagggatagcatccattggcttatgaaataatcttagcctagtgattgacagttaacttttattcatagattctgaaactgctttacaaatgtttgttccactttgtaaaaccatctgctatgtagtagagagtcttaattttaatgtacctgtctttaaataattgaaaactaaagcagtttattattctgaagtagcaacacagatcattttgtatctcagacttttcttttttttttt

SEQ ID NO: 37132 - DNA, 394 bp, Homo sapiens
gataaatgtacatggctcaaagcccaccattgactgatcacacattttcaccatatcatctagtgattattgttccacccatgtttataatttcctcttcatcatcactataaccctcatgattatctgtatttaaaaccatttctgggccaggcgcagtggctcacgccggtaatcccaacactttgggaggccaaagcagtaggatcgcttgaggccaggagttcaagactagcctggacaacattgcaagacctcatccctacgaaacagttttaaaaatcagcttagcattctggcatgcacctgtagtcccagctactcgggaggctaaggtgggaagattgcttgagcccaagaatttgaggcttcagtgagctcccatcacatcctt

SEQ ID NO: 37133 - DNA, 423 bp, Homo sapiens
aaaaatgtatttatatttacccacataattaatattttggttcacttttatctttcctgcatcttcatctatttgttttgaataatatttcattcatttgaagaatatctgctgcttaaaacttgttcaacatttgtttaaaatgtgtttcactctcattctagatggatatttttgttgagtgtacatctacattttgttctttttttaagatatttttctttttttttctttcatagctgaactgtgtgtgcctgggtggattaattttttgaaaagaaattttctgcttgggattatcaggcttattgaatctgtcacttaataaatatatttcacaatttctcaaaattgcccatacataatatcttacaaggttacttttgtcccatctttccctctcctcctttcaaaaagatgtgt

SEQ ID NO: 37134 - DNA, 306 bp, Homo sapiens
gtgtgagatagagattaaggcttacttttttccacatggatgtcagttatctttttactatttgttcaaaagactttccatcctcttttggactgtctaggcacttttgtaaaatattaaatgactataaatgtgggtctctttgttagactccttaatctgttgcattgatctatttgttgatccttaagccagtaccatactgtttagattactcagcccatgctatgttttgaagtcagattgtgtaacttctacagctttccaagcttttttgggatgttttagatccttcacatttccata

SEQ ID NO: 37135 - DNA, 727 bp, Homo sapiens
gcattcacgtgtccgtgcgaatcacaatatagaagcagctgccatccatagatcgctaaggtggtatttaattttgtaattcagctgagggtcactgggagctttgtttccatttctgctcttaacgcgttaaactttgaagagttattcagcagactgttattttcaagttccctacataagatttcatgctttattggctaccattttctattattaagtcattttgctattcaatataccttggaagttagataaattttgagaaggaaaataaaattagatgctatcttaactttaacaaaaaactctgttgctgcatgttgaagagctgataaatgaattacactttgcagtctttgccccctcccccgccgccaccccatcattttagaggagaaaattgtacctaactagttactgatatacagaagatggcaataatccccctgggagagtttagaagggaaaaataaattgttacacctataggacagttctggcttgttaaagaatttcaagccatttgatcttgggtgactttaacataacttactaggtttttggggggtacaatagttgtatttgttaaacttgtaaatttatgagcattggaatgatgtctcctaagctggacttgttgaactaagatttttttttagccttcatcttccaccaaccataagatttcagtgcacaggtaaaaggcaatctttgaccaagtttt

SEQ ID NO: 37136 - DNA, 370 bp, Homo sapiens
accccgcctccgaggctcaagtgatcctcccacctcaggctcctgagtagctgagactacaggctaattttttgtattttttagaggtggggtttcactatgttgcccagggtgatctcgaactcgtgagctcaagcaacacgcccgcctcagcctcccaaagtgttgagattacaggcatgagccaccgcgcccagcctcaacttttctttatgcttcaaactgttcatataaaaagggtgaaaaaaaagtatcattgtgttcctatcagtatttatgagtcacagtatttctcttcaagaaaaaaaaagagacatttaatttttggaggcacaaaaaggaaaacacaagtggaaaaaaatgccttttg

SEQ ID NO: 37137 - DNA, 450 bp, Homo sapiens
ggaatgtacaaagttcattgtccatccggacacccaggaataagtgagaggtacatactaattagtattttctaacattgcttacttctgccccctgcctagtcacaggctgagagaagaatgcagcaagaagcatcttaactggaggcccattctaagtccattttgaggatgaggaaacaggccagggaggttaaacgacttgtcccaggtactgtggctggaagagaggctataccttacctactctcctgggtgcccttttacctctgtctttagaggaagtgcatagatttttctcatttggctcttgagacctgggataaacatagtgctaccctaagtcttgcagttacaagaatggaaatattctgatttaagttatagacatttgtttgaattttaccattacacattttttaaatcacagataagatttttcacttgaat

SEQ ID NO: 37138 - DNA, 340 bp, Homo sapiens
tgcttcctctactctatgtttattttatgtaaagtgcagatttactgagcagaagacaaatacataattgactgttccctctacccctccttttgtagtgcaacatgtggattcagtgagccgtatcaaaaccttgaaagaatgtgaccataccctccctcttttttttcctttttcccctttcccctcctgcccacttttccacatttaaatattgaatacttcaaaatcctatttggaaaaaagtacaggtcacagatcctacaatcctactgtggcttgtgtctctttttccgaggcacatcctcaaccttggaaaaataaacttttaaattgattg

SEQ ID NO: 37139 - DNA, 504 bp, Homo sapiens
cagcgtgttgctagttagtaggaaatgatcgtgtgtgctgttgctttaattgcccgggtaaataattctgcctcggtgttagtgagcattttaaagcacttgatgccaatagactagaaacaaacaaaaattaaccttgattatgcaacaccttagcatagaaagttacaaaggtatgtcttttttaaagtttgcattctatcatgcaaatattatctaaatatgcatgtgctgactactcatctactgtattttaggaaatacaattaggctgcctttctcttcccctatgtagactgtaaataactgtagatctttctcttgtttccctatgtaaatatatgtaaatactaacaagctatgcatgctgctattctaggcaatttcaggtacttttataatatgaaggcatgtacttgaactcgtttgttaacagaggggaaaaaactctctcaaactctttaaagctgaatagaaattaaagatttcttcctagactgttgt

SEQ ID NO: 37140 - DNA, 849 bp, Homo sapiens
cttcggctaggtcgaggctcggtggttaatcggccgagggcccagagcttcgctcttgctgctcccctgaggtgaactgaagccagcagccccgcatcatgtcaaagctcggccgggccgcccggggcctcaggaagcccgaggtcggcggtgtgatccgggcgatcgtgcgggcaggcctggccatgcccgggcccccactaggcccagtgctgggtcagagaggcgtttccatcaaccagttttgcaaggagttcaatgagaggacaaaggacatcaaggaaggcattcctctgcctaccaagattttagtgaagcctgacaggacatttgaaattaagattggacagcccactgtttcctacttcctgaaggcagcagctgggattgaaaagggggcccggcaaacagggaaagaggtggcaggcctggtgaccttgaagcatgtgtatgagattgcccgcatcaaagctcaggatgaggcatttgccctgcaggatgtacccctgtcgtctgttgtccgctccatcatcgggtctgcccgttctctgggcattcgcgtggtgaaggacctcagttcagaagagcttgcagctttccagaaggaacgagccatcttcctggctgctcagaaggaggcagatttggctgcccaagaagaagctgccaagaagtgacccttgccccaccaactcccagatttcaaaggaggtagttgcaaaagctgtgcccaaggggaggaaggaggtcacaccaatatgatgatggttttcatgactttgaatgatatatttttgtacatctagctgtatcgaggcatcaggcctgaataaacatcctttcttaccc

SEQ ID NO: 37141 - DNA, 1279 bp, Homo sapiens
caagcaaatgaatacttttattaacatggtaagtttttgtttgttttaacatggtagggttttgacctcaaatatttgttaggtctgctactcaaatgaacttacagctggacaacgtatgaaccttgaagatgcctcttctagtccagtttagggtccaatgcagacagttccatactctcatccccaagcccctcaagggcctttgccaatctttcattttatgccaagtcctctaaaacgcatcagggtattacatcaacttgtacagaatatcaagatcttatcttctattttaggttccatgtcaaataaagctgagttaggttgtccaaacaaactcaccagacaggttacataagatagtgtaccacaacaaatttaaattttgaacaaaacacatctctcctcctttggtctcacacagaaattaaagtctccaaatacagacaatactatccattctccagctcttctccagattcacgagtcccagccaggtcggcccatccacactcccccttgacctctggcccaagatggtggcgcccagagcttcgctcttgctgctcccctgaggtgaactgaagccagcagccccgcatcatgtcaaagctcggccgggccgcccggggcctcaggaagcccgagagaggcgtttccatcaaccagttttgcaaggagttcaatgagaggacaaaggacatcaaggaaggcattcctctgcctaccaagattttagtgaagcctgacaggacatttgaaattaagattggacagcccactgtttcctacttcctgaaggcagcagctgggattgaaaagggggcccggcaaacagggaaagaggtggcaggcctggtgaccttgaagcatgtgtatgagattgcccgcatcaaagctcaggatgaggcatttgccctgcaggatgtacccctgtcgtctgttgtccgctccatcatcgggtctgcccgttctctgggcattcgcgtggtgaaggacctcagttcagaagagcttgcagctttccagaaggaacgagccatcttcctggctgctcagaaggaggcagatttggctgcccaagaagaagctgccaagaagtgacccttgccccaccaactcccagatttcaaaggaggtagttgcaaaagctgtgcccaaggggaggaaggaggtcacaccaatatgatgatggttttcatgactttgaatgatatatttttgtacatctagctgtatcgaggcatcaggcctgaataaacatcctttcttaccc

SEQ ID NO: 37142 - DNA, 1357 bp, Homo sapiens
caagcaaatgaatacttttattaacatggtaagtttttgtttgttttaacatggtagggttttgacctcaaatatttgttaggtctgctactcaaatgaacttacagctggacaacgtatgaaccttgaagatgcctcttctagtccagtttagggtccaatgcagacagttccatactctcatccccaagcccctcaagggcctttgccaatctttcattttatgccaagtcctctaaaacgcatcagggtattacatcaacttgtacagaatatcaagatcttatcttctattttaggttccatgtcaaataaagctgagttaggttgtccaaacaaactcaccagacaggttacataagatagtgtaccacaacaaatttaaattttgaacaaaacacatctctcctcctttggtctcacacagaaattaaagtctccaaatacagacaatactatccattctccagctcttctccagattcacgagtcccagccaggtcggcccatccacactcccccttgacctctggcccaagatggtggcgcccagagcttcgctcttgctgctcccctgaggtgaactgaagccagcagccccgcatcatgtcaaagctcggccgggccgcccggggcctcaggaagcccgaggtcggcggtgtgatccgggcgatcgtgcgggcaggcctggccatgcccgggcccccactaggcccagtgctgggtcagagaggcgtttccatcaaccagttttgcaaggagttcaatgagaggacaaaggacatcaaggaaggcattcctctgcctaccaagattttagtgaagcctgacaggacatttgaaattaagattggacagcccactgtttcctacttcctgaaggcagcagctgggattgaaaagggggcccggcaaacagggaaagaggtggcaggcctggtgaccttgaagcatgtgtatgagattgcccgcatcaaagctcaggatgaggcatttgccctgcaggatgtacccctgtcgtctgttgtccgctccatcatcgggtctgcccgttctctgggcattcgcgtggtgaaggacctcagttcagaagagcttgcagctttccagaaggaacgagccatcttcctggctgctcagaaggaggcagatttggctgcccaagaagaagctgccaagaagtgacccttgccccaccaactcccagatttcaaaggaggtagttgcaaaagctgtgcccaaggggaggaaggaggtcacaccaatatgatgatggttttcatgactttgaatgatatatttttgtacatctagctgtatcgaggcatcaggcctgaataaacatcctttcttaccc

SEQ ID NO: 37143 - DNA, 2119 bp, Homo sapiens
caagcaaatgaatacttttattaacatggtaagtttttgtttgttttaacatggtagggttttgacctcaaatatttgttaggtctgctactcaaatgaacttacagctggacaacgtatgaaccttgaagatgcctcttctagtccagtttagggtccaatgcagacagttccatactctcatccccaagcccctcaagggcctttgccaatctttcattttatgccaagtcctctaaaacgcatcagggtattacatcaacttgtacagaatatcaagatcttatcttctattttaggttccatgtcaaataaagctgagttaggttgtccaaacaaactcaccagacaggttacataagatagtgtaccacaacaaatttaaattttgaacaaaacacatctctcctcctttggtctcacacagaaattaaagtctccaaatacagacaatactatccattctccagctcttctccagattcacgagtcccagccaggtcggcccatccacactcccccttgacctctggcccaagatggtggcgcccagagcttcgctcttgctgctcccctgaggtgaactgaagccagcagccccgcatcatgtcaaagctcggccgggccgcccggggcctcaggaagcccgaggtcggcggtgtgatccgggcgatcgtgcgggcaggcctggccatgcccgggcccccactaggcccagtgctgggtcagagaggcgtttccatcaaccagttttgcaaggagttcaatgagaggacaaaggacatcaaggaaggcattcctctgcctaccaagattttagtgaagcctgacaggacatttgaaattaagattggacagcccactgtttcctacttcctgaaggcagcagctgggattgaaaagggggcccggcaaacagggaaagaggtggcaggcctggtgaccttgaagcatgtgtatgagattgcccgcatcaaagctcaggatgaggcatttgccctgcaggatgtacccctgtcgtctgttgtccgctccatcatcgggtctgcccgttctctgggcattcgcgtggtgaaggacctcagttcagaagagcttgcagctttccagaaggaacgagccatcttcctggctgctcagaaggaggcagatttggctgcccaagaagaagctgccaagaagtgacccttgccccaccaactcccagatttcaaaggaggtagttgcaaaagctgtgcccaaggggaggaaggaggtcacaccaatatgatgatggttttcatgactttgaatgatatatttttgtacatctagctgtatcgaggcatcaggcctgaataaacatcctttcttacccactgtcatcttctatcttgggacctcagggaagggaaccagtactggtggtagccaatatgggcagacattaggaaattggggtcttcatactgcttctcagatgtgcaaactgaggttcagccaagcaaagtaacttgcccaggtccttttttttcttttttaagttataattttgttttattgcccaggttctgaattggtgccagaggtaggaatagaacccaggccttctcatttgaaatcctgtgttcttcccctccccagggtgggaactatggttgctagggctgaggtgtattgcttacttcttccatcaaaaatctcttttatctctgaacaacttgccacctctgcagaaacaagtccctgtggagatctcagttcagccccaggcagggttactacatggagtacccagatcccaggggctacttcaggcccttctactaagctcctgaccctggctctgggtcagatgttggctgaacatgaactattgtagggctgacagctacagaccacagaaagagcaaagcttcagtaggttcctgcctgatggagaagtcctcgggaagcccttggccttctatttcctcattgtcctttcagagaagagagcaggagttgggggagaaaggagattcgcatttactgaccatctgttatgtgctagacacttcattttacactgagaaaatatggaaagcatagataaacacctaaaagaaaataaaaacctcatgttatcccaccacccaga

SEQ ID NO: 37144 - DNA, 1207 bp, Homo sapiens
caagcaaatgaatacttttattaacatggtaagtttttgtttgttttaacatggtagggttttgacctcaaatatttgttaggtctgctactcaaatgaacttacagctggacaacgtatgaaccttgaagatgcctcttctagtccagtttagggtccaatgcagacagttccatactctcatccccaagcccctcaagggcctttgccaatctttcattttatgccaagtcctctaaaacgcatcagggtattacatcaacttgtacagaatatcaagatcttatcttctattttaggttccatgtcaaataaagctgagttaggttgtccaaacaaactcaccagacaggttacataagatagtgtaccacaacaaatttaaattttgaacaaaacacatctctcctcctttggtctcacacagaaattaaagtctccaaatacagacaatactatccattctccagctcttctccagattcacgagtcccagccaggtcggcccatccacactcccccttgacctctggcccaagatggtggcgcccagagcttcgctcttgctgctcccctgagagaggcgtttccatcaaccagttttgcaaggagttcaatgagaggacaaaggacatcaaggaaggcattcctctgcctaccaagattttagtgaagcctgacaggacatttgaaattaagattggacagcccactgtttcctacttcctgaaggcagcagctgggattgaaaagggggcccggcaaacagggaaagaggtggcaggcctggtgaccttgaagcatgtgtatgagattgcccgcatcaaagctcaggatgaggcatttgccctgcaggatgtacccctgtcgtctgttgtccgctccatcatcgggtctgcccgttctctgggcattcgcgtggtgaaggacctcagttcagaagagcttgcagctttccagaaggaacgagccatcttcctggctgctcagaaggaggcagatttggctgcccaagaagaagctgccaagaagtgacccttgccccaccaactcccagatttcaaaggaggtagttgcaaaagctgtgcccaaggggaggaaggaggtcacaccaatatgatgatggttttcatgactttgaatgatatatttttgtacatctagctgtatcgaggcatcaggcctgaataaacatcctttcttaccc

SEQ ID NO: 37145 - DNA, 1397 bp, Homo sapiens
  misc_feature (1379)..(1379): n is a, c, g, or t
  misc_feature (1383)..(1383): n is a, c, g, or t
caagcaaatgaatacttttattaacatggtaagtttttgtttgttttaacatggtagggttttgacctcaaatatttgttaggtctgctactcaaatgaacttacagctggacaacgtatgaaccttgaagatgcctcttctagtccagtttagggtccaatgcagacagttccatactctcatccccaagcccctcaagggcctttgccaatctttcattttatgccaagtcctctaaaacgcatcagggtattacatcaacttgtacagaatatcaagatcttatcttctattttaggttccatgtcaaataaagctgagttaggttgtccaaacaaactcaccagacaggttacataagatagtgtaccacaacaaatttaaattttgaacaaaacacatctctcctcctttggtctcacacagaaattaaagtctccaaatacagacaatactatccattctccagctcttctccagattcacgagtcccagccaggtcggcccatccacactcccccttgacctctggcccaagatggtggcgcccagagcttcgctcttgctgctcccctgaggtgaactgaagccagcagccccgcatcatgtcaaagctcggccgggccgcccggggcctcaggaagcccgaggtcggcggtgtgatccgggcgatcgtgcgggcaggcctggccatgcccgggcccccactaggcccagtgctgggtcagagaggcgtttccatcaaccagttttgcaaggagttcaatgagaggacaaaggacatcaaggaaggcattcctctgcctaccaagattttagtgaagcctgacaggacatttgaaattaagattggacagcccactgtttcctacttcctgaaggcagcagctgggattgaaaagggggcccggcaaacagggaaagaggtggcaggcctggtgaccttgaagcatgtgtatgagattgcccgcatcaaagctcaggatgaggcatttgccctgcaggatgtacccctgtcgtctgttgtccgctccatcatcgggtctgcccgttctctgggcattcgcgtggtgaaggacctcagttcagaagagcttgcagctttccagaaggaacgagccatcttcctggctgctcagaaggaggcagatttggctgcccaagaagaagctgccaagaagtgacccttgccccaccaactcccagatttcaaaggaggtagttgcaaaagctgtgcccaaggggaggaaggaggtcacaccaatatgatgatggttttcatgactttgaatgatatatttttgtacatctagctgtatcgaggcatcaggcctgaataaacatcctttcttacccaaaaaaaaagaaaaaaaacaanaaanaacaaacacacaaa

SEQ ID NO: 37146 - DNA, 2041 bp, Homo sapiens
caagcaaatgaatacttttattaacatggtaagtttttgtttgttttaacatggtagggttttgacctcaaatatttgttaggtctgctactcaaatgaacttacagctggacaacgtatgaaccttgaagatgcctcttctagtccagtttagggtccaatgcagacagttccatactctcatccccaagcccctcaagggcctttgccaatctttcattttatgccaagtcctctaaaacgcatcagggtattacatcaacttgtacagaatatcaagatcttatcttctattttaggttccatgtcaaataaagctgagttaggttgtccaaacaaactcaccagacaggttacataagatagtgtaccacaacaaatttaaattttgaacaaaacacatctctcctcctttggtctcacacagaaattaaagtctccaaatacagacaatactatccattctccagctcttctccagattcacgagtcccagccaggtcggcccatccacactcccccttgacctctggcccaagatggtggcgcccagagcttcgctcttgctgctcccctgaggtgaactgaagccagcagccccgcatcatgtcaaagctcggccgggccgcccggggcctcaggaagcccgagagaggcgtttccatcaaccagttttgcaaggagttcaatgagaggacaaaggacatcaaggaaggcattcctctgcctaccaagattttagtgaagcctgacaggacatttgaaattaagattggacagcccactgtttcctacttcctgaaggcagcagctgggattgaaaagggggcccggcaaacagggaaagaggtggcaggcctggtgaccttgaagcatgtgtatgagattgcccgcatcaaagctcaggatgaggcatttgccctgcaggatgtacccctgtcgtctgttgtccgctccatcatcgggtctgcccgttctctgggcattcgcgtggtgaaggacctcagttcagaagagcttgcagctttccagaaggaacgagccatcttcctggctgctcagaaggaggcagatttggctgcccaagaagaagctgccaagaagtgacccttgccccaccaactcccagatttcaaaggaggtagttgcaaaagctgtgcccaaggggaggaaggaggtcacaccaatatgatgatggttttcatgactttgaatgatatatttttgtacatctagctgtatcgaggcatcaggcctgaataaacatcctttcttacccactgtcatcttctatcttgggacctcagggaagggaaccagtactggtggtagccaatatgggcagacattaggaaattggggtcttcatactgcttctcagatgtgcaaactgaggttcagccaagcaaagtaacttgcccaggtccttttttttcttttttaagttataattttgttttattgcccaggttctgaattggtgccagaggtaggaatagaacccaggccttctcatttgaaatcctgtgttcttcccctccccagggtgggaactatggttgctagggctgaggtgtattgcttacttcttccatcaaaaatctcttttatctctgaacaacttgccacctctgcagaaacaagtccctgtggagatctcagttcagccccaggcagggttactacatggagtacccagatcccaggggctacttcaggcccttctactaagctcctgaccctggctctgggtcagatgttggctgaacatgaactattgtagggctgacagctacagaccacagaaagagcaaagcttcagtaggttcctgcctgatggagaagtcctcgggaagcccttggccttctatttcctcattgtcctttcagagaagagagcaggagttgggggagaaaggagattcgcatttactgaccatctgttatgtgctagacacttcattttacactgagaaaatatggaaagcatagataaacacctaaaagaaaataaaaacctcatgttatcccaccacccaga

SEQ ID NO: 37147 - DNA, 1319 bp, Homo sapiens
  misc_feature (1301)..(1301): n is a, c, g, or t
  misc_feature (1305)..(1305): n is a, c, g, or t
caagcaaatgaatacttttattaacatggtaagtttttgtttgttttaacatggtagggttttgacctcaaatatttgttaggtctgctactcaaatgaacttacagctggacaacgtatgaaccttgaagatgcctcttctagtccagtttagggtccaatgcagacagttccatactctcatccccaagcccctcaagggcctttgccaatctttcattttatgccaagtcctctaaaacgcatcagggtattacatcaacttgtacagaatatcaagatcttatcttctattttaggttccatgtcaaataaagctgagttaggttgtccaaacaaactcaccagacaggttacataagatagtgtaccacaacaaatttaaattttgaacaaaacacatctctcctcctttggtctcacacagaaattaaagtctccaaatacagacaatactatccattctccagctcttctccagattcacgagtcccagccaggtcggcccatccacactcccccttgacctctggcccaagatggtggcgcccagagcttcgctcttgctgctcccctgaggtgaactgaagccagcagccccgcatcatgtcaaagctcggccgggccgcccggggcctcaggaagcccgagagaggcgtttccatcaaccagttttgcaaggagttcaatgagaggacaaaggacatcaaggaaggcattcctctgcctaccaagattttagtgaagcctgacaggacatttgaaattaagattggacagcccactgtttcctacttcctgaaggcagcagctgggattgaaaagggggcccggcaaacagggaaagaggtggcaggcctggtgaccttgaagcatgtgtatgagattgcccgcatcaaagctcaggatgaggcatttgccctgcaggatgtacccctgtcgtctgttgtccgctccatcatcgggtctgcccgttctctgggcattcgcgtggtgaaggacctcagttcagaagagcttgcagctttccagaaggaacgagccatcttcctggctgctcagaaggaggcagatttggctgcccaagaagaagctgccaagaagtgacccttgccccaccaactcccagatttcaaaggaggtagttgcaaaagctgtgcccaaggggaggaaggaggtcacaccaatatgatgatggttttcatgactttgaatgatatatttttgtacatctagctgtatcgaggcatcaggcctgaataaacatcctttcttacccaaaaaaaaagaaaaaaaacaanaaanaacaaacacacaaa

SEQ ID NO: 37148 - DNA, 2213 bp, Homo sapiens
caagcaaatgaatacttttattaacatggtaagtttttgtttgttttaacatggtagggttttgacctcaaatatttgttaggtctgctactcaaatgaacttacagctggacaacgtatgaaccttgaagatgcctcttctagtccagtttagggtccaatgcagacagttccatactctcatccccaagcccctcaagggcctttgccaatctttcattttatgccaagtcctctaaaacgcatcagggtattacatcaacttgtacagaatatcaagatcttatcttctattttaggttccatgtcaaataaagctgagttaggttgtccaaacaaactcaccagacaggttacataagatagtgtaccacaacaaatttaaattttgaacaaaacacatctctcctcctttggtctcacacagaaattaaagtctccaaatacagacaatactatccattctccagctcttctccagattcacgagtcccagccaggtcggcccatccacactcccccttgacctctggcccaagatggtggcgcccagagcttcgctcttgctgctcccctgaggtgaactgaagccagcagccccgcatcatgtcaaagctcggccgggccgcccggggcctcaggaagcccgaggtcggcggtgtgatccgggcgatcgtgcgggcaggcctggccatgcccgggcccccactaggcccagtgctgggtcagagaggcgtttccatcaaccagttttgcaaggagttcaatgagaggacaaaggacatcaaggaaggcattcctctgcctaccaagattttagtgaagcctgacaggacatttgaaattaagattggacagcccactgtttcctacttcctgaaggcagcagctgggattgaaaagggggcccggcaaacagggaaagaggtggcaggcctggtgaccttgaagcatgtgtatgagattgcccgcatcaaagctcaggatgaggcatttgccctgcaggatgtacccctgtcgtctgttgtccgctccatcatcgggtctgcccgttctctgggcattcgcgtggtgaaggaacgttgttctgcaaatgttctaagaaatggaaagatctccatgaaggatccaagtgggagaagttcagtgtgacctgggtctgtcgtcctagagcctcagttcagaagagcttgcagctttccagaaggaacgagccatcttcctggctgctcagaaggaggcagatttggctgcccaagaagaagctgccaagaagtgacccttgccccaccaactcccagatttcaaaggaggtagttgcaaaagctgtgcccaaggggaggaaggaggtcacaccaatatgatgatggttttcatgactttgaatgatatatttttgtacatctagctgtatcgaggcatcaggcctgaataaacatcctttcttacccactgtcatcttctatcttgggacctcagggaagggaaccagtactggtggtagccaatatgggcagacattaggaaattggggtcttcatactgcttctcagatgtgcaaactgaggttcagccaagcaaagtaacttgcccaggtccttttttttcttttttaagttataattttgttttattgcccaggttctgaattggtgccagaggtaggaatagaacccaggccttctcatttgaaatcctgtgttcttcccctccccagggtgggaactatggttgctagggctgaggtgtattgcttacttcttccatcaaaaatctcttttatctctgaacaacttgccacctctgcagaaacaagtccctgtggagatctcagttcagccccaggcagggttactacatggagtacccagatcccaggggctacttcaggcccttctactaagctcctgaccctggctctgggtcagatgttggctgaacatgaactattgtagggctgacagctacagaccacagaaagagcaaagcttcagtaggttcctgcctgatggagaagtcctcgggaagcccttggccttctatttcctcattgtcctttcagagaagagagcaggagttgggggagaaaggagattcgcatttactgaccatctgttatgtgctagacacttcattttacactgagaaaatatggaaagcatagataaacacctaaaagaaaataaaaacctcatgttatcccaccacccaga

SEQ ID NO: 37149 - DNA, 1451 bp, Homo sapiens
caagcaaatgaatacttttattaacatggtaagtttttgtttgttttaacatggtagggttttgacctcaaatatttgttaggtctgctactcaaatgaacttacagctggacaacgtatgaaccttgaagatgcctcttctagtccagtttagggtccaatgcagacagttccatactctcatccccaagcccctcaagggcctttgccaatctttcattttatgccaagtcctctaaaacgcatcagggtattacatcaacttgtacagaatatcaagatcttatcttctattttaggttccatgtcaaataaagctgagttaggttgtccaaacaaactcaccagacaggttacataagatagtgtaccacaacaaatttaaattttgaacaaaacacatctctcctcctttggtctcacacagaaattaaagtctccaaatacagacaatactatccattctccagctcttctccagattcacgagtcccagccaggtcggcccatccacactcccccttgacctctggcccaagatggtggcgcccagagcttcgctcttgctgctcccctgaggtgaactgaagccagcagccccgcatcatgtcaaagctcggccgggccgcccggggcctcaggaagcccgaggtcggcggtgtgatccgggcgatcgtgcgggcaggcctggccatgcccgggcccccactaggcccagtgctgggtcagagaggcgtttccatcaaccagttttgcaaggagttcaatgagaggacaaaggacatcaaggaaggcattcctctgcctaccaagattttagtgaagcctgacaggacatttgaaattaagattggacagcccactgtttcctacttcctgaaggcagcagctgggattgaaaagggggcccggcaaacagggaaagaggtggcaggcctggtgaccttgaagcatgtgtatgagattgcccgcatcaaagctcaggatgaggcatttgccctgcaggatgtacccctgtcgtctgttgtccgctccatcatcgggtctgcccgttctctgggcattcgcgtggtgaaggaacgttgttctgcaaatgttctaagaaatggaaagatctccatgaaggatccaagtgggagaagttcagtgtgacctgggtctgtcgtcctagagcctcagttcagaagagcttgcagctttccagaaggaacgagccatcttcctggctgctcagaaggaggcagatttggctgcccaagaagaagctgccaagaagtgacccttgccccaccaactcccagatttcaaaggaggtagttgcaaaagctgtgcccaaggggaggaaggaggtcacaccaatatgatgatggttttcatgactttgaatgatatatttttgtacatctagctgtatcgaggcatcaggcctgaataaacatcctttcttaccc

SEQ ID NO: 37150 - DNA, 2086 bp, Homo sapiens
caagcaaatgaatacttttattaacatggtaagtttttgtttgttttaacatggtagggttttgacctcaaatatttgttaggtctgctactcaaatgaacttacagctggacaacgtatgaaccttgaagatgcctcttctagtccagtttagggtccaatgcagacagttccatactctcatccccaagcccctcaagggcctttgccaatctttcattttatgccaagtcctctaaaacgcatcagggtattacatcaacttgtacagaatatcaagatcttatcttctattttaggttccatgtcaaataaagctgagttaggttgtccaaacaaactcaccagacaggttacataagatagtgtaccacaacaaatttaaattttgaacaaaacacatctctcctcctttggtctcacacagaaattaaagtctccaaatacagacaatactatccattctccagctcttctccagattcacgagtcccagccaggtcggcccatccacactcccccttgacctctggcccaagatggtggcgcccagagcttcgctcttgctgctcccctgaggtgaactgaagccagcagccccgcatcatgtcaaagctcggccgggccgcccggggcctcaggaagcccgaggtcggcggtgtgatccgggcgatcgtgcgggcaggcctggccatgcccgggcccccactaggcccagtgctgggtcagagaggcgtttccatcaaccagttttgcaaggagttcaatgagaggacaaaggacatcaaggaaggcattcctctgcctaccaagattttagtgaagcctgacaggacatttgaaattaagattggacagcccactgtttcctacttcctgaaggcagcagctgggattgaaaagggggcccggcaaacagatgtgtatgagattgcccgcatcaaagctcaggatgaggcatttgccctgcaggatgtacccctgtcgtctgttgtccgctccatcatcgggtctgcccgttctctgggcattcgcgtggtgaaggacctcagttcagaagagcttgcagctttccagaaggaacgagccatcttcctggctgctcagaaggaggcagatttggctgcccaagaagaagctgccaagaagtgacccttgccccaccaactcccagatttcaaaggaggtagttgcaaaagctgtgcccaaggggaggaaggaggtcacaccaatatgatgatggttttcatgactttgaatgatatatttttgtacatctagctgtatcgaggcatcaggcctgaataaacatcctttcttacccactgtcatcttctatcttgggacctcagggaagggaaccagtactggtggtagccaatatgggcagacattaggaaattggggtcttcatactgcttctcagatgtgcaaactgaggttcagccaagcaaagtaacttgcccaggtccttttttttcttttttaagttataattttgttttattgcccaggttctgaattggtgccagaggtaggaatagaacccaggccttctcatttgaaatcctgtgttcttcccctccccagggtgggaactatggttgctagggctgaggtgtattgcttacttcttccatcaaaaatctcttttatctctgaacaacttgccacctctgcagaaacaagtccctgtggagatctcagttcagccccaggcagggttactacatggagtacccagatcccaggggctacttcaggcccttctactaagctcctgaccctggctctgggtcagatgttggctgaacatgaactattgtagggctgacagctacagaccacagaaagagcaaagcttcagtaggttcctgcctgatggagaagtcctcgggaagcccttggccttctatttcctcattgtcctttcagagaagagagcaggagttgggggagaaaggagattcgcatttactgaccatctgttatgtgctagacacttcattttacactgagaaaatatggaaagcatagataaacacctaaaagaaaataaaaacctcatgttatcccaccacccaga

SEQ ID NO: 37151 - DNA, 1324 bp, Homo sapiens
caagcaaatgaatacttttattaacatggtaagtttttgtttgttttaacatggtagggttttgacctcaaatatttgttaggtctgctactcaaatgaacttacagctggacaacgtatgaaccttgaagatgcctcttctagtccagtttagggtccaatgcagacagttccatactctcatccccaagcccctcaagggcctttgccaatctttcattttatgccaagtcctctaaaacgcatcagggtattacatcaacttgtacagaatatcaagatcttatcttctattttaggttccatgtcaaataaagctgagttaggttgtccaaacaaactcaccagacaggttacataagatagtgtaccacaacaaatttaaattttgaacaaaacacatctctcctcctttggtctcacacagaaattaaagtctccaaatacagacaatactatccattctccagctcttctccagattcacgagtcccagccaggtcggcccatccacactcccccttgacctctggcccaagatggtggcgcccagagcttcgctcttgctgctcccctgaggtgaactgaagccagcagccccgcatcatgtcaaagctcggccgggccgcccggggcctcaggaagcccgaggtcggcggtgtgatccgggcgatcgtgcgggcaggcctggccatgcccgggcccccactaggcccagtgctgggtcagagaggcgtttccatcaaccagttttgcaaggagttcaatgagaggacaaaggacatcaaggaaggcattcctctgcctaccaagattttagtgaagcctgacaggacatttgaaattaagattggacagcccactgtttcctacttcctgaaggcagcagctgggattgaaaagggggcccggcaaacagatgtgtatgagattgcccgcatcaaagctcaggatgaggcatttgccctgcaggatgtacccctgtcgtctgttgtccgctccatcatcgggtctgcccgttctctgggcattcgcgtggtgaaggacctcagttcagaagagcttgcagctttccagaaggaacgagccatcttcctggctgctcagaaggaggcagatttggctgcccaagaagaagctgccaagaagtgacccttgccccaccaactcccagatttcaaaggaggtagttgcaaaagctgtgcccaaggggaggaaggaggtcacaccaatatgatgatggttttcatgactttgaatgatatatttttgtacatctagctgtatcgaggcatcaggcctgaataaacatcctttcttaccc

SEQ ID NO: 37152 - DNA, 2012 bp, Homo sapiens
caagcaaatgaatacttttattaacatggtaagtttttgtttgttttaacatggtagggttttgacctcaaatatttgttaggtctgctactcaaatgaacttacagctggacaacgtatgaaccttgaagatgcctcttctagtccagtttagggtccaatgcagacagttccatactctcatccccaagcccctcaagggcctttgccaatctttcattttatgccaagtcctctaaaacgcatcagggtattacatcaacttgtacagaatatcaagatcttatcttctattttaggttccatgtcaaataaagctgagttaggttgtccaaacaaactcaccagacaggttacataagatagtgtaccacaacaaatttaaattttgaacaaaacacatctctcctcctttggtctcacacagaaattaaagtctccaaatacagacaatactatccattctccagctcttctccagattcacgagtcccagccaggtcggcccatccacactcccccttgacctctggcccaagatggtggcgcccagagcttcgctcttgctgctcccctgaggtgaactgaagccagcagccccgcatcatgtcaaagctcggccgggccgcccggggcctcaggaagcccgaggtcggcggtgtgatccgggcgatcgtgcgggcaggcctggccatgcccgggcccccactaggcccagtgctgggtcagagaggcgtttccatcaaccagttttgcaaggagttcaatgagaggacaaaggacatcaaggaaggcattcctctgcctaccaagattttagtgaagcctgacaggacatttgaaattaagattggacagcccactgtttcctacttcctgaaggcagcagctgggattgaaaagggggcccggcaaacagagggaaagaggtggcaggcctggtgacctctgggcacttcgcgtggtgaaggacctcagttcagaagagcttgcagctttccagaaggaacgagccatcttcctggctgctcagaaggaggcagatttggctgcccaagaagaagctgccaagaagtgacccttgccccaccaactcccagatttcaaaggaggtagttgcaaaagctgtgcccaaggggaggaaggaggtcacaccaatatgatgatggttttcatgactttgaatgatatatttttgtacatctagctgtatcgaggcatcaggcctgaataaacatcctttcttacccactgtcatcttctatcttgggacctcagggaagggaaccagtactggtggtagccaatatgggcagacattaggaaattggggtcttcatactgcttctcagatgtgcaaactgaggttcagccaagcaaagtaacttgcccaggtccttttttttcttttttaagttataattttgttttattgcccaggttctgaattggtgccagaggtaggaatagaacccaggccttctcatttgaaatcctgtgttcttcccctccccagggtgggaactatggttgctagggctgaggtgtattgcttacttcttccatcaaaaatctcttttatctctgaacaacttgccacctctgcagaaacaagtccctgtggagatctcagttcagccccaggcagggttactacatggagtacccagatcccaggggctacttcaggcccttctactaagctcctgaccctggctctgggtcagatgttggctgaacatgaactattgtagggctgacagctacagaccacagaaagagcaaagcttcagtaggttcctgcctgatggagaagtcctcgggaagcccttggccttctatttcctcattgtcctttcagagaagagagcaggagttgggggagaaaggagattcgcatttactgaccatctgttatgtgctagacacttcattttacactgagaaaatatggaaagcatagataaacacctaaaagaaaataaaaacctcatgttatcccaccacccaga

SEQ ID NO: 37153 - DNA, 1934 bp, Homo sapiens
caagcaaatgaatacttttattaacatggtaagtttttgtttgttttaacatggtagggttttgacctcaaatatttgttaggtctgctactcaaatgaacttacagctggacaacgtatgaaccttgaagatgcctcttctagtccagtttagggtccaatgcagacagttccatactctcatccccaagcccctcaagggcctttgccaatctttcattttatgccaagtcctctaaaacgcatcagggtattacatcaacttgtacagaatatcaagatcttatcttctattttaggttccatgtcaaataaagctgagttaggttgtccaaacaaactcaccagacaggttacataagatagtgtaccacaacaaatttaaattttgaacaaaacacatctctcctcctttggtctcacacagaaattaaagtctccaaatacagacaatactatccattctccagctcttctccagattcacgagtcccagccaggtcggcccatccacactcccccttgacctctggcccaagatggtggcgcccagagcttcgctcttgctgctcccctgaggtgaactgaagccagcagccccgcatcatgtcaaagctcggccgggccgcccggggcctcaggaagcccgagagaggcgtttccatcaaccagttttgcaaggagttcaatgagaggacaaaggacatcaaggaaggcattcctctgcctaccaagattttagtgaagcctgacaggacatttgaaattaagattggacagcccactgtttcctacttcctgaaggcagcagctgggattgaaaagggggcccggcaaacagagggaaagaggtggcaggcctggtgacctctgggcacttcgcgtggtgaaggacctcagttcagaagagcttgcagctttccagaaggaacgagccatcttcctggctgctcagaaggaggcagatttggctgcccaagaagaagctgccaagaagtgacccttgccccaccaactcccagatttcaaaggaggtagttgcaaaagctgtgcccaaggggaggaaggaggtcacaccaatatgatgatggttttcatgactttgaatgatatatttttgtacatctagctgtatcgaggcatcaggcctgaataaacatcctttcttacccactgtcatcttctatcttgggacctcagggaagggaaccagtactggtggtagccaatatgggcagacattaggaaattggggtcttcatactgcttctcagatgtgcaaactgaggttcagccaagcaaagtaacttgcccaggtccttttttttcttttttaagttataattttgttttattgcccaggttctgaattggtgccagaggtaggaatagaacccaggccttctcatttgaaatcctgtgttcttcccctccccagggtgggaactatggttgctagggctgaggtgtattgcttacttcttccatcaaaaatctcttttatctctgaacaacttgccacctctgcagaaacaagtccctgtggagatctcagttcagccccaggcagggttactacatggagtacccagatcccaggggctacttcaggcccttctactaagctcctgaccctggctctgggtcagatgttggctgaacatgaactattgtagggctgacagctacagaccacagaaagagcaaagcttcagtaggttcctgcctgatggagaagtcctcgggaagcccttggccttctatttcctcattgtcctttcagagaagagagcaggagttgggggagaaaggagattcgcatttactgaccatctgttatgtgctagacacttcattttacactgagaaaatatggaaagcatagataaacacctaaaagaaaataaaaacctcatgttatcccaccacccaga

SEQ ID NO: 37154 - DNA, 868 bp, Homo sapiens
agaaaactgaccagatcctggatctgagctgcctgctccaggcctagaaatccccaaaggctggcactgagctgtgactgctttaacagcccccaagatttggtcagtttgaggtggtggagactcagatttgttgctgaaagttcagtaacacagtcctggtctttggccctagagaaactttttatatgagaagtgttctctatatacatgtttgaggtgactctggaatggattatgaggtcatatctcaaaatgtcagaaaacgttatagagcactcgaacttttgtatttgctgcttaacctcaatattacagccacaaacaaggggtaccaagacaaagtataactgagcataagcagaaaatgttaaccctccaggtttctttcttaagcacaataaaagtgggagcgaacaacacaaggatatttttacatttgacccgtctcaaaagtagcacaccctatccttgtgccattatttgtacaaggaaatatatgattagaaggaatagaacccccagttgtcatcagcttttttagacaccacaggttgtagcagtttgaacaaactgaaaactttatacttctgtgtgagctgaactcaagtttcagaataatcatcgccatgtgggaggctttttgttaaatgcagaagaaatttcaaaatattgtatttatatctgccttccactgctgccaatttagtaagcatctcctatacaatcgacaataaacagcaaatgatgcagttcatagagtattttgcacttggggaaaaatatgtatctgaattgtaaaaagaaatgtttggattttgtatgtcttttttattattattaaaatactaaatgaaactcctcagcc

SEQ ID NO: 37155 - DNA, 611 bp, Homo sapiens
gtagacgcttgaagttgcatttctaagaagctcccagattatgtggatgtggctgggtcaggaatcacaccaagtggcaagagtgtacagcacatgctttgtacttaataaatatctgttgaatgagtcctcttctgtcctaacccccaggaatttgaaacctcccgtgaagtcacatccttcttctttgttcttctctgggtgagactgtcaggaatttttactttcttggaagttaaaaaacaaaacaaacaacaacaacaacaacacacacaaaaaaaccccaaaaaactttctggctttctgaaaagcagactctagcaagtgattgtattttgcatatttccacccctcccgataatctaccacatggaggcagaacccagggctgtttttccatgtagaaaacatcagtgtgtgcaccctgctctgctcactctttcccagcacaatctgacagatttaacagcttctgcccagcagagatgtcccactggggctgcaaaccagcatcaggggccaagccatggaggggaaatggtggcttctcctgcaagaccacattctcctcagagccatcagctcctttcccactctgggttagtgacttg

SEQ ID NO: 37156 - DNA, 422 bp, Homo sapiens
ttttttttgagacggagtttccctcttgttgcccaggctagagtgcaatggcatgatctcagctcactgcaacctctgcctcccgggttcaagcaattctcctgcctcagcctcccgagtagctgggattataggcgcctgctaccatgcctggctaatttttgtatttttagtacagacgaggtttcaccatgtcggtcaggctggtctcgaactcctgacctcaggcaatctgcccgtctcggcctcccaaagtgctgagaatacaggcatgagccaccacgcccagccatgtttctgaatattctatatgtcacactacataatcattaaacaaactcaaaattttatgaagcatagaaataactttatagaaagtaaaataattacatacaggcaaatccaaattaagatgggacacc

SEQ ID NO: 37157 - DNA, 519 bp, Homo sapiens
cccctactcatttcttgcaatttaatgggtcatgcagctccacccactcaccccttttgatctctcccctcctccgtcctgtgaaaattccagtcccgcatccttctgagcccgggacccccagtcaattcctgggtcaggtgtctccttaaccctcccgatttacagtgcttaaccctcatttctgctttttggggtctcccaatggattgtcagtcctcctacccctctcgtattctgggtacctcaggggtttcttcgcacatactgggaccctcaccccacttgctgcgtaccaggtcctggtatttgtcccagtggactccagggaaatcatcctcctccctgaaacccctcactcatgtgcctgggccccccagcacctccttccatgcgtaccccgaggtcctttgagcccctccccctgcagccccgccgagccacccggcccgtggccgctgtttacaaggacacgcgcttcctgacagtgacgcgagccgcctcctccccttccccacg

SEQ ID NO: 37158 - DNA, 616 bp, Homo sapiens
atcagactatcttttatccagggacagaatcgcttctctctcctttcagtacagtatccctctgttggtggggtaaaggacatctcttccaggtttttgtcaactgaatgtagtatttggagttggcagatgtaacaaaaagatggaagttatccttaggaagggaaaaaaagattattcaccttgactgatgtatggcagtttgacttgatgggaagaatttggcctgtttctccattgtttgtttgtggtttttaactcacatctttaaatgtgttgtagttcccctcctgtggattagttatggaatcattaaaggtcattgccacatatgggatttgtgtgggctcactctgtattggggaagagaacccgtgtggaactgtagttctttctccttgaaactttgttagcaagaatcaatgtggaaatgcaaaaagaaaataaaaaagaagtgagacccactaacaaggttgtaaaattcctgaactaggacaaactaggagggtaatccttccctggaatatttgtttacctcttctagaaagctcatactgattcagttgcctaggagatttttaggattattaaccttgtagtctctgttcaagacttc

SEQ ID NO: 37159 - DNA, 630 bp, Homo sapiens
aagcctagcccctttcctcaaattgattcaattctcaatggttatctcagctctagggcttggctgaggcctgggttgcaactgcattgtgagtcagtttttatttctggccaatcctgtcagaaacaccagtttcctacagatgtgtctcccactcctgcatgaaattcagcatctcagaatctgtttccagggaaaccaatctgagaccaaaaccatatggccttgatgttttctcagtagaagccttttaataattgattcaatttatttaacagttgaccagttaatttatttaactattgaatagttaataattgtataaccattcaaattttctatttcttgtatcagttttggtaaattgtgctttccaaggactttttccttggaaaatctctatttttagtttgttgacataaggttgttcatagtatcttttcacatttttaatgtctgtaggatatgtagtgatatcccttattttattcataaagatgacaatttgtgttttctttgttatggattagttgctaggagtttatcaattttattattcttctcaaaaaatcaattcttgtctttgtggattttttccagcatagatttatttttgatatcattgatttt

SEQ ID NO: 37160 - DNA, 498 bp, Homo sapiens
tttgttgactcttggcatatagaaatcctactgatttgtatatgttgattttgtattctgcaaatttactcaagttattacttctaatagttttttggtggatgtattaggccattctcacattgctataaaaaataatcagtgactggttaatttataaagaaaataggtttaattggctcatggttctacagggtatacagaaagcatagcactggcttctgcttctggggaagcctctgacaactgacaaggtgaaaaataaatctggtgcttgcacatcacatggtaagtgtgagggcaggggggaggtgctacacacacttgtagataaccaactctcatgaaagctaactattgtgggaatggcaccaaaggaaatgatgccaaactgttcttggaaatcctgctgtcatgattcaatcacctccccactaggcccacttccaacattgaggattacatttcaatataagatttttgtgggaacacacaccc

SEQ ID NO: 37161 - DNA, 167 bp, Homo sapiens
taaactgtaacaggaaacaccgcagatgctagcttttcaagaagcgtaatgctgaacgggacacgctacaggagtatgttacaaataggctgaaggagcaaataaggtctgttgaatgaagaagggatgagtctcacctagcactcaggactgggattattatttat

SEQ ID NO: 37162 - DNA, 422 bp, Homo sapiens
tgttcctgtgttagtttgctaaggataacaacagcctccagctccatccacgttcccacgaaagacatgaacctgttcttttttatggctgctctcaggtttaaaaattagagaaagagaataattttttttgtgcttctgaatggaagttgtaattcatggaaaatagaatataatgtatgccactgacaatatacagtcagtatatatgacacacctttgaacacaagaccagtcaatggtaaatgaacactgctccttcacattgtcttctgatggctctgtcaaagtacagaagcatgctgagatgattcgagatggaagatgcacgttggcattaaatagcagtaaaccacatactgaacaagctattcccttttcaattctttcagtccttcgaaggaggaaatttaaattggtgc

SEQ ID NO: 37163 - DNA, 428 bp, Homo sapiens
tttggaattgggcatgtattccatgagagtaaaatgtagacagcctgtttccttattaaaaggagagatgggggagacgtgaagagattatgtgacagagagagaggaaaaaatacagaaagggtgctatagtgaaggaggtgaaggaatttaacactctgtagacatttgtgagtgtccttatcaccgcactgtaacatcaaaaaattctaaaatctgcaggtcctctttccatgacccacagaggcaaaaagcaattccagaaatgcagatctggacaaatgctagacattttatggtttatttttgtattctgtgaatacattagagatttttaaaattgtttcttgatttctttttccatcccattttaatgcattattgtatctctcgtttcccccaatacctctgaaaatgtataatcagga

SEQ ID NO: 37164 - DNA, 590 bp, Homo sapiens
gcaggagtttggggaagattaagttagacccaggaacaggattgagaacgagggggctgaatcaacagtccagttcaatattcacaaatccaaggggtagtgggacagctcatgaccagaggccaatatccatgggactggatgtccatggactggccaaagtccacagtgatcacttgctctgaacacttcataatgtaggtacaagctcagttcaccatcagagcagccataagcctaatgtaaacactattcactgcacaatgggtaggcaggagatctcaccaggtcaaatccccagcctaactcaggaaaagtgaatcctaggggttagtttaagacaaacagaccaacccccggcaaaacagttctcctggtagaaccatacagttggactgagtcttggattggtaaagtctcagtggagtaaatcttatttgggtattaatagggagaaagttaaagaccagtattccttacctcaattctggagggatattgtattattctaaatgtaatacaggtccataatgtttagttgttttaggattcttggggtcagatgttttttagaattcagaactttgtga

SEQ ID NO: 37165 - DNA, 372 bp, Homo sapiens
ctcatttaacttttttaatgggtctcaaaattctgtgacaaatttttggtcaagttgtttccattaaaaagtactgattttaaaaactaataacttaaaactgccacagagtagtacagcatatttacaatagctgtagttgataaaggatttgaatctagaattcaatagtagttaggtgttgctacataacaaattacccccaaaacagtgatctcataatcttggtgggtcaggaatctcggtacaacttagctgggtacttctggcacaagatctctcatgaggttgtagttaagctgccagctatagggcagtgggttcatctgaagacccaagcgagggatccactttcaagcttcctcatgtagt

SEQ ID NO: 37166 - DNA, 349 bp, Homo sapiens
tcacttgagcccaagaggttgagggtgtatatatatatatatgaggggggaaaagtagcatgcattttttaggcctcattacactttattatttttgagtattatttctcctgtggataattatattaagaaactgtagctgtaaaaataagcacagtgctaggttcatgtcatggcagagtggattgatggtgtatttcctaattttgcaaagaatgtgtgatttctgagctggacacagtgacttatacttgtagtcccagctactcaggaggctgaggttggaggaccactttggcccaggaattcaagtccagcctgggcaacgtagtgagacccagtctcttta

SEQ ID NO: 37167 - DNA, 636 bp, Homo sapiens
ataagtgtataaggaatgtgctcttgagtctgattgtacttgtgggccgttgacgctaccccgagtgctgccattgagccctgtccctctcctgcagatctgagaagtgctccattgtcacctcaattcttgagcttatctgggtatctccagcgcaccctgtttatgtcttcttctgtgcccggggctactctgaaagttgtcctgcacctgagtgtccggcggccctgcctgagacaccccctccttgtggagcagcttaacaattgcatcagctttctcctgtgctgattcttcatgagaacgttgccaaggcgctgtggagacaccgtttctctagttgtgcagctgcaaggtcacagacagagaaactcaagtcgtaaaacatgtttttccttcaaaaggaagaaatgatgtaaggaatgtctcaattcattgaatcactgtctttgtttctcgcttctgtaacatgcttccccctgcaccgatctccccccaccccgcgaaatgcttaaaaggtaacttaactctttgttcagagctcagtcctttggatgttaacccgactgggctggtgcacctaaataataaatatcctcctcatcctgaaccatatatgggcctcgttggcctcac

SEQ ID NO: 37168 - DNA, 701 bp, Homo sapiens
ctgaattatctagcattaaaaaacctcctctttttacatcgaaacctctcattcagttggcatgcctttggctgtagcgagagaggtgatgatccagccttatcctgttctctccacagtgctccacggcggctgccagtgagccctgtccctctcctgcagatctgagaagtgctccattgtcacctcaattcttgagcttatctgggtatctccagcgcaccctgtttatgtcttcttctgtgcccggggctactctgaaagttgtcctgcacctgagtgtccggcggccctgcctgagacaccccctccttgtggagcagcttaacaattgcatcagctttctcctgtgctgattcttcatgagaacgttgccaaggcgctgtggagacaccgtttctctagttgtgcagctgcaaggtcacagacagagaaactcaagtcgtaaaacatgtttttccttcaaaaggaagaaatgatgtaaggaatgtctcaattcattgaatcactgtctttgtttctcgcttctgtaacatgcttccccctgcaccgatctccccccaccccgcgaaatgcttaaaaggtaacttaactctttgttcagagctcagtcctttggatgttaacccgactgggctggtgcacctaaataataaatatcctcctcatcctgaaccatatatgggcctcgttggcctcac

SEQ ID NO: 37169 - DNA, 474 bp, Homo sapiens
tggcacctgggtgtctcccgaaagcctcctcagagctgtctttgatgagcaccacctgctgcctgtcagtccaactgcggtggagatggttggggtcaaatccccattgtcaaggtgataggagagacctcagtgtgctttgtggatgcagaggatgaaaatcagcaaaactgaatgagctgtgtgctgttcttagaggaagcactaggtaaactattccagtacaattctgtttattcttttctgtgcaaacccaaatttagtgtacccaatacacatgcatatgaatacataccacatagaaatgcacagacatcacacacacccacaacactcagacacagggatgtgagtgtatgcatgaacacatactcacactcacacaccattgtaaggcttgtcctcatcctaagagtttaacgtaatagcttttttaaaaaaattgaataaatgaatgaatgaaatcaaaattta

SEQ ID NO: 37170 - DNA, 889 bp, Homo sapiens
  misc_feature (881)..(881): n is a, c, g, or t
  misc_feature (886)..(888): n is a, c, g, or t
tgaaaatctactctatcagctgctgtggttgccaccattctcaggaccctcgccatgaaagcccttatgctgctcaccctgtctgttctgctctgctgggtctcagctgacattcgctgtcactcctgctacaaggtccctgtgctgggctgtgtggaccggcagtcctgccgcctggagccaggacagcaatgcctgacaacacatgcataccttggtaagatgtgggttttctccaatctgcgctgtggcacaccagaagagccctgtcaggaggccttcaaccaaaccaaccgtaagctgggtctgacatataacaccacctgctgcaacaaggacaactgcaacagcgcaggaccccggcccactccagccctgggccttgtcttccttacctccttggctggccttggcctctggctgctgcactgagactcattccattggctgcccctcctcccacctgccttggcctgagcctctctccctgtgtctctgtatcccctggctttacagaatcgtctctccctagctcccatttctttaattaaacactgttccgagtggtctcctcatccgtccttcccacctcacacccttcactctcctttttctgggtcccttcccacttccttccaggacctccattggctcctagaagggctccccactttgcttcctatactctgctgtcccctacttgaggagggattgggatctgggcctgaaatggggcttctgtgttgtccccagtgaaggctcccacaaggacctgatgacctcactgtacagagctgactccccaaatccaggctcccatatgtaccccatcccccatactcacctctttccattttgagtaataaatgtctgagtctganaaaannna

SEQ ID NO: 37171 - DNA, 328 bp, Homo sapiens
gtgggtcttagatttggttttagggggctttgggggaatatctctgccccacaatagccctccagcaatgtgaagcagcgttgtgtcttgtaaatcttttcttccctgggtagacagccccagtcccatcagctgatagtctggaaactcctcttcaccctgtggagcacaggacctgaaatagatgttgtcaaagatttgatccccagttgactttctcactttcttatcctgtaagcctctgaagagctgcaaaattgctctaaaagagacagtacaaaccagactaaattggaagcccattagaagctgtcatctagccaatttc

SEQ ID NO: 37172 - DNA, 411 bp, Homo sapiens
gtagagacggggtttcaccatgttgaccaggctggtctcaacttctgaccttgtgatccgtccgccttggcctcctaaagtgttaggattacaggtgtgagccaagatcaggaacaagacgaggatgcccactctctactttcattcaacatagtactggcagtactagccagactggttaagcaagagaaagaaaaagcatccaaataggaaaggaagaagtgaaattgtctctctttgccaacaacatgatcttatattagaaaaaaccctaaagacttcaccaaaaagctgttagaactaaagtgacaagaaacaaaatcaacaaacagaaatcagtaacatttctgtacactaacaaactatctgaaaaagaaatcaagaaaaaggcagaaataaaaaactgaattc

SEQ ID NO: 37173 - DNA, 184 bp, Homo sapiens
cattttggacaccaggggaaatggaaatgctgctttcaaaacttagtttcctttccatttcttcctagtctggcctttgacacaaatctggtagaaagaagcctgataaattgagggcacttgtaccctccctgtgcccccagaaggttcttggagagaagtgcaagaatttgtgaacacggcg

SEQ ID NO: 37174 - DNA, 445 bp, Homo sapiens
aagcttattttggtgtcacggtatgaaacagcaggatgtatccttctttaccatggacagcaacaggatttgggatgatctcagggcaaaggaggattttattcgtcatttgacctacatagtcacaattatgataggtcctaccttttgtctaccagaagggatgctggtgatgacactagtcagattattcacaaccaaacttcgtgtgacctaaaccgaaaaagagttcctgttatttgagggcataagtttaagatttagaaaaaaaataataaagttcttatttgtgtctttagtttctttaatttaaaactttttataaatggaaaataaactgtttcttttttaaagccataaccatttgcaaaatggaggttttaaaattttttgtatttatttttttttgagacggggtctcactctgtctcccaggctggagtac

SEQ ID NO: 37175 - DNA, 572 bp, Homo sapiens
actctgatcctgttattcagaataaagtagcatttctgccatgagctatctcagagcatcacggtgaggtataaggaacatctctttggtacacatagcattcattcataaggcttttacttataacagctttcaatataacctgaagagcagggaagtaaaaaaaaaatttaaaaataaattcaataagatgccattccaataacagggagatagctttttgattaccaccttaatctatgaataaattttagaacctatccttcttagggcaaaactccacaaatattatttctcccaattagtcgttgaataggaattcaagtgcagatacttcaaagttatacttaccaatgattatctggagagcaattactctatgtggccacaagtataaagccatattctccaaagattagcacatctttgcctaatgttaacatcctttcaatgaatactaaggccttgacaaggtgcacactgaaagagaaggacaccacactctgttccagtttgagctgatgggaataaacagcatcacaggacatgggcctgcttttcccaaaagacca

SEQ ID NO: 37176 - DNA, 230 bp, Homo sapiens
aaacaaaaacctaaccctttggttggtctttgtgttctcatgtttacttaagtttaacaagacctattgtgcatcatggccttgagccctgaggttcagggaggggatatatccccaatgctaaatgacgagttgatgggtccagcacaccaacatggcacatgtatacatatgtaacaaacctgcatgttgtgcacatgtaccctaaaacttaaagtataataataata

SEQ ID NO: 37177 - DNA, 689 bp, Homo sapiens
tggcaccaaaagaaattagaaaaaaattgttgcaaatgtcagtgaaatcttttaaaaaactgttgtacttagaagtgcctcaagtgactaatggaggcttaggactctgaatggtgtcacaaggaaccttatgcacagggacactgacatcagcctgtactgctggtaatgtcagagtgaagcaaatcccacctgaaggcactctcttgcttgaccgtgaagtcacactgagtggttcaccatgtgcctgcactcatgcaaggataagccaggtctctaggcatgggcagaaggatccctgcttcccttctcttccctttcagagcaacactttcagccatttccatgagtctgggctcttgttacccagctgaaatactgtttcctgaaactcacaaatttgctctctaccaaagcccaccttatgccctgcctttccatgaagcctgtcaagaaaattccaagaaagaaaatttgatattcctatatcaaagcgtgtgtctttcctctcctaatccctcttagctgccacagtaggtgcaatgtcattttagcttttgcagatgcattacctggtggtttcctagtatttctttcacttgcctcgattgctagattagaaatttactggggacagacatctttttaatatctttctcctactacttaacatatagagcatcaaggga

SEQ ID NO: 37178 - DNA, 393 bp, Homo sapiens
gtgccctatcccaataccctggaattacttttcctcttttacttactcaagtcctgcaaaagccagttccattatgctggtctcactgacctctttctacatatttctggtaagaatgaattactttctcctgaaatacctctgccatattgtttaaaaattgccatatggtgctggacatgagtatgtgttcacatgtttattatctactctagtctcaatttctaaggtcttgaatataggaaccaatttattcatcaccttattccagacatgatggaactcagctttattgagaatcaagtgattatagtaggatagtgaccatcctgagtatgttcatgtgttacataacaatgttttggtcaaccaaggactgcatataggaaggtg

SEQ ID NO: 37179 - DNA, 458 bp, Homo sapiens
  misc_feature (276)..(276): n is a, c, g, or t
cttctttactgttttaggtaccatgttggcttggtagtagaacacttaatcttgtcagttccagaaaatttactgacttttagtctaacattttgtcccttagtagggagggggtggtaattaatgagccaaatgaggattctagaagaatcctatgtggcttgcagcctttcagtttatgccccagcctttcaagggggctgcttgggaatcttctgttctgcttggggatcttctctgagctttctgttatcctgctgcttctgggggctggcnttgggatcctggtgctgctgctctctttcctctctttgacaagggatggagccctctttttcctctgggtgggtgatggtattacattaccctgcattcatccactccatggtttagatcatgtgggtcctccaggatttggtgctttatactgaatccaacctcttgaattaaaaaaagaa

SEQ ID NO: 37180 - DNA, 2054 bp, Homo sapiens
ggggttgttttagagctaggtggtccaccactgtagccactggtcacatgtgactatttaaatgaaaattaaataaaataaaaaattcagctttccactcatagtaggcacatttcaagtgctcagtggtcacatggctgctgaattggactgttatatctttgtaagaagttctgttgggcagagctgctctgaagttttgaactttcaacagagtgaattatggcaaggcagatttcagctcatttctaacaaaactgttctattaattttaactgttcagtgccagagctgttgaactggctgcctcaaagaatagtaagctttctgtcatttgaagtactcagacagagactagattcctactttttggagtgatgtagaagagtttcctacccagaaccttagggtgtttaagtgggaagaagactcagcaattcaatgtttcttttactgcagatgaagacacagactcagagtcagacagttttgcccaaagacccacaactggttaatggcaaatgctagctgtcctcatgaatcctagcttagtacttttcccattccacccattggctaatgttttaacaacaaggtcctcgcggttcttgttgagcaacacatttccgcttctggcattcaccagcttttccacttattctctcccactcttctgcagtgaaaactacactgcagccaagctgaactggctatattgaaatacgttattctgattcctgcctctgcgtctttgctattgctttgccctttatcaaagtgacatttcttcacaaacttaattctacttattttctaacttctcctcaggtctcagaatattcaaacccataccatctcttctctttgctaaactaccttgttacaatgcactcagacatttatactctctgtgatgattatattttgtcttatccctttgatgagcttcttaaagactgtgattactattttcatgcatatatcctttttctgtctccctcactagaatataagttcctcaagggcagggactatagctgtctttttcaccataccttactatccagttgctatccagcaagtgtcttagcaccataataggtgctcaacaaatatttattgaatgagtgaatcaatttttctcttcccaagcatgctattattctccttaagtttgccatgaattctcaataaatacttttctaagcaaacatttctgtttctataaagtaagtattgaaaataggaatatgaaaaaaacaaagtaaggcactccagcatgtaaagtgcttgggagtcctcactcccttccaaacctgagcaagtaaaacttggtaagttttcctggaactgtcagcaatctcagggcaaatcacttgccaccccaaaatctgaagaaataggtacattcagacagtcacagctaagatttgcttacctacagcagaagcaactggaaccatagactagaagggccatttaaatagtaattttgatgaattgctggaggctaagtgttgactagcttgagagtggaactcctaggcgcaggagtctgagaaagggtctcacacgtacatggattttacctcccggaaacccgtcaggttttcacagcaaagagccaagatagaccctgtcctggctctggcaaagggaaggggaaagtaatgactttgaagtgcgctcagaatgttctctatgataaagacttactctccaaggaaaagggctttaccagagtcttatcccatctggggagaagatagttctctgactcgaggcacctctagattcctgtgtcaactaaggaaggaggaaaaaggttaagaaacatttgtaaaggtcacagtacagcaacataggcccaccaaaagattgagatgtaatcctaagaaaatggaatgcttcccttccccactccttaccaccacagcaacagggctccttataataacagtggattacagctgaaagagctgcaagatgcagacagacaccggctggccaaggagagggggtctcaggaaagtccaaagacaacaggagagatg

SEQ ID NO: 37181 - DNA, 1613 bp, Homo sapiens
cgagctcggtaccccaagcagttaatacagactcagagtcagacagttttgcccaaagacccacaactggttaatggcaaatgctagctgtcctcatgaatcctagcttagtacttttcccattccacccattggctaatgttttaacaacaaggtcctcgcggttcttgttgagcaacacatttccgcttctggcattcaccagcttttccacttattctctcccactcttctgcagtgaaaactacactgcagccaagctgaactggctatattgaaatacgttattctgattcctgcctctgcgtctttgctattgctttgccctttatcaaagtgacatttcttcacaaacttaattctacttattttctaacttctcctcaggtctcagaatattcaaacccataccatctcttctctttgctaaactaccttgttacaatgcactcagacatttatactctctgtgatgattatattttgtcttatccctttgatgagcttcttaaagactgtgattactattttcatgcatatatcctttttctgtctccctcactagaatataagttcctcaagggcagggactatagctgtctttttcaccataccttactatccagttgctatccagcaagtgtcttagcaccataataggtgctcaacaaatatttattgaatgagtgaatcaatttttctcttcccaagcatgctattattctccttaagtttgccatgaattctcaataaatacttttctaagcaaacatttctgtttctataaagtaagtattgaaaataggaatatgaaaaaaacaaagtaaggcactccagcatgtaaagtgcttgggagtcctcactcccttccaaacctgagcaagtaaaacttggtaagttttcctggaactgtcagcaatctcagggcaaatcacttgccaccccaaaatctgaagaaataggtacattcagacagtcacagctaagatttgcttacctacagcagaagcaactggaaccatagactagaagggccatttaaatagtaattttgatgaattgctggaggctaagtgttgactagcttgagagtggaactcctaggcgcaggagtctgagaaagggtctcacacgtacatggattttacctcccggaaacccgtcaggttttcacagcaaagagccaagatagaccctgtcctggctctggcaaagggaaggggaaagtaatgactttgaagtgcgctcagaatgttctctatgataaagacttactctccaaggaaaagggctttaccagagtcttatcccatctggggagaagatagttctctgactcgaggcacctctagattcctgtgtcaactaaggaaggaggaaaaaggttaagaaacatttgtaaaggtcacagtacagcaacataggcccaccaaaagattgagatgtaatcctaagaaaatggaatgcttcccttccccactccttaccaccacagcaacagggctccttataataacagtggattacagctgaaagagctgcaagatgcagacagacaccggctggccaaggagagggggtctcaggaaagtccaaagacaacaggagagatg

SEQ ID NO: 37182 - DNA, 383 bp, Homo sapiens
ccttaaacaagtgatgcatattgtgccttggctattaccagagccatgtggaagctagaaatgagtagtgtgaaagaacctaggtcctagcccacccacttttcctagccctttcttttgatgttgaactttaaatacagtaaactttaaaataagcagtcaaatcatacataagaaatgtaagtagttatgtaagtgttttggcactgacttttttaaattatgaaaatgaaacatgacattgtaaattcaaacagtaagtgtaatgacaagtgagtttctttatcactagctgctaagctccatgccctagagaccacccttcacaatttcttacattaatatgaccctctagaaatttttcatgcatacacatgtgtata

SEQ ID NO: 37183 - DNA, 550 bp, Homo sapiens
caggctcctggctgagcacccagctgacaggcagcacaaacctgccagtcactcaggtgagttctttggggagtatattctccaactccagcagaggccaagaggagcagaatgagccattaccactgagctctgcccacattattgatttgtgagaaaactgaatgattgtggttgctttaagcacaaagtttgggggtagttttttatgcagcaatagatggacagaacaagtgctaaggcctttacacgttatctttattcctcacaatgatcttatgaagaagctattatccttacctcaagatgacaaagctgaggctcagtgagttggcataataatccaggtctgtcaactccagcttgatagatatttctcctgataaatcttacttcactttatgatccatcttattcacagctgttgagtcaggcacgactaaggttaaatcttagttctgcccttattggctatatgaccttggataaatagaaggtaagtttgttacttcacaggactgtgaagattccaaggatacatataaagaaa

SEQ ID NO: 37184 - DNA, 1679 bp, Homo sapiens
tagagatggggtctcactatgtcgcccagggtagtctcaaactcctcggtcttggcctcccaaagtgttgggattacaaacgtgagaaccgtattttcaaatgtattcaataacactacagcgtttccaattttaagaggaagcaattgccacaaaatcactgcccctggtctgggcaaggggcagttggtgaacttgctgcctccagagaaccttccctggtgtggaggcagccagggacccaggatgctccggacctgttacgtgctctgttcccaagctggtcccccctccaggggctggcagtccctgagctttgatggcggggccttccaccttaagggcacaggagagctgacacgggccttgctggttctccggctgtgtgcctggcccccactcgtcactcacgggctgttgctccaggcctggtctcggcgactcctgggctcccggctctcaggcgcatttctccgagcatccgtctatgggcagtttgtggctggtgagacagcagaggaggtgaagggctgcgtgcagcagctgcggaccctcagcctccgaccactgctggcagtgcccactgaggaggagccggactctgctgccaagagtggtgaggcgtggtatgaggggaacctcggtgctatgctgcggtgtgtggacctgtcacggggcctcctggagccccccagcctggctgaggccagcctcatgcagctgaaggtgacggcgctgaccagtactcggctctgtaaggagctagcctcgtgggtcagaaggccaggagcctccttggagctgagccccgagaggctggctgaagctatggactctgggcagaacctccaggtctcctgcctcaatgctgagcagaaccagcacctccgggcctccctcagccgcctgcatcgggtggcacagtatgcccgggcccagcacgtgcggctcctggtggatgcggagtacacctcactgaaccctgcgctctcgctgctggtggctgccctggctgtgcgctggaacagcccgggtgaaggcgggccctgggtgtggaacacctaccaggcctgtctaaaggacacattcgagcggctggggagggatgcagaggctgcgcacagggccggcctggccttcggagtgaagctggtacgaggtgcatatctggacaaggagagagcggtggcccagctccatgggatggaagaccccactcagcctgactatgaggccaccagtcagagttacagccgctgcctggaactgatgctgacgcacgtggcccgccatggccccatgtgccacctcatggtggcttcccacaatgaggaatctgttcgccaggcaaccaagcgcatgtgggagctgggcattcctctggatgggactgtctgtttcggacaacttctgggcatgtgtgaccacgtctctctagcactggggcaggccggctatgtagtgtataagtccattccctatggctccttggaggaggtaatcccctacctgatccggagggcccaggagaaccggagcgtgcttcagggtgcccgcagggaacaggagctgctcagccaagaactgtggcggcggctgctgccaggatgccgaaggataccccactagcacccctgagggggtcatgtggtcaataaaagtccttaggtgctgcctaa

SEQ ID NO: 37185 - DNA, 437 bp, Homo sapiens
aagagagaaaaaaaaaagtttgctccaggacttttagctttttcagttagaaattttatccaactcacttaatctgccatgttctcagaaacagaagtctctgttccaggtggggactggggagtgtccccccagcccaagcccatacctctgtctcagaaaaacaccaaaaacgaaaaaacaaaacccactctccctgcagggcaggccggctatgtagtgtataagtccattccctatggctccttggaggaggtaatcccctacctgatccggagggcccaggagaaccggagcgtgcttcagggtgcccgcagggaacaggagctgctcagccaagaactgtggcggcggctgctgccaggatgccgaaggataccccactagcacccctgagggggtcatgtggtcaataaaagtccttaggtgctgcctaa

SEQ ID NO: 37186 - DNA, 1851 bp, Homo sapiens
tagagatggggtctcactatgtcgcccagggtagtctcaaactcctcggtcttggcctcccaaagtgttgggattacaaacgtgagaaccgtattttcaaatgtattcaataacactacagcgtttccaattttaagaggaagcaattgccacaaaatcactgcccctggtctgggcaaggggcagttggtgaacttgctgcctccagagaaccttccctggtgtggaggcagccagggacccaggatgctccggacctgttacgtgctctgttcccaagctggtcccccctccaggggctggcagtccctgagctttgatggcggggccttccaccttaagggcacaggagagctgacacgggccttgctggttctccggctgtgtgcctggcccccactcgtcactcacgggctgttgctccaggcctggtctcggcgactcctgggctcccggctctcaggcgcatttctccgagcatccgtctatgggcagtttgtggctggtgagacagcagaggaggtgaagggctgcgtgcagcagctgcggaccctcagcctccgaccactgctggcagtgcccactgaggaggagccggactctgctgccaagagtgggtgagtagggagccagggcccagggaggctgggaggacgcaggaaggggctttgctgttcgggccctgacacctgctggctgggcagtgaggcgtggtatgaggggaacctcggtgctatgctgcggtgtgtggacctgtcacggggcctcctggagccccccagcctggctgaggccagcctcatgcagctgaaggtgacggcgctgaccagtactcggctctgtgtaaggagtgcaaagacgggggtgcggggagggcgcggctgcccatcgggctcccctcaccaccccgcctaccaccccatttcagaaggagctagcctcgtgggtcagaaggccaggagcctccttggagctgagccccgagaggctggctgaagctatggactctgggcagaacctccaggtctcctgcctcaatgctgagcagaaccagcacctccgggcctccctcagccgcctgcatcgggtggcacagtatgcccgggcccagcacgtgcggctcctggtggatgcggagtacacctcactgaaccctgcgctctcgctgctggtggctgccctggctgtgcgctggaacagcccgggtgaaggcgggccctgggtgtggaacacctaccaggcctgtctaaaggacacattcgagcggctggggagggatgcagaggctgcgcacagggccggcctggccttcggagtgaagctggtacgaggtgcatatctggacaaggagagagcggtggcccagctccatgggatggaagaccccactcagcctgactatgaggccaccagtcagagttacagccgctgcctggaactgatgctgacgcacgtggcccgccatggccccatgtgccacctcatggtggcttcccacaatgaggaatctgttcgccaggcaaccaagcgcatgtgggagctgggcattcctctggatgggactgtctgtttcggacaacttctgggcatgtgtgaccacgtctctctagcactggggcaggccggctatgtagtgtataagtccattccctatggctccttggaggaggtaatcccctacctgatccggagggcccaggagaaccggagcgtgcttcagggtgcccgcagggaacaggagctgctcagccaagaactgtggcggcggctgctgccaggatgccgaaggataccccactagcacccctgagggggtcatgtggtcaataaaagtccttaggtgctgcctaa

SEQ ID NO: 37187 - DNA, 1766 bp, Homo sapiens
tagagatggggtctcactatgtcgcccagggtagtctcaaactcctcggtcttggcctcccaaagtgttgggattacaaacgtgagaaccgtattttcaaatgtattcaataacactacagcgtttccaattttaagaggaagcaattgccacaaaatcactgcccctggtctgggcaaggggcagttggtgaacttgctgcctccagagaaccttccctggtgtggaggcagccagggacccaggatgctccggacctgttacgtgctctgttcccaagctggtcccccctccaggggctggcagtccctgagctttgatggcggggccttccaccttaagggcacaggagagctgacacgggccttgctggttctccggctgtgtgcctggcccccactcgtcactcacgggctgttgctccaggcctggtctcggcgactcctgggctcccggctctcaggcgcatttctccgagcatccgtctatgggcagtttgtggctggtgagacagcagaggaggtgaagggctgcgtgcagcagctgcggaccctcagcctccgaccactgctggcagtgcccactgaggaggagccggactctgctgccaagagtgggtgagtagggagccagggcccagggaggctgggaggacgcaggaaggggctttgctgttcgggccctgacacctgctggctgggcagtgaggcgtggtatgaggggaacctcggtgctatgctgcggtgtgtggacctgtcacggggcctcctggagccccccagcctggctgaggccagcctcatgcagctgaaggtgacggcgctgaccagtactcggctctgtaaggagctagcctcgtgggtcagaaggccaggagcctccttggagctgagccccgagaggctggctgaagctatggactctgggcagaacctccaggtctcctgcctcaatgctgagcagaaccagcacctccgggcctccctcagccgcctgcatcgggtggcacagtatgcccgggcccagcacgtgcggctcctggtggatgcggagtacacctcactgaaccctgcgctctcgctgctggtggctgccctggctgtgcgctggaacagcccgggtgaaggcgggccctgggtgtggaacacctaccaggcctgtctaaaggacacattcgagcggctggggagggatgcagaggctgcgcacagggccggcctggccttcggagtgaagctggtacgaggtgcatatctggacaaggagagagcggtggcccagctccatgggatggaagaccccactcagcctgactatgaggccaccagtcagagttacagccgctgcctggaactgatgctgacgcacgtggcccgccatggccccatgtgccacctcatggtggcttcccacaatgaggaatctgttcgccaggcaaccaagcgcatgtgggagctgggcattcctctggatgggactgtctgtttcggacaacttctgggcatgtgtgaccacgtctctctagcactggggcaggccggctatgtagtgtataagtccattccctatggctccttggaggaggtaatcccctacctgatccggagggcccaggagaaccggagcgtgcttcagggtgcccgcagggaacaggagctgctcagccaagaactgtggcggcggctgctgccaggatgccgaaggataccccactagcacccctgagggggtcatgtggtcaataaaagtccttaggtgctgcctaa

SEQ ID NO: 37188 - DNA, 1593 bp, Homo sapiens
tagagatggggtctcactatgtcgcccagggtagtctcaaactcctcggtcttggcctcccaaagtgttgggattacaaacgtgagaaccgtattttcaaatgtattcaataacactacagcgtttccaattttaagaggaagcaattgccacaaaatcactgcccctggtctgggcaaggggcagttggtgaacttgctgcctccagagaaccttccctggtgtggaggcagccagggacccaggatgctccggacctgttacgtgctctgttcccaagctggtcccccctccaggggctggcagtccctgagctttgatggcggggccttccaccttaagggcacaggagagctgacacgggccttgctggttctccggctgtgtgcctggcccccactcgtcactcacgggctgttgctccaggcctggtctcggcgactcctgggctcccggctctcaggcgcatttctccgagcatccgtctatgggcagtttgtggctggtgagacagcagaggaggtgaagggctgcgtgcagcagctgcggaccctcagcctccgaccactgctggcagtgcccactgaggaggagccggactctgctgccaagagtggtgaggcgtggtatgaggggaacctcggtgctatgctgcggtgtgtggacctgtcacggggcctcctggagccccccagcctggctgaggccagcctcatgcagctgaaggtgacggcgctgaccagtactcggctctgtaaggagctagcctcgtgggtcagaaggccaggagcctccttggagctgagccccgagaggctggctgaagctatggactctgggcagaacctccaggtctcctgcctcaatgctgagcagaaccagcacctccgggcctccctcagccgcctgcatcgggtggcacagtatgcccgggcccagcacgtgcggctcctggtggatgcggagtacacctcactgaaccctgcgctctcgctgctggtggctgccctggctgtgcgctggaacagcccgggtgaaggcgggccctgggtgtggaacacctaccaggcctgtctaaaggacacattcgagcggctggggagggatgcagaggctgcgcacagggccggcctggccttcggagtgaagctggtacgaggtgcatatctggacaaggagagagcggtggcccagctccatgggatggaagaccccactcagcctgactatgaggccaccagtcagagttacagccgctgcctggaactgatgctgacgcacgtggcccgccatggccccatgtgccacctcatggtggcttcccacaatgaggaatctgttcgccaggcaaccaagcgggcaggccggctatgtagtgtataagtccattccctatggctccttggaggaggtaatcccctacctgatccggagggcccaggagaaccggagcgtgcttcagggtgcccgcagggaacaggagctgctcagccaagaactgtggcggcggctgctgccaggatgccgaaggataccccactagcacccctgagggggtcatgtggtcaataaaagtccttaggtgctgcctaa

SEQ ID NO: 37189 - DNA, 1842 bp, Homo sapiens
tagagatggggtctcactatgtcgcccagggtagtctcaaactcctcggtcttggcctcccaaagtgttgggattacaaacgtgagaaccgtattttcaaatgtattcaataacactacagcgtttccaattttaagaggaagcaattgccacaaaatcactgcccctggtctgggcaaggggcagttggtgaacttgctgcctccagagaaccttccctggtgtggaggcagccagggacccaggatgctccggacctgttacgtgctctgttcccaagctggtcccccctccaggggctggcagtccctgagctttgatggcggggccttccaccttaagggcacaggagagctgacacgggccttgctggttctccggctgtgtgcctggcccccactcgtcactcacgggctgttgctccaggcctggtctcggcgactcctgggctcccggctctcaggcgcatttctccgagcatccgtctatgggcagtttgtggctggtgagacagcagaggaggtgaagggctgcgtgcagcagctgcggaccctcagcctccgaccactgctggcagtgcccactgaggaggagccggactctgctgccaagagtggtgaggcgtggtatgaggggaacctcggtgctatgctgcggtgtgtggacctgtcacggggcctcctggagccccccagcctggctgaggccagcctcatgcagctgaaggtgacggcgctgaccagtactcggctctgtaaggagctagcctcgtgggtcagaaggccaggagcctccttggagctgagccccgagaggctggctgaagctatggactctgggcagaacctccaggtctcctgcctcaatgctgagcagaaccagcacctccgggcctccctcagccgcctgcatcgggtggcacagtatgcccgggcccagcacgtgcggctcctggtggatgcggagtacacctcactgaaccctgcgctctcgctgctggtggctgccctggctgtgcgctggaacagcccgggtgaaggcgggccctgggtgtggaacacctaccaggcctgtctaaaggacacattcgagcggctggggagggatgcagaggctgcgcacagggccggcctggccttcggagtgaagctggtacgaggtgcatatctggacaaggagagagcggtggcccagctccatgggatggaagaccccactcagcctgactatgaggccaccagtcagagttacagccgctgcctggaactgatgctgacgcacgtggcccgccatggccccatgtgccacctcatggtggcttcccacaatgaggaatctgttcgccaggcaaccaagcgcatgtgggagctgggcattcctctggatgggactgtctgtttcggacaacttctgggcatgtgtgaccacgtctctctagcactgggtatgtgaatggctcccccacccccatcaagccccaggccttactccctcccagccagagcccttctcctattcccaaccaaggcccagcctccagatccttccagagagatctgtcattccagtgtctgtgggccttccaaggctgtgtctctgtgtctgccgtctgtcatttctgctggttcttgatcatggtgtattatttcttgtgtgttttgttatctttactgtgctgctcctcagggcctgacaccaggtaattaatgtttccttctgccaggtgctaagcagaacgaaatcactttatcctaaattcatagcttgaggtttcttgaaacaccccactggcacaaatttgagctgcaaatacataagggggttaacccatagccccaactt

SEQ ID NO: 37190 - DNA, 937 bp, Homo sapiens
gggaaataggtgcccacaaaagggccctcccttcctctcctttgctcaaatgccagagatggacagaggtgttctggggagaattttaaaaatatttatagccaggcatggttggcacatgcctataatcccaacactttgggaggcgaaggtggaggattgtttgagaccagcctgggcaacacagcaagaccccatttctacaacaaattaaaaaaaaaaaaacagctgggtgtggtggcgcacacctgtagtcccagctattccggaggtggaaggatcacttgagcccaagaggttgagactgcagtgagcagtgcttgagccactgcactccagcctgggtaacaaagcaagtccctacctcttaagtcccagatggacaagacgttgccccttatttgctggggcatgaggaggtctgagggctccagggaactggctgggagtcactgggggaccttcaaggaatgcaaaggactggttattatgtatcattgagtttggaaatacttcaatgtttgaattactggagccgccatatgggtgcatagtggctgactttaagctgtagatgcagccacagtctggactgatgatgtggccttttctgtagcatgtgggagctgggcattcctctggatgggactgtctgtttcggacaacttctgggcatgtgtgaccacgtctctctagcactggggcaggccggctatgtagtgtataagtccattccctatggctccttggaggaggtaatcccctacctgatccggagggcccaggagaaccggagcgtgcttcagggtgcccgcagggaacaggagctgctcagccaagaactgtggcggcggctgctgccaggatgccgaaggataccccactagcacccctgagggggtcatgtggtcaataaaagtccttaggtgctgcctaa

SEQ ID NO: 37191 - DNA, 565 bp, Homo sapiens
tagagatggggtctcactatgtcgcccagggtagtctcaaactcctcggtcttggcctcccaaagtgttgggattacaaacgtgagaaccgtattttcaaatgtattcaataacactacagcgtttccaattttaagaggaagcaattgccacaaaatcactgcccctggtctgggcaaggggcagttggtgaacttgctgcctccagagaaccttccctggtgtggaggcagccagggacccaggatgctccggacctgttacgtgctctgttcccaagctggtcccccctccaggggctggcagtccctgagctttgatggcggggccttccaccttaagggcacaggagagctgacacgggccttgctggttctccggctgtgtgcctggcccccactcgtcactcacgggctgttgctccaggcctggtctcggcgactcctgggctcccggctctcagccaagaactgtggcggcggctgctgccaggatgccgaaggataccccactagcacccctgagggggtcatgtggtcaataaaagtccttaggtgctgcctaa

SEQ ID NO: 37192 - DNA, 155 bp, Homo sapiens
atttacagttcagaatgatccatgcaaactctttatttctgttttctcttttaaaaatcagatctgccacactgggcttatctgtctgcaaggcaccaatttgttcctcctgcatagtaccagcccctttagaccatgaatataatctcctttcc

SEQ ID NO: 37193 - DNA, 340 bp, Homo sapiens
tttgatcagtcagagcccccgcctttgcctatttacggccctgtcactcaagagcagcccagcagcagagagaggagtgttgggttgggtgtggggggcggggggtggtgcagaggggagggggagctgccgaggagaggcaggtctggggctgccagggcagtccaggctgcctaactttctgatgcaaccagcccttcagtggcaaggtgctccctggcctctgggacagcctggaagtgtgtcctgcctgcaccgacacacacttctcacagtctgctgagcagcaccttccagttgcgaactacgccagggaacagacctggctgcagagaaccgg

SEQ ID NO: 37194 - DNA, 524 bp, Homo sapiens
acactaacattcgttaaaatgtatccaatgtttgtaatatgtcataaaatgtgctaaacagttcctagttatgagcttagttaattctcagaactttgtaagcagctgacaattgatttcattagctgatttgattttagctccattttacaggtggaaaaactgaggcacagagtgagtgaattcctgaaaccgtaaagataggaaatattcaagagggaattaccatctggatgggttgactaggtttcctctctgaatcaccattgtacacagtttccagggtcaggtaaaccaaacaaaaccatgggatacctacactgttagccctcctccccaatctgcgcctcacttgtccttagcaggtgctcattagctacttgtgccctggacaagatgctgtttacacacttgtgttttctctaaaacaaggacatggcaccgacttggctagtgtttgtctaggttccataaaacacataaatttccaaacttggcttattgaggtaagaaccagtataatt

SEQ ID NO: 37195 - DNA, 166 bp, Homo sapiens
ttgatgacctattatgtgctaggcaaggttctaagttcagaggatacagtagtgaatcaaacagacaaaattccctgccttcttagagcttatgttctagttggggaaagacaaaataaataaatatgtaaaatatatattatgtcaaatagtcataagtactatg

SEQ ID NO: 37196 - DNA, 397 bp, Homo sapiens
ctttaataaaagggatatacagataatgtctttctcatgaggttgtggcagagtttaatgtaataacaggtatagtgcttagcacagggtctagcatacattatgcttgataaaatattgcccctttatttctgatgattattaaggcacattgccttaacaaaaagatgtttaagtcatatgaggagtaaaaattttaaactgccttttggttcaaatttctgcttcctcttgcctcttttatgtccccatttcatctatcattggggtattaatatattcataatccaaaggactttgggttctaaggaaaccccaaaattctctagggaaatagttgggagggtcccaaggtattcaccccaaagtagttttcacaaataatgttggtacatag

SEQ ID NO: 37197 - DNA, 237 bp, Homo sapiens
ctggaagaatttagaaaatacagttctattaatattaaatagtttacaaaatttgaaaagatagatcataaactgtccacagtggttctctggattattcaagtgggggactggagtggagggtagggtaggaaaaaaatgtttcctttctctatttttgtgttgtttgattttctttttaaaccataaaaatttattacctttagattcaatagccaaaagaaaggtatcatttta

SEQ ID NO: 37198 - DNA, 486 bp, Homo sapiens
aactgcatttctggacatgaaaagtcaaatgaatgcggggaaaagtaaattgcctatagaggtattttctgtatttccctagagggggaaatgtgtaatttctcaaaaggaagaagtcctcatttatccttctgaaccacaatcatatgaatccattcaattaatattaatcttatcttctattctccatcactctctacatctttctataattgcatcattttcttgtccgtataatacatcaaatgcagaggtgattttaagggagccacaaatcaagaagtctcaattcaataatttcgttaaaatgtaagaaatatatacggattaagaatattcttaggtaattatgttctgtttcaaatatcagtgaaaattttcatagacatttaaggggtaaaagacatttaacagatagaaaaaaatatctaccttttaaaaaatgaccttctcttttgtcctacgtgatttgttgagcagactggg

SEQ ID NO: 37199 - DNA, 321 bp, Homo sapiens
aactgcatttctggacatgaaaagtcaaatgaatgcggggaaaagtaaattgcctatagaggtattttctgtatttccctagagggggaaatgtgtaatttctcaaaaggaagaagtcctcatttatccttctgaaccacaatcatatgaatccattcaattaatattaatcttatcttctattctccatcactctctacatctttctataattgcatcattttcttgtccgtataatacatcaaatgcagaggttgcagtgagatcgcgtccatgcactccagcctgggcgacagagcatgactctatctcaaaaaaaaa

SEQ ID NO: 37200 - DNA, 395 bp, Homo sapiens
gagaactgcttgaacctgggagacagaggtttcagggagcagatgtcataccactgaactccagcctgggtgacagagcgagaatccatcaagatcaaaagtctttactgtttcctgagcagtgtgtaaacctcccagactcttacgtgacccttgagagacaagctctataaggactgtgatttaacttctccatcatggcaggcttgggggcacactgaagtcaatttaggaaatacatagaaatggacaacatggcttacacatttgagatctgatttctactggctatgcaatgttaaatccatttttttgtttccttctttcaaatactttccaccatacttaccctcatgacagacatttacacttcagcccttaggctgtgagaagca

SEQ ID NO: 37201 - DNA, 409 bp, Homo sapiens
atcatctgatcaggcagatcctatggtttgggaagtgacagtggggaaggcatgatgcagtatgaaacttatgacaagctccagtagaagattcacaacacaggcccctgtgattctgaagtgaagccaggtcatcctcagcagagagtgacatgccttgggaatcagtccctgtgcatcactgggccctgatagcattggaacacttagctatgggacagcgggtgaccatgtgtttagaacttccatttatgaactgcgttctgttaaaccttccaagtcctaaagccaatgagctcagaaagtccactctaagatgaaaatggagcatctgggatcaaattagagcaaggccagcaggcacatgtcagttgcacgagcaggtagcccaaacccccatgtcactcac

SEQ ID NO: 37202 - DNA, 713 bp, Homo sapiens
gttgaataaaatatgacagacctccttttaaatgtatagctgagcttttaatagtgtgagggaagtccacagggatcaacaattaagagagaactgcaaacaacagtagtaagcacataacctgatgctttggcaacatggaaggagaggggtgctgtttcagtaactaaaggattttaaaaagaagataaggccttaagttcaataaatttgactgttggaaactaaaatcttctcacctgcctttcaactctccatacaatagcccgaactatcttttaaaaatgtaaaccagataatgccgccctcctgcttagaatgttccaaaggcttcttattgcagatgatatacaaaacaatcttcatgccttattctgcatgcgctagatcatgcattctcaaacaggatgatattgcccccaaaagggggaaatatgattgttggtgtgagaggtggaatgatatgaagttttacaatgatttgtgtcctccaaagctcaactgtatttgataaaatcttatactttagaacttaaatcactcttgttttcttggatattacagaagcattgccattgagctcatggaagatacatgaaatgtatgcaagaccagcactacaaaatcatagcaaatagatgactttgattgtaggacttttcaatctattgctcattcttgaagtcatatgtcaagaagtggcctttgtgtac

SEQ ID NO: 37203 - DNA, 521 bp, Homo sapiens
ttacaggtgtgagccaccacacctggccaacatgtggctttcagttcttacttgaagacagctgctctagctagaaacttcctatcggcatttgagccagctggtagagggcattacctcccccacccccaagaacacttcttggaagttacacacaatacataaacttcaatttcaaacagttgcttggtcccactagccatgaagctggatgggacgtaatattctatctgggttgtcatgggccaaattaacattttgagattctgttaggaagacgagaattggataatgggcacctctaacagtgtctgtcagagttgacatacattgtgtatctcctgcaccaaagcatttttgagatcaagtgttcttccagctgagcagaaatttggaaggctattcagtgctgcttagtgtagcagctaataatgttccaacttctatatgatagtttgctttttgttttttgtttttttctagagacagagtctggccaatatggtgaaaccccatctcta

SEQ ID NO: 37204 - DNA, 1058 bp, Homo sapiens
ttacaggtgtgagccaccacacctggccaacatgtggctttcagttcttacttgaagacagctgctctagctagaaacttcctatcggcatttgagccagctggtagagggcattacctcccccacccccaagaacacttcttggaagttacacacaatacataaacttcaatttcaaacagttgcttggtcccactagccatgaagctggatgggacgtaatattctatctgggttgtcatgggccaaattaacattttgagattctgttaggaagacgagaattggataatgggcacctctaacagtgtctgtcagagttgacatacattgtgtatctcctgcaccaaagcatttttgagatcaagtgttcttccagctgagcagaaatttggaaggctattcagtgctgcttagtgtagcagctaataatgttccaacttctatatgatagtttgctttttgttttttgtttttttctagagacagagtctcgttgcccaggctggtctccaattcctgggttcaagcaatcctcctgactcggcctcctaaatgctgggattgcaggcatgaaccactgtgcccagtctatatataatagattttagaagaaatttctgccactcagtgactgctttaaattctagagacagaggctgagagaaacttagtagcctgcctgcgcatactgcaagtacagactatataacaagttgaaagagaatcaccctggtatataatatttaaaacatgaaaaaggcattactattgttctggtctaagtactctaacaggacgatgatttctaaccctagcatcatgacatgtatatagtgtgttgtaagacatttgccagctaatagttacagtactgaagcttgtgaatacgttaattgagaaaactttaagcaggttcaaagttatcccatgatagtggcattcttatttgtatatatgtgctttccttttttatttgtatcaaggcatttaaaatgaatatatgtaacatgtacctaagttttaaaagcataataaaatgaacacatctgaaacca

SEQ ID NO: 37205 - DNA, 1210 bp, Homo sapiens
gtgggtaggatttatggagcatcttatctacaaaggtcataaagactgaaaaattatgattgacccttcaacgtggatttgaactgcctgggtccacttatatgtaaactattttcaacccaacttggatcaaagacaaaatttacgagatgtgaaacccatgtatatggaagactgacttttaatatatgtgggttccacagagctgactgcaggacttgagtatgctcaaattttggtatatgtgggggtcttggaaccaatcccctgcatgtgagggacgacggtagcttcaaaaaggacttaggtgttgatgacaattcgccctaaccctgcaaagctctttcacactcatatttttcttctacctttgtaatatccttaaaatcacttcctgaggatagcgggagaggattatcatcctctggaatagattgatgcatgggttcagagaggcagattagaacgcttgtccaaagtactagagcaagcaagcagtggaagcagggtcttttttcttttccttttttttttttgagatggacactcactctgtcacccaggctggagtgcagtggtgtgatctcagcttactgcaagttctgcctcccgggttcatgccactctcctgcctcagcctccggagtagcttgggaccgcaggcgcctgccaccacgcccagctaactttttttttttttgtatttttagtagagacggagatgatgtttcactgtgttagtcaagatggtcttgatctcctgacctcgtgatccgcctgcctccgcctcccaaagtgctgggattacaggtgtgagccactgcgcctggcgggaagtagggtcttaatccacatcctctggctccaaaaccaatgctgatttaataattaaatctgttactaggtaacaagtctgccaagtatttacactttaaccttttggggttaatgtctacaagggcaaccaagctctctcatatatcaccaaagatatcaaagatatcatggagtgctgggctgaaagaatcactgatagagtcaagtaagagatctcaagttctaggccccaaacctttcccaagtgacagtctgttcacctagatgactagaggaaagacatgagctcggtacagatattgaaagcagaagtcaagaaaattcaaggctgccaaactcctcagttactgagactgaaacacaaaggaaaaga

SEQ ID NO: 37206 - DNA, 299 bp, Homo sapiens
tgagacggagtctcacgctgtcacccaggctggagtgcagtggcacgatcttggctcactacaacctccgcctcccgggttcaagtgattctcctgcctcagcctcccgagtagccgggactacaggcacgcgccaccacgccccacctctgattgcttttttttttttttaatatggaatacttcatgaattgattattcttttaaaagagttctccaatcaccaactgtatactctttcttcctcttccctatctttatttctcttctttgctcatattattatctgaaattgcatt

SEQ ID NO: 37207 - DNA, 2323 bp, Homo sapiens
  misc_feature (279)..(279): n is a, c, g, or t
  misc_feature (289)..(289): n is a, c, g, or t
tccgccgagcccgggcggcggcggcggcacatctaacgcgcgggcacccgggccgccgcggcccccgcaaataagcccagcctcggcccccgccgctcattggcgcgggccgcagccagcgcacccagaccctgcgctgccctcggacggccgggcgcggaccccagctgcggaggccgacggcacccggccccgagcgcctcgacgccgagccgcgcgcgccttctccgccaggcccggcgggcgggagcgggggcgagggagcaggagcggccagtncccccgacanccccggcccggcacccccggcccggcatcccccgccgccgccgccgccgcctcaaggccgcccgctccccgcaggtggacgcggccatgggccgaggggtgcgcgtgctgctgctgctgagcctgctgcactgcgccgggggaagcgagggcaggaagacctggcggcgccggggtcagcagccgcctcctcccccgcggaccgaggcggcgccggcggccggacagcccgtggagagcttcccgctggacttcacggccgtggagggtaacatggacagcttcatggcgcaagtcaagagcctggcgcagtccctgtacccctgctccgcgcagcagctcaacgaggacctgcgcctgcacctcctactcaacacctcggtgacctgcaacgacggcagccccgccggctactacctgaaggagtccaggggcagccggcggtggctcctcttcctggaaggcggctggtactgcttcaaccgcgagaactgcgactccagatacgacaccatgcggcgcctcatgagctcccgggactggccgcgcactcgcacaggcacagggatcctgtcctcacagccggaggagaacccctactggtggaacgcaaacatggtcttcatcccctactgctccagtgatgtttggagcggggcttcatccaagtctgagaagaacgagtacgccttcatgggcgccctcatcatccaggaggtggtgcgggagcttctgggcagagggctgagcggggccaaggtgctgctgctggccgggagcagcgcggggggcaccggggtgctcctgaatgtggaccgtgtggctgagcagctggagaagctgggctacccagccatccaggtgcgaggcctggctgactccggctggttcctggacaacaagcagtatcgccacacagactgcgtcgacacgatcacgtgcgcgcccacggaggccatccgccgtggcatcaggtactggaacggggtggtcccggagcgctgccgacgccagttccaggagggcgaggagtggaactgcttctttggctacaaggtctacccgaccctgcgctgccctgtgttcgtggtgcagtggctgtttgacgaggcacagctgacggtggacaacgtgcacctgacggggcagccggtgcaggagggcctgcggctgtacatccagaacctcggccgcgagctgcgccacacactcaaggacgtgccggccagctttgcccccgcctgcctctcccatgagatcatcatccggagccactggacggatgtccaggtgaaggggacgtcgctgccccgagcactgcactgctgggacaggagcctccatgacagccacaaggccagcaagacccccctcaagggctgccccgtccacctggtggacagctgcccctggccccactgcaacccctcatgccccaccgtccgagaccagttcacggggcaagagatgaacgtggcccagttcctcatgcacatgggcttcgacatgcagacggtggcccagccgcagggactggagcccagtgagctgctggggatgctgagcaacggaagctaggcagactgtctggaggaggagccggcactgaggggcccagacacccgctgccccagtgccacctcaccccccaccagcaggccctcccgtctcttcgggacagggccccagccgtcccccctgtctgggtctgcccactgccctcctgccccggctttccctgcccctctcccacagcccagccagagacaagggacctgctgtcatccccatctgtggcctgggggtccttcctgacaacgagggggtagccagaagagaagcactggattcctcagtccaccagctcagacagcacccaccggccccacccatcaagcccttttatattattttataaagtgacttttttattactttaattttttaaaaaaaggaaaataagaatatatgatgaatgatattgttttgtaactttttaaaaatgattttaaagagacaaaaaagaacctcaccc

SEQ ID NO: 37208 - DNA, 2184 bp, Homo sapiens
tccgccgagcccgggcggcggcggcggcacatctaacgcgcgggcacccgggccgccgcggcccccgcaaataagcccagcctcggcccccgccgctcattggcgcgggccgcagccagcgcacccagaccctgcgctgccctcggacggccgggcgcggaccccagctgcggaggccgacggcacccggccccgagcgcctcaaggccgcccgctccccgcaggtggacgcggccatgggccgaggggtgcgcgtgctgctgctgctgagcctgctgcactgcgccgggggaagcgagggcaggaagacctggcggcgccggggtcagcagccgcctcctcccccgcggaccgaggcggcgccggcggccggacagcccgtggagagcttcccgctggacttcacggccgtggagggtaacatggacagcttcatggcgcaagtcaagagcctggcgcagtccctgtacccctgctccgcgcagcagctcaacgaggacctgcgcctgcacctcctactcaacacctcggtgacctgcaacgacggcagccccgccggctactacctgaaggagtccaggggcagccggcggtggctcctcttcctggaaggcggctggtactgcttcaaccgcgagaactgcgactccagatacgacaccatgcggcgcctcatgagctcccgggactggccgcgcactcgcacaggcacagggatcctgtcctcacagccggaggagaacccctactggtggaacgcaaacatggtcttcatcccctactgctccagtgatgtttggagcggggcttcatccaagtctgagaagaacgagtacgccttcatgggcgccctcatcatccaggaggtggtgcgggagcttctgggcagagggctgagcggggccaaggtgctgctgctggccgggagcagcgcggggggcaccggggtgctcctgaatgtggaccgtgtggctgagcagctggagaagctgggctacccagccatccaggtgcgaggcctggctgactccggctggttcctggacaacaagcagtatcgccacacagactgcgtcgacacgatcacgtgcgcgcccacggaggccatccgccgtggcatcaggtactggaacggggtggtcccggagcgctgccgacgccagttccaggagggcgaggagtggaactgcttctttggctacaaggtctacccgaccctgcgctgccctgtgttcgtggtgcagtggctgtttgacgaggcacagctgacggtggacaacgtgcacctgacggggcagccggtgcaggagggcctgcggctgtacatccagaacctcggccgcgagctgcgccacacactcaaggacgtgccggccagctttgcccccgcctgcctctcccatgagatcatcatccggagccactggacggatgtccaggtgaaggggacgtcgctgccccgagcactgcactgctgggacaggagcctccatgacagccacaaggccagcaagacccccctcaagggctgccccgtccacctggtggacagctgcccctggccccactgcaacccctcatgccccaccgtccgagaccagttcacggggcaagagatgaacgtggcccagttcctcatgcacatgggcttcgacatgcagacggtggcccagccgcagggactggagcccagtgagctgctggggatgctgagcaacggaagctaggcagactgtctggaggaggagccggcactgaggggcccagacacccgctgccccagtgccacctcaccccccaccagcaggccctcccgtctcttcgggacagggccccagccgtcccccctgtctgggtctgcccactgccctcctgccccggctttccctgcccctctcccacagcccagccagagacaagggacctgctgtcatccccatctgtggcctgggggtccttcctgacaacgagggggtagccagaagagaagcactggattcctcagtccaccagctcagacagcacccaccggccccacccatcaagcccttttatattattttataaagtgacttttttattactttaattttttaaaaaaaggaaaataagaatatatgatgaatgatattgttttgtaactttttaaaaatgattttaaagagacaaaaaagaacctcaccc

SEQ ID NO: 37209 - DNA, 2257 bp, Homo sapiens
  misc_feature (206)..(206): n is a, c, g, or t
  misc_feature (208)..(209): n is a, c, g, or t
tccgccgagcccgggcggcggcggcggcacatctaacgcgcgggcacccgggccgccgcggcccccgcaaataagcccagcctcggcccccgccgctcattggcgcgggccgcagccagcgcacccagaccctgcgctgccctcggacggccgggcgcggaccccagctgcggaggccgacggcacccggccccgagcgcctcgangnngagccgggcgcgccttctccgccaggcccggcgggcgggagcgggggcgagggagcaggagcgcctcaaggccgcccgctccccgcaggtggacgcggccatgggccgaggggtgcgcgtgctgctgctgctgagcctgctgcactgcgccgggggaagcgagggcaggaagacctggcggcgccggggtcagcagccgcctcctcccccgcggaccgaggcggcgccggcggccggacagcccgtggagagcttcccgctggacttcacggccgtggagggtaacatggacagcttcatggcgcaagtcaagagcctggcgcagtccctgtacccctgctccgcgcagcagctcaacgaggacctgcgcctgcacctcctactcaacacctcggtgacctgcaacgacggcagccccgccggctactacctgaaggagtccaggggcagccggcggtggctcctcttcctggaaggcggctggtactgcttcaaccgcgagaactgcgactccagatacgacaccatgcggcgcctcatgagctcccgggactggccgcgcactcgcacaggcacagggatcctgtcctcacagccggaggagaacccctactggtggaacgcaaacatggtcttcatcccctactgctccagtgatgtttggagcggggcttcatccaagtctgagaagaacgagtacgccttcatgggcgccctcatcatccaggaggtggtgcgggagcttctgggcagagggctgagcggggccaaggtgctgctgctggccgggagcagcgcggggggcaccggggtgctcctgaatgtggaccgtgtggctgagcagctggagaagctgggctacccagccatccaggtgcgaggcctggctgactccggctggttcctggacaacaagcagtatcgccacacagactgcgtcgacacgatcacgtgcgcgcccacggaggccatccgccgtggcatcaggtactggaacggggtggtcccggagcgctgccgacgccagttccaggagggcgaggagtggaactgcttctttggctacaaggtctacccgaccctgcgctgccctgtgttcgtggtgcagtggctgtttgacgaggcacagctgacggtggacaacgtgcacctgacggggcagccggtgcaggagggcctgcggctgtacatccagaacctcggccgcgagctgcgccacacactcaaggacgtgccggccagctttgcccccgcctgcctctcccatgagatcatcatccggagccactggacggatgtccaggtgaaggggacgtcgctgccccgagcactgcactgctgggacaggagcctccatgacagccacaaggccagcaagacccccctcaagggctgccccgtccacctggtggacagctgcccctggccccactgcaacccctcatgccccaccgtccgagaccagttcacggggcaagagatgaacgtggcccagttcctcatgcacatgggcttcgacatgcagacggtggcccagccgcagggactggagcccagtgagctgctggggatgctgagcaacggaagctaggcagactgtctggaggaggagccggcactgaggggcccagacacccgctgccccagtgccacctcaccccccaccagcaggccctcccgtctcttcgggacagggccccagccgtcccccctgtctgggtctgcccactgccctcctgccccggctttccctgcccctctcccacagcccagccagagacaagggacctgctgtcatccccatctgtggcctgggggtccttcctgacaacgagggggtagccagaagagaagcactggattcctcagtccaccagctcagacagcacccaccggccccacccatcaagcccttttatattattttataaagtgacttttttattactttaattttttaaaaaaaggaaaataagaatatatgatgaatgatattgttttgtaactttttaaaaatgattttaaagagacaaaaaagaacctcaccc

SEQ ID NO: 37210 - DNA, 1640 bp, Homo sapiens
aagtctaggcgcatgtctcgtattgaattggaaggagtgcggctggccactattcctggaaggcggtggtactggttcaagcgcgagaacgtgcgactccagatacgaggaccatgcggcgcctcatgaggctcccgtgtgactggccgtcgttttacacggcacttggatcctgtcttagagctgagtagaacccctactggtggaccacatcgatgtgtcgttctatacccctactgctcctagtgatgttttgtagcgggtttcatcgaagtctgagaagaacgagtacgccttcatgggcgccctcatcatccaggaggtggtgcgggagcttctgggcagagggctgagcggggccaaggtgctgctgctggccgggagcagcgcggggggcaccggggtgctcctgaatgtggaccgtgtggctgagcagctggagaagctgggctacccagccatccaggtgcgaggcctggctgactccggctggttcctggacaacaagcagtatcgccacacagactgcgtcgacacgatcacgtgcgcgcccacggaggccatccgccgtggcatcaggtactggaacggggtggtcccggagcgctgccgacgccagttccaggagggcgaggagtggaactgcttctttggctacaaggtctacccgaccctgcgctgccctgtgttcgtggtgcagtggctgtttgacgaggcacagctgacggtggacaacgtgcacctgacggggcagccggtgcaggagggcctgcggctgtacatccagaacctcggccgcgagctgcgccacacactcaaggacgtgccggccagctttgcccccgcctgcctctcccatgagatcatcatccggagccactggacggatgtccaggtgaaggggacgtcgctgccccgagcactgcactgctgggacaggagcctccatgacagccacaaggccagcaagacccccctcaagggctgccccgtccacctggtggacagctgcccctggccccactgcaacccctcatgccccaccgtccgagaccagttcacggggcaagagatgaacgtggcccagttcctcatgcacatgggcttcgacatgcagacggtggcccagccgcagggactggagcccagtgagctgctggggatgctgagcaacggaagctaggcagactgtctggaggaggagccggcactgaggggcccagacacccgctgccccagtgccacctcaccccccaccagcaggccctcccgtctcttcgggacagggccccagccgtcccccctgtctgggtctgcccactgccctcctgccccggctttccctgcccctctcccacagcccagccagagacaagggacctgctgtcatccccatctgtggcctgggggtccttcctgacaacgagggggtagccagaagagaagcactggattcctcagtccaccagctcagacagcacccaccggccccacccatcaagcccttttatattattttataaagtgacttttttattactttaattttttaaaaaaaggaaaataagaatatatgatgaatgatattgttttgtaactttttaaaaatgattttaaagagacaaaaaagaacctcaccc

SEQ ID NO: 37211 - DNA, 834 bp, Homo sapiens
gtgcctgtaatccagctactccggaggctgaggcaggagaatcgcttgaacctgggagacagaggttatgccactggacggatgtccaggtgaaggggacgtcgctgccccgagcactgcactgctgggacaggagcctccatgacagccacaaggccagcaagacccccctcaagggctgccccgtccacctggtggacagctgcccctggccccactgcaacccctcatgccccaccgtccgagaccagttcacggggcaagagatgaacgtggcccagttcctcatgcacatgggcttcgacatgcagacggtggcccagccgcagggactggagcccagtgagctgctggggatgctgagcaacggaagctaggcagactgtctggaggaggagccggcactgaggggcccagacacccgctgccccagtgccacctcaccccccaccagcaggccctcccgtctcttcgggacagggccccagccgtcccccctgtctgggtctgcccactgccctcctgccccggctttccctgcccctctcccacagcccagccagagacaagggacctgctgtcatccccatctgtggcctgggggtccttcctgacaacgagggggtagccagaagagaagcactggattcctcagtccaccagctcagacagcacccaccggccccacccatcaagcccttttatattattttataaagtgacttttttattactttaattttttaaaaaaaggaaaataagaatatatgatgaatgatattgttttgtaactttttaaaaatgattttaaagagacaaaaaagaacctcaccc

SEQ ID NO: 37212 - DNA, 2090 bp, Homo sapiens
  misc_feature (279)..(279): n is a, c, g, or t
  misc_feature (289)..(289): n is a, c, g, or t
tccgccgagcccgggcggcggcggcggcacatctaacgcgcgggcacccgggccgccgcggcccccgcaaataagcccagcctcggcccccgccgctcattggcgcgggccgcagccagcgcacccagaccctgcgctgccctcggacggccgggcgcggaccccagctgcggaggccgacggcacccggccccgagcgcctcgacgccgagccgcgcgcgccttctccgccaggcccggcgggcgggagcgggggcgagggagcaggagcggccagtncccccgacanccccggcccggcacccccggcccggcatcccccgccgccgccgccgccgcctcaaggccgcccgctccccgcaggtggacgcggccatgggccgaggggtgcgcgtgctgctgctgctgagcctgctgcactgcgccgggggaagcgagggcaggaagacctggcggcgccggggtcagcagccgcctcctcccccgcggaccgaggcggcgccggcggccggacagcccgtggagagcttcccgctggacttcacggccgtggagggtaacatggacagcttcatggcgcaagtcaagagcctggcgcagtccctgtacccctgctccgcgcagcagctcaacgaggacctgcgcctgcacctcctactcaacacctcggtgacctgcaacgacggcagccccgccggctactacctgaaggagtccaggggcagccggcggtggctcctcttcctggaaggcggctggtactgcttcaaccgcgagaactgcgactccagatacgacaccatgcggcgcctcatgagctcccgggactggccgcgcactcgcacaggcacagggatcctgtcctcacagccggaggagaacccctactggtggaacgcaaacatggtcttcatcccctactgctccagtgatgtttggagcggggcttcatccaagtctgagaagaacgagtacgccttcatgggcgccctcatcatccaggaggtggtgcgggagcttctgggcagagggctgagcggggccaaggtgctgctgctggccgggagcagcgcggggggcaccggggtgctcctgaatgtggaccgtgtggctgagcagctggagaagctgggctacccagccatccaggtgcgaggcctggctgactccggctggttcctggacaacaagcagtatcgccacacagactgcgtcgacacgatcacgtgcgcgcccacggaggccatccgccgtggcatcaggtactggaacggggtggtcccggagcgctgccgacgccagttccaggagggcgaggagtggaactgcttctttggctacaaggtctacccgaccctgcgctgccctgtgttcgtggtgcagtggctgtttgacgaggcacagctgacggtggacaacgtgcacctgacggggcagccggtgcaggagggcctgcggctgtacatccagaacctcggccgcgagctgcgccacacactcaaggacgtgccggccagctttgcccccgcctgcctctcccatgagatcatcatccggagccactggacggatgtccaggtgaaggggacgtcgctgccccgagcactgcactgctgggacaggagcctccatgacagccacaaggccagcaagacccccctcaagggctgccccgtccacctggtggacagctgcccctggccccactgcaacccctcatgccccaccgtccgagaccagttcacggggcaagagatgaacgtggcccagttcctcatgcacatgggcttcgacatgcagacggtggcccagccgcagggactggagcccagtgagctgctggggatgctgagcaacggaagctaggcagactgtctggaggaggagccggcactgaggggcccagacaaccaatgcgagcagcggtaccttaagacacaccgacagccccggtcatcagggcgccacaggctcggagtcgtcaggacaccctcagttataccaccaccgctgcgcaacacttctttggacccctcgcgctgacgagcagccaggacgaagcgaccctcctcctcacgaaagcccgagga

SEQ ID NO: 37213 - DNA, 1585 bp, Homo sapiens
  misc_feature (279)..(279): n is a, c, g, or t
  misc_feature (289)..(289): n is a, c, g, or t
tccgccgagcccgggcggcggcggcggcacatctaacgcgcgggcacccgggccgccgcggcccccgcaaataagcccagcctcggcccccgccgctcattggcgcgggccgcagccagcgcacccagaccctgcgctgccctcggacggccgggcgcggaccccagctgcggaggccgacggcacccggccccgagcgcctcgacgccgagccgcgcgcgccttctccgccaggcccggcgggcgggagcgggggcgagggagcaggagcggccagtncccccgacanccccggcccggcacccccggcccggcatcccccgccgccgccgccgccgcctcaaggccgcccgctccccgcaggtggacgcggccatgggccgaggggtgcgcgtgctgctgctgctgagcctgctgcactgcgccgggggaagcgagggcaggaagacctggcggcgccggggtcagcagccgcctcctcccccgcggaccgaggcggcgccggcggccggacagcccgtggagagcttcccgctggacttcacggccgtggagggtaacatggacagcttcatggcgcaagtcaagagcctggcgcagtccctgtacccctgctccgcgcagcagctcaacgaggacctgcgcctgcacctcctactcaacacctcggtgacctgcaacgacggcagccccgccggctactacctgaaggagtccaggggcagccggcggtggctcctcttcctggaaggcggctggtactgcttcaaccgcgagaactgcgactccagatacgacaccatgcggcgcctcatgagctcccgggactggccgcgcactcgcacaggcacagggatcctgtcctcacagccggaggagaacccctactggtggaacgcaaacatggtcttcatcccctactgctccagtgatgtttggagcggggcttcatccaagtctgagaagaacgagtacgccttcatgggcgccctcatcatccaggaggtggtgcgggagcttctgggcagagggctgagcggggccaaggtgctgctgctggccgggagcagcgcggggggcaccggggtgctcctgaatgtggaccgtgtggctgagcagctggagaagctgggctacccagccatccaggtgcgaggcctggctgactccggctggttcctggacaacaagcagtatcgccacacagactgcgtcgacacgatcacgtgcgcgcccacggaggccatccgccgtggcatcaggtactggaacggggtggtcccggagcgctgccgacgccagttccaggagggcgaggagtggaactgcttctttggctacaaggtctacccgaccctgcgctgccctgtgttcgtggtgcagtggctgtttgacgaggcacagctgacggtggacaacgtgcacctgacggggcagccggtgcaggagggcctgcggctgtacatccagaacctcggccgcgagctgcgccacacactcaaggacgtgccggccagctttgcccccgcctgcctctcccatgagatcatcatccggaggtcagtgtccctgctccgggcagctt

SEQ ID NO: 37214 - DNA, 1161 bp, Homo sapiens
  misc_feature (279)..(279): n is a, c, g, or t
  misc_feature (289)..(289): n is a, c, g, or t
tccgccgagcccgggcggcggcggcggcacatctaacgcgcgggcacccgggccgccgcggcccccgcaaataagcccagcctcggcccccgccgctcattggcgcgggccgcagccagcgcacccagaccctgcgctgccctcggacggccgggcgcggaccccagctgcggaggccgacggcacccggccccgagcgcctcgacgccgagccgcgcgcgccttctccgccaggcccggcgggcgggagcgggggcgagggagcaggagcggccagtncccccgacanccccggcccggcacccccggcccggcatcccccgccgccgccgccgccgcctcaaggccgcccgctccccgcaggtggacgcggccatgggccgaggggtgcgcgtgctgctgctgctgagcctgctgcactgcgccgggggaagcgagggcaggaagacctggcggcgccggggtcagcagccgcctcctcccccgcggaccgaggcggcgccggcggccggacagcccgtggagagcttcccgctggacttcacggccgtggagggtaacatggacagcttcatggcgcaagtcaagagcctggcgcagtccctgtacccctgctccgcgcagcagctcaacgaggacctgcgcctgcacctcctactcaacacctcggtgacctgcaacgacggcagccccgccggctactacctgaaggagtccaggggcagccggcggtggctcctcttcctggaaggcggctggtactgcttcaaccgcgagaactgcgactccagatacgacaccatgcggcgcctcatgagctcccgggactggccgcgcactcgcacaggcacagggatcctgtcctcacagccggaggagaacccctactggtggaacgcaaacatggtcttcatcccctactgctccagtgatgtttggagcggggcttcatccaagtctgagaagacactggattcctcagtccaccagctcagacagcacccaccggccccacccatcaagcccttttatattattttataaagtgacttttttattactttaattttttaaaaaaaggaaaataagaatatatgatgaatgatattgttttgtaactttttaaaaatgattttaaagagacaaaaaagaacctcaccc

SEQ ID NO: 37215 - DNA, 397 bp, Homo sapiens
gtctcaaaaaaaaaaaaaaaaaaaaaagagggaaatgaatatacacctgctctgaaatgaaatggttggggccaaattgtgtgtgtgtgtgtgtgtgtgtgtgtgcgcacacgcaattgtctcaaaagcctcttgagtctttcccttatatctctgacaatcccactgctccaaagtacactgtgggttttcctcaacttggagctagatacctggaattctagaaaacaattccctcagtagacaattgctcccttatatgagcacaagcagcggagtgactacatggatcaagctgtatttcaccattttttttttttgctctgttgctttatgtaccacaccagccccacacaactcttcaccaaagagttgtggaattattgcataagagaaa

SEQ ID NO: 37216 - DNA, 757 bp, Homo sapiens
atttttctttttcatttacaacttggctaacaggaggcctagcttttggcctgtctcagcttttgacatatcttcaagtgaaagatgtgtgactcttcccatcacttgaatacttagaagccatgatagggttattaattggctggaattcaatactggtgtgtcttaggcaatagagagaactaagatggctggtcagtggagcaatcagaacacacacatttattgattaagatctggtatttgatagcccaacagggtgactgtagtcaaaaataatttaactgtatatttaaaaataactaagtaagcatattgtttgcaacacaaaggataaatgcatgaggtgatagatactccatttatcctgatgtgattattacacattgtatgcctgtttcaaagtatctcatgtgccctataaatgtatacacttactatgtacccacaaaaattaaaaattaaaaacaaaaacaaaatcccaaacctttattgatgaagttcgccatcttatgtaagtacagtttgtggtgctgcaaaacaattacaatagtaacatcaaagctcattggtcattgatcaccataacagatagataaattaataatgaaaaactttgaaatattgtgagaattatgaaaatataagagaaaagcacaaagtgaattcctgctgttgaaaaaatggtgccagtagacttgctaatgtagggttgccacaaatcttcaatttgtaaagaatgcagtatttatgaggc

SEQ ID NO: 37217 - DNA, 544 bp, Homo sapiens
gcttatcacctttgccgtagaatgtaacccagtcttaggagtgacatcccctcacatttgccatattctgttggttagaagcaagtcacaggtcccatgtgtactcataaggagggaattacatgaaggcatgaccaggaggcaggagactactggagttcaagtaggggtctgttcaccactgatgggatgggaagaatccacttaccaactgccacacttgcccttacccactgctaagcacttacttactgagtacttgtgagtactaagtaatgtaccctggtatttatccccgtttttcctaatttaacggtagttatcactggaaaatgggaagaaggtgcagtgctgaagagcactagaactttctgctctgcatatggtattgtttgggatctttgcagtaagcatgtattcatgtgttatgtaatttaaaaatgcaattgaaaatgaaaatcatatattcagtatggcttcaactaaaagctgctctccctccacttccagaccttcctacatacatacacattcacaattggaa

SEQ ID NO: 37218 - DNA, 514 bp, Homo sapiens
gtttccctcttcattccctactgtggcctgactctctcgtaggaagcaccttgcttcatgcgcatgttagcattgtttcggaagaccagaactgctctcccatgaagtgcagtagtagggcctttttgtacttgggtccctcacgtatgaaactggaatcttcctggttggggttgtcttctgctctacctggcgtgccaggtaaatggagaactcacattcattgcaacatcatttcttgggaaagatttgtcagccttaagctgtctcctcctaccttcaaagtgggaaatgctcaaaggtatttatgctgcactctggccatcttctttctttgtgagagggaacattattgatcttagcctccaggactctagataattttgaaaaccaagaatatctgcgatccatttagggagaaacaagtatgatttgcttcctccaaggcagcattcttcaccaacttcatttgagacacaaatggtgtgttttgtttgttcatttgccctttaaa

SEQ ID NO: 37219 - DNA, 367 bp, Homo sapiens
tgacagcaggcaatattttaacatgtcaaaagtacaatgaccattaaacatacacacgcatcattttatttttatttattcttaaaaaaaattatttttatttaagacagagtctttgtcacccaggctggagtgcagtggcacaatgatggctcactgcagccttgacctcctgggctcaagcaatccttctacctcagcctcctgtctagctggaaccagaggcatgtaccaacatgcccggttaattttttactttttgtagagacagggtctccttatgttgccttcgttggtcttgagcccagaagttcaagaccagcctgggcaacatgacaagaccccatctctacaagaagtttaaaaa

SEQ ID NO: 37220 - DNA, 469 bp, Homo sapiens
ctatcaaacaaacagcagcaaaaaaataagaaaatttctgaggaaaagtacaaaaaaaaaaaaaaagacagaaagtagacagtcaagggcacaggagctcttcagaccgcccactgcatttgaaaaataccttagcaagtagcaacatgaaacatgcaatgtctctgctaacttgctcctgattcagcagcctgtttagcaatacctacaacatttccataaccaaaggatggatgcaattttgttttccgacttgccaatttgacatatgcaaaagctataggactttacaatttctgcctgaatctgtaaacttggaagtgtctcacgtgtcccccctagttagacaaaaccaaatccttcatatgcataatacattttctagaataatacagtgatactgagatatttctcattattaaaaggccacaaaataggtttatctttctatatacatatcaaaaaacaa

SEQ ID NO: 37221 - DNA, 217 bp, Homo sapiens
acatttataaaaattgatttttaaaattacacccaaaaaatctcaattttaagttacacactctgttaacagcactaaaaataattttttagataaaaagataaaaggaaattcatctaattggaagctaaagggaaaaatgccttaaatctgggtcaaggagaaaatcgcaaccgtgattgcagatttataaactatttagaaattaatcacaatg

SEQ ID NO: 37222 - DNA, 361 bp, Homo sapiens
taaagacagagtctcgctctgtcacccaggctggagtacagtggcttgatctcggcttactgcagccttgacctcctggactcaagagatcctcctacctgagcctccaagtagctgggtagctagaactccaggtgcatgccaccccacctagctatttttttttttttttaattttagtagagacagggtctcactatattgcccagtctggtcttgaacttctgggctcatgctatccccctgccttggcctcccaaagtgctgagattacaggagtgaaccaccatgctagacagtattttttttaaatacaagaatattcagcatttggccgggcacggtggctcacgcctataat

SEQ ID NO: 37223 - DNA, 241 bp, Homo sapiens
aatggaaggatcagaaagatctgttttctatggtcttatgcaagtgcacattgtaagcattcaatatgtagatatgaaaatcactgcaataatgcttctaggagccagcactagataaccatcttcagcatcctgggcttatgtaaataatccatttagactgaactgttattttcatttttatttttttatttgtacatatttatgggtgtattagtccattttcatgctgctgataaag

SEQ ID NO: 37224 - DNA, 382 bp, Homo sapiens
acatgaatggcttcctataacctgctaaggatgtgggtattgacttaaggaaagaaaagccactttaagatgtagaataggaaagtggctatgttacatatattagaaaaatcacataagcagtagtacaatggaaatgtgatgaaattaaaagcaggaagatcatttagaaagttcttgtttgcttgtttgtttctctttggatttttgcaatcatacagatgactgctgaataagggacagtgggaatggagattacaaataaaagatggacacgaaggatatttagcatgtagagtatatagaatttgtggttggataaaggtgggatgagggacaaaagagatttaggaaataaaagaagtttgtacaggtttgtttc

SEQ ID NO: 37225 - DNA, 362 bp, Homo sapiens
ttttttttttgagacggagtctcgctctgtcgcccaggctggagtgcagtggcgggatctcggctcactgcaagctccgcctcccgggttcacgccattctcctgcctcagcctcccaagtagctgggactacaggcgcccgccactacgcccggctaattttttgtatttttagtagagacggggtttcaccgttttagccaggatggtctcgatctcctgacctcgtgatccgcccgcctcggcctcccaaagtgctgggattacaggcgtgagccaccgcgcccggccaacaaggctttaaaaattaagttaactcatgtgtgctaaatgggataaattttaaatttcagaatatcaaa

SEQ ID NO: 37226 - DNA, 554 bp, Homo sapiens
acttctatttgggatttctgggtttcaacaacttgtataatttaaaaaaaaaaaaaaaccaactgtcacaatatatggattttttttaaacctgaaagatatgcaacaaatttaatgaaagatctctctgtgttggtagaattgtgggtagtttttctattctttttgtgtttatctacacttttcaatattttcaccaataaaatatggtattacagtttcataattccttatctgacacccttatggctggagatgtttcaaaattatggctagagtttttttgggtttttttttttgggtttttttttttttttggctttcagaaaggtaacaatggtgtgtgaagtgggtgacaagtcacacctattcaataaatagatactagaaataacttcagttaaggtcttgttttgttaccaaagaggtctaaaccagattttatcccctaaaggaatggcattatttagtgtaagtaaggcttccaattccgcccctactggtccaactaatttggagcttaatcactgcagactgcactcagttgggaacaa

SEQ ID NO: 37227 - DNA, 387 bp, Homo sapiens
agaaaaattcttcaggaaagagaaaattgagtgaacacattttataataaaatataaccaatatggatttaatattatataacattcaattagaattcagtatttctataaggcaactgataacattatttctagcaatgtaaatttattatatcattcatgacttagagctaatcgtgaaaatgtcattctattaagtcccaaacctcaaagtgttctcttaaagagcagcatatatttccctacttgtacatatatttttagtttaaatgtgcctacatgtacatgtgttgtagtagtctgttttgtgttgctataaaggaataactgagattgggtaatttataaagaaaggagttttatttggtacattgttctgcaggctgt

SEQ ID NO: 37228 - DNA, 480 bp, Homo sapiens
tttttttttgagacagagtcttgctctgtcacccaggctggagtgcagtggcgcgatctcggctccctgcaacctccgcctcctgggttcaagcgattctcctgcctcagcctcctgagtagctgggattacagctatgtacagcgatgtctgcaaagatagggatttaacagcactcatatcttcatgttcataaaaaagtcctacacgcgtgatgtacgtctagatctttccttttgtcacaggatatagcacggtagttacggatatagtctccgcagtgcctgggtttgactcagcttccccacgtactgtcctgcgcatattttgtgtctcagtttcctcatctttaaggtaggaatatcaatggtaactacctcttacggtggtagcaactaaccagctctgccacttctgtgatctctaagcagttttgatcatacacccagcagtaaaaattaagtatctctccagccccaa

SEQ ID NO: 37229 - DNA, 815 bp, Homo sapiens
cttttatgttgtaccaaagacagcaaagaggaggaaggaggagtaggaagaaataagagtaaatgggagaaaaatatatattttgtgagatcctgactcaaaaaaaaacagagaaaattagattttatttttgtattagtgtattattaacattaaagttaatttttaataaagccttgtaaataaatctatttaattttaattagtttgaccacaagatttttatacgtttttaaatagcctcttaaatttaaacatttttaaaattttttatttttgtttttttaattaaaaactttttaaacgtttatactaggcaaaatcttttttttttttttttttttttacaaaaacacatttttatgtgttttataaccttttttactaaaaacacattttccttttggaatatactttgcgtatggaattgtttattttaatatctagtacttttaattatatatattaattatgatagtatctcttagtaactcttacttttagtgaaaaacctaggaaataagtaattgtaactatgtgcagtgcaagacaaagaatagagctgtgaacacaatgcctggaggagttaatccttagtatggccaagagacatggttgggctagggaggacagggcctgggtgttgtccccagaccttttttgtctagacattagaatctaaagtctcaaatttacagacataagctcacagataaattaagtaagcattaaaaatattatagaagtaacagttctgtgaccttacaacatttagtagagacagtataaacctgtctgatcaatccaaccaggcc

SEQ ID NO: 37230 - DNA, 464 bp, Homo sapiens
tattagtaacagtcaaggaagctttgagggcttgtctctggtctccttccaaagcgtgggggcactgaggctgttgaggattgaccgcagcctacttgtaaccatatttctataccatgctccttccacccaatgtagtgattcctcttttgaggcaaccggacccatctgtgtgtctcttttgttaggactgtcagatccccattggcaaggatggtgatagggcctgtcttgagactgcaagcagatccttaactcagtgctggcttgctgagtgcatgcatgcctgcatgaatgaatgaacgccactgggcggtaaacaagctgttctctacagccttcatgctcttcatgggcatttcacctaataccagctctgtctacagcaacgaaagaatgaacaacctaagtaagacaccggagatttctctgtctccttataaaggcacacatcagtgctcccc

SEQ ID NO: 37231 - DNA, 178 bp, Homo sapiens
gatcaagttcccagccagtgacccagcacaaacacacagttcagcctgtgtccctacccaaacacggagcccagcctgtggcctgcccaactacaaagcacagcctgagaccaccaccaattacaaaacctagtcagtggctccatctgaatatggcattcagccagcatcacaccca

SEQ ID NO: 37232 - DNA, 450 bp, Homo sapiens
ttttaacttaaaattaccaacttttactagatagaaaataaaataatcatagattctagcaatagatatcttattatcagtatagttaggtagtagaaaatgaaaataatctgttctgaaataaatttcaaatgaatttatattttaaaaggacttttactcagccaggtgcggtggctcacacctgtaatcccagcactttgggaggccgaggcgggcggatcacctgaggtcaggagttcgagaccagcctgaccaacatggtgaaaccccatctctactaaaaatacaaaaaaaattagccgggcattgtggcatgtgcctgtaatcccagctacttgggagaactgaggcaggggaatcgcttgaacccaggaggcagaggttgcagtgagccgacatcacgccactgtactccagcctgggcgacaagagcgaaactccatctca

SEQ ID NO: 37233 - DNA, 473 bp, Homo sapiens
gatagaggcagaaagcaagcaagcgggtggagcctgttctctttagaatggcatttcctctttgtctggaaaagaatgctattcctcctgagaacttgtgggatttctcctacagtgtggtttcattacattcaaaattgtattaccttccagaataagatagcatgcccacaatcaaataaatccaggcatttaaaaataactcgcatatggcccctaacctgctctccatcttcctacaaaaagctgattgtagtttattataaaacaataatgaaagaaaatagatgaaaaataaaaacctgaatgattttatacaatctatggtctcacatgaaggaaaagtagcaacagaacagaactgactcctggaatagccactgtatcccacaaatctaagactacccttctttcaccttgactgatttttgctaaaatgaactgttacattgcaaataaattaccaaagactt

SEQ ID NO: 37234 - DNA, 148 bp, Homo sapiens
gaaaaatgaggctacttagtttgtttctttttattttaggtttggtaggttgtcttttcaggaatttgtccatttcatataagttatagaatgtattgatagtaatttgttcataatagtcctttattcacctttttatttatatatt

SEQ ID NO: 37235 - DNA, 358 bp, Homo sapiens
tagattctgtcctcagatgtttgaaagacttctaggtagatatgtatataaaccaaatataaaataaaaagtgaacctaactgtcttaaaagaagtaaagactgtctctgagaaaaataaaggagggaaagcttgcttctagctgggaaggatcccaaaagactttatttaaaaagatggttttgaattagctttgaaggatagtaatgaaatctatcactttttgatcagttattatgtgccacattcatcatgctattttctaatccttataataattccaagcagggtgtcatttcccctcctttagggatgaaatatcatccctaaagtgtcaagagagttcaaataacttgtg

SEQ ID NO: 37236 - DNA, 390 bp, Homo sapiens
atttctgcatctaatcatggaggcagctcctgatcaaagagcattgtactggtgaggcactcattctcccacatatgggctgaccccctggtgctgagtgagtgaggggctcttagatcttcggccacagactgaaggctgcactgtcagcttccctacttttgaggtttttggactcagactggcttccttgctgctcagcttgcagacggcctattgtgggacttcaccttgtgatcatgaagtagaagtgattatccacattccatagaagaagaagcggagctcagaatggtctcatctccaggcagctgtccctcttctggatctctggcaactccagttcacagcaccctttctcctcctagcctaggatccagtgcctttagc

SEQ ID NO: 37237 - DNA, 615 bp, Homo sapiens
gtgatggttaatattgagtgtcaacttgattggattgaaggatgcaaagtattgttcctgagtgtgtttgtgagggtgttgccaaaggaggtaacatttgagtcagtgcactgggagaggctaacctaccctcaatctggttgggcaccatctaatcagctgccagtgtggctagaataaaagctggccgaagttggaaaataagataagaacacgtgttgagtctgccggccttcacttttcccctgtgctggatgccttctgcccttgaatatcagactccaagttcttcagcttttggactcttggacttacaccagtgttttgccaggggctcttagatcttcggccacagactgaaggctgcactgtcagcttccctacttttgaggtttttggactcagactggcttccttgctgctcagcttgcagacggcctattgtgggacttcaccttgtgatcatgaagtagaagtgattatccacattccatagaagaagaagcggagctcagaatggtctcatctccaggcagctgtccctcttctggatctctggcaactccagttcacagcaccctttctcctcctagcctaggatccagtgcctttagc

SEQ ID NO: 37238 - DNA, 560 bp, Homo sapiens
aacattttaaaagaattatcttatttacaaatgatcaaagtaaggcatagtgaggtgacagattcctgcccttcattcgtcaaccaaatatgctcaggaacaaaaattagcacctaaaggtattgctgtcttattgtcaggtcaataactcctttcttccattaggtcaagtttcagaagtttctggatataaaaggtaaatggaagtgggtatttgtgggggaaaaattatttttttctctatacccacattcaatgcagaacacttctttggccgtgtgtgtgtgtgtgtgtgtgtgtgtgtgttttccacaccaaccaattatctgccaccagctgggtgtcttgcaatccagttcaattctgacatgatctgcctggagttagtgcagaccccatagtttaagggttcagccccacaaaacttccctcatttaagatgccagttacgggaggctgaggcaggcgaatggtgtgaacccggcaggcagagcttgcagtgagccgagaccgtgccactgcactccagcctgggcaacagagcgagacttagtctccaa

SEQ ID NO: 37239 - DNA, 228 bp, Homo sapiens
ttttttttttttagtagagagggggtttcatcattttggccaggctggtcttgaactattggtctcaagtgatccatctgcctcgggctcccaaagtgctgggattacaggtgtgagccaccatgcccggccatccttcttgaagaagtctttcattacacggctggaggtcaaaggaggaagagaaaaactaatgtcgacgctgctgcgaatttagtagtagtagta

SEQ ID NO: 37240 - DNA, 5703 bp, Homo sapiens
gagctgccaggcgggagcggcgtaggcgcggggtcgccggccagcgtgaaccgggacatggagccgcccggcgggagcctggggcccggccgcgagacccgggacaagaagaagggccggagcccagatgagctgccctcggcgggcggcgacggcggcaaatctaagaaatttctggagagatttaccagcatgagaattaagaaggagaaggaaaagcccaattctgctcatagaaattcttctgcatcatatggggatgatcccacagcacagtcattgcaagatgtttcagatgaacaagtgctggttctctttgaacagatgctgctggatatgaacctgaatgaggagaaacagcaacctttgagggagaaggacatcatcatcaagagggagatggtgtcccaatacttgtacacctccaaggctggcatgagccagaaggagagctctaagtctgccatgatgtatattcaggagttgaggtcaggcttgcgggatatgcctctgctcagctgcctggagtcccttcgtgtgtctctcaacaacaaccctgtcagttgggtgcaaacatttggtgctgaaggcttggcctccttattggacattcttaaacgacttcatgatgagaaagaagagactgctgggagttacgatagccggaacaagcatgagatcattcgctgcttgaaagcttttatgaacaacaagtttggaatcaagaccatgttggagacagaagaaggaatcctactgctggtcagagccatggatcctgctgttcccaacatgatgattgatgcagctaagctgctttctgctctttgtattctaccgcagccagaggacatgaatgaaagggttttggaggcaatgacagaaagagctgagatggatgaagtggaacgtttccagccgctgctggatggattaaaaagtggaaccactattgcactgaaggttggatgcctacagctgatcaatgctctcatcacaccagcggaggaacttgacttccgagttcacatcagaagtgaactgatgcgtttggggctacatcaggtgttgcaggaccttcgagagattgaaaatgaagatatgagagtgcaactaaatgtgtttgatgaacaaggggaagaggattcctatgacctgaagggacggctggatgacattcgcatggagatggatgactttaatgaagtctttcagattctcttaaacacagtgaaggattcaaaggcagagccacacttcctttccatcctgcagcacttactcttggtccgaaatgactatgaggccagacctcagtactataagttgattgaagaatgtatttcccagatagttctgcacaagaacggggctgatcctgacttcaagtgccggcacctccagattgagattgagggattaattgatcaaatgattgataagacaaaggtggagaaatctgaagccaaagctgcagagctggaaaagaagttggactcagagttaacagcccgacatgagctacaggtggaaatgaaaaagatggaaagtgactttgagcagaagcttcaagatcttcagggagaaaaagatgcactgcattctgaaaagcagcaaattgccacagagaaacaggacctggaagcagaggtgtcccagctcacaggagaggttgccaagctgacaaaggaactggaagatgccaagaaagaaatggcttccctctctgcggcagctattactgtacctccttctgttcctagtcgtgctcctgttccccctgcccctcctttacctggtgactctggcactattattccaccaccacctgctcctggggatagtaccactcctcctcctcctcctcctcctcctcctcctccacctcctttgcctggaggtactgctatctctccaccccctcctttgtctggggatgctaccatccctccaccccctcctttgcctgagggtgttggcatcccttcaccctcttctttgcctggaggtactgccatccccccacctcctcctttgcctgggagtgctagaatccccccaccaccacctcctttgcctgggagtgctggaattccccccccacctcctcccttgcctggagaagcaggaatgccacctcctcctccccctcttcctggtggtcctggaatccctccacctcctccatttcccggaggccctggcattcctccacctccacccggaatgggtatgcctccacctcccccatttggatttggagttcctgcagccccagttctgccatttggattaacccccaaaaagctttataagccagaggtgcagctccggaggccaaactggtccaagcttgtggctgaggacctctcccaggactgcttctggacaaaggtgaaggaggaccgctttgagaacaatgaacttttcgccaaacttacccttaccttctctgcccagaccaagacttccaaagccaagaaggatcaagaaggtggagaagaaaagaaatctgtgcaaaagaaaaaagtaaaagagttaaaggtgttggattcaaagacagcccagaatctctcaatctttttgggttccttccgcatgccctatcaagagattaagaatgtcatcctggaggtgaatgaggctgttctgactgagtctatgatccagaacctcattaagcaaatgccagagccagagcagttaaaaatgctttctgaactgaaggatgaatatgatgacctggctgagtcagagcagtttggcgtggtgatgggcactgtgccccgactgcggcctcgcctcaatgccattctcttcaagctacaattcagcgagcaagtggagaatatcaagccagagattgtgtctgtcactgctgcatgtgaggagttacgtaagagtgagagcttttccaatctcctagagattaccttgcttgttggaaattacatgaatgctggctccagaaatgctggtgcttttggcttcaatatcagcttcctctgtaagcttcgagacaccaagtccacagatcagaagatgacgttgttacacttcttggctgagttgtgtgagaatgactatcccgatgtcctcaagtttccagacgagcttgcccatgtggagaaagccagccgagtttctgctgaaaacttgcaaaagaacctagatcagatgaagaaacaaatttctgatgtggaacgtgatgttcagaatttcccagctgccacagatgaaaaagacaagtttgttgaaaaaatgaccagctttgtgaaggatgcacaggaacagtataacaagctgcggatgatgcattctaacatggagaccctctataaggagctgggcgagtacttcctctttgaccccaagaagttgtctgttgaagaatttttcatggatcttcacaattttcggaatatgtttttgcaagcagtcaaggagaaccagaagcggcgggagacagaagaaaagatgaggcgagcaaaactagccaaggagaaggcagagaaggagcggctagagaagcagcagaagagagagcaactcatagacatgaatgcagagggcgatgagacaggtgtgatggacagtcttctagaagccctgcagtcaggggcagcattccgacggaagagagggccccgtcaagccaacaggaaggccgggtgtgcagtcacatctctgctagcttcggagctgaccaaggatgatgccatggctgctgttcctgccaaggtgtccaagaacagtgagacattccccacaatccttgaggaagccaaggagttggttggccgtgcaagctaatgtgggtcctgtgaccgcggcagctcctcagcggagccgcagactgtcctgccctgcagcatgtgcctaaaggctcaaggggatattcctctggggtggccactcccaccaccctgaccctgtctttctctctggcctgctgctctctcaacatcacatacagcttcagctgcctggaggccagaaggaaagggcagtgcaggggaggcctgagcccgacttagccagccctggctgttgtattaccaaagcagggtccatgtttgctgccttaaccctgtctcctctctgttactcagagggcctcatctcagacaaggcccagcctgctttttctcagccctgactttctaatgggctttcccccctaggtcagtcttgctggatttgtgcttttcttttgtggtttctctggccctgagaatagcatggggcttgtaaacctttgggctagatccctcctttcattgctgttgtctctgctcttccctctcctggctgtggttatttattattagtggtgtggcactgggagctgctcctaaggaagcagggagcaaatcccacctttaccccaccttcctgggaaaggcctccaaagcaaaggatctggaccagtttccctgctgtgctgtggcccaggccagagcctgtgggcaggcaggcagggcatagcgacagtgtgggacctgcccccagcttctgccacgctttatgcccttgcctctctggacgctctgcaccaaccccaggctactgagccaccttccctcctcatgccttccctgagctttggtgcatctcatctggactatgggttgtactgtgaccatcccaacacctcaccctctgtctacaaggaaatgggaggtggagggttgtactgtgaccatcccaacacctcaccctctgtctacaaggaaatgggaggtggagcctcctggctgagaaattgttttgcaaatggatctatttttgtatgaaaaaaaaaatttttttaaagaaaactgttccttccccctttcccctccataatgtaagaagctttggtggcaggttacagagttctgggatttcttctcacaggcccaatcctgaatgtgcccctggaccttctggacccttgagtccaaggcagatcctctctcccagggaatccgacacaggaggaaccccttctctggttgagctgggccaggcctaagagtagcaggaactctaagaccacagagttttttataaatgtataaatgtatcaagccaaatgtgcagatgctaactggacattctggggaactgggcaccaggagtgccttcatacactgtaccccagctctcttctaaaagagaagtgggtgggcacactgaactgtttggtggccccaaccacaggaagctgcaattctctggcttagggtgatacttttgccctccttgtgcccctctcagctttccatccccagctaggaagaaagaatggcactcttgggcttggcccagaattagagttattagagcaagagagagcttaggaagcatgagggcaactatagtgaggccttattgccaggagggagggttttggttgctggcgcttgtgtataaaggggcaagagcagctcctttggactattcctgggaggactctgatgcagggcgtctgttgctcccctgggtcacctcctccctgctcgctgacatctggggctttgaccctttcttttttaatctacttttgctaagatgcatttaataaaaaaaaagagagagagagagaggtgtgagggacaaaatgcaaacctatttcccttgcctcataggcttctgggatgtcatcacctccagtttgttggttttgtttccaactgttaataaagcattgaaacagta

SEQ ID NO: 37241 - DNA, 233 bp, Homo sapiens
  misc_feature (211)..(211): n is a, c, g, or t
tatttattggtttgatattgcattgcctctctctgttccttacagttgggtgcaaacatttggtgctgaaggcttggcctccttattggacattcttaaacgacttcatgatgagaaagaagagactgctgggtgaggacttccaagtctttgcaacttcaagttggagagtcacaggggacttggctatttgctcacagaatatagtctncagcactggtctttttcaatat

SEQ ID NO: 37242 - DNA, 5643 bp, Homo sapiens
gagctgccaggcgggagcggcgtaggcgcggggtcgccggccagcgtgaaccgggacatggagccgcccggcgggagcctggggcccggccgcgagacccgggacaagaagaagggccggagcccagatgagctgccctcggcgggcggcgacggcggcaaatctaagaaatttctggagagatttaccagcatgagaattaagaaggagaaggaaaagcccaattctgctcatagaaattcttctgcatcatatggggatgatcccacagcacagtcattgcaagatgtttcagatgaacaagtgctggttctctttgaacagatgctgctggatatgaacctgaatgaggagaaacagcaacctttgagggagaaggacatcatcatcaagagggagatggtgtcccaatacttgtacacctccaaggctggcatgagccagaaggagagctctaagtctgccatgatgtatattcaggagttgaggtcaggcttgcgggatatgcctctgctcagctgcctggagtcccttcgtgtgtctctcaacaacaaccctgtcagttgggtgcaaacatttggtgctgaaggcttggcctccttattggacattcttaaacgacttcatgatgagaaagaagagactgctgggagttacgatagccggaacaagcatgagatcattcgctgcttgaaagcttttatgaacaacaagtttggaatcaagaccatgttggagacagaagaaggaatcctactgctggtcagagccatggatcctgctgttcccaacatgatgattgatgcagctaagctgctttctgctctttgtattctaccgcagccagaggacatgaatgaaagggttttggaggcaatgacagaaagagctgagatggatgaagtggaacgtttccagccgctgctggatggattaaaaagtggaaccactattgcactgaaggttggatgcctacagctgatcaatgctctcatcacaccagcggaggaacttgacttccgagttcacatcagaagtgaactgatgcgtttggggctacatcaggtgttgcaggaccttcgagagattgaaaatgaagatatgagagtgcaactaaatgtgtttgatgaacaaggggaagaggattcctatgacctgaagggacggctggatgacattcgcatggagatggatgactttaatgaagtctttcagattctcttaaacacagtgaaggattcaaaggcagagccacacttcctttccatcctgcagcacttactcttggtccgaaatgactatgaggccagacctcagtactataagttgattgaagaatgtatttcccagatagttctgcacaagaacggggctgatcctgacttcaagtgccggcacctccagattgagattgagggattaattgatcaaatgattgataagacaaaggtggagaaatctgaagccaaagctgcagagctggaaaagaagttggactcagagttaacagcccgacatgagctacaggtggaaatgaaaaagatggaaagtgactttgagcagaagcttcaagatcttcagggagaaaaagatgcactgcattctgaaaagcagcaaattgccacagagaaacaggacctggaagcagaggtgtcccagctcacaggagaggttgccaagctgacaaaggaactggaagatgccaagaaagaaatggcttccctctctgcggcagctattactgtacctccttctgttcctagtcgtgctcctgttccccctgcccctcctttacctggtgactctggcactattattccaccaccacctgctcctggggatagtaccactcctcctcctcctcctcctcctcctcctcctccacctcctttgcctggaggtactgctatctctccaccccctcctttgtctggggatgctaccatccctccaccccctcctttgcctgagggtgttggcatcccttcaccctcttctttgcctggaggtactgccatccccccacctcctcctttgcctgggagtgctagaatccccccaccaccacctcctttgcctgggagtgctggaattccccccccacctcctcccttgcctggagaagcaggaatgccacctcctcctccccctcttcctggtggtcctggaatccctccacctcctccatttcccggaggccctggcattcctccacctccacccggaatgggtatgcctccacctcccccatttggatttggagttcctgcagccccagttctgccatttggattaacccccaaaaagctttataagccagaggtgcagctccggaggccaaactggtccaagcttgtggctgaggacctctcccaggactgcttctggacaaaggtgaaggaggaccgctttgagaacaatgaacttttcgccaaacttacccttaccttctctgcccagaccaagacttccaaagccaagaaggatcaagaaggtggagaagaaaagaaatctgtgcaaaagaaaaaagtaaaagagttaaaggtgttggattcaaagacagcccagaatctctcaatctttttgggttccttccgcatgccctatcaagagattaagaatgtcatcctggaggtgaatgaggctgttctgactgagtctatgatccagaacctcattaagcaaatgccagagccagagcagttaaaaatgctttctgaactgaaggatgaatatgatgacctggctgagtcagagcagtttggcgtggtgatgggcactgtgccccgactgcggcctcgcctcaatgccattctcttcaagctacaattcagcgagcaagtggagaatatcaagccagagattgtgtctgtcactgctgcatgtgaggagttacgtaagagtgagagcttttccaatctcctagagattaccttgcttgttggaaattacatgaatgctggctccagaaatgctggtgcttttggcttcaatatcagcttcctctgtaagcttcgagacaccaagtccacagatcagaagatgacgttgttacacttcttggctgagttgtgtgagaatgactatcccgatgtcctcaagtttccagacgagcttgcccatgtggagaaagccagccgagtttctgctgaaaacttgcaaaagaacctagatcagatgaagaaacaaatttctgatgtggaacgtgatgttcagaatttcccagctgccacagatgaaaaagacaagtttgttgaaaaaatgaccagctttgtgaaggatgcacaggaacagtataacaagctgcggatgatgcattctaacatggagaccctctataaggagctgggcgagtacttcctctttgaccccaagaagttgtctgttgaagaatttttcatggatcttcacaattttcggaatatgtttttgcaagcagtcaaggagaaccagaagcggcgggagacagaagaaaagatgaggcgagcaaaactagccaaggagaaggcagagaaggagcggctagagaagcagcagaagagagagcaactcatagacatgaatgcagagggcgatgagacaggtgtgatggacagtcttctagaagccctgcagtcaggggcagcattccgacggaagagagggccccgtcaagccaacaggaaggccgggtgtgcagtcacatctctgctagcttcggagctgaccaaggatgatgccatggctgctgttcctgccaaggtgtccaagaacagtgagacattccccacaatccttgaggaagccaaggagttggttggccgtgcaagctaatgtgggtcctgtgaccgcggcagctcctcagcggagccgcagactgtcctgccctgcagcatgtgcctaaaggctcaaggggatattcctctggggtggccactcccaccaccctgaccctgtctttctctctggcctgctgctctctcaacatcacatacagcttcagctgcctggaggccagaaggaaagggcagtgcaggggaggcctgagcccgacttagccagccctggctgttgtattaccaaagcagggtccatgtttgctgccttaaccctgtctcctctctgttactcagagggcctcatctcagacaaggcccagcctgctttttctcagccctgactttctaatgggctttcccccctaggtcagtcttgctggatttgtgcttttcttttgtggtttctctggccctgagaatagcatggggcttgtaaacctttgggctagatccctcctttcattgctgttgtctctgctcttccctctcctggctgtggttatttattattagtggtgtggcactgggagctgctcctaaggaagcagggagcaaatcccacctttaccccaccttcctgggaaaggcctccaaagcaaaggatctggaccagtttccctgctgtgctgtggcccaggccagagcctgtgggcaggcaggcagggcatagcgacagtgtgggacctgcccccagcttctgccacgctttatgcccttgcctctctggacgctctgcaccaaccccaggctactgagccaccttccctcctcatgccttccctgagctttggtgcatctcatctggactatgggttgtactgtgaccatcccaacacctcaccctctgtctacaaggaaatgggaggtggagcctcctggctgagaaattgttttgcaaatggatctatttttgtatgaaaaaaaaaatttttttaaagaaaactgttccttccccctttcccctccataatgtaagaagctttggtggcaggttacagagttctgggatttcttctcacaggcccaatcctgaatgtgcccctggaccttctggacccttgagtccaaggcagatcctctctcccagggaatccgacacaggaggaaccccttctctggttgagctgggccaggcctaagagtagcaggaactctaagaccacagagttttttataaatgtataaatgtatcaagccaaatgtgcagatgctaactggacattctggggaactgggcaccaggagtgccttcatacactgtaccccagctctcttctaaaagagaagtgggtgggcacactgaactgtttggtggccccaaccacaggaagctgcaattctctggcttagggtgatacttttgccctccttgtgcccctctcagctttccatccccagctaggaagaaagaatggcactcttgggcttggcccagaattagagttattagagcaagagagagcttaggaagcatgagggcaactatagtgaggccttattgccaggagggagggttttggttgctggcgcttgtgtataaaggggcaagagcagctcctttggactattcctgggaggactctgatgcagggcgtctgttgctcccctgggtcacctcctccctgctcgctgacatctggggctttgaccctttcttttttaatctacttttgctaagatgcatttaataaaaaaaaagagagagagagagaggtgtgagggacaaaatgcaaacctatttcccttgcctcataggcttctgggatgtcatcacctccagtttgttggttttgtttccaactgttaataaagcattgaaacagta

SEQ ID NO: 37243 - DNA, 5679 bp, Homo sapiens
gagctgccaggcgggagcggcgtaggcgcggggtcgccggccagcgtgaaccgggacatggagccgcccggcgggagcctggggcccggccgcgagacccgggacaagaagaagggccggagcccagatgagctgccctcggcgggcggcgacggcggcaaatctaagaaatttctggagagatttaccagcatgagaattaagaaggagaaggaaaagcccaattctgctcatagaaattcttctgcatcatatggggatgatcccacagcacagtcattgcaagatgtttcagatgaacaagtgctggttctctttgaacagatgctgctggatatgaacctgaatgaggagaaacagcaacctttgagggagaaggacatcatcatcaagagggagatggtgtcccaatacttgtacacctccaaggctggcatgagccagaaggagagctctaagtctgccatgatgtatattcaggagttgaggtcaggcttgcgggatatgcctctgctcagctgcctggagtcccttcgtgtgtctctcaacaacaaccctgtcagttgggtgcaaacatttggtgctgaaggcttggcctccttattggacattcttaaacgacttcatgatgagaaagaagagactgctgggagttacgatagccggaacaagcatgagatcattcgctgcttgaaagcttttatgaacaacaagtttggaatcaagaccatgttggagacagaagaaggaatcctactgctggtcagagccatggatcctgctgttcccaacatgatgattgatgcagctaagctgctttctgctctttgtattctaccgcagccagaggacatgaatgaaagggttttggaggcaatgacagaaagagctgagatggatgaagtggaacgtttccagccgctgctggatggattaaaaagtggaaccactattgcactgaaggttggatgcctacagctgatcaatgctctcatcacaccagcggaggaacttgacttccgagttcacatcagaagtgaactgatgcgtttggggctacatcaggtgttgcaggaccttcgagagattgaaaatgaagatatgagagtgcaactaaatgtgtttgatgaacaaggggaagaggattcctatgacctgaagggacggctggatgacattcgcatggagatggatgactttaatgaagtctttcagattctcttaaacacagtgaaggattcaaaggcagagccacacttcctttccatcctgcagcacttactcttggtccgaaatgactatgaggccagacctcagtactataagttgattgaagaatgtatttcccagatagttctgcacaagaacggggctgatcctgacttcaagtgccggcacctccagattgagattgagggattaattgatcaaatgattgataagacaaaggtggagaaatctgaagccaaagctgcagagctggaaaagaagttggactcagagttaacagcccgacatgagctacaggtggaaatgaaaaagatggaaagtgactttgagcagaagcttcaagatcttcagggagaaaaagatgcactgcattctgaaaagcagcaaattgccacagagaaacaggacctggaagcagaggtgtcccagctcacaggagaggttgccaagctgacaaaggaactggaagatgccaagaaagaaatggcttccctctctgcggcagctattactgtacctccttctgttcctagtcgtgctcctgttccccctgcccctcctttacctggtgactctggcactattattccaccaccacctgctcctggggatagtaccactcctcctcctcctcctcctcctcctcctcctccacctcctttgcctgggggtgtttgcatctcctcacccccttctttacctggaggtactgctatctctccaccccctcctttgtctggggatgctaccatccctccaccccctcctttgcctgagggtgttggcatcccttcaccctcttctttgcctggaggtactgccatccccccacctcctcctttgcctgggagtgctagaatccccccaccaccacctcctttgcctgggagtgctggaattccccccccacctcctcccttgcctggagaagcaggaatgccacctcctcctccccctcttcctggtggtcctggaatccctccacctcctccatttcccggaggccctggcattcctccacctccacccggaatgggtatgcctccacctcccccatttggatttggagttcctgcagccccagttctgccatttggattaacccccaaaaagctttataagccagaggtgcagctccggaggccaaactggtccaagcttgtggctgaggacctctcccaggactgcttctggacaaaggtgaaggaggaccgctttgagaacaatgaacttttcgccaaacttacccttaccttctctgcccagaccaagacttccaaagccaagaaggatcaagaaggtggagaagaaaagaaatctgtgcaaaagaaaaaagtaaaagagttaaaggtgttggattcaaagacagcccagaatctctcaatctttttgggttccttccgcatgccctatcaagagattaagaatgtcatcctggaggtgaatgaggctgttctgactgagtctatgatccagaacctcattaagcaaatgccagagccagagcagttaaaaatgctttctgaactgaaggatgaatatgatgacctggctgagtcagagcagtttggcgtggtgatgggcactgtgccccgactgcggcctcgcctcaatgccattctcttcaagctacaattcagcgagcaagtggagaatatcaagccagagattgtgtctgtcactgctgcatgtgaggagttacgtaagagtgagagcttttccaatctcctagagattaccttgcttgttggaaattacatgaatgctggctccagaaatgctggtgcttttggcttcaatatcagcttcctctgtaagcttcgagacaccaagtccacagatcagaagatgacgttgttacacttcttggctgagttgtgtgagaatgactatcccgatgtcctcaagtttccagacgagcttgcccatgtggagaaagccagccgagtttctgctgaaaacttgcaaaagaacctagatcagatgaagaaacaaatttctgatgtggaacgtgatgttcagaatttcccagctgccacagatgaaaaagacaagtttgttgaaaaaatgaccagctttgtgaaggatgcacaggaacagtataacaagctgcggatgatgcattctaacatggagaccctctataaggagctgggcgagtacttcctctttgaccccaagaagttgtctgttgaagaatttttcatggatcttcacaattttcggaatatgtttttgcaagcagtcaaggagaaccagaagcggcgggagacagaagaaaagatgaggcgagcaaaactagccaaggagaaggcagagaaggagcggctagagaagcagcagaagagagagcaactcatagacatgaatgcagagggcgatgagacaggtgtgatggacagtcttctagaagccctgcagtcaggggcagcattccgacggaagagagggccccgtcaagccaacaggaaggccgggtgtgcagtcacatctctgctagcttcggagctgaccaaggatgatgccatggctgctgttcctgccaaggtgtccaagaacagtgagacattccccacaatccttgaggaagccaaggagttggttggccgtgcaagctaatgtgggtcctgtgaccgcggcagctcctcagcggagccgcagactgtcctgccctgcagcatgtgcctaaaggctcaaggggatattcctctggggtggccactcccaccaccctgaccctgtctttctctctggcctgctgctctctcaacatcacatacagcttcagctgcctggaggccagaaggaaagggcagtgcaggggaggcctgagcccgacttagccagccctggctgttgtattaccaaagcagggtccatgtttgctgccttaaccctgtctcctctctgttactcagagggcctcatctcagacaaggcccagcctgctttttctcagccctgactttctaatgggctttcccccctaggtcagtcttgctggatttgtgcttttcttttgtggtttctctggccctgagaatagcatggggcttgtaaacctttgggctagatccctcctttcattgctgttgtctctgctcttccctctcctggctgtggttatttattattagtggtgtggcactgggagctgctcctaaggaagcagggagcaaatcccacctttaccccaccttcctgggaaaggcctccaaagcaaaggatctggaccagtttccctgctgtgctgtggcccaggccagagcctgtgggcaggcaggcagggcatagcgacagtgtgggacctgcccccagcttctgccacgctttatgcccttgcctctctggacgctctgcaccaaccccaggctactgagccaccttccctcctcatgccttccctgagctttggtgcatctcatctggactatgggttgtactgtgaccatcccaacacctcaccctctgtctacaaggaaatgggaggtggagcctcctggctgagaaattgttttgcaaatggatctatttttgtatgaaaaaaaaaatttttttaaagaaaactgttccttccccctttcccctccataatgtaagaagctttggtggcaggttacagagttctgggatttcttctcacaggcccaatcctgaatgtgcccctggaccttctggacccttgagtccaaggcagatcctctctcccagggaatccgacacaggaggaaccccttctctggttgagctgggccaggcctaagagtagcaggaactctaagaccacagagttttttataaatgtataaatgtatcaagccaaatgtgcagatgctaactggacattctggggaactgggcaccaggagtgccttcatacactgtaccccagctctcttctaaaagagaagtgggtgggcacactgaactgtttggtggccccaaccacaggaagctgcaattctctggcttagggtgatacttttgccctccttgtgcccctctcagctttccatccccagctaggaagaaagaatggcactcttgggcttggcccagaattagagttattagagcaagagagagcttaggaagcatgagggcaactatagtgaggccttattgccaggagggagggttttggttgctggcgcttgtgtataaaggggcaagagcagctcctttggactattcctgggaggactctgatgcagggcgtctgttgctcccctgggtcacctcctccctgctcgctgacatctggggctttgaccctttcttttttaatctacttttgctaagatgcatttaataaaaaaaaagagagagagagagaggtgtgagggacaaaatgcaaacctatttcccttgcctcataggcttctgggatgtcatcacctccagtttgttggttttgtttccaactgttaataaagcattgaaacagta

SEQ ID NO: 37244 - DNA, 5425 bp, Homo sapiens
actgcgctctgctatatctacatcagctaccctaccctatctacgtcaaataatcaaaacttcttgtgatccgcccgcctcggcctcccaaagtgctaggattacaagcgtgagccactgcgcccagccaacttacagatattttttaaagcagatttcactatctgttctaggtgatcatttttacaaatgatactgcagtgaacatccttgtgcatatcttctttcacatttatgcccatatgttggatacatttctagaagtagactatatgttacatgcatgagaaattgattagtactgttaaatgcccctccaaaagttgtatcaatttatacttcattgaataggggacttgatttggtatttatggacaggagcctagggatggattgtagggaatgcatttccctgaagagatggtccttagctttcagcagtttctggaaactgagtggtgagaataataatgtgagaaatccggaacactgataatgtcctgtttcctaatcggtctgtgcccctgtgtaatttactcattatacgtgtccgtgtcacagtacctggaaagttctctccgtttcctttctcttgggcaggaatgaaagggttttggaggcaatgacagaaagagctgagatggatgaagtggaacgtttccagccgctgctggatggattaaaaagtggaaccactattgcactgaaggttggatgcctacagctgatcaatgctctcatcacaccagcggaggaacttgacttccgagttcacatcagaagtgaactgatgcgtttggggctacatcaggtgttgcaggaccttcgagagattgaaaatgaagatatgagagtgcaactaaatgtgtttgatgaacaaggggaagaggattcctatgacctgaagggacggctggatgacattcgcatggagatggatgactttaatgaagtctttcagattctcttaaacacagtgaaggattcaaaggcagagccacacttcctttccatcctgcagcacttactcttggtccgaaatgactatgaggccagacctcagtactataagttgattgaagaatgtatttcccagatagttctgcacaagaacggggctgatcctgacttcaagtgccggcacctccagattgagattgagggattaattgatcaaatgattgataagacaaaggtggagaaatctgaagccaaagctgcagagctggaaaagaagttggactcagagttaacagcccgacatgagctacaggtggaaatgaaaaagatggaaagtgactttgagcagaagcttcaagatcttcagggagaaaaagatgcactgcattctgaaaagcagcaaattgccacagagaaacaggacctggaagcagaggtgtcccagctcacaggagaggttgccaagctgacaaaggaactggaagatgccaagaaagaaatggcttccctctctgcggcagctattactgtacctccttctgttcctagtcgtgctcctgttccccctgcccctcctttacctggtgactctggcactattattccaccaccacctgctcctggggatagtaccactcctcctcctcctcctcctcctcctcctcctccacctcctttgcctgggggtgtttgcatctcctcacccccttctttacctggaggtactgctatctctccaccccctcctttgtctggggatgctaccatccctccaccccctcctttgcctgagggtgttggcatcccttcaccctcttctttgcctggaggtactgccatccccccacctcctcctttgcctgggagtgctagaatccccccaccaccacctcctttgcctgggagtgctggaattccccccccacctcctcccttgcctggagaagcaggaatgccacctcctcctccccctcttcctggtggtcctggaatccctccacctcctccatttcccggaggccctggcattcctccacctccacccggaatgggtatgcctccacctcccccatttggatttggagttcctgcagccccagttctgccatttggattaacccccaaaaagctttataagccagaggtgcagctccggaggccaaactggtccaagcttgtggctgaggacctctcccaggactgcttctggacaaaggtgaaggaggaccgctttgagaacaatgaacttttcgccaaacttacccttaccttctctgcccagaccaagacttccaaagccaagaaggatcaagaaggtggagaagaaaagaaatctgtgcaaaagaaaaaagtaaaagagttaaaggtgttggattcaaagacagcccagaatctctcaatctttttgggttccttccgcatgccctatcaagagattaagaatgtcatcctggaggtgaatgaggctgttctgactgagtctatgatccagaacctcattaagcaaatgccagagccagagcagttaaaaatgctttctgaactgaaggatgaatatgatgacctggctgagtcagagcagtttggcgtggtgatgggcactgtgccccgactgcggcctcgcctcaatgccattctcttcaagctacaattcagcgagcaagtggagaatatcaagccagagattgtgtctgtcactgctgcatgtgaggagttacgtaagagtgagagcttttccaatctcctagagattaccttgcttgttggaaattacatgaatgctggctccagaaatgctggtgcttttggcttcaatatcagcttcctctgtaagcttcgagacaccaagtccacagatcagaagatgacgttgttacacttcttggctgagttgtgtgagaatgactatcccgatgtcctcaagtttccagacgagcttgcccatgtggagaaagccagccgagtttctgctgaaaacttgcaaaagaacctagatcagatgaagaaacaaatttctgatgtggaacgtgatgttcagaatttcccagctgccacagatgaaaaagacaagtttgttgaaaaaatgaccagctttgtgaaggatgcacaggaacagtataacaagctgcggatgatgcattctaacatggagaccctctataaggagctgggcgagtacttcctctttgaccccaagaagttgtctgttgaagaatttttcatggatcttcacaattttcggaatatgtttttgcaagcagtcaaggagaaccagaagcggcgggagacagaagaaaagatgaggcgagcaaaactagccaaggagaaggcagagaaggagcggctagagaagcagcagaagagagagcaactcatagacatgaatgcagagggcgatgagacaggtgtgatggacagtcttctagaagccctgcagtcaggggcagcattccgacggaagagagggccccgtcaagccaacaggaaggccgggtgtgcagtcacatctctgctagcttcggagctgaccaaggatgatgccatggctgctgttcctgccaaggtgtccaagaacagtgagacattccccacaatccttgaggaagccaaggagttggttggccgtgcaagctaatgtgggtcctgtgaccgcggcagctcctcagcggagccgcagactgtcctgccctgcagcatgtgcctaaaggctcaaggggatattcctctggggtggccactcccaccaccctgaccctgtctttctctctggcctgctgctctctcaacatcacatacagcttcagctgcctggaggccagaaggaaagggcagtgcaggggaggcctgagcccgacttagccagccctggctgttgtattaccaaagcagggtccatgtttgctgccttaaccctgtctcctctctgttactcagagggcctcatctcagacaaggcccagcctgctttttctcagccctgactttctaatgggctttcccccctaggtcagtcttgctggatttgtgcttttcttttgtggtttctctggccctgagaatagcatggggcttgtaaacctttgggctagatccctcctttcattgctgttgtctctgctcttccctctcctggctgtggttatttattattagtggtgtggcactgggagctgctcctaaggaagcagggagcaaatcccacctttaccccaccttcctgggaaaggcctccaaagcaaaggatctggaccagtttccctgctgtgctgtggcccaggccagagcctgtgggcaggcaggcagggcatagcgacagtgtgggacctgcccccagcttctgccacgctttatgcccttgcctctctggacgctctgcaccaaccccaggctactgagccaccttccctcctcatgccttccctgagctttggtgcatctcatctggactatgggttgtactgtgaccatcccaacacctcaccctctgtctacaaggaaatgggaggtggagcctcctggctgagaaattgttttgcaaatggatctatttttgtatgaaaaaaaaaatttttttaaagaaaactgttccttccccctttcccctccataatgtaagaagctttggtggcaggttacagagttctgggatttcttctcacaggcccaatcctgaatgtgcccctggaccttctggacccttgagtccaaggcagatcctctctcccagggaatccgacacaggaggaaccccttctctggttgagctgggccaggcctaagagtagcaggaactctaagaccacagagttttttataaatgtataaatgtatcaagccaaatgtgcagatgctaactggacattctggggaactgggcaccaggagtgccttcatacactgtaccccagctctcttctaaaagagaagtgggtgggcacactgaactgtttggtggccccaaccacaggaagctgcaattctctggcttagggtgatacttttgccctccttgtgcccctctcagctttccatccccagctaggaagaaagaatggcactcttgggcttggcccagaattagagttattagagcaagagagagcttaggaagcatgagggcaactatagtgaggccttattgccaggagggagggttttggttgctggcgcttgtgtataaaggggcaagagcagctcctttggactattcctgggaggactctgatgcagggcgtctgttgctcccctgggtcacctcctccctgctcgctgacatctggggctttgaccctttcttttttaatctacttttgctaagatgcatttaataaaaaaaaagagagagagagagaggtgtgagggacaaaatgcaaacctatttcccttgcctcataggcttctgggatgtcatcacctccagtttgttggttttgtttccaactgttaataaagcattgaaacagta

SEQ ID NO: 37245 - DNA, 3465 bp, Homo sapiens
  misc_feature (18)..(18): n is a, c, g, or t
  misc_feature (42)..(42): n is a, c, g, or t
gggcttccgggaaatggnggaggtggagggattccaggaccntccggaatgggtatgcctccacctcccccatttggatttggagttcctgcagccccagttctgccatttggattaacccccaaaaagctttataagccagaggtgcagctccggaggccaaactggtccaagcttgtggctgaggacctctcccaggactgcttctggacaaaggtgaaggaggaccgctttgagaacaatgaacttttcgccaaacttacccttaccttctctgcccagaccaagacttccaaagccaagaaggatcaagaaggtggagaagaaaagaaatctgtgcaaaagaaaaaagtaaaagagttaaaggtgttggattcaaagacagcccagaatctctcaatctttttgggttccttccgcatgccctatcaagagattaagaatgtcatcctggaggtgaatgaggctgttctgactgagtctatgatccagaacctcattaagcaaatgccagagccagagcagttaaaaatgctttctgaactgaaggatgaatatgatgacctggctgagtcagagcagtttggcgtggtgatgggcactgtgccccgactgcggcctcgcctcaatgccattctcttcaagctacaattcagcgagcaagtggagaatatcaagccagagattgtgtctgtcactgctgcatgtgaggagttacgtaagagtgagagcttttccaatctcctagagattaccttgcttgttggaaattacatgaatgctggctccagaaatgctggtgcttttggcttcaatatcagcttcctctgtaagcttcgagacaccaagtccacagatcagaagatgacgttgttacacttcttggctgagttgtgtgagaatgactatcccgatgtcctcaagtttccagacgagcttgcccatgtggagaaagccagccgagtttctgctgaaaacttgcaaaagaacctagatcagatgaagaaacaaatttctgatgtggaacgtgatgttcagaatttcccagctgccacagatgaaaaagacaagtttgttgaaaaaatgaccagctttgtgaaggatgcacaggaacagtataacaagctgcggatgatgcattctaacatggagaccctctataaggagctgggcgagtacttcctctttgaccccaagaagttgtctgttgaagaatttttcatggatcttcacaattttcggaatatgtttttgcaagcagtcaaggagaaccagaagcggcgggagacagaagaaaagatgaggcgagcaaaactagccaaggagaaggcagagaaggagcggctagagaagcagcagaagagagagcaactcatagacatgaatgcagagggcgatgagacaggtgtgatggacagtcttctagaagccctgcagtcaggggcagcattccgacggaagagagggccccgtcaagccaacaggaaggccgggtgtgcagtcacatctctgctagcttcggagctgaccaaggatgatgccatggctgctgttcctgccaaggtgtccaagaacagtgagacattccccacaatccttgaggaagccaaggagttggttggccgtgcaagctaatgtgggtcctgtgaccgcggcagctcctcagcggagccgcagactgtcctgccctgcagcatgtgcctaaaggctcaaggggatattcctctggggtggccactcccaccaccctgaccctgtctttctctctggcctgctgctctctcaacatcacatacagcttcagctgcctggaggccagaaggaaagggcagtgcaggggaggcctgagcccgacttagccagccctggctgttgtattaccaaagcagggtccatgtttgctgccttaaccctgtctcctctctgttactcagagggcctcatctcagacaaggcccagcctgctttttctcagccctgactttctaatgggctttcccccctaggtcagtcttgctggatttgtgcttttcttttgtggtttctctggccctgagaatagcatggggcttgtaaacctttgggctagatccctcctttcattgctgttgtctctgctcttccctctcctggctgtggttatttattattagtggtgtggcactgggagctgctcctaaggaagcagggagcaaatcccacctttaccccaccttcctgggaaaggcctccaaagcaaaggatctggaccagtttccctgctgtgctgtggcccaggccagagcctgtgggcaggcaggcagggcatagcgacagtgtgggacctgcccccagcttctgccacgctttatgcccttgcctctctggacgctctgcaccaaccccaggctactgagccaccttccctcctcatgccttccctgagctttggtgcatctcatctggactatgggttgtactgtgaccatcccaacacctcaccctctgtctacaaggaaatgggaggtggagcctcctggctgagaaattgttttgcaaatggatctatttttgtatgaaaaaaaaaatttttttaaagaaaactgttccttccccctttcccctccataatgtaagaagctttggtggcaggttacagagttctgggatttcttctcacaggcccaatcctgaatgtgcccctggaccttctggacccttgagtccaaggcagatcctctctcccagggaatccgacacaggaggaaccccttctctggttgagctgggccaggcctaagagtagcaggaactctaagaccacagagttttttataaatgtataaatgtatcaagccaaatgtgcagatgctaactggacattctggggaactgggcaccaggagtgccttcatacactgtaccccagctctcttctaaaagagaagtgggtgggcacactgaactgtttggtggccccaaccacaggaagctgcaattctctggcttagggtgatacttttgccctccttgtgcccctctcagctttccatccccagctaggaagaaagaatggcactcttgggcttggcccagaattagagttattagagcaagagagagcttaggaagcatgagggcaactatagtgaggccttattgccaggagggagggttttggttgctggcgcttgtgtataaaggggcaagagcagctcctttggactattcctgggaggactctgatgcagggcgtctgttgctcccctgggtcacctcctccctgctcgctgacatctggggctttgaccctttcttttttaatctacttttgctaagatgcatttaataaaaaaaaagagagagagagagaggtgtgagggacaaaatgcaaacctatttcccttgcctcataggcttctgggatgtcatcacctccagtttgttggttttgtttccaactgttaataaagcattgaaacagta

SEQ ID NO: 37246 - DNA, 5763 bp, Homo sapiens
gagctgccaggcgggagcggcgtaggcgcggggtcgccggccagcgtgaaccgggacatggagccgcccggcgggagcctggggcccggccgcgagacccgggacaagaagaagggccggagcccagatgagctgccctcggcgggcggcgacggcggcaaatctaagaaatttctggagagatttaccagcatgagaattaagaaggagaaggaaaagcccaattctgctcatagaaattcttctgcatcatatggggatgatcccacagcacagtcattgcaagatgtttcagatgaacaagtgctggttctctttgaacagatgctgctggatatgaacctgaatgaggagaaacagcaacctttgagggagaaggacatcatcatcaagagggagatggtgtcccaatacttgtacacctccaaggctggcatgagccagaaggagagctctaagtctgccatgatgtatattcaggagttgaggtcaggcttgcgggatatgcctctgctcagctgcctggagtcccttcgtgtgtctctcaacaacaaccctgtcagttgggtgcaaacatttggtgctgaaggcttggcctccttattggacattcttaaacgacttcatgatgagaaagaagagactgctgggagttacgatagccggaacaagcatgagatcattcgctgcttgaaagcttttatgaacaacaagtttggaatcaagaccatgttggagacagaagaaggaatcctactgctggtcagagccatggatcctgctgttcccaacatgatgattgatgcagctaagctgctttctgctctttgtattctaccgcagccagaggacatgaatgaaagggttttggaggcaatgacagaaagagctgagatggatgaagtggaacgtttccagccgctgctggatggattaaaaagtggaaccactattgcactgaaggttggatgcctacagctgatcaatgctctcatcacaccagcggaggaacttgacttccgagttcacatcagaagtgaactgatgcgtttggggctacatcaggtgttgcaggaccttcgagagattgaaaatgaagatatgagagtgcaactaaatgtgtttgatgaacaaggggaagaggattcctatgacctgaagggacggctggatgacattcgcatggagatggatgactttaatgaagtctttcagattctcttaaacacagtgaaggattcaaaggcagagccacacttcctttccatcctgcagcacttactcttggtccgaaatgactatgaggccagacctcagtactataagttgattgaagaatgtatttcccagatagttctgcacaagaacggggctgatcctgacttcaagtgccggcacctccagattgagattgagggattaattgatcaaatgattgataagacaaaggtggagaaatctgaagccaaagctgcagagctggaaaagaagttggactcagagttaacagcccgacatgagctacaggtggaaatgaaaaagatggaaagtgactttgagcagaagcttcaagatcttcagggagaaaaagatgcactgcattctgaaaagcagcaaattgccacagagaaacaggacctggaagcagaggtgtcccagctcacaggagaggttgccaagctgacaaaggaactggaagatgccaagaaagaaatggcttccctctctgcggcagctattactgtacctccttctgttcctagtcgtgctcctgttccccctgcccctcctttacctggtgactctggcactattattccaccaccacctgctcctggggatagtaccactcctcctcctcctcctcctcctcctcctcctccacctcctttgcctggaggtactgctatctctccaccccctcctttgtctggggatgctaccatccctccaccccctcctttgcctgagggtgttggcatcccttcaccctcttctttgcctggaggtactgccatccccccacctcctcctttgcctgggagtgctagaatccccccaccaccacctcctttgcctgggagtgctggaattccccccccacctcctcccttgcctggagaagcaggaatgccacctcctcctccccctcttcctggtggtcctggaatccctccacctcctccatttcccggaggccctggcattcctccacctccacccggaatgggtatgcctccacctcccccatttggatttggagttcctgcagccccagttctgccatttggattaacccccaaaaagctttataagccagaggtgcagctccggaggccaaactggtccaagcttgtggctgaggacctctcccaggactgcttctggacaaaggtgaaggaggaccgctttgagaacaatgaacttttcgccaaacttacccttaccttctctgcccagaccaagacttccaaagccaagaaggatcaagaaggtggagaagaaaagaaatctgtgcaaaagaaaaaagtaaaagagttaaaggtgttggattcaaagacagcccagaatctctcaatctttttgggttccttccgcatgccctatcaagagattaagaatgtcatcctggaggtgaatgaggctgttctgactgagtctatgatccagaacctcattaagcaaatgccagagccagagcagttaaaaatgctttctgaactgaaggatgaatatgatgacctggctgagtcagagcagtttggcgtggtgatgggcactgtgccccgactgcggcctcgcctcaatgccattctcttcaagctacaattcagcgagcaagtggagaatatcaagccagagattgtgtctgtcactgctgcatgtgaggagttacgtaagagtgagagcttttccaatctcctagagattaccttgcttgttggaaattacatgaatgctggctccagaaatgctggtgcttttggcttcaatatcagcttcctctgtaagcttcgagacaccaagtccacagatcagaagatgacgttgttacacttcttggctgagttgtgtgagaatgactatcccgatgtcctcaagtttccagacgagcttgcccatgtggagaaagccagccgagtttctgctgaaaacttgcaaaagaacctagatcagatgaagaaacaaatttctgatgtggaacgtgatgttcagaatttcccagctgccacagatgaaaaagacaagtttgttgaaaaaatgaccagctttgtgaaggatgcacaggaacagtataacaagctgcggatgatgcattctaacatggagaccctctataaggagctgggcgagtacttcctctttgaccccaagaagttgtctgttgaagaatttttcatggatcttcacaattttcggaatatgtttttgcaagcagtcaaggagaaccagaagcggcgggagacagaagaaaagatgaggcgagcaaaactagccaaggagaaggcagagaaggagcggctagagaagcagcagaagagagagcaactcatagacatgaatgcagagggcgatgagacaggtgtgatggacagtcttctagaagccctgcagtcaggggcagcattccgacggaagagagggccccgtcaagccaacaggaaggccgggtgtgcagtcacatctctgctagcttcggagctgaccaaggatgatgccatggctgctgttcctgccaaggtgtccaagaacagtgagacattccccacaatccttgaggaagccaaggagttggttggccgtgcaagctaatgtgggtcctgtgaccgcggcagctcctcagcggagccgcagactgtcctgccctgcagcatgtgcctaaaggctcaaggggatattcctctggggtggccactcccaccaccctgaccctgtctttctctctggcctgctgctctctcaacatcacatacagcttcagctgcctggaggccagaaggaaagggcagtgcaggggaggcctgagcccgacttagccagccctggctgttgtattaccaaagcagggtccatgtttgctgccttaaccctgtctcctctctgttactcagagggcctcatctcagacaaggcccagcctgctttttctcagccctgactttctaatgggctttcccccctaggtcagtcttgctggatttgtgcttttcttttgtggtttctctggccctgagaatagcatggggcttgtaaacctttgggctagatccctcctttcattgctgttgtctctgctcttccctctcctggctgtggttatttattattagtggtgtggcactgggagctgctcctaaggaagcagggagcaaatcccacctttaccccaccttcctgggaaaggcctccaaagcaaaggatctggaccagtttccctgctgtgctgtggcccaggccagagcctgtgggcaggcaggcagggcatagcgacagtgtgggacctgcccccagcttctgccacgctttatgcccttgcctctctggacgctctgcaccaaccccaggctactgagccaccttccctcctcatgccttccctgagctttggtgcatctcatctggactatgggttgtactgtgaccatcccaacacctcaccctctgtctacaaggaaatgggaggtggagcctcctggctgagaaattgttttgcaaatggatctatttttgtatgaaaaaaaaaatttttttaaagaaaactgttccttccccctttcccctccataatgtaagaagctttggtggcaggttacagagttctgggatttcttctcacaggcccaatcctgaatgtgcccctggaccttctggacccttgagtccaaggcagatcctctctcccagggaatccgacacaggaggaaccccttctctggttgagctgggccaggcctaagagtagcaggaactctaagaccacagagttttttataaatgtataaatgtatcaagccaaatgtgcagatgctaactggacattctggggaactgggcaccaggagtgccttcatacactgtaccccagctctcttctaaaagagaagtgggtgggcacactgaactgtttggtggccccaaccacaggaagctgcaattctctggcttagggtgatacttttgccctccttgtgcccctctcagctttccatccccagctaggaagaaagaatggcactcttgggcttggcccagaattagagttattagagcaagagagagcttaggaagcatgagggcaactatagtgaggccttattgccaggagggagggttttggttgctggcgcttgtgtataaaggggcaagagcagctcctttggactattcctgggaggactctgatgcagggcgtctgttgctcccctgggtcacctcctccctgctcgctgacatctggggctttgaccctttcttttttaatctacttttgctaagatgcatttaataaaaaaaaagagagagagagagaggtgtgagggacaaaatgcaaacctatttcccttgcctcataggcttctgggatgtcatcacctccagtttgttggttttgtttccaactgttaataaagcattgaaacagtaaaaaaaaatatatctccaccccccctccccacacacccaacaaaccctactaacacacatccatccatccaccccatatctacaacccccctaaatcaccctcactccccccccaccctt

SEQ ID NO: 37247 - DNA, 3224 bp, Homo sapiens
aaagcacagaggtggcttacttttaatcatgcttttctaatcttttcccttccaaagccaagaaggatcaagaaggtggagaagaaaagaaatctgtgcaaaagaaaaaagtaaaagagttaaaggtgttggattcaaagacagcccagaatctctcaatctttttgggttccttccgcatgccctatcaagagattaagaatgtcatcctggaggtgaatgaggctgttctgactgagtctatgatccagaacctcattaagcaaatgccagagccagagcagttaaaaatgctttctgaactgaaggatgaatatgatgacctggctgagtcagagcagtttggcgtggtgatgggcactgtgccccgactgcggcctcgcctcaatgccattctcttcaagctacaattcagcgagcaagtggagaatatcaagccagagattgtgtctgtcactgctgcatgtgaggagttacgtaagagtgagagcttttccaatctcctagagattaccttgcttgttggaaattacatgaatgctggctccagaaatgctggtgcttttggcttcaatatcagcttcctctgtaagcttcgagacaccaagtccacagatcagaagatgacgttgttacacttcttggctgagttgtgtgagaatgactatcccgatgtcctcaagtttccagacgagcttgcccatgtggagaaagccagccgagtttctgctgaaaacttgcaaaagaacctagatcagatgaagaaacaaatttctgatgtggaacgtgatgttcagaatttcccagctgccacagatgaaaaagacaagtttgttgaaaaaatgaccagctttgtgaaggatgcacaggaacagtataacaagctgcggatgatgcattctaacatggagaccctctataaggagctgggcgagtacttcctctttgaccccaagaagttgtctgttgaagaatttttcatggatcttcacaattttcggaatatgtttttgcaagcagtcaaggagaaccagaagcggcgggagacagaagaaaagatgaggcgagcaaaactagccaaggagaaggcagagaaggagcggctagagaagcagcagaagagagagcaactcatagacatgaatgcagagggcgatgagacaggtgtgatggacagtcttctagaagccctgcagtcaggggcagcattccgacggaagagagggccccgtcaagccaacaggaaggccgggtgtgcagtcacatctctgctagcttcggagctgaccaaggatgatgccatggctgctgttcctgccaaggtgtccaagaacagtgagacattccccacaatccttgaggaagccaaggagttggttggccgtgcaagctaatgtgggtcctgtgaccgcggcagctcctcagcggagccgcagactgtcctgccctgcagcatgtgcctaaaggctcaaggggatattcctctggggtggccactcccaccaccctgaccctgtctttctctctggcctgctgctctctcaacatcacatacagcttcagctgcctggaggccagaaggaaagggcagtgcaggggaggcctgagcccgacttagccagccctggctgttgtattaccaaagcagggtccatgtttgctgccttaaccctgtctcctctctgttactcagagggcctcatctcagacaaggcccagcctgctttttctcagccctgactttctaatgggctttcccccctaggtcagtcttgctggatttgtgcttttcttttgtggtttctctggccctgagaatagcatggggcttgtaaacctttgggctagatccctcctttcattgctgttgtctctgctcttccctctcctggctgtggttatttattattagtggtgtggcactgggagctgctcctaaggaagcagggagcaaatcccacctttaccccaccttcctgggaaaggcctccaaagcaaaggatctggaccagtttccctgctgtgctgtggcccaggccagagcctgtgggcaggcaggcagggcatagcgacagtgtgggacctgcccccagcttctgccacgctttatgcccttgcctctctggacgctctgcaccaaccccaggctactgagccaccttccctcctcatgccttccctgagctttggtgcatctcatctggactatgggttgtactgtgaccatcccaacacctcaccctctgtctacaaggaaatgggaggtggagcctcctggctgagaaattgttttgcaaatggatctatttttgtatgaaaaaaaaaatttttttaaagaaaactgttccttccccctttcccctccataatgtaagaagctttggtggcaggttacagagttctgggatttcttctcacaggcccaatcctgaatgtgcccctggaccttctggacccttgagtccaaggcagatcctctctcccagggaatccgacacaggaggaaccccttctctggttgagctgggccaggcctaagagtagcaggaactctaagaccacagagttttttataaatgtataaatgtatcaagccaaatgtgcagatgctaactggacattctggggaactgggcaccaggagtgccttcatacactgtaccccagctctcttctaaaagagaagtgggtgggcacactgaactgtttggtggccccaaccacaggaagctgcaattctctggcttagggtgatacttttgccctccttgtgcccctctcagctttccatccccagctaggaagaaagaatggcactcttgggcttggcccagaattagagttattagagcaagagagagcttaggaagcatgagggcaactatagtgaggccttattgccaggagggagggttttggttgctggcgcttgtgtataaaggggcaagagcagctcctttggactattcctgggaggactctgatgcagggcgtctgttgctcccctgggtcacctcctccctgctcgctgacatctggggctttgaccctttcttttttaatctacttttgctaagatgcatttaataaaaaaaaagagagagagagagaggtgtgagggacaaaatgcaaacctatttcccttgcctcataggcttctgggatgtcatcacctccagtttgttggttttgtttccaactgttaataaagcattgaaacagta

SEQ ID NO: 37248 - DNA, 3222 bp, Homo sapiens
gtctgacctccctttatcagtgatcctccttctctgccgagcaagacttccaaagccaagaaggatcaagaaggtggagaagaaaagaaatctgtgcaaaagaaaaaagtaaaagagttaaaggtgttggattcaaagacagcccagaatctctcaatctttttgggttccttccgcatgccctatcaagagattaagaatgtcatcctggaggtgaatgaggctgttctgactgagtctatgatccagaacctcattaagcaaatgccagagccagagcagttaaaaatgctttctgaactgaaggatgaatatgatgacctggctgagtcagagcagtttggcgtggtgatgggcactgtgccccgactgcggcctcgcctcaatgccattctcttcaagctacaattcagcgagcaagtggagaatatcaagccagagattgtgtctgtcactgctgcatgtgaggagttacgtaagagtgagagcttttccaatctcctagagattaccttgcttgttggaaattacatgaatgctggctccagaaatgctggtgcttttggcttcaatatcagcttcctctgtaagcttcgagacaccaagtccacagatcagaagatgacgttgttacacttcttggctgagttgtgtgagaatgactatcccgatgtcctcaagtttccagacgagcttgcccatgtggagaaagccagccgagtttctgctgaaaacttgcaaaagaacctagatcagatgaagaaacaaatttctgatgtggaacgtgatgttcagaatttcccagctgccacagatgaaaaagacaagtttgttgaaaaaatgaccagctttgtgaaggatgcacaggaacagtataacaagctgcggatgatgcattctaacatggagaccctctataaggagctgggcgagtacttcctctttgaccccaagaagttgtctgttgaagaatttttcatggatcttcacaattttcggaatatgtttttgcaagcagtcaaggagaaccagaagcggcgggagacagaagaaaagatgaggcgagcaaaactagccaaggagaaggcagagaaggagcggctagagaagcagcagaagagagagcaactcatagacatgaatgcagagggcgatgagacaggtgtgatggacagtcttctagaagccctgcagtcaggggcagcattccgacggaagagagggccccgtcaagccaacaggaaggccgggtgtgcagtcacatctctgctagcttcggagctgaccaaggatgatgccatggctgctgttcctgccaaggtgtccaagaacagtgagacattccccacaatccttgaggaagccaaggagttggttggccgtgcaagctaatgtgggtcctgtgaccgcggcagctcctcagcggagccgcagactgtcctgccctgcagcatgtgcctaaaggctcaaggggatattcctctggggtggccactcccaccaccctgaccctgtctttctctctggcctgctgctctctcaacatcacatacagcttcagctgcctggaggccagaaggaaagggcagtgcaggggaggcctgagcccgacttagccagccctggctgttgtattaccaaagcagggtccatgtttgctgccttaaccctgtctcctctctgttactcagagggcctcatctcagacaaggcccagcctgctttttctcagccctgactttctaatgggctttcccccctaggtcagtcttgctggatttgtgcttttcttttgtggtttctctggccctgagaatagcatggggcttgtaaacctttgggctagatccctcctttcattgctgttgtctctgctcttccctctcctggctgtggttatttattattagtggtgtggcactgggagctgctcctaaggaagcagggagcaaatcccacctttaccccaccttcctgggaaaggcctccaaagcaaaggatctggaccagtttccctgctgtgctgtggcccaggccagagcctgtgggcaggcaggcagggcatagcgacagtgtgggacctgcccccagcttctgccacgctttatgcccttgcctctctggacgctctgcaccaaccccaggctactgagccaccttccctcctcatgccttccctgagctttggtgcatctcatctggactatgggttgtactgtgaccatcccaacacctcaccctctgtctacaaggaaatgggaggtggagcctcctggctgagaaattgttttgcaaatggatctatttttgtatgaaaaaaaaaatttttttaaagaaaactgttccttccccctttcccctccataatgtaagaagctttggtggcaggttacagagttctgggatttcttctcacaggcccaatcctgaatgtgcccctggaccttctggacccttgagtccaaggcagatcctctctcccagggaatccgacacaggaggaaccccttctctggttgagctgggccaggcctaagagtagcaggaactctaagaccacagagttttttataaatgtataaatgtatcaagccaaatgtgcagatgctaactggacattctggggaactgggcaccaggagtgccttcatacactgtaccccagctctcttctaaaagagaagtgggtgggcacactgaactgtttggtggccccaaccacaggaagctgcaattctctggcttagggtgatacttttgccctccttgtgcccctctcagctttccatccccagctaggaagaaagaatggcactcttgggcttggcccagaattagagttattagagcaagagagagcttaggaagcatgagggcaactatagtgaggccttattgccaggagggagggttttggttgctggcgcttgtgtataaaggggcaagagcagctcctttggactattcctgggaggactctgatgcagggcgtctgttgctcccctgggtcacctcctccctgctcgctgacatctggggctttgaccctttcttttttaatctacttttgctaagatgcatttaataaaaaaaaagagagagagagagaggtgtgagggacaaaatgcaaacctatttcccttgcctcataggcttctgggatgtcatcacctccagtttgttggttttgtttccaactgttaataaagcattgaaacagta

SEQ ID NO: 37249 - DNA, 2411 bp, Homo sapiens
ggtcttggtcttggtcctttactccttggctgcacagctttgtgaaggatgcacaggaacagtataacaagctgcggatgatgcattctaacatggagaccctctataaggagctgggcgagtacttcctctttgaccccaagaagttgtctgttgaagaatttttcatggatcttcacaattttcggaatatgtttttgcaagcagtcaaggagaaccagaagcggcgggagacagaagaaaagatgaggcgagcaaaactagccaaggagaaggcagagaaggagcggctagagaagcagcagaagagagagcaactcatagacatgaatgcagagggcgatgagacaggtgtgatggacagtcttctagaagccctgcagtcaggggcagcattccgacggaagagagggccccgtcaagccaacaggaaggccgggtgtgcagtcacatctctgctagcttcggagctgaccaaggatgatgccatggctgctgttcctgccaaggtgtccaagaacagtgagacattccccacaatccttgaggaagccaaggagttggttggccgtgcaagctaatgtgggtcctgtgaccgcggcagctcctcagcggagccgcagactgtcctgccctgcagcatgtgcctaaaggctcaaggggatattcctctggggtggccactcccaccaccctgaccctgtctttctctctggcctgctgctctctcaacatcacatacagcttcagctgcctggaggccagaaggaaagggcagtgcaggggaggcctgagcccgacttagccagccctggctgttgtattaccaaagcagggtccatgtttgctgccttaaccctgtctcctctctgttactcagagggcctcatctcagacaaggcccagcctgctttttctcagccctgactttctaatgggctttcccccctaggtcagtcttgctggatttgtgcttttcttttgtggtttctctggccctgagaatagcatggggcttgtaaacctttgggctagatccctcctttcattgctgttgtctctgctcttccctctcctggctgtggttatttattattagtggtgtggcactgggagctgctcctaaggaagcagggagcaaatcccacctttaccccaccttcctgggaaaggcctccaaagcaaaggatctggaccagtttccctgctgtgctgtggcccaggccagagcctgtgggcaggcaggcagggcatagcgacagtgtgggacctgcccccagcttctgccacgctttatgcccttgcctctctggacgctctgcaccaaccccaggctactgagccaccttccctcctcatgccttccctgagctttggtgcatctcatctggactatgggttgtactgtgaccatcccaacacctcaccctctgtctacaaggaaatgggaggtggagcctcctggctgagaaattgttttgcaaatggatctatttttgtatgaaaaaaaaaatttttttaaagaaaactgttccttccccctttcccctccataatgtaagaagctttggtggcaggttacagagttctgggatttcttctcacaggcccaatcctgaatgtgcccctggaccttctggacccttgagtccaaggcagatcctctctcccagggaatccgacacaggaggaaccccttctctggttgagctgggccaggcctaagagtagcaggaactctaagaccacagagttttttataaatgtataaatgtatcaagccaaatgtgcagatgctaactggacattctggggaactgggcaccaggagtgccttcatacactgtaccccagctctcttctaaaagagaagtgggtgggcacactgaactgtttggtggccccaaccacaggaagctgcaattctctggcttagggtgatacttttgccctccttgtgcccctctcagctttccatccccagctaggaagaaagaatggcactcttgggcttggcccagaattagagttattagagcaagagagagcttaggaagcatgagggcaactatagtgaggccttattgccaggagggagggttttggttgctggcgcttgtgtataaaggggcaagagcagctcctttggactattcctgggaggactctgatgcagggcgtctgttgctcccctgggtcacctcctccctgctcgctgacatctggggctttgaccctttcttttttaatctacttttgctaagatgcatttaataaaaaaaaagagagagagagagaggtgtgagggacaaaatgcaaacctatttcccttgcctcataggcttctgggatgtcatcacctccagtttgttggttttgtttccaactgttaataaagcattgaaacagta

SEQ ID NO: 37250 - DNA, 2166 bp, Homo sapiens
cttggttggaaaaggaagagggagtggtcagatgaatctgaggaggagccggagaaggagctcgcccctgagcctgaggagacctgggtagagggcgatgagacaggtgtgatggacagtcttctagaagccctgcagtcaggggcagcattccgacggaagagagggccccgtcaagccaacaggaaggccgggtgtgcagtcacatctctgctagcttcggagctgaccaaggatgatgccatggctgctgttcctgccaaggtgtccaagaacagtgagacattccccacaatccttgaggaagccaaggagttggttggccgtgcaagctaatgtgggtcctgtgaccgcggcagctcctcagcggagccgcagactgtcctgccctgcagcatgtgcctaaaggctcaaggggatattcctctggggtggccactcccaccaccctgaccctgtctttctctctggcctgctgctctctcaacatcacatacagcttcagctgcctggaggccagaaggaaagggcagtgcaggggaggcctgagcccgacttagccagccctggctgttgtattaccaaagcagggtccatgtttgctgccttaaccctgtctcctctctgttactcagagggcctcatctcagacaaggcccagcctgctttttctcagccctgactttctaatgggctttcccccctaggtcagtcttgctggatttgtgcttttcttttgtggtttctctggccctgagaatagcatggggcttgtaaacctttgggctagatccctcctttcattgctgttgtctctgctcttccctctcctggctgtggttatttattattagtggtgtggcactgggagctgctcctaaggaagcagggagcaaatcccacctttaccccaccttcctgggaaaggcctccaaagcaaaggatctggaccagtttccctgctgtgctgtggcccaggccagagcctgtgggcaggcaggcagggcatagcgacagtgtgggacctgcccccagcttctgccacgctttatgcccttgcctctctggacgctctgcaccaaccccaggctactgagccaccttccctcctcatgccttccctgagctttggtgcatctcatctggactatgggttgtactgtgaccatcccaacacctcaccctctgtctacaaggaaatgggaggtggagcctcctggctgagaaattgttttgcaaatggatctatttttgtatgaaaaaaaaaatttttttaaagaaaactgttccttccccctttcccctccataatgtaagaagctttggtggcaggttacagagttctgggatttcttctcacaggcccaatcctgaatgtgcccctggaccttctggacccttgagtccaaggcagatcctctctcccagggaatccgacacaggaggaaccccttctctggttgagctgggccaggcctaagagtagcaggaactctaagaccacagagttttttataaatgtataaatgtatcaagccaaatgtgcagatgctaactggacattctggggaactgggcaccaggagtgccttcatacactgtaccccagctctcttctaaaagagaagtgggtgggcacactgaactgtttggtggccccaaccacaggaagctgcaattctctggcttagggtgatacttttgccctccttgtgcccctctcagctttccatccccagctaggaagaaagaatggcactcttgggcttggcccagaattagagttattagagcaagagagagcttaggaagcatgagggcaactatagtgaggccttattgccaggagggagggttttggttgctggcgcttgtgtataaaggggcaagagcagctcctttggactattcctgggaggactctgatgcagggcgtctgttgctcccctgggtcacctcctccctgctcgctgacatctggggctttgaccctttcttttttaatctacttttgctaagatgcatttaataaaaaaaaagagagagagagagaggtgtgagggacaaaatgcaaacctatttcccttgcctcataggcttctgggatgtcatcacctccagtttgttggttttgtttccaactgttaataaagcattgaaacagta

SEQ ID NO: 37251 - DNA, 2068 bp, Homo sapiens
tgcatcaacgcgttgggagctctcatattgtcgacctgcaggcggcgcgaattcactagtgattggagggcaggagaaagccaacaggaaggccgggtgtgcagtcacatctctgctagcttcggagctgaccaaggatgatgccatggctgctgttcctgccaaggtgtccaagaacagtgagacattccccacaatccttgaggaagccaaggagttggttggccgtgcaagctaatgtgggtcctgtgaccgcggcagctcctcagcggagccgcagactgtcctgccctgcagcatgtgcctaaaggctcaaggggatattcctctggggtggccactcccaccaccctgaccctgtctttctctctggcctgctgctctctcaacatcacatacagcttcagctgcctggaggccagaaggaaagggcagtgcaggggaggcctgagcccgacttagccagccctggctgttgtattaccaaagcagggtccatgtttgctgccttaaccctgtctcctctctgttactcagagggcctcatctcagacaaggcccagcctgctttttctcagccctgactttctaatgggctttcccccctaggtcagtcttgctggatttgtgcttttcttttgtggtttctctggccctgagaatagcatggggcttgtaaacctttgggctagatccctcctttcattgctgttgtctctgctcttccctctcctggctgtggttatttattattagtggtgtggcactgggagctgctcctaaggaagcagggagcaaatcccacctttaccccaccttcctgggaaaggcctccaaagcaaaggatctggaccagtttccctgctgtgctgtggcccaggccagagcctgtgggcaggcaggcagggcatagcgacagtgtgggacctgcccccagcttctgccacgctttatgcccttgcctctctggacgctctgcaccaaccccaggctactgagccaccttccctcctcatgccttccctgagctttggtgcatctcatctggactatgggttgtactgtgaccatcccaacacctcaccctctgtctacaaggaaatgggaggtggagcctcctggctgagaaattgttttgcaaatggatctatttttgtatgaaaaaaaaaatttttttaaagaaaactgttccttccccctttcccctccataatgtaagaagctttggtggcaggttacagagttctgggatttcttctcacaggcccaatcctgaatgtgcccctggaccttctggacccttgagtccaaggcagatcctctctcccagggaatccgacacaggaggaaccccttctctggttgagctgggccaggcctaagagtagcaggaactctaagaccacagagttttttataaatgtataaatgtatcaagccaaatgtgcagatgctaactggacattctggggaactgggcaccaggagtgccttcatacactgtaccccagctctcttctaaaagagaagtgggtgggcacactgaactgtttggtggccccaaccacaggaagctgcaattctctggcttagggtgatacttttgccctccttgtgcccctctcagctttccatccccagctaggaagaaagaatggcactcttgggcttggcccagaattagagttattagagcaagagagagcttaggaagcatgagggcaactatagtgaggccttattgccaggagggagggttttggttgctggcgcttgtgtataaaggggcaagagcagctcctttggactattcctgggaggactctgatgcagggcgtctgttgctcccctgggtcacctcctccctgctcgctgacatctggggctttgaccctttcttttttaatctacttttgctaagatgcatttaataaaaaaaaagagagagagagagaggtgtgagggacaaaatgcaaacctatttcccttgcctcataggcttctgggatgtcatcacctccagtttgttggttttgtttccaactgttaataaagcattgaaacagta

SEQ ID NO: 37252 - DNA, 1973 bp, Homo sapiens
gcgaattcactagtgattgagctgaggaggagctgaccaaggatgatgccatggctgctgttcctgccaaggtgtccaagaacagtgagacattccccacaatccttgaggaagccaaggagttggttggccgtgcaagctaatgtgggtcctgtgaccgcggcagctcctcagcggagccgcagactgtcctgccctgcagcatgtgcctaaaggctcaaggggatattcctctggggtggccactcccaccaccctgaccctgtctttctctctggcctgctgctctctcaacatcacatacagcttcagctgcctggaggccagaaggaaagggcagtgcaggggaggcctgagcccgacttagccagccctggctgttgtattaccaaagcagggtccatgtttgctgccttaaccctgtctcctctctgttactcagagggcctcatctcagacaaggcccagcctgctttttctcagccctgactttctaatgggctttcccccctaggtcagtcttgctggatttgtgcttttcttttgtggtttctctggccctgagaatagcatggggcttgtaaacctttgggctagatccctcctttcattgctgttgtctctgctcttccctctcctggctgtggttatttattattagtggtgtggcactgggagctgctcctaaggaagcagggagcaaatcccacctttaccccaccttcctgggaaaggcctccaaagcaaaggatctggaccagtttccctgctgtgctgtggcccaggccagagcctgtgggcaggcaggcagggcatagcgacagtgtgggacctgcccccagcttctgccacgctttatgcccttgcctctctggacgctctgcaccaaccccaggctactgagccaccttccctcctcatgccttccctgagctttggtgcatctcatctggactatgggttgtactgtgaccatcccaacacctcaccctctgtctacaaggaaatgggaggtggagcctcctggctgagaaattgttttgcaaatggatctatttttgtatgaaaaaaaaaatttttttaaagaaaactgttccttccccctttcccctccataatgtaagaagctttggtggcaggttacagagttctgggatttcttctcacaggcccaatcctgaatgtgcccctggaccttctggacccttgagtccaaggcagatcctctctcccagggaatccgacacaggaggaaccccttctctggttgagctgggccaggcctaagagtagcaggaactctaagaccacagagttttttataaatgtataaatgtatcaagccaaatgtgcagatgctaactggacattctggggaactgggcaccaggagtgccttcatacactgtaccccagctctcttctaaaagagaagtgggtgggcacactgaactgtttggtggccccaaccacaggaagctgcaattctctggcttagggtgatacttttgccctccttgtgcccctctcagctttccatccccagctaggaagaaagaatggcactcttgggcttggcccagaattagagttattagagcaagagagagcttaggaagcatgagggcaactatagtgaggccttattgccaggagggagggttttggttgctggcgcttgtgtataaaggggcaagagcagctcctttggactattcctgggaggactctgatgcagggcgtctgttgctcccctgggtcacctcctccctgctcgctgacatctggggctttgaccctttcttttttaatctacttttgctaagatgcatttaataaaaaaaaagagagagagagagaggtgtgagggacaaaatgcaaacctatttcccttgcctcataggcttctgggatgtcatcacctccagtttgttggttttgtttccaactgttaataaagcattgaaacagta

SEQ ID NO: 37253 - DNA, 1405 bp, Homo sapiens
ccatgcagcataatgttctatgtgcatgtgttttaagttctataagtttccctgtaatctcattctttcctaccttttttgtaaaactcaggccattcaacgcctcccggaggcgttgaatggcctagggagcaaatcccacctttaccccaccttcctgggaaaggcctccaaagcaaaggatctggaccagtttccctgctgtgctgtggcccaggccagagcctgtgggcaggcaggcagggcatagcgacagtgtgggacctgcccccagcttctgccacgctttatgcccttgcctctctggacgctctgcaccaaccccaggctactgagccaccttccctcctcatgccttccctgagctttggtgcatctcatctggactatgggttgtactgtgaccatcccaacacctcaccctctgtctacaaggaaatgggaggtggagcctcctggctgagaaattgttttgcaaatggatctatttttgtatgaaaaaaaaaatttttttaaagaaaactgttccttccccctttcccctccataatgtaagaagctttggtggcaggttacagagttctgggatttcttctcacaggcccaatcctgaatgtgcccctggaccttctggacccttgagtccaaggcagatcctctctcccagggaatccgacacaggaggaaccccttctctggttgagctgggccaggcctaagagtagcaggaactctaagaccacagagttttttataaatgtataaatgtatcaagccaaatgtgcagatgctaactggacattctggggaactgggcaccaggagtgccttcatacactgtaccccagctctcttctaaaagagaagtgggtgggcacactgaactgtttggtggccccaaccacaggaagctgcaattctctggcttagggtgatacttttgccctccttgtgcccctctcagctttccatccccagctaggaagaaagaatggcactcttgggcttggcccagaattagagttattagagcaagagagagcttaggaagcatgagggcaactatagtgaggccttattgccaggagggagggttttggttgctggcgcttgtgtataaaggggcaagagcagctcctttggactattcctgggaggactctgatgcagggcgtctgttgctcccctgggtcacctcctccctgctcgctgacatctggggctttgaccctttcttttttaatctacttttgctaagatgcatttaataaaaaaaaagagagagagagagaggtgtgagggacaaaatgcaaacctatttcccttgcctcataggcttctgggatgtcatcacctccagtttgttggttttgtttccaactgttaataaagcattgaaacagta

SEQ ID NO: 37254 - DNA, 3100 bp, Homo sapiens
  misc_feature (3058)..(3058): n is a, c, g, or t
  misc_feature (3084)..(3084): n is a, c, g, or t
gagctgccaggcgggagcggcgtaggcgcggggtcgccggccagcgtgaaccgggacatggagccgcccggcgggagcctggggcccggccgcgagacccgggacaagaagaagggccggagcccagatgagctgccctcggcgggcggcgacggcggcaaatctaagaaatttctggagagatttaccagcatgagaattaagaaggagaaggaaaagcccaattctgctcatagaaattcttctgcatcatatggggatgatcccacagcacagtcattgcaagatgtttcagatgaacaagtgctggttctctttgaacagatgctgctggatatgaacctgaatgaggagaaacagcaacctttgagggagaaggacatcatcatcaagagggagatggtgtcccaatacttgtacacctccaaggctggcatgagccagaaggagagctctaagtctgccatgatgtatattcaggagttgaggtcaggcttgcgggatatgcctctgctcagctgcctggagtcccttcgtgtgtctctcaacaacaaccctgtcagttgggtgcaaacatttggtgctgaaggcttggcctccttattggacattcttaaacgacttcatgatgagaaagaagagactgctgggagttacgatagccggaacaagcatgagatcattcgctgcttgaaagcttttatgaacaacaagtttggaatcaagaccatgttggagacagaagaaggaatcctactgctggtcagagccatggatcctgctgttcccaacatgatgattgatgcagctaagctgctttctgctctttgtattctaccgcagccagaggacatgaatgaaagggttttggaggcaatgacagaaagagctgagatggatgaagtggaacgtttccagccgctgctggatggattaaaaagtggaaccactattgcactgaaggttggatgcctacagctgatcaatgctctcatcacaccagcggaggaacttgacttccgagttcacatcagaagtgaactgatgcgtttggggctacatcaggtgttgcaggaccttcgagagattgaaaatgaagatatgagagtgcaactaaatgtgtttgatgaacaaggggaagaggattcctatgacctgaagggacggctggatgacattcgcatggagatggatgactttaatgaagtctttcagattctcttaaacacagtgaaggattcaaaggcagagccacacttcctttccatcctgcagcacttactcttggtccgaaatgactatgaggccagacctcagtactataagttgattgaagaatgtatttcccagatagttctgcacaagaacggggctgatcctgacttcaagtgccggcacctccagattgagattgagggattaattgatcaaatgattgataagacaaaggtggagaaatctgaagccaaagctgcagagctggaaaagaagttggactcagagttaacagcccgacatgagctacaggtggaaatgaaaaagatggaaagtgactttgagcagaagcttcaagatcttcagggagaaaaagatgcactgcattctgaaaagcagcaaattgccacagagaaacaggacctggaagcagaggtgtcccagctcacaggagaggttgccaagctgacaaaggaactggaagatgccaagaaagaaatggcttccctctctgcggcagctattactgtacctccttctgttcctagtcgtgctcctgttccccctgcccctcctttacctggtgactctggcactattattccaccaccacctgctcctggggatagtaccactcctcctcctcctcctcctcctcctcctcctccacctcctttgcctgggggtgtttgcatctcctcacccccttctttacctggaggtactgctatctctccaccccctcctttgtctggggatgctaccatccctccaccccctcctttgcctgagggtgttggcatcccttcaccctcttctttgcctggaggtactgccatccccccacctcctcctttgcctgggagtgctagaatccccccaccaccacctcctttgcctgggagtgctggaattccccccccacctcctcccttgcctggagaagcaggaatgccacctcctcctccccctcttcctggtggtcctggaatccctccacctcctccatttcccggaggccctggcattcctccacctccacccggaatgggtatgcctccacctcccccatttggatttggagttcctgcagccccagttctgccatttggattaacccccaaaaagctttataagccagaggtgcagctccggaggccaaactggtccaagcttgtggctgaggacctctcccaggactgcttctggacaaaggtgaaggaggaccgctttgagaacaatgaacttttcgccaaacttacccttaccttctctgcccagaccaagacttccaaagccaagaaggatcaagaaggtggagaagaaaagaaatctgtgcaaaagaaaaaagtaaaagagttaaaggtgttggattcaaagacagcccagaatctctcaatctttttgggttccttccgcatgccctatcaagagattaagaatgtcatcctggaggtgaatgaggctgttctgactgagtctatgatccagaacctcattaagcaaatgccagagccagagcagttaaaaatgctttctgaactgaaggatgaatatgatgacctggctgagtcagagcagtttggcgtggtgatgggcactgtgccccgactgcggcctcgcctcaatgccattctcttcaagctacaattcagcgagcaagtggagaatatcaagccagagattgtgtctgtcactgctgcatgtgaggagttacgtaagagtgagagcttttccaatctcctagagattaccttgcttgttggaaattacatgaatgctggctccagaaatgctggtgcttttggcttcaatatcagcttcctctgtaagcttcgagacnccagtcccagagcagaaggtcgaccnggatcctctagagcga

SEQ ID NO: 37255 - DNA, 2428 bp, Homo sapiens
gagctgccaggcgggagcggcgtaggcgcggggtcgccggccagcgtgaaccgggacatggagccgcccggcgggagcctggggcccggccgcgagacccgggacaagaagaagggccggagcccagatgagctgccctcggcgggcggcgacggcggcaaatctaagaaatttctggagagatttaccagcatgagaattaagaaggagaaggaaaagcccaattctgctcatagaaattcttctgcatcatatggggatgatcccacagcacagtcattgcaagatgtttcagatgaacaagtgctggttctctttgaacagatgctgctggatatgaacctgaatgaggagaaacagcaacctttgagggagaaggacatcatcatcaagagggagatggtgtcccaatacttgtacacctccaaggctggcatgagccagaaggagagctctaagtctgccatgatgtatattcaggagttgaggtcaggcttgcgggatatgcctctgctcagctgcctggagtcccttcgtgtgtctctcaacaacaaccctgtcagttgggtgcaaacatttggtgctgaaggcttggcctccttattggacattcttaaacgacttcatgatgagaaagaagagactgctgggagttacgatagccggaacaagcatgagatcattcgctgcttgaaagcttttatgaacaacaagtttggaatcaagaccatgttggagacagaagaaggaatcctactgctggtcagagccatggatcctgctgttcccaacatgatgattgatgcagctaagctgctttctgctctttgtattctaccgcagccagaggacatgaatgaaagggttttggaggcaatgacagaaagagctgagatggatgaagtggaacgtttccagccgctgctggatggattaaaaagtggaaccactattgcactgaaggttggatgcctacagctgatcaatgctctcatcacaccagcggaggaacttgacttccgagttcacatcagaagtgaactgatgcgtttggggctacatcaggtgttgcaggaccttcgagagattgaaaatgaagatatgagagtgcaactaaatgtgtttgatgaacaaggggaagaggattcctatgacctgaagggacggctggatgacattcgcatggagatggatgactttaatgaagtctttcagattctcttaaacacagtgaaggattcaaaggcagagccacacttcctttccatcctgcagcacttactcttggtccgaaatgactatgaggccagacctcagtactataagttgattgaagaatgtatttcccagatagttctgcacaagaacggggctgatcctgacttcaagtgccggcacctccagattgagattgagggattaattgatcaaatgattgataagacaaaggtggagaaatctgaagccaaagctgcagagctggaaaagaagttggactcagagttaacagcccgacatgagctacaggtggaaatgaaaaagatggaaagtgactttgagcagaagcttcaagatcttcagggagaaaaagatgcactgcattctgaaaagcagcaaattgccacagagaaacaggacctggaagcagaggtgtcccagctcacaggagaggttgccaagctgacaaaggaactggaagatgccaagaaagaaatggcttccctctctgcggcagctattactgtacctccttctgttcctagtcgtgctcctgttccccctgcccctcctttacctggtgactctggcactattattccaccaccacctgctcctggggatagtaccactcctcctcctcctcctcctcctcctcctcctccacctcctttgcctgggggtgtttgcatctcctcacccccttctttacctggaggtactgctatctctccaccccctcctttgtctggggatgctaccatccctccaccccctcctttgcctgagggtgttggcatcccttcaccctcttctttgcctggaggtactgccatccccccacctcctcctttgcctgggagtgctagaatccccccaccaccacctcctttgcctgggagtgctggaattccccccccacctcctcccttgcctggagaagcaggaatgccacctcctcctccccctcttcctggtggtcctggaatccctccacctcctcctccctgctcgctgacatctggggctttgaccctttcttttttaatctacttttgctaagatgcatttaataaaaaaaaagagagagagagagaggtgtgagggacaaaatgcaaacctatttcccttgcctcataggcttctgggatgtcatcacctccagtttgttggttttgtttccaactgttaataaagcattgaaacagta

SEQ ID NO: 37256 - DNA, 1429 bp, Homo sapiens
gagctgccaggcgggagcggcgtaggcgcggggtcgccggccagcgtgaaccgggacatggagccgcccggcgggagcctggggcccggccgcgagacccgggacaagaagaagggccggagcccagatgagctgccctcggcgggcggcgacggcggcaaatctaagaaatttctggagagatttaccagcatgagaattaagaaggagaaggaaaagcccaattctgctcatagaaattcttctgcatcatatggggatgatcccacagcacagtcattgcaagatgtttcagatgaacaagtgctggttctctttgaacagatgctgctggatatgaacctgaatgaggagaaacagcaacctttgagggagaaggacatcatcatcaagagggagatggtgtcccaatacttgtacacctccaaggctggcatgagccagaaggagagctctaagtctgccatgatgtatattcaggagttgaggtcaggcttgcgggatatgcctctgctcagctgcctggagtcccttcgtgtgtctctcaacaacaaccctgtcagttgggtgcaaacatttggtgctgaaggcttggcctccttattggacattcttaaacgacttcatgatgagaaagaagagactgctgggagttacgatagccggaacaagcatgagatcattcgctgcttgaaagcttttatgaacaacaagtttggaatcaagaccatgttggagacagaagaaggaatcctactgctggtcagagccatggatcctgctgttcccaacatgatgattgatgcagctaagctgctttctgctctttgtattctaccgcagccagaggacatgaatgaaagggttttggaggcaatgacagaaagagctgagatggatgaagtggaacgtttccagccgctgctggatggattaaaaagtggaaccactattgcactgaaggttggatgcctacagctgatcaatgctctcatcacaccagcggaggaacttgacttccgagttcacatcagaagtgaactgatgcgtttggggctacatcaggtgttgcaggaccttcgagagattgaaaatgaagatatgagagtgcaactaaatgtgtttgatgaacaaggggaagaggattcctatgacctgaagggacggctggatgacattcgcatggagatggaatatccttttgctgactaggttcaaggcagatgagacattcattgtatttagttccctgatccctgtgtggaatggtttgggagatgatgactcagaacagagcatcaggcttatgtgtcttctcattaaataaggcaggtgtatttttattgcgctggctttacttagcttatcatagatcagggaagtcagtaaaggtgatctgagggttgttgagcatggaagccatcaaaat

SEQ ID NO: 37257 - DNA, 1410 bp, Homo sapiens
gagctgccaggcgggagcggcgtaggcgcggggtcgccggccagcgtgaaccgggacatggagccgcccggcgggagcctggggcccggccgcgagacccgggacaagaagaagggccggagcccagatgagctgccctcggcgggcggcgacggcggcaaatctaagaaatttctggagagatttaccagcatgagaattaagaaggagaaggaaaagcccaattctgctcatagaaattcttctgcatcatatggggatgatcccacagcacagtcattgcaagatgtttcagatgaacaagtgctggttctctttgaacagatgctgctggatatgaacctgaatgaggagaaacagcaacctttgagggagaaggacatcatcatcaagagggagatggtgtcccaatacttgtacacctccaaggctggcatgagccagaaggagagctctaagtctgccatgatgtatattcaggagttgaggtcaggcttgcgggatatgcctctgctcagctgcctggagtcccttcgtgtgtctctcaacaacaaccctgtcagttgggtgcaaacatttggtgctgaaggcttggcctccttattggacattcttaaacgacttcatgatgagaaagaagagactgctgggagttacgatagccggaacaagcatgagatcattcgctgcttgaaagcttttatgaacaacaagtttggaatcaagaccatgttggagacagaagaaggaatcctactgctggtcagagccatggatcctgctgttcccaacatgatgattgatgcagctaagctgctttctgctctttgtattctaccgcagccagaggacatgtatgtgactggaataatttttcttctccattttcaattttatcattttctcttagttcagaggacaattgagttggttgggtgtcctctcggtcataaatactaggtaagattgtgtttcttcccagaagtgaacactaagcatcttaaaatttaagaacaattcctaagtgatgggtgctatcctgaatgttccactggtcatcagaggtatagcaaaatgtctcctatatctccattaatatctgtattgtctaggatgagggtttctttttactattcttttttctaaacttctcttctcacttcatttcattaatttgatcttcaatcactgataccctttcttccactagatcgaatcggctactgaagcatgtgtatgtgtcatgtagttctcgcgccatggttttcagctccatcaggtcatttaaggtcttctctacactgtttattctagttaccatttgtctaatctcttttcaagtttttagcttcctgcgatgggttcgacatcctcctttagcttggagatagtcatgttagtacccacttc

SEQ ID NO: 37258 - DNA, 344 bp, Homo sapiens
ccaatacttgtacacctccaaggctgtgagtcctgggacaggtacccatgacatgggagactgtgcccttgtcttggacctgttttttttttgccaattttatgtaacattttatgtctgcatcaattctgtttcattccattatataagcctgttcactttttactgtcttatttagttaccgttcttacatacattttgcctggttaaattttcatgaagtatgtaaatatagggaatgggataggcagttctaagtctcatttatgttggtggtatgtgagatgggtatctgccctgataaacgtggcctgacatggtggcttactcctgtaatctgagca

SEQ ID NO: 37259 - DNA, 423 bp, Homo sapiens
ctccagcattgctgacttatgaatgctggctttgagaaactgccttttctctggtggtcagattacttctggtatattttgcaaaagtacccccatctcagtagctgcctctcttctcccaccatatgtttctttctgtatggtccttgagcagagtgtgggactgacaacagagtaaaagttgtttaggcttgagttgttagcgaattcccctccagctgagatgtctcttctgtctttcagaacctcattaagcaaatgccagagccagagcagttaaaaatgctttctgaactgaaggatgaatatgatgacctggctgagtcagagcagtttggcgtggtggtgagtgaggcctgtggcagtaagcggttttccacctcctgtattcccctcccctctagagagcagcctgggcatatg

SEQ ID NO: 37260 - DNA, 10006 bp, Homo sapiens
acacagtggtcctccgccggctacggcgctgcgtcactggtttgcaggcgctttcctcttggaagtggcgactgctgcgggcctgagcgctggtctcacgcgcctcgggagccaggttggcggcgcgatgaggcgcagcaaggctgacgtggagcggtacatcgcctcggtgcagggctccaccccgtcgcctcgacagaagtcaatgaaaggattctattttgcaaagctgtattatgaagctaaagaatatgatcttgctaaaaaatacatatgtacttacattaatgtgcaagagagggatcccaaagctcacagatttctgggtcttctttatgaattggaagaaaacacagacaaagccgttgaatgttacaggcgttcagtggaattaaacccaacacaaaaagatcttgtgttgaagattgcagaattgctttgtaaaaatgatgttactgatggaagagcaaaatactggcttgaaagagcagccaaacttttcccaggaagtcctgcaatttataaactaaaggaacagcttctagattgtgaaggtgaagatggatggaataaactttttgacttgattcagtcagaactttatgtaagacctgatgacgtccatgtgaacatccggctagtggaggtgtatcgctcaactaaaagattgaaggatgctgtggcccactgccatgaggcagagaggaacatagctttgcgttcaagtttagaatggaattcgtgtgttgtacagacccttaaggaatatctggagtctttacagtgtttggagtctgataaaagtgactggcgagcaaccaatacagacttactgctggcctatgctaatcttatgcttcttacgctttccactagagatgtgcaggaaagtagagaattactgcaaagttttgatagtgctcttcagtctgtgaaatctttgggtggaaatgatgaactgtcagctactttcttagaaatgaaaggacatttctacatgcatgctggttctctgcttttgaagatgggtcagcatagtagtaatgttcaatggcgagctctttctgagctggctgcattgtgctatctcatagcatttcaggttccaagaccaaagattaaattaataaaaggtgaagctggacaaaatctgctggaaatgatggcctgtgaccgactgagccaatcagggcacatgttgctaaacttaagtcgtggcaagcaagattttttaaaagagattgttgaaacttttgccaacaaaagcgggcagtctgcattatatgatgctctgttttctagtcagtcacctaaggatacatcttttcttggtagcgatgatattggaaacattgatgtacgagaaccagagcttgaagatttgactagatacgatgttggtgctattcgagcacataatggtagtcttcagcaccttacttggcttggcttacagtggaattcattgcctgctttacctggaatccgaaaatggctaaaacagcttttccatcatttgccccatgaaacctcaaggcttgaaacaaatgcacctgaatcaatatgtattttagatcttgaagtatttctccttggagtagtatataccagccacttacaattaaaggagaaatgtaattctcaccacagctcctatcagccgttatgcctgccccttcctgtgtgtaaacagctttgtacagaaagacaaaaatcttggtgggatgcggtttgtactctgattcacagaaaagcagtacctggaaacgtagcaaaattgagacttctagttcagcatgaaataaacactctaagagcccaggaaaaacatggccttcaacctgctctgcttgtacattgggcagaatgccttcagaaaacgggcagcggtcttaattctttttatgatcaacgagaatacatagggagaagtgttcattattggaagaaagttttgccattgttgaagataataaaaaagaagaacagtattcctgaacctattgatcctctgtttaaacattttcatagtgtagacattcaggcatcagaaattgttgaatatgaagaagacgcacacataacttttgctatattggatgcagtaaatggaaatatagaagatgctgtgactgcttttgaatctataaaaagtgttgtttcttattggaatcttgcactgatttttcacaggaaggcagaagacattgaaaatgatgccctttctcctgaagaacaagaagaatgcaaaaattatctgagaaagaccagggactacctaataaagattatagatgacagtgattcaaatctttcagtggtcaagaaattgcctgtgcccctggagtctgtaaaagagatgcttaattcagtcatgcaggaactcgaagactatagtgaaggaggtcctctctataaaaatggttctttgcgaaatgcagattcagaaataaaacattctacaccgtctcctaccagatattcactatcaccaagtaaaagttacaagtattctcccaaaacaccacctcgatgggcagaagatcagaattctttactgaaaatgatttgccaacaagtagaggccattaagaaagaaatgcaggagttgaaactaaatagcagtaactcagcatcccctcatcgttggcccacagagaattatggaccagactcggtgcctgatggatatcaggggtcacagacatttcatggggctccactaacagttgcaactactggcccttcagtatattatagtcagtcaccagcatataattcccagtatcttctcagaccagcagctaatgttactcccacaaagggcccagtctatggcatgaataggcttccaccccaacagcatatttatgcctatccgcaacagatgcacacaccgccagtgcaaagctcatctgcttgtatgttctctcaggagatgtatggtcctcctgcattgcgttttgagtctcctgcaacgggaattctatcgcccaggggtgatgattactttaattacaatgttcaacagacaagcacaaatccacctttgccagaaccaggatatttcacaaaacctccgattgcagctcatgcttcaagatctgcagaatctaagactatagaatttgggaaaactaattttgttcagcccatgccgggtgaaggattaaggccatctttgccaacacaagcacacacaacacagccaactccttttaaatttaactcaaatttcaaatcaaatgatggtgacttcacgttttcctcaccacaggttgtgacacagccccctcctgcagcttacagtaacagtgaaagccttttaggtctcctgacttcagataaacccttgcaaggagatggctatagtggagccaaaccaattcctggtggtcaaaccattgggcctcgaaatacattcaattttggaagcaaaaatgtgtctggaatttcatttacagaaaacatggggtcgagtcagcaaaagaattctggttttcggcgaagtgatgatatgtttactttccatggtccagggaaatcagtatttggaacacccactttagagacagcaaacaagaatcatgagacagatggaggaagtgcccatggggatgatgatgatgacggtcctcactttgagcctgtagtacctcttcctgataagattgaagtaaaaactggtgaggaagatgaagaagaattcttttgcaaccgcgcgaaattgtttcgtttcgatgtagaatccaaagaatggaaagaacgtgggattggcaatgtaaaaatactgaggcataaaacatctggtaaaattcgccttctaatgagacgagagcaagtattgaaaatctgtgcaaatcattacatcagtccagatatgaaattgacaccaaatgctggatcagacagatcttttgtatggcatgcccttgattatgcagatgagttgccaaaaccagaacaacttgctattaggttcaaaactcctgaggaagcagcactttttaaatgcaagtttgaagaagcccagagcattttaaaagccccaggaacaaatgtagccatggcgtcaaatcaggctgtcagaattgtaaaagaacccacaagtcatgataacaaggatatttgcaaatctgatgctggaaacctgaattttgaatttcaggttgcaaagaaagaagggtcttggtggcattgtaacagctgctcattaaagaatgcttcaactgctaagaaatgtgtatcatgccaaaatctaaacccaagcaataaagagctcgttggcccaccattagctgaaactgtttttactcctaaaaccagcccagagaatgttcaagatcgatttgcattggtgactccaaagaaagaaggtcactgggattgtagtatttgtttagtaagaaatgaacctactgtatctaggtgcattgcgtgtcagaatacaaaatctgctaacaaaagtggatcttcatttgttcatcaagcttcatttaaatttggccagggagatcttcctaaacctattaacagtgatttcagatctgttttttctacaaaggaaggacagtgggattgcagtgcatgtttggtacaaaatgaggggagctctacaaaatgtgctgcttgtcagaatccgagaaaacagagtctacctgctacttctattccaacacctgcctcttttaagtttggtacttcagagacaagtaaaactctaaaaagtggatttgaagacatgtttgctaagaaggaaggacagtgggattgcagttcatgcttagtgcgaaatgaagcaaatgctacaagatgtgttgcttgtcagaatccggataaaccaagtccatctacttctgttccagctcctgcctcttttaagtttggtacttcagagacaagcaaggctccaaagagcggatttgagggaatgttcactaagaaggagggacagtgggattgcagtgtgtgcttagtaagaaatgaagccagtgctaccaaatgtattgcttgtcagaatccaggtaaacaaaatcaaactacttctgcagtttcaacacctgcctcttcagagacaagcaaggctccaaagagcggatttgagggaatgttcactaagaaggagggacagtgggattgcagtgtgtgcttagtaagaaatgaagccagtgctaccaaatgtattgcttgtcagaatccaggtaaacaaaatcaaactacttctgcagtttcaacacctgcctcttcagagacaagcaaggctccaaagagcggatttgagggaatgttcactaagaaggaaggacagtgggattgcagtgtgtgcttagtaagaaatgaagccagtgctaccaaatgtattgcttgtcagtgtccaagtaaacaaaatcaaacaactgcaatttcaacacctgcctcttcggagataagcaaggctccaaagagtggatttgaaggaatgttcatcaggaaaggacagtgggattgtagtgtttgctgtgtacaaaatgagagttcttccttaaaatgtgtggcttgtgatgcctctaaaccaactcataaacctattgcagaagctccttcagctttcacactgggctcagaaatgaagttgcatgactcttctggaagtcaggtgggaacaggatttaaaagtaatttctcagaaaaagcttctaagtttggcaatacagagcaaggattcaaatttgggcatgtggatcaagaaaattcaccttcatttatgtttcagggttcttctaatacagaatttaagtcaaccaaagaaggattttccatccctgtgtctgctgatggatttaaatttggcatttcggaaccaggaaatcaagaaaagaaaagtgaaaagcctcttgaaaatggtactggcttccaggctcaggatattagtggccagaagaatggccgtggtgtgatttttggccaaacaagtagcacttttacatttgcagatcttgcaaaatcaacttcaggagaaggatttcagtttggcaaaaaagaccccaatttcaagggattttcaggtgctggagaaaaattattctcatcacaatacggtaaaatggccaataaagcaaacacttccggtgactttgagaaagatgatgatgcctataagactgaggacagcgatgacatccattttgaaccagtagttcaaatgcccgaaaaagtagaacttgtaacaggagaagaagatgaaaaagttctgtattcacagcgggtaaaactatttagatttgatgctgaggtaagtcagtggaaagaaaggggcttggggaacttaaaaattctcaaaaacgaggtcaatggcaaactaagaatgctgatgcgaagagaacaagtactaaaagtgtgtgctaatcattggataacgactacgatgaacctgaagcctctctctggatcagatagagcatggatgtggttagccagtgatttctctgatggtgatgccaaactagagcagttggcagcaaaatttaaaacaccagagctggctgaagaattcaagcagaaatttgaggaatgccagcggcttctgttagacataccacttcaaactccccataaacttgtagatactggcagagctgccaagttaatacagagagctgaagaaatgaagagtggactgaaagatttcaaaacatttttgacaaatgatcaaacaaaagtcactgaggaagaaaataagggttcaggtacaggtgcggccggtgcctcagacacaacaataaaacccaatcctgaaaacactgggcccacattagaatgggataactatgatttaagggaagatgctttggatgatagtgtcagtagtagctcagtacatgcttctccattggcaagtagccctgtgagaaaaaatcttttccgttttggtgagtcaacaacaggatttaacttcagttttaaatctgctttgagtccatctaagtctcctgccaagttgaatcagagtgggacttcagttggcactgatgaagaatctgatgttactcaagaagaagagagagatggacagtactttgaacctgttgttcctttacctgatctagttgaagtatccagtggtgaggaaaatgaacaagttgtttttagtcacagggcaaaactctacagatatgataaagatgttggtcaatggaaagaaaggggcattggtgatataaagattttacagaattatgataataagcaagttcgtatagtgatgagaagggaccaagtattaaaactttgtgccaatcacagaataactccagacatgactttgcaaaatatgaaagggacagaaagagtatggttgtggactgcatgtgattttgcagatggagaaagaaaagtagagcatttagctgttcgttttaaactacaggatgttgcagactcgtttaagaaaatttttgatgaagcaaaaacagcccaggaaaaagattctttgataacacctcatgtttctcggtcaagcactcccagagagtcaccatgtggcaaaattgctgtagctgtattagaagaaaccacaagagagaggacagatgttattcagggtgatgatgtagcagatgcaacttcagaagttgaagtgtctagcacatctgaaacaacaccaaaagcagtggtttctcctccaaagtttgtatttggttcagagtctgttaaaagcatttttagtagtgaaaaatcaaaaccatttgcattcggcaacagttcagccactgggtctttgtttggatttagttttaatgcacctttgaaaagtaacaatagtgaaactagttcagtagcccagagtggatctgaaagcaaagtggaacctaaaaaatgtgaactgtcaaagaactctgatatcgaacagtcttcagatagcaaagtcaaaaatctctttgcttcctttccaacggaagaatcttcaatcaactacacatttaaaacaccagaaaaggcaaaagagaagaaaaaacctgaagattctccctcagatgatgatgttctcattgtatatgaactaactccaaccgctgagcagaaagcccttgcaaccaaacttaaacttcctccaactttcttctgctacaagaatagaccagattatgttagtgaagaagaggaggatgatgaagatttcgaaacagctgtcaagaaacttaatggaaaactatatttggatggctcagaaaaatgtagacccttggaagaaaatacagcagataatgagaaagaatgtattattgtttgggaaaagaaaccaacagttgaagagaaggcaaaagcagatacgttaaaacttccacctacatttttttgtggagtctgtagtgatactgatgaagacaatggaaatggggaagactttcaatcagagcttcaaaaagttcaggaagctcaaaaatctcagacagaagaaataactagcacaactgacagtgtatatacaggtgggactgaagtgatggtaccttctttctgtaaatctgaagaacctgattctattaccaaatccattagttcaccatctgtttcctctgaaactatggacaaacctgtagatttgtcaactagaaaggaaattgatacagattctacaagccaaggggaaagcaagatagtttcatttggatttggaagtagcacagggctctcatttgcagacttggcttccagtaattctggagattttgcttttggttctaaagataaaaatttccaatgggcaaatactggagcagctgtgtttggaacacagtcagtcggaacccagtcagccggtaaagttggtgaagatgaagatggtagtgatgaagaagtagttcataatgaagatatccattttgaaccaatagtgtcactaccagaggtagaagtaaaatctggagaagaagatgaagaaattttgtttaaagagagagccaaactttatagatgggatcgggatgtcagtcagtggaaggagcgcggtgttggagatataaagattctttggcatacaatgaagaattattaccggatcctaatgagaagagaccaggtttttaaagtgtgtgcaaaccacgttattactaaaacaatggaattaaagcccttaaatgtttcaaataatgctttagtttggactgcctcagattatgctgatggagaagcaaaagtagaacagcttgcagtgagatttaaaactaaagaagtagctgattgtttcaagaaaacatttgaagaatgtcagcagaatttaatgaaactccagaaaggacatgtatcactggcagcagaattatcaaaggagaccaatcctgtggtgttttttgatgtttgtgcggacggtgaacctctagggcggataactatggaattattttcaaacattgttcctcggactgctgagaacttcagagcactatgcactggagagaaaggctttggtttcaagaattccatttttcacagagtaattccagattttgtttgccaaggaggagatatcaccaaacatgatggaacaggcggacagtccatttatggagacaaatttgaagatgaaaattttgatgtgaaacatactggtcctggtttactatccatggccaatcaaggccagaataccaataattctcaatttgttataacactgaagaaagcagaacatttggactttaagcatgtagtatttgggtttgttaaggatggcatggatactgtgaaaaagattgaatcatttggttctcccaaagggtctgtttgtcgaagaataactatcacagaatgtggacagatataaaatcattgttgttcatagaaaatttcatctgtataagcagttggattgaagcttagctattacaatttgatagttatgttcagcttttgaaaatggacgtttccgatttacaaatgtaaaattgcagcttatagctgttgtcactttttaatgtgttataattgaccttgcatggtgtgaaataaaagtttaaacactggtgta

SEQ ID NO: 37261 - DNA, 10692 bp, Homo sapiens
acacagtggtcctccgccggctacggcgctgcgtcactggtttgcaggcgctttcctcttggaagtggcgactgctgcgggcctgagcgctggtctcacgcgcctcgggagccaggttggcggcgcgatgaggcgcagcaaggctgacgtggagcggtacatcgcctcggtgcagggctccaccccgtcgcctcgacagaagtcaatgaaaggattctattttgcaaagctgtattatgaagctaaagaatatgatcttgctaaaaaatacatatgtacttacattaatgtgcaagagagggatcccaaagctcacagatttctgggtcttctttatgaattggaagaaaacacagacaaagccgttgaatgttacaggcgttcagtggaattaaacccaacacaaaaagatcttgtgttgaagattgcagaattgctttgtaaaaatgatgttactgatggaagagcaaaatactggcttgaaagagcagccaaacttttcccaggaagtcctgcaatttataaactaaaggaacagcttctagattgtgaaggtgaagatggatggaataaactttttgacttgattcagtcagaactttatgtaagacctgatgacgtccatgtgaacatccggctagtggaggtgtatcgctcaactaaaagattgaaggatgctgtggcccactgccatgaggcagagaggaacatagctttgcgttcaagtttagaatggaattcgtgtgttgtacagacccttaaggaatatctggagtctttacagtgtttggagtctgataaaagtgactggcgagcaaccaatacagacttactgctggcctatgctaatcttatgcttcttacgctttccactagagatgtgcaggaaagtagagaattactgcaaagttttgatagtgctcttcagtctgtgaaatctttgggtggaaatgatgaactgtcagctactttcttagaaatgaaaggacatttctacatgcatgctggttctctgcttttgaagatgggtcagcatagtagtaatgttcaatggcgagctctttctgagctggctgcattgtgctatctcatagcatttcaggttccaagaccaaagattaaattaataaaaggtgaagctggacaaaatctgctggaaatgatggcctgtgaccgactgagccaatcagggcacatgttgctaaacttaagtcgtggcaagcaagattttttaaaagagattgttgaaacttttgccaacaaaagcgggcagtctgcattatatgatgctctgttttctagtcagtcacctaaggatacatcttttcttggtagcgatgatattggaaacattgatgtacgagaaccagagcttgaagatttgactagatacgatgttggtgctattcgagcacataatggtagtcttcagcaccttacttggcttggcttacagtggaattcattgcctgctttacctggaatccgaaaatggctaaaacagcttttccatcatttgccccatgaaacctcaaggcttgaaacaaatgcacctgaatcaatatgtattttagatcttgaagtatttctccttggagtagtatataccagccacttacaattaaaggagaaatgtaattctcaccacagctcctatcagccgttatgcctgccccttcctgtgtgtaaacagctttgtacagaaagacaaaaatcttggtgggatgcggtttgtactctgattcacagaaaagcagtacctggaaacgtagcaaaattgagacttctagttcagcatgaaataaacactctaagagcccaggaaaaacatggccttcaacctgctctgcttgtacattgggcagaatgccttcagaaaacgggcagcggtcttaattctttttatgatcaacgagaatacatagggagaagtgttcattattggaagaaagttttgccattgttgaagataataaaaaagaagaacagtattcctgaacctattgatcctctgtttaaacattttcatagtgtagacattcaggcatcagaaattgttgaatatgaagaagacgcacacataacttttgctatattggatgcagtaaatggaaatatagaagatgctgtgactgcttttgaatctataaaaagtgttgtttcttattggaatcttgcactgatttttcacaggaaggcagaagacattgaaaatgatgccctttctcctgaagaacaagaagaatgcaaaaattatctgagaaagaccagggactacctaataaagattatagatgacagtgattcaaatctttcagtggtcaagaaattgcctgtgcccctggagtctgtaaaagagatgcttaattcagtcatgcaggaactcgaagactatagtgaaggaggtcctctctataaaaatggttctttgcgaaatgcagattcagaaataaaacattctacaccgtctcctaccagatattcactatcaccaagtaaaagttacaagtattctcccaaaacaccacctcgatgggcagaagatcagaattctttactgaaaatgatttgccaacaagtagaggccattaagaaagaaatgcaggagttgaaactaaatagcagtaactcagcatcccctcatcgttggcccacagagaattatggaccagactcggtgcctgatggatatcaggggtcacagacatttcatggggctccactaacagttgcaactactggcccttcagtatattatagtcagtcaccagcatataattcccagtatcttctcagaccagcagctaatgttactcccacaaagggcccagtctatggcatgaataggcttccaccccaacagcatatttatgcctatccgcaacagatgcacacaccgccagtgcaaagctcatctgcttgtatgttctctcaggagatgtatggtcctcctgcattgcgttttgagtctcctgcaacgggaattctatcgcccaggggtgatgattactttaattacaatgttcaacagacaagcacaaatccacctttgccagaaccaggatatttcacaaaacctccgattgcagctcatgcttcaagatctgcagaatctaagactatagaatttgggaaaactaattttgttcagcccatgccgggtgaaggattaaggccatctttgccaacacaagcacacacaacacagccaactccttttaaatttaactcaaatttcaaatcaaatgatggtgacttcacgttttcctcaccacaggttgtgacacagccccctcctgcagcttacagtaacagtgaaagccttttaggtctcctgacttcagataaacccttgcaaggagatggctatagtggagccaaaccaattcctggtggtcaaaccattgggcctcgaaatacattcaattttggaagcaaaaatgtgtctggaatttcatttacagaaaacatggggtcgagtcagcaaaagaattctggttttcggcgaagtgatgatatgtttactttccatggtccagggaaatcagtatttggaacacccactttagagacagcaaacaagaatcatgagacagatggaggaagtgcccatggggatgatgatgatgacggtcctcactttgagcctgtagtacctcttcctgataagattgaagtaaaaactggtgaggaagatgaagaagaattcttttgcaaccgcgcgaaattgtttcgtttcgatgtagaatccaaagaatggaaagaacgtgggattggcaatgtaaaaatactgaggcataaaacatctggtaaaattcgccttctaatgagacgagagcaagtattgaaaatctgtgcaaatcattacatcagtccagatatgaaattgacaccaaatgctggatcagacagatcttttgtatggcatgcccttgattatgcagatgagttgccaaaaccagaacaacttgctattaggttcaaaactcctgaggaagcagcactttttaaatgcaagtttgaagaagcccagagcattttaaaagccccaggaacaaatgtagccatggcgtcaaatcaggctgtcagaattgtaaaagaacccacaagtcatgataacaaggatatttgcaaatctgatgctggaaacctgaattttgaatttcaggttgcaaagaaagaagggtcttggtggcattgtaacagctgctcattaaagaatgcttcaactgctaagaaatgtgtatcatgccaaaatctaaacccaagcaataaagagctcgttggcccaccattagctgaaactgtttttactcctaaaaccagcccagagaatgttcaagatcgatttgcattggtgactccaaagaaagaaggtcactgggattgtagtatttgtttagtaagaaatgaacctactgtatctaggtgcattgcgtgtcagaatacaaaatctgctaacaaaagtggatcttcatttgttcatcaagcttcatttaaatttggccagggagatcttcctaaacctattaacagtgatttcagatctgttttttctacaaaggaaggacagtgggattgcagtgcatgtttggtacaaaatgaggggagctctacaaaatgtgctgcttgtcagaatccgagaaaacagagtctacctgctacttctattccaacacctgcctcttttaagtttggtacttcagagacaagtaaaactctaaaaagtggatttgaagacatgtttgctaagaaggaaggacagtgggattgcagttcatgcttagtgcgaaatgaagcaaatgctacaagatgtgttgcttgtcagaatccggataaaccaagtccatctacttctgttccagctcctgcctcttttaagtttggtacttcagagacaagcaaggctccaaagagcggatttgagggaatgttcactaagaaggagggacagtgggattgcagtgtgtgcttagtaagaaatgaagccagtgctaccaaatgtattgcttgtcagaatccaggtaaacaaaatcaaactacttctgcagtttcaacacctgcctcttcagagacaagcaaggctccaaagagcggatttgagggaatgttcactaagaaggagggacagtgggattgcagtgtgtgcttagtaagaaatgaagccagtgctaccaaatgtattgcttgtcagaatccaggtaaacaaaatcaaactacttctgcagtttcaacacctgcctcttcagagacaagcaaggctccaaagagcggatttgagggaatgttcactaagaaggaaggacagtgggattgcagtgtgtgcttagtaagaaatgaagccagtgctaccaaatgtattgcttgtcagtgtccaagtaaacaaaatcaaacaactgcaatttcaacacctgcctcttcggagataagcaaggctccaaagagtggatttgaaggaatgttcatcaggaaaggacagtgggattgtagtgtttgctgtgtacaaaatgagagttcttccttaaaatgtgtggcttgtgatgcctctaaaccaactcataaacctattgcagaagctccttcagctttcacactgggctcagaaatgaagttgcatgactcttctggaagtcaggtgggaacaggatttaaaagtaatttctcagaaaaagcttctaagtttggcaatacagagcaaggattcaaatttgggcatgtggatcaagaaaattcaccttcatttatgtttcagggttcttctaatacagaatttaagtcaaccaaagaaggattttccatccctgtgtctgctgatggatttaaatttggcatttcggaaccaggaaatcaagaaaagaaaagtgaaaagcctcttgaaaatggtactggcttccaggctcaggatattagtggccagaagaatggccgtggtgtgatttttggccaaacaagtagcacttttacatttgcagatcttgcaaaatcaacttcaggagaaggatttcagtttggcaaaaaagaccccaatttcaagggattttcaggtgctggagaaaaattattctcatcacaatacggtaaaatggccaataaagcaaacacttccggtgactttgagaaagatgatgatgcctataagactgaggacagcgatgacatccattttgaaccagtagttcaaatgcccgaaaaagtagaacttgtaacaggagaagaagatgaaaaagttctgtattcacagcgggtaaaactatttagatttgatgctgaggtaagtcagtggaaagaaaggggcttggggaacttaaaaattctcaaaaacgaggtcaatggcaaactaagaatgctgatgcgaagagaacaagtactaaaagtgtgtgctaatcattggataacgactacgatgaacctgaagcctctctctggatcagatagagcatggatgtggttagccagtgatttctctgatggtgatgccaaactagagcagttggcagcaaaatttaaaacaccagagctggctgaagaattcaagcagaaatttgaggaatgccagcggcttctgttagacataccacttcaaactccccataaacttgtagatactggcagagctgccaagttaatacagagagctgaagaaatgaagagtggactgaaagatttcaaaacatttttgacaaatgatcaaacaaaagtcactgaggaagaaaataagggttcaggtacaggtgcggccggtgcctcagacacaacaataaaacccaatcctgaaaacactgggcccacattagaatgggataactatgatttaagggaagatgctttggatgatagtgtcagtagtagctcagtacatgcttctccattggcaagtagccctgtgagaaaaaatcttttccgttttggtgagtcaacaacaggatttaacttcagttttaaatctgctttgagtccatctaagtctcctgccaagttgaatcagagtgggacttcagttggcactgatgaagaatctgatgttactcaagaagaagagagagatggacagtactttgaacctgttgttcctttacctgatctagttgaagtatccagtggtgaggaaaatgaacaagttgtttttagtcacagggcaaaactctacagatatgataaagatgttggtcaatggaaagaaaggggcattggtgatataaagattttacagaattatgataataagcaagttcgtatagtgatgagaagggaccaagtattaaaactttgtgccaatcacagaataactccagacatgactttgcaaaatatgaaagggacagaaagagtatggttgtggactgcatgtgattttgcagatggagaaagaaaagtagagcatttagctgttcgttttaaactacaggatgttgcagactcgtttaagaaaatttttgatgaagcaaaaacagcccaggaaaaagattctttgataacacctcatgtttctcggtcaagcactcccagagagtcaccatgtggcaaaattgctgtagctgtattagaagaaaccacaagagagaggacagatgttattcagggtgatgatgtagcagatgcaacttcagaagttgaagtgtctagcacatctgaaacaacaccaaaagcagtggtttctcctccaaagtttgtatttggttcagagtctgttaaaagcatttttagtagtgaaaaatcaaaaccatttgcattcggcaacagttcagccactgggtctttgtttggatttagttttaatgcacctttgaaaagtaacaatagtgaaactagttcagtagcccagagtggatctgaaagcaaagtggaacctaaaaaatgtgaactgtcaaagaactctgatatcgaacagtcttcagatagcaaagtcaaaaatctctttgcttcctttccaacggaagaatcttcaatcaactacacatttaaaacaccagaaaaggcaaaagagaagaaaaaacctgaagattctccctcagatgatgatgttctcattgtatatgaactaactccaaccgctgagcagaaagcccttgcaaccaaacttaaacttcctccaactttcttctgctacaagaatagaccagattatgttagtgaagaagaggaggatgatgaagatttcgaaacagctgtcaagaaacttaatggaaaactatatttggatggctcagaaaaatgtagacccttggaagaaaatacagcagataatgagaaagaatgtattattgtttgggaaaagaaaccaacagttgaagagaaggcaaaagcagatacgttaaaacttccacctacatttttttgtggagtctgtagtgatactgatgaagacaatggaaatggggaagactttcaatcagagcttcaaaaagttcaggaagctcaaaaatctcagacagaagaaataactagcacaactgacagtgtatatacaggtgggactgaagtgatggtaccttctttctgtaaatctgaagaacctgattctattaccaaatccattagttcaccatctgtttcctctgaaactatggacaaacctgtagatttgtcaactagaaaggaaattgatacagattctacaagccaaggggaaagcaagatagtttcatttggatttggaagtagcacagggctctcatttgcagacttggcttccagtaattctggagattttgcttttggttctaaagataaaaatttccaatgggcaaatactggagcagctgtgtttggaacacagtcagtcggaacccagtcagccggtaaagttggtgaagatgaagatggtagtgatgaagaagtagttcataatgaagatatccattttgaaccaatagtgtcactaccagaggtagaagtaaaatctggagaagaagatgaagaaattttgtttaaagagagagccaaactttatagatgggatcgggatgtcagtcagtggaaggagcgcggtgttggagatataaagattctttggcatacaatgaagaattattaccggatcctaatgagaagagaccaggtttttaaagtgtgtgcaaaccacgttattactaaaacaatggaattaaagcccttaaatgtttcaaataatgctttagtttggactgcctcagattatgctgatggagaagcaaaagtagaacagcttgcagtgagatttaaaactaaagaagtagctgattgtttcaagaaaacatttgaagaatgtcagcagaatttaatgaaactccagaaaggacatgtatcactggcagcagaattatcaaaggagaccaatcctgtggtgttttttgatgtttgtgcggacggtgaacctctagggcggataactatggaattattttcaaacattgttcctcggactgctgagaacttcagagcactatgcactggagagaaaggctttggtttcaagaattccatttttcacagagtaattccagattttgtttgccaaggaggagatatcaccaaacatgatggaacaggcggacagtccatttatggagacaaatttgaagatgaaaattttgatgtgaaacatactggtcctggtttactatccatggccaatcaaggccagaataccaataattctcaatttgttataacactgaagaaagcagaacatttggactttaagcatgtagtatttgggtttgttaaggatggcatggatactgtgaaaaagattgaatcatttggttctcccaaagggtctgtttgtcgaagaataactatcacagaatgtggacagatataaaatcattgttgttcatagaaaatttcatctgtataagcagttggattgaagcttagctattacaatttgatagttatgttcagcttttgaaaatggacgtttccgatttacaaatgtaaaattgcagcttatagctgttgtcactttttaatgtgttataattgaccttgcatggtgtgaaataaaagtttaaacactggtgtatttcaggtgtacttgtgtttatgtactcctgacgtattaaaatggaataatactaatcttgttaaaagcaatagacctcaaactattgaaggaatatgatatatgcaatttaattttaattccttttaagatatttggacttcctgcatggatatacttaccatttgaataaagggaccacaacttggataatttaattttaggtttgaaatatatttggtaatcttaactattggtgtactcatttatgcatagagactcgtttatgaatgggtagagccacagaacgtatagagttaaccaaagtgctcttctctagaatctttacacctcctgtgtggttacaagttaactttgtaagtagcgtaccttccttccttaaaatatctagcttcctgtgccctttcatagatattcgattaatttttacattttaaacaagttgactatttcctttaggggttttgtttcaaacttttctgtcatctgtctctactacctcagaaactgcagcttggttctgatgatagaaattgaatttttccttgtagttattgtgataaagtatgaatatttttagaaagtctataccatgttctttcgttaaagatttgctttatacaagattgttgcagtacctttttctggtaaattttgtagcagaaataaaatgacaattcctaaga

SEQ ID NO: 37262 - DNA, 948 bp, Homo sapiens
taggctaaggtacgaggcgggggggttattactaaaacaatggaattaaagcccttaaatgtttcaaataatgctttagtttggactgcctcagattatgctgatggagaagcaaaagtagaacagcttgcagtgagatttaaaactaaagaagtagctgattgtttcaagaaaacatttgaagaatgtcagcagaatttaatgaaactccagaaaggacatgtatcactggcagcagaattatcaaaggagaccaatcctgtggtgttttttgatgtttgtgcggacggtgaacctctagggcggataactatggaattattttcaaacattgttcctcggactgctgagaacttcagagcactatgcactggagagaaaggctttggtttcaagaattccatttttcacagagtaattccagattttgtttgccaaggaggagatatcaccaaacatgatggaacaggcggacagtccatttatggagacaaatttgaagatgaaaattttgatgtgaaacatactggtcctggtttactatccatggccaatcaaggccagaataccaataattctcaatttgttataacactgaagaaagcagaacatttggactttaagcatgtagtatttgggtttgttaaggatggcatggatactgtgaaaaagattgaatcatttggttctcccaaagggtctgtttgtcgaagaataactatcacagaatgtggacagatataaaatcattgttgttcatagaaaatttcatctgtataagcagttggattgaagcttagctattacaatttgatagttatgttcagcttttgaaaatggacgtttccgatttacaaatgtaaaattgcagcttatagctgttgtcactttttaatgtgttataattgaccttgcatggtgtgaaataaaagtttaaacactggtgta

SEQ ID NO: 37263 - DNA, 688 bp, Homo sapiens
  misc_feature (72)..(72): n is a, c, g, or t
  misc_feature (139)..(139): n is a, c, g, or t
ccggtgtagcagtagccagcaacacaaagtggtgttgatgcttatgcagaaacgacattcttcctctatgcnaatggtgatgttggtcagctcacagctattcagcagattgctttcagcaacagaaaagaaagaaaanctggagtgtcttcatcctggtctggaaagcaaacaatgaagcccactagaaactgtggtcggcctcgtgccgaattcggcacgagatggagacaaatttgaagatgaaaattttgatgtgaaacatactggtcctggtttactatccatggccaatcaaggccagaataccaataattctcaatttgttataacactgaagaaagcagaacatttggactttaagcatgtagtatttgggtttgttaaggatggcatggatactgtgaaaaagattgaatcatttggttctcccaaagggtctgtttgtcgaagaataactatcacagaatgtggacagatataaaatcattgttgttcatagaaaatttcatctgtataagcagttggattgaagcttagctattacaatttgatagttatgttcagcttttgaaaatggacgtttccgatttacaaatgtaaaattgcagcttatagctgttgtcactttttaatgtgttataattgaccttgcatggtgtgaaataaaagtttaaacactggtgta

SEQ ID NO: 37264 - DNA, 949 bp, Homo sapiens
acagagtaattccagaaaccaaagcctttctctccagtgcatatgcactggagagaaaggctttggtttcaagaattccatttttcacagagtaattccagattttgtttgccaaggaggagatatcaccaaacatgatggaacaggcggacagtccatttatggagacaaatttgaagatgaaaattttgatgtgaaacatactggtcctggtttactatccatggccaatcaaggccagaataccaataattctcaatttgttataacactgaagaaagcagaacatttggactttaagcatgtagtatttgggtttgttaaggatggcatggatactgtgaaaaagattgaatcatttggttctcccaaagggtctgtttgtcgaagaataactatcacagaatgtggacagatataaaatcattgttgttcatagaaaatttcatctgtataagcagttggattgaagcttagctattacaatttgatagttatgttcagcttttgaaaatggacgtttccgatttacaaatgtaaaattgcagcttatagctgttgtcactttttaatgtgttataattgaccttgcatggtgtgaaataaaagtttaaacactggtgtaaaaaaaaaaaaaaaaaaaatcggggattatatggggggggggaaaaaagaggtacggaaggcgcatggtcataaggtgttccgggaccaatttcgtggtccaagggtgaaatcgggcggctccccaaggggagcgtaaaattcgaaagcaggtaactgtagacttgtgcggaacacgggaagacaggaacaggaaccaccagcacacaaggaacaaacagcaacaacataccgacaccaacagagaagccaagcatccgagaacaagagcacgacacagccgcacgcgagacgaacagcacgagacagcacagaaaaaaacaac

SEQ ID NO: 37265 - DNA, 795 bp, Homo sapiens
cataaggaccttgttgctgaggattgactggggaggtctaggcttctggtggtgactcagatggacaggaatgtgtggcattagtcctggtagtctctgaagagagtatgagctactgcagtaatcacagatgcttttcttcacatacagttcttgaggcttagtttctgggttgtaagcaactctcagaagggatgaataaggtatataggatggtgtttttggtggcatcatcataaaactagacatagtggaatggtgctctttgggagcatgacttgtttaaaattgcacaagtgttactctaataatttttctttttcccctctaaataggaacagcttctagattgtgaaggtgaagatggatggaataaactttttgacttgattcagtcagaactttatgtaagacctgatgacgtccatgtgaacatccggctagtggaggtgtatcgctcaactaaaagattgaaggatgctgtggcccactgccatgaggcagagaggaacatagctttgcgttcaagtttagaatggaattcggtctgtttgtcgaagaataactatcacagaatgtggacagatataaaatcattgttgttcatagaaaatttcatctgtataagcagttggattgaagcttagctattacaatttgatagttatgttcagcttttgaaaatggacgtttccgatttacaaatgtaaaattgcagcttatagctgttgtcactttttaatgtgttataattgaccttgcatggtgtgaaataaaagtttaaacactggtgta

SEQ ID NO: 37266 - DNA, 9809 bp, Homo sapiens
cataaggaccttgttgctgaggattgactggggaggtctaggcttctggtggtgactcagatggacaggaatgtgtggcattagtcctggtagtctctgaagagagtatgagctactgcagtaatcacagatgcttttcttcacatacagttcttgaggcttagtttctgggttgtaagcaactctcagaagggatgaataaggtatataggatggtgtttttggtggcatcatcataaaactagacatagtggaatggtgctctttgggagcatgacttgtttaaaattgcacaagtgttactctaataatttttctttttcccctctaaataggaacagcttctagattgtgaaggtgaagatggatggaataaactttttgacttgattcagtcagaactttatgtaagacctgatgacgtccatgtgaacatccggctagtggaggtgtatcgctcaactaaaagattgaaggatgctgtggcccactgccatgaggcagagaggaacatagctttgcgttcaagtttagaatggaattcgtgtgttgtacagacccttaaggaatatctggagtctttacagtgtttggagtctgataaaagtgactggcgagcaaccaatacagacttactgctggcctatgctaatcttatgcttcttacgctttccactagagatgtgcaggaaagtagagaattactgcaaagttttgatagtgctcttcagtctgtgaaatctttgggtggaaatgatgaactgtcagctactttcttagaaatgaaaggacatttctacatgcatgctggttctctgcttttgaagatgggtcagcatagtagtaatgttcaatggcgagctctttctgagctggctgcattgtgctatctcatagcatttcaggttccaagaccaaagattaaattaataaaaggtgaagctggacaaaatctgctggaaatgatggcctgtgaccgactgagccaatcagggcacatgttgctaaacttaagtcgtggcaagcaagattttttaaaagagattgttgaaacttttgccaacaaaagcgggcagtctgcattatatgatgctctgttttctagtcagtcacctaaggatacatcttttcttggtagcgatgatattggaaacattgatgtacgagaaccagagcttgaagatttgactagatacgatgttggtgctattcgagcacataatggtagtcttcagcaccttacttggcttggcttacagtggaattcattgcctgctttacctggaatccgaaaatggctaaaacagcttttccatcatttgccccatgaaacctcaaggcttgaaacaaatgcacctgaatcaatatgtattttagatcttgaagtatttctccttggagtagtatataccagccacttacaattaaaggagaaatgtaattctcaccacagctcctatcagccgttatgcctgccccttcctgtgtgtaaacagctttgtacagaaagacaaaaatcttggtgggatgcggtttgtactctgattcacagaaaagcagtacctggaaacgtagcaaaattgagacttctagttcagcatgaaataaacactctaagagcccaggaaaaacatggccttcaacctgctctgcttgtacattgggcagaatgccttcagaaaacgggcagcggtcttaattctttttatgatcaacgagaatacatagggagaagtgttcattattggaagaaagttttgccattgttgaagataataaaaaagaagaacagtattcctgaacctattgatcctctgtttaaacattttcatagtgtagacattcaggcatcagaaattgttgaatatgaagaagacgcacacataacttttgctatattggatgcagtaaatggaaatatagaagatgctgtgactgcttttgaatctataaaaagtgttgtttcttattggaatcttgcactgatttttcacaggaaggcagaagacattgaaaatgatgccctttctcctgaagaacaagaagaatgcaaaaattatctgagaaagaccagggactacctaataaagattatagatgacagtgattcaaatctttcagtggtcaagaaattgcctgtgcccctggagtctgtaaaagagatgcttaattcagtcatgcaggaactcgaagactatagtgaaggaggtcctctctataaaaatggttctttgcgaaatgcagattcagaaataaaacattctacaccgtctcctaccagatattcactatcaccaagtaaaagttacaagtattctcccaaaacaccacctcgatgggcagaagatcagaattctttactgaaaatgatttgccaacaagtagaggccattaagaaagaaatgcaggagttgaaactaaatagcagtaactcagcatcccctcatcgttggcccacagagaattatggaccagactcggtgcctgatggatatcaggggtcacagacatttcatggggctccactaacagttgcaactactggcccttcagtatattatagtcagtcaccagcatataattcccagtatcttctcagaccagcagctaatgttactcccacaaagggcccagtctatggcatgaataggcttccaccccaacagcatatttatgcctatccgcaacagatgcacacaccgccagtgcaaagctcatctgcttgtatgttctctcaggagatgtatggtcctcctgcattgcgttttgagtctcctgcaacgggaattctatcgcccaggggtgatgattactttaattacaatgttcaacagacaagcacaaatccacctttgccagaaccaggatatttcacaaaacctccgattgcagctcatgcttcaagatctgcagaatctaagactatagaatttgggaaaactaattttgttcagcccatgccgggtgaaggattaaggccatctttgccaacacaagcacacacaacacagccaactccttttaaatttaactcaaatttcaaatcaaatgatggtgacttcacgttttcctcaccacaggttgtgacacagccccctcctgcagcttacagtaacagtgaaagccttttaggtctcctgacttcagataaacccttgcaaggagatggctatagtggagccaaaccaattcctggtggtcaaaccattgggcctcgaaatacattcaattttggaagcaaaaatgtgtctggaatttcatttacagaaaacatggggtcgagtcagcaaaagaattctggttttcggcgaagtgatgatatgtttactttccatggtccagggaaatcagtatttggaacacccactttagagacagcaaacaagaatcatgagacagatggaggaagtgcccatggggatgatgatgatgacggtcctcactttgagcctgtagtacctcttcctgataagattgaagtaaaaactggtgaggaagatgaagaagaattcttttgcaaccgcgcgaaattgtttcgtttcgatgtagaatccaaagaatggaaagaacgtgggattggcaatgtaaaaatactgaggcataaaacatctggtaaaattcgccttctaatgagacgagagcaagtattgaaaatctgtgcaaatcattacatcagtccagatatgaaattgacaccaaatgctggatcagacagatcttttgtatggcatgcccttgattatgcagatgagttgccaaaaccagaacaacttgctattaggttcaaaactcctgaggaagcagcactttttaaatgcaagtttgaagaagcccagagcattttaaaagccccaggaacaaatgtagccatggcgtcaaatcaggctgtcagaattgtaaaagaacccacaagtcatgataacaaggatatttgcaaatctgatgctggaaacctgaattttgaatttcaggttgcaaagaaagaagggtcttggtggcattgtaacagctgctcattaaagaatgcttcaactgctaagaaatgtgtatcatgccaaaatctaaacccaagcaataaagagctcgttggcccaccattagctgaaactgtttttactcctaaaaccagcccagagaatgttcaagatcgatttgcattggtgactccaaagaaagaaggtcactgggattgtagtatttgtttagtaagaaatgaacctactgtatctaggtgcattgcgtgtcagaatacaaaatctgctaacaaaagtggatcttcatttgttcatcaagcttcatttaaatttggccagggagatcttcctaaacctattaacagtgatttcagatctgttttttctacaaaggaaggacagtgggattgcagtgcatgtttggtacaaaatgaggggagctctacaaaatgtgctgcttgtcagaatccgagaaaacagagtctacctgctacttctattccaacacctgcctcttttaagtttggtacttcagagacaagtaaaactctaaaaagtggatttgaagacatgtttgctaagaaggaaggacagtgggattgcagttcatgcttagtgcgaaatgaagcaaatgctacaagatgtgttgcttgtcagaatccggataaaccaagtccatctacttctgttccagctcctgcctcttttaagtttggtacttcagagacaagcaaggctccaaagagcggatttgagggaatgttcactaagaaggagggacagtgggattgcagtgtgtgcttagtaagaaatgaagccagtgctaccaaatgtattgcttgtcagaatccaggtaaacaaaatcaaactacttctgcagtttcaacacctgcctcttcagagacaagcaaggctccaaagagcggatttgagggaatgttcactaagaaggagggacagtgggattgcagtgtgtgcttagtaagaaatgaagccagtgctaccaaatgtattgcttgtcagaatccaggtaaacaaaatcaaactacttctgcagtttcaacacctgcctcttcagagacaagcaaggctccaaagagcggatttgagggaatgttcactaagaaggaaggacagtgggattgcagtgtgtgcttagtaagaaatgaagccagtgctaccaaatgtattgcttgtcagtgtccaagtaaacaaaatcaaacaactgcaatttcaacacctgcctcttcggagataagcaaggctccaaagagtggatttgaaggaatgttcatcaggaaaggacagtgggattgtagtgtttgctgtgtacaaaatgagagttcttccttaaaatgtgtggcttgtgatgcctctaaaccaactcataaacctattgcagaagctccttcagctttcacactgggctcagaaatgaagttgcatgactcttctggaagtcaggtgggaacaggatttaaaagtaatttctcagaaaaagcttctaagtttggcaatacagagcaaggattcaaatttgggcatgtggatcaagaaaattcaccttcatttatgtttcagggttcttctaatacagaatttaagtcaaccaaagaaggattttccatccctgtgtctgctgatggatttaaatttggcatttcggaaccaggaaatcaagaaaagaaaagtgaaaagcctcttgaaaatggtactggcttccaggctcaggatattagtggccagaagaatggccgtggtgtgatttttggccaaacaagtagcacttttacatttgcagatcttgcaaaatcaacttcaggagaaggatttcagtttggcaaaaaagaccccaatttcaagggattttcaggtgctggagaaaaattattctcatcacaatacggtaaaatggccaataaagcaaacacttccggtgactttgagaaagatgatgatgcctataagactgaggacagcgatgacatccattttgaaccagtagttcaaatgcccgaaaaagtagaacttgtaacaggagaagaagatgaaaaagttctgtattcacagcgggtaaaactatttagatttgatgctgaggtaagtcagtggaaagaaaggggcttggggaacttaaaaattctcaaaaacgaggtcaatggcaaactaagaatgctgatgcgaagagaacaagtactaaaagtgtgtgctaatcattggataacgactacgatgaacctgaagcctctctctggatcagatagagcatggatgtggttagccagtgatttctctgatggtgatgccaaactagagcagttggcagcaaaatttaaaacaccagagctggctgaagaattcaagcagaaatttgaggaatgccagcggcttctgttagacataccacttcaaactccccataaacttgtagatactggcagagctgccaagttaatacagagagctgaagaaatgaagagtggactgaaagatttcaaaacatttttgacaaatgatcaaacaaaagtcactgaggaagaaaataagggttcaggtacaggtgcggccggtgcctcagacacaacaataaaacccaatcctgaaaacactgggcccacattagaatgggataactatgatttaagggaagatgctttggatgatagtgtcagtagtagctcagtacatgcttctccattggcaagtagccctgtgagaaaaaatcttttccgttttggtgagtcaacaacaggatttaacttcagttttaaatctgctttgagtccatctaagtctcctgccaagttgaatcagagtgggacttcagttggcactgatgaagaatctgatgttactcaagaagaagagagagatggacagtactttgaacctgttgttcctttacctgatctagttgaagtatccagtggtgaggaaaatgaacaagttgtttttagtcacagggcaaaactctacagatatgataaagatgttggtcaatggaaagaaaggggcattggtgatataaagattttacagaattatgataataagcaagttcgtatagtgatgagaagggaccaagtattaaaactttgtgccaatcacagaataactccagacatgactttgcaaaatatgaaagggacagaaagagtatggttgtggactgcatgtgattttgcagatggagaaagaaaagtagagcatttagctgttcgttttaaactacaggatgttgcagactcgtttaagaaaatttttgatgaagcaaaaacagcccaggaaaaagattctttgataacacctcatgtttctcggtcaagcactcccagagagtcaccatgtggcaaaattgctgtagctgtattagaagaaaccacaagagagaggacagatgttattcagggtgatgatgtagcagatgcaacttcagaagttgaagtgtctagcacatctgaaacaacaccaaaagcagtggtttctcctccaaagtttgtatttggttcagagtctgttaaaagcatttttagtagtgaaaaatcaaaaccatttgcattcggcaacagttcagccactgggtctttgtttggatttagttttaatgcacctttgaaaagtaacaatagtgaaactagttcagtagcccagagtggatctgaaagcaaagtggaacctaaaaaatgtgaactgtcaaagaactctgatatcgaacagtcttcagatagcaaagtcaaaaatctctttgcttcctttccaacggaagaatcttcaatcaactacacatttaaaacaccagaaaaggcaaaagagaagaaaaaacctgaagattctccctcagatgatgatgttctcattgtatatgaactaactccaaccgctgagcagaaagcccttgcaaccaaacttaaacttcctccaactttcttctgctacaagaatagaccagattatgttagtgaagaagaggaggatgatgaagatttcgaaacagctgtcaagaaacttaatggaaaactatatttggatggctcagaaaaatgtagacccttggaagaaaatacagcagataatgagaaagaatgtattattgtttgggaaaagaaaccaacagttgaagagaaggcaaaagcagatacgttaaaacttccacctacatttttttgtggagtctgtagtgatactgatgaagacaatggaaatggggaagactttcaatcagagcttcaaaaagttcaggaagctcaaaaatctcagacagaagaaataactagcacaactgacagtgtatatacaggtgggactgaagtgatggtaccttctttctgtaaatctgaagaacctgattctattaccaaatccattagttcaccatctgtttcctctgaaactatggacaaacctgtagatttgtcaactagaaaggaaattgatacagattctacaagccaaggggaaagcaagatagtttcatttggatttggaagtagcacagggctctcatttgcagacttggcttccagtaattctggagattttgcttttggttctaaagataaaaatttccaatgggcaaatactggagcagctgtgtttggaacacagtcagtcggaacccagtcagccggtaaagttggtgaagatgaagatggtagtgatgaagaagtagttcataatgaagatatccattttgaaccaatagtgtcactaccagaggtagaagtaaaatctggagaagaagatgaagaaattttgtttaaagagagagccaaactttatagatgggatcgggatgtcagtcagtggaaggagcgcggtgttggagatataaagattctttggcatacaatgaagaattattaccggatcctaatgagaagagaccaggtttttaaagtgtgtgcaaaccacgttattactaaaacaatggaattaaagcccttaaatgtttcaaataatgctttagtttggactgcctcagattatgctgatggagaagcaaaagtagaacagcttgcagtgagatttaaaactaaagaagtagctgattgtttcaagaaaacatttgaagaatgtcagcagaatttaatgaaactccagaaaggacatgtatcactggcagcagaattatcaaaggagaccaatcctgtggtgttttttgatgtttgtgcggacggtgaacctctagggcggataactatggaattattttcaaacattgttcctcggactgctgagaacttcagagcactatgcactggagagaaaggctttggtttcaagaattccatttttcacagagtaattccagattttgtttgccaaggaggagatatcaccaaacatgatggaacaggcggacagtccatttatggagacaaatttgaagatgaaaattttgatgtgaaacatactggtcctggtttactatccatggccaatcaaggccagaataccaataattctcaatttgttataacactgaagaaagcagaacatttggactttaagcatgtagtatttgggtttgttaaggatggcatggatactgtgaaaaagattgaatcatttggttctcccaaagggtctgtttgtcgaagaataactatcacagaatgtggacagatataaaatcattgttgttcatagaaaatttcatctgtataagcagttggattgaagcttagctattacaatttgatagttatgttcagcttttgaaaatggacgtttccgatttacaaatgtaaaattgcagcttatagctgttgtcactttttaatgtgttataattgaccttgcatggtgtgaaataaaagtttaaacactggtgta

SEQ ID NO: 37267 - DNA, 11721 bp, Homo sapiens
acacagtggtcctccgccggctacggcgctgcgtcactggtttgcaggcgctttcctcttggaagtggcgactgctgcgggcctgagcgctggtctcacgcgcctcgggagccaggttggcggcgcgatgaggcgcagcaaggctgacgtggagcggtacatcgcctcggtgcagggctccaccccgtcgcctcgacagaagtcaatgaaaggattctattttgcaaagctgtattatgaagctaaagaatatgatcttgctaaaaaatacatatgtacttacattaatgtgcaagagagggatcccaaagctcacagatttctgggtcttctttatgaattggaagaaaacacagacaaagccgttgaatgttacaggcgttcagtggaattaaacccaacacaaaaagatcttgtgttgaagattgcagaattgctttgtaaaaatgatgttactgatggaagagcaaaatactggcttgaaagagcagccaaacttttcccaggaagtcctgcaatttataaactaaaggaacagcttctagattgtgaaggtgaagatggatggaataaactttttgacttgattcagtcagaactttatgtaagacctgatgacgtccatgtgaacatccggctagtggaggtgtatcgctcaactaaaagattgaaggatgctgtggcccactgccatgaggcagagaggaacatagctttgcgttcaagtttagaatggaattcgtgtgttgtacagacccttaaggaatatctggagtctttacagtgtttggagtctgataaaagtgactggcgagcaaccaatacagacttactgctggcctatgctaatcttatgcttcttacgctttccactagagatgtgcaggaaagtagagaattactgcaaagttttgatagtgctcttcagtctgtgaaatctttgggtggaaatgatgaactgtcagctactttcttagaaatgaaaggacatttctacatgcatgctggttctctgcttttgaagatgggtcagcatagtagtaatgttcaatggcgagctctttctgagctggctgcattgtgctatctcatagcatttcaggttccaagaccaaagattaaattaataaaaggtgaagctggacaaaatctgctggaaatgatggcctgtgaccgactgagccaatcagggcacatgttgctaaacttaagtcgtggcaagcaagattttttaaaagagattgttgaaacttttgccaacaaaagcgggcagtctgcattatatgatgctctgttttctagtcagtcacctaaggatacatcttttcttggtagcgatgatattggaaacattgatgtacgagaaccagagcttgaagatttgactagatacgatgttggtgctattcgagcacataatggtagtcttcagcaccttacttggcttggcttacagtggaattcattgcctgctttacctggaatccgaaaatggctaaaacagcttttccatcatttgccccatgaaacctcaaggcttgaaacaaatgcacctgaatcaatatgtattttagatcttgaagtatttctccttggagtagtatataccagccacttacaattaaaggagaaatgtaattctcaccacagctcctatcagccgttatgcctgccccttcctgtgtgtaaacagctttgtacagaaagacaaaaatcttggtgggatgcggtttgtactctgattcacagaaaagcagtacctggaaacgtagcaaaattgagacttctagttcagcatgaaataaacactctaagagcccaggaaaaacatggccttcaacctgctctgcttgtacattgggcagaatgccttcagaaaacgggcagcggtcttaattctttttatgatcaacgagaatacatagggagaagtgttcattattggaagaaagttttgccattgttgaagataataaaaaagaagaacagtattcctgaacctattgatcctctgtttaaacattttcatagtgtagacattcaggcatcagaaattgttgaatatgaagaagacgcacacataacttttgctatattggatgcagtaaatggaaatatagaagatgctgtgactgcttttgaatctataaaaagtgttgtttcttattggaatcttgcactgatttttcacaggaaggcagaagacattgaaaatgatgccctttctcctgaagaacaagaagaatgcaaaaattatctgagaaagaccagggactacctaataaagattatagatgacagtgattcaaatctttcagtggtcaagaaattgcctgtgcccctggagtctgtaaaagagatgcttaattcagtcatgcaggaactcgaagactatagtgaaggaggtcctctctataaaaatggttctttgcgaaatgcagattcagaaataaaacattctacaccgtctcctaccagatattcactatcaccaagtaaaagttacaagtattctcccaaaacaccacctcgatgggcagaagatcagaattctttactgaaaatgatttgccaacaagtagaggccattaagaaagaaatgcaggagttgaaactaaatagcagtaactcagcatcccctcatcgttggcccacagagaattatggaccagactcggtgcctgatggatatcaggggtcacagacatttcatggggctccactaacagttgcaactactggcccttcagtatattatagtcagtcaccagcatataattcccagtatcttctcagaccagcagctaatgttactcccacaaagggcccagtctatggcatgaataggcttccaccccaacagcatatttatgcctatccgcaacagatgcacacaccgccagtgcaaagctcatctgcttgtatgttctctcaggagatgtatggtcctcctgcattgcgttttgagtctcctgcaacgggaattctatcgcccaggggtgatgattactttaattacaatgttcaacagacaagcacaaatccacctttgccagaaccaggatatttcacaaaacctccgattgcagctcatgcttcaagatctgcagaatctaagactatagaatttgggaaaactaattttgttcagcccatgccgggtgaaggattaaggccatctttgccaacacaagcacacacaacacagccaactccttttaaatttaactcaaatttcaaatcaaatgatggtgacttcacgttttcctcaccacaggttgtgacacagccccctcctgcagcttacagtaacagtgaaagccttttaggtctcctgacttcagataaacccttgcaaggagatggctatagtggagccaaaccaattcctggtggtcaaaccattgggcctcgaaatacattcaattttggaagcaaaaatgtgtctggaatttcatttacagaaaacatggggtcgagtcagcaaaagaattctggttttcggcgaagtgatgatatgtttactttccatggtccagggaaatcagtatttggaacacccactttagagacagcaaacaagaatcatgagacagatggaggaagtgcccatggggatgatgatgatgacggtcctcactttgagcctgtagtacctcttcctgataagattgaagtaaaaactggtgaggaagatgaagaagaattcttttgcaaccgcgcgaaattgtttcgtttcgatgtagaatccaaagaatggaaagaacgtgggattggcaatgtaaaaatactgaggcataaaacatctggtaaaattcgccttctaatgagacgagagcaagtattgaaaatctgtgcaaatcattacatcagtccagatatgaaattgacaccaaatgctggatcagacagatcttttgtatggcatgcccttgattatgcagatgagttgccaaaaccagaacaacttgctattaggttcaaaactcctgaggaagcagcactttttaaatgcaagtttgaagaagcccagagcattttaaaagccccaggaacaaatgtagccatggcgtcaaatcaggctgtcagaattgtaaaagaacccacaagtcatgataacaaggatatttgcaaatctgatgctggaaacctgaattttgaatttcaggttgcaaagaaagaagggtcttggtggcattgtaacagctgctcattaaagaatgcttcaactgctaagaaatgtgtatcatgccaaaatctaaacccaagcaataaagagctcgttggcccaccattagctgaaactgtttttactcctaaaaccagcccagagaatgttcaagatcgatttgcattggtgactccaaagaaagaaggtcactgggattgtagtatttgtttagtaagaaatgaacctactgtatctaggtgcattgcgtgtcagaatacaaaatctgctaacaaaagtggatcttcatttgttcatcaagcttcatttaaatttggccagggagatcttcctaaacctattaacagtgatttcagatctgttttttctacaaaggaaggacagtgggattgcagtgcatgtttggtacaaaatgaggggagctctacaaaatgtgctgcttgtcagaatccgagaaaacagagtctacctgctacttctattccaacacctgcctcttttaagtttggtacttcagagacaagtaaaactctaaaaagtggatttgaagacatgtttgctaagaaggaaggacagtgggattgcagttcatgcttagtgcgaaatgaagcaaatgctacaagatgtgttgcttgtcagaatccggataaaccaagtccatctacttctgttccagctcctgcctcttttaagtttggtacttcagagacaagcaaggctccaaagagcggatttgagggaatgttcactaagaaggagggacagtgggattgcagtgtgtgcttagtaagaaatgaagccagtgctaccaaatgtattgcttgtcagaatccaggtaaacaaaatcaaactacttctgcagtttcaacacctgcctcttcagagacaagcaaggctccaaagagcggatttgagggaatgttcactaagaaggagggacagtgggattgcagtgtgtgcttagtaagaaatgaagccagtgctaccaaatgtattgcttgtcagaatccaggtaaacaaaatcaaactacttctgcagtttcaacacctgcctcttcagagacaagcaaggctccaaagagcggatttgagggaatgttcactaagaaggaaggacagtgggattgcagtgtgtgcttagtaagaaatgaagccagtgctaccaaatgtattgcttgtcagtgtccaagtaaacaaaatcaaacaactgcaatttcaacacctgcctcttcggagataagcaaggctccaaagagtggatttgaaggaatgttcatcaggaaaggacagtgggattgtagtgtttgctgtgtacaaaatgagagttcttccttaaaatgtgtggcttgtgatgcctctaaaccaactcataaacctattgcagaagctccttcagctttcacactgggctcagaaatgaagttgcatgactcttctggaagtcaggtgggaacaggatttaaaagtaatttctcagaaaaagcttctaagtttggcaatacagagcaaggattcaaatttgggcatgtggatcaagaaaattcaccttcatttatgtttcagggttcttctaatacagaatttaagtcaaccaaagaaggattttccatccctgtgtctgctgatggatttaaatttggcatttcggaaccaggaaatcaagaaaagaaaagtgaaaagcctcttgaaaatggtactggcttccaggctcaggatattagtggccagaagaatggccgtggtgtgatttttggccaaacaagtagcacttttacatttgcagatcttgcaaaatcaacttcaggagaaggatttcagtttggcaaaaaagaccccaatttcaagggattttcaggtgctggagaaaaattattctcatcacaatacggtaaaatggccaataaagcaaacacttccggtgactttgagaaagatgatgatgcctataagactgaggacagcgatgacatccattttgaaccagtagttcaaatgcccgaaaaagtagaacttgtaacaggagaagaagatgaaaaagttctgtattcacagcgggtaaaactatttagatttgatgctgaggtaagtcagtggaaagaaaggggcttggggaacttaaaaattctcaaaaacgaggtcaatggcaaactaagaatgctgatgcgaagagaacaagtactaaaagtgtgtgctaatcattggataacgactacgatgaacctgaagcctctctctggatcagatagagcatggatgtggttagccagtgatttctctgatggtgatgccaaactagagcagttggcagcaaaatttaaaacaccagagctggctgaagaattcaagcagaaatttgaggaatgccagcggcttctgttagacataccacttcaaactccccataaacttgtagatactggcagagctgccaagttaatacagagagctgaagaaatgaagagtggactgaaagatttcaaaacatttttgacaaatgatcaaacaaaagtcactgaggaagaaaataagggttcaggtacaggtgcggccggtgcctcagacacaacaataaaacccaatcctgaaaacactgggcccacattagaatgggataactatgatttaagggaagatgctttggatgatagtgtcagtagtagctcagtacatgcttctccattggcaagtagccctgtgagaaaaaatcttttccgttttggtgagtcaacaacaggatttaacttcagttttaaatctgctttgagtccatctaagtctcctgccaagttgaatcagagtgggacttcagttggcactgatgaagaatctgatgttactcaagaagaagagagagatggacagtactttgaacctgttgttcctttacctgatctagttgaagtatccagtggtgaggaaaatgaacaagttgtttttagtcacagggcaaaactctacagatatgataaagatgttggtcaatggaaagaaaggggcattggtgatataaagattttacagaattatgataataagcaagttcgtatagtgatgagaagggaccaagtattaaaactttgtgccaatcacagaataactccagacatgactttgcaaaatatgaaagggacagaaagagtatggttgtggactgcatgtgattttgcagatggagaaagaaaagtagagcatttagctgttcgttttaaactacaggatgttgcagactcgtttaagaaaatttttgatgaagcaaaaacagcccaggaaaaagattctttgataacacctcatgtttctcggtcaagcactcccagagagtcaccatgtggcaaaattgctgtagctgtattagaagaaaccacaagagagaggacagatgttattcagggtgatgatgtagcagatgcaacttcagaagttgaagtgtctagcacatctgaaacaacaccaaaagcagtggtttctcctccaaagtttgtatttggttcagagtctgttaaaagcatttttagtagtgaaaaatcaaaaccatttgcattcggcaacagttcagccactgggtctttgtttggatttagttttaatgcacctttgaaaagtaacaatagtgaaactagttcagtagcccagagtggatctgaaagcaaagtggaacctaaaaaatgtgaactgtcaaagaactctgatatcgaacagtcttcagatagcaaagtcaaaaatctctttgcttcctttccaacggaagaatcttcaatcaactacacatttaaaacaccagaaaaggcaaaagagaagaaaaaacctgaagattctccctcagatgatgatgttctcattgtatatgaactaactccaaccgctgagcagaaagcccttgcaaccaaacttaaacttcctccaactttcttctgctacaagaatagaccagattatgttagtgaagaagaggaggatgatgaagatttcgaaacagctgtcaagaaacttaatggaaaactatatttggatggctcagaaaaatgtagacccttggaagaaaatacagcagataatgagaaagaatgtattattgtttgggaaaagaaaccaacagttgaagagaaggcaaaagcagatacgttaaaacttccacctacatttttttgtggagtctgtagtgatactgatgaagacaatggaaatggggaagactttcaatcagagcttcaaaaagttcaggaagctcaaaaatctcagacagaagaaataactagcacaactgacagtgtatatacaggtgggactgaagtgatggtaccttctttctgtaaatctgaagaacctgattctattaccaaatccattagttcaccatctgtttcctctgaaactatggacaaacctgtagatttgtcaactagaaaggaaattgatacagattctacaagccaaggggaaagcaagatagtttcatttggatttggaagtagcacagggctctcatttgcagacttggcttccagtaattctggagattttgcttttggttctaaagataaaaatttccaatgggcaaatactggagcagctgtgtttggaacacagtcagtcggaacccagtcagccggtaaagttggtgaagatgaagatggtagtgatgaagaagtagttcataatgaagatatccattttgaaccaatagtgtcactaccagaggtagaagtaaaatctggagaagaagatgaagaaattttgtttaaagagagagccaaactttatagatgggatcgggatgtcagtcagtggaaggagcgcggtgttggagatataaagattctttggcatacaatgaagaattattaccggatcctaatgagaagagaccaggtttttaaagtgtgtgcaaaccacgttattactaaaacaatggaattaaagcccttaaatgtttcaaataatgctttagtttggactgcctcagattatgctgatggagaagcaaaagtagaacagcttgcagtgagatttaaaactaaagaagtagctgattgtttcaagaaaacatttgaagaatgtcagcagaatttaatgaaactccagaaaggacatgtatcactggcagcagaattatcaaaggagaccaatcctgtggtgttttttgatgtttgtgcggacggtgaacctctagggcggataactatggaattattttcaaacattgttcctcggactgctgagaacttcagagcactatgcactggagagaaaggctttggtttcaagaattccatttttcacagagtaattccagattttgtttgccaaggaggagatatcaccaaacatgatggaacaggcggacagtccatttatggagacaaatttgaagatgaaaattttgatgtgaaacatactggtcctggtttactatccatggccaatcaaggccagaataccaataattctcaatttgttataacactgaagaaagcagaacatttggactttaagcatgtagtatttgggtttgttaaggatggcatggatactgtgaaaaagattgaatcatttggttctcccaaagggtctgtttgtcgaagaataactatcacagaatgtggacagatataaaatcattgttgttcatagaaaatttcatctgtataagcagttggattgaagcttagctattacaatttgatagttatgttcagcttttgaaaatggacgtttccgatttacaaatgtaaaattgcagcttatagctgttgtcactttttaatgtgttataattgaccttgcatggtgtgaaataaaagtttaaacactggtgtatttcaggtgtacttgtgtttatgtactcctgacgtattaaaatggaataatactaatcttgttaaaagcaatagacctcaaactattgaaggaatatgatatatgcaatttaattttaattccttttaagatatttggacttcctgcatggatatacttaccatttgaataaagggaccacaacttggataatttaattttaggtttgaaatatatttggtaatcttaactattggtgtactcatttatgcatagagactcgtttatgaatgggtagagccacagaacgtatagagttaaccaaagtgctcttctctagaatctttacacctcctgtgtggttacaagttaactttgtaagtagcgtaccttccttccttaaaatatctagcttcctgtgccctttcatagatattcgattaatttttacattttaaacaagttgactatttcctttaggggttttgtttcaaacttttctgtcatctgtctctactacctcagaaactgcagcttggttctgatgatagaaattgaatttttccttgtagttattgtgataaagtatgaatatttttagaaagtctataccatgttctttcgttaaagatttgctttatacaagattgttgcagtacctttttctggtaaattttgtagcagaaataaaatgacaattcctaagagccactgacatccaaaaaattcattacttacgcttcgggttcattctaaagtaaggaagacaatttaaaggcagtaaattcaaactgctgcataatttccagagctcctagtttctcaagtttgatacacaccaaaaacgtatttggaaatggcttgtatcaaatgttaggcaaattgctaaagaaaagaggatgttcttattggcctactcaatatggaactacaaagaatccaggtagaacacaaaattttgtatattgcaattatgaatattgactgtcttccacccatctgtgttctttcgggtgaaattacctcattttatttagtgaggaaagacaggtttattccctgttacatggggatttggaaattgggtatcctaaagcaagtaactgttcaaccaccagtcaaaagaggggagggatgttgtgcgagtaatgagtgatggtataccatcaccattccactcggccacaaagccagatacttgaaataaacctactccaaatgtatcagttcagtcttgaaccatggattacatatgtttacactaaatatttcaaattggcttatttggaaatctatgtaatataaactgatgtaaagtgtgttgtaacttttcagctgagacagttgatgccttcgtcatgattttagaataaattcttaagttaatgcaagtgctttttaagagactttttacagatttgtatgctttcctaaagcactaaagttacaaattaaaaagctttaaaaactttgaccaaaaatttgacaaaatgacatgtaaactgacttttcccgtattagtattccaaagatgcttaaaagtggcttgtggcatttatgagaaagtctttgtgtcacatttcaggaaaggactttgatttctctttgttatttaatcactgatgtggtctaaacccacgataatatgtatctttccttttaaactggattttatgttgtctcattaaaatctgcttaaagatagaataaaattcattatttgtaaaaaaaaaaaa

SEQ ID NO: 37268 - DNA, 11667 bp, Homo sapiens
acacagtggtcctccgccggctacggcgctgcgtcactggtttgcaggcgctttcctcttggaagtggcgactgctgcgggcctgagcgctggtctcacgcgcctcgggagccaggttggcggcgcgatgaggcgcagcaaggctgacgtggagcggtacatcgcctcggtgcagggctccaccccgtcgcctcgacagaagtcaatgaaaggattctattttgcaaagctgtattatgaagctaaagaatatgatcttgctaaaaaatacatatgtacttacattaatgtgcaagagagggatcccaaagctcacagatttctgggtcttctttatgaattggaagaaaacacagacaaagccgttgaatgttacaggcgttcagtggaattaaacccaacacaaaaagatcttgtgttgaagattgcagaattgctttgtaaaaatgatgttactgatggaagagcaaaatactggcttgaaagagcagccaaacttttcccaggaagtcctgcaatttataaactaaaggaacagcttctagattgtgaaggtgaagatggatggaataaactttttgacttgattcagtcagaactttatgtaagacctgatgacgtccatgtgaacatccggctagtggaggtgtatcgctcaactaaaagattgaaggatgctgtggcccactgccatgaggcagagaggaacatagctttgcgttcaagtttagaatggaattcgtgtgttgtacagacccttaaggaatatctggagtctttacagtgtttggagtctgataaaagtgactggcgagcaaccaatacagacttactgctggcctatgctaatcttatgcttcttacgctttccactagagatgtgcaggaaagtagagaattactgcaaagttttgatagtgctcttcagtctgtgaaatctttgggtggaaatgatgaactgtcagctactttcttagaaatgaaaggacatttctacatgcatgctggttctctgcttttgaagatgggtcagcatagtagtaatgttcaatggcgagctctttctgagctggctgcattgtgctatctcatagcatttcaggttccaagaccaaagattaaattaataaaaggtgaagctggacaaaatctgctggaaatgatggcctgtgaccgactgagccaatcagggcacatgttgctaaacttaagtcgtggcaagcaagattttttaaaagagattgttgaaacttttgccaacaaaagcgggcagtctgcattatatgatgctctgttttctagtcagtcacctaaggatacatcttttcttggtagcgatgatattggaaacattgatgtacgagaaccagagcttgaagatttgactagatacgatgttggtgctattcgagcacataatggtagtcttcagcaccttacttggcttggcttacagtggaattcattgcctgctttacctggaatccgaaaatggctaaaacagcttttccatcatttgccccatgaaacctcaaggcttgaaacaaatgcacctgaatcaatatgtattttagatcttgaagtatttctccttggagtagtatataccagccacttacaattaaaggagaaatgtaattctcaccacagctcctatcagccgttatgcctgccccttcctgtgtgtaaacagctttgtacagaaagacaaaaatcttggtgggatgcggtttgtactctgattcacagaaaagcagtacctggaaacgtagcaaaattgagacttctagttcagcatgaaataaacactctaagagcccaggaaaaacatggccttcaacctgctctgcttgtacattgggcagaatgccttcagaaaacgggcagcggtcttaattctttttatgatcaacgagaatacatagggagaagtgttcattattggaagaaagttttgccattgttgaagataataaaaaagaagaacagtattcctgaacctattgatcctctgtttaaacattttcatagtgtagacattcaggcatcagaaattgttgaatatgaagaagacgcacacataacttttgctatattggatgcagtaaatggaaatatagaagatgctgtgactgcttttgaatctataaaaagtgttgtttcttattggaatcttgcactgatttttcacaggaaggcagaagacattgaaaatgatgccctttctcctgaagaacaagaagaatgcaaaaattatctgagaaagaccagggactacctaataaagattatagatgacagtgattcaaatctttcagtggtcaagaaattgcctgtgcccctggagtctgtaaaagagatgcttaattcagtcatgcaggaactcgaagactatagtgaaggaggtcctctctataaaaatggttctttgcgaaatgcagattcagaaataaaacattctacaccgtctcctaccagatattcactatcaccaagtaaaagttacaagtattctcccaaaacaccacctcgatgggcagaagatcagaattctttactgaaaatgatttgccaacaagtagaggccattaagaaagaaatgcaggagttgaaactaaatagcagtaactcagcatcccctcatcgttggcccacagagaattatggaccagactcggtgcctgatggatatcaggggtcacagacatttcatggggctccactaacagttgcaactactggcccttcagtatattatagtcagtcaccagcatataattcccagtatcttctcagaccagcagctaatgttactcccacaaagggcccagtctatggcatgaataggcttccaccccaacagcatatttatgcctatccgcaacagatgcacacaccgccagtgcaaagctcatctgcttgtatgttctctcaggagatgtatggtcctcctgcattgcgttttgagtctcctgcaacgggaattctatcgcccaggggtgatgattactttaattacaatgttcaacagacaagcacaaatccacctttgccagaaccaggatatttcacaaaacctccgattgcagctcatgcttcaagatctgcagaatctaagactatagaatttgggaaaactaattttgttcagcccatgccgggtgaaggattaaggccatctttgccaacacaagcacacacaacacagccaactccttttaaatttaactcaaatttcaaatcaaatgatggtgacttcacgttttcctcaccacaggttgtgacacagccccctcctgcagcttacagtaacagtgaaagccttttaggtctcctgacttcagataaacccttgcaaggagatggctatagtggagccaaaccaattcctggtggtcaaaccattgggcctcgaaatacattcaattttggaagcaaaaatgtgtctggaatttcatttacagaaaacatggggtcgagtcagcaaaagaattctggttttcggcgaagtgatgatatgtttactttccatggtccagggaaatcagtatttggaacacccactttagagacagcaaacaagaatcatgagacagatggaggaagtgcccatggggatgatgatgatgacggtcctcactttgagcctgtagtacctcttcctgataagattgaagtaaaaactggtgaggaagatgaagaagaattcttttgcaaccgcgcgaaattgtttcgtttcgatgtagaatccaaagaatggaaagaacgtgggattggcaatgtaaaaatactgaggcataaaacatctggtaaaattcgccttctaatgagacgagagcaagtattgaaaatctgtgcaaatcattacatcagtccagatatgaaattgacaccaaatgctggatcagacagatcttttgtatggcatgcccttgattatgcagatgagttgccaaaaccagaacaacttgctattaggttcaaaactcctgaggaagcagcactttttaaatgcaagtttgaagaagcccagagcattttaaaagccccaggaacaaatgtagccatggcgtcaaatcaggctgtcagaattgtaaaagaacccacaagtcatgataacaaggatatttgcaaatctgatgctggaaacctgaattttgaatttcaggttgcaaagaaagaagggtcttggtggcattgtaacagctgctcattaaagaatgcttcaactgctaagaaatgtgtatcatgccaaaatctaaacccaagcaataaagagctcgttggcccaccattagctgaaactgtttttactcctaaaaccagcccagagaatgttcaagatcgatttgcattggtgactccaaagaaagaaggtcactgggattgtagtatttgtttagtaagaaatgaacctactgtatctaggtgcattgcgtgtcagaatacaaaatctgctaacaaaagtggatcttcatttgttcatcaagcttcatttaaatttggccagggagatcttcctaaacctattaacagtgatttcagatctgttttttctacaaaggaaggacagtgggattgcagtgcatgtttggtacaaaatgaggggagctctacaaaatgtgctgcttgtcagaatccgagaaaacagagtctacctgctacttctattccaacacctgcctcttttaagtttggtacttcagagacaagtaaaactctaaaaagtggatttgaagacatgtttgctaagaaggaaggacagtgggattgcagttcatgcttagtgcgaaatgaagcaaatgctacaagatgtgttgcttgtcagaatccggataaaccaagtccatctacttctgttccagctcctgcctcttttaagtttggtacttcagagacaagcaaggctccaaagagcggatttgagggaatgttcactaagaaggagggacagtgggattgcagtgtgtgcttagtaagaaatgaagccagtgctaccaaatgtattgcttgtcagaatccaggtaaacaaaatcaaactacttctgcagtttcaacacctgcctcttcagagacaagcaaggctccaaagagcggatttgagggaatgttcactaagaaggagggacagtgggattgcagtgtgtgcttagtaagaaatgaagccagtgctaccaaatgtattgcttgtcagaatccaggtaaacaaaatcaaactacttctgcagtttcaacacctgcctcttcagagacaagcaaggctccaaagagcggatttgagggaatgttcactaagaaggaaggacagtgggattgcagtgtgtgcttagtaagaaatgaagccagtgctaccaaatgtattgcttgtcagtgtccaagtaaacaaaatcaaacaactgcaatttcaacacctgcctcttcggagataagcaaggctccaaagagtggatttgaaggaatgttcatcaggaaaggacagtgggattgtagtgtttgctgtgtacaaaatgagagttcttccttaaaatgtgtggcttgtgatgcctctaaaccaactcataaacctattgcagaagctccttcagctttcacactgggctcagaaatgaagttgcatgactcttctggaagtcaggtgggaacaggatttaaaagtaatttctcagaaaaagcttctaagtttggcaatacagagcaaggattcaaatttgggcatgtggatcaagaaaattcaccttcatttatgtttcagggttcttctaatacagaatttaagtcaaccaaagaaggattttccatccctgtgtctgctgatggatttaaatttggcatttcggaaccaggaaatcaagaaaagaaaagtgaaaagcctcttgaaaatggtactggcttccaggctcaggatattagtggccagaagaatggccgtggtgtgatttttggccaaacaagtagcacttttacatttgcagatcttgcaaaatcaacttcaggagaaggatttcagtttggcaaaaaagaccccaatttcaagggattttcaggtgctggagaaaaattattctcatcacaatacggtaaaatggccaataaagcaaacacttccggtgactttgagaaagatgatgatgcctataagactgaggacagcgatgacatccattttgaaccagtagttcaaatgcccgaaaaagtagaacttgtaacaggagaagaagatgaaaaagttctgtattcacagcgggtaaaactatttagatttgatgctgaggtaagtcagtggaaagaaaggggcttggggaacttaaaaattctcaaaaacgaggtcaatggcaaactaagaatgctgatgcgaagagaacaagtactaaaagtgtgtgctaatcattggataacgactacgatgaacctgaagcctctctctggatcagatagagcatggatgtggttagccagtgatttctctgatggtgatgccaaactagagcagttggcagcaaaatttcttctgttagacataccacttcaaactccccataaacttgtagatactggcagagctgccaagttaatacagagagctgaagaaatgaagagtggactgaaagatttcaaaacatttttgacaaatgatcaaacaaaagtcactgaggaagaaaataagggttcaggtacaggtgcggccggtgcctcagacacaacaataaaacccaatcctgaaaacactgggcccacattagaatgggataactatgatttaagggaagatgctttggatgatagtgtcagtagtagctcagtacatgcttctccattggcaagtagccctgtgagaaaaaatcttttccgttttggtgagtcaacaacaggatttaacttcagttttaaatctgctttgagtccatctaagtctcctgccaagttgaatcagagtgggacttcagttggcactgatgaagaatctgatgttactcaagaagaagagagagatggacagtactttgaacctgttgttcctttacctgatctagttgaagtatccagtggtgaggaaaatgaacaagttgtttttagtcacagggcaaaactctacagatatgataaagatgttggtcaatggaaagaaaggggcattggtgatataaagattttacagaattatgataataagcaagttcgtatagtgatgagaagggaccaagtattaaaactttgtgccaatcacagaataactccagacatgactttgcaaaatatgaaagggacagaaagagtatggttgtggactgcatgtgattttgcagatggagaaagaaaagtagagcatttagctgttcgttttaaactacaggatgttgcagactcgtttaagaaaatttttgatgaagcaaaaacagcccaggaaaaagattctttgataacacctcatgtttctcggtcaagcactcccagagagtcaccatgtggcaaaattgctgtagctgtattagaagaaaccacaagagagaggacagatgttattcagggtgatgatgtagcagatgcaacttcagaagttgaagtgtctagcacatctgaaacaacaccaaaagcagtggtttctcctccaaagtttgtatttggttcagagtctgttaaaagcatttttagtagtgaaaaatcaaaaccatttgcattcggcaacagttcagccactgggtctttgtttggatttagttttaatgcacctttgaaaagtaacaatagtgaaactagttcagtagcccagagtggatctgaaagcaaagtggaacctaaaaaatgtgaactgtcaaagaactctgatatcgaacagtcttcagatagcaaagtcaaaaatctctttgcttcctttccaacggaagaatcttcaatcaactacacatttaaaacaccagaaaaggcaaaagagaagaaaaaacctgaagattctccctcagatgatgatgttctcattgtatatgaactaactccaaccgctgagcagaaagcccttgcaaccaaacttaaacttcctccaactttcttctgctacaagaatagaccagattatgttagtgaagaagaggaggatgatgaagatttcgaaacagctgtcaagaaacttaatggaaaactatatttggatggctcagaaaaatgtagacccttggaagaaaatacagcagataatgagaaagaatgtattattgtttgggaaaagaaaccaacagttgaagagaaggcaaaagcagatacgttaaaacttccacctacatttttttgtggagtctgtagtgatactgatgaagacaatggaaatggggaagactttcaatcagagcttcaaaaagttcaggaagctcaaaaatctcagacagaagaaataactagcacaactgacagtgtatatacaggtgggactgaagtgatggtaccttctttctgtaaatctgaagaacctgattctattaccaaatccattagttcaccatctgtttcctctgaaactatggacaaacctgtagatttgtcaactagaaaggaaattgatacagattctacaagccaaggggaaagcaagatagtttcatttggatttggaagtagcacagggctctcatttgcagacttggcttccagtaattctggagattttgcttttggttctaaagataaaaatttccaatgggcaaatactggagcagctgtgtttggaacacagtcagtcggaacccagtcagccggtaaagttggtgaagatgaagatggtagtgatgaagaagtagttcataatgaagatatccattttgaaccaatagtgtcactaccagaggtagaagtaaaatctggagaagaagatgaagaaattttgtttaaagagagagccaaactttatagatgggatcgggatgtcagtcagtggaaggagcgcggtgttggagatataaagattctttggcatacaatgaagaattattaccggatcctaatgagaagagaccaggtttttaaagtgtgtgcaaaccacgttattactaaaacaatggaattaaagcccttaaatgtttcaaataatgctttagtttggactgcctcagattatgctgatggagaagcaaaagtagaacagcttgcagtgagatttaaaactaaagaagtagctgattgtttcaagaaaacatttgaagaatgtcagcagaatttaatgaaactccagaaaggacatgtatcactggcagcagaattatcaaaggagaccaatcctgtggtgttttttgatgtttgtgcggacggtgaacctctagggcggataactatggaattattttcaaacattgttcctcggactgctgagaacttcagagcactatgcactggagagaaaggctttggtttcaagaattccatttttcacagagtaattccagattttgtttgccaaggaggagatatcaccaaacatgatggaacaggcggacagtccatttatggagacaaatttgaagatgaaaattttgatgtgaaacatactggtcctggtttactatccatggccaatcaaggccagaataccaataattctcaatttgttataacactgaagaaagcagaacatttggactttaagcatgtagtatttgggtttgttaaggatggcatggatactgtgaaaaagattgaatcatttggttctcccaaagggtctgtttgtcgaagaataactatcacagaatgtggacagatataaaatcattgttgttcatagaaaatttcatctgtataagcagttggattgaagcttagctattacaatttgatagttatgttcagcttttgaaaatggacgtttccgatttacaaatgtaaaattgcagcttatagctgttgtcactttttaatgtgttataattgaccttgcatggtgtgaaataaaagtttaaacactggtgtatttcaggtgtacttgtgtttatgtactcctgacgtattaaaatggaataatactaatcttgttaaaagcaatagacctcaaactattgaaggaatatgatatatgcaatttaattttaattccttttaagatatttggacttcctgcatggatatacttaccatttgaataaagggaccacaacttggataatttaattttaggtttgaaatatatttggtaatcttaactattggtgtactcatttatgcatagagactcgtttatgaatgggtagagccacagaacgtatagagttaaccaaagtgctcttctctagaatctttacacctcctgtgtggttacaagttaactttgtaagtagcgtaccttccttccttaaaatatctagcttcctgtgccctttcatagatattcgattaatttttacattttaaacaagttgactatttcctttaggggttttgtttcaaacttttctgtcatctgtctctactacctcagaaactgcagcttggttctgatgatagaaattgaatttttccttgtagttattgtgataaagtatgaatatttttagaaagtctataccatgttctttcgttaaagatttgctttatacaagattgttgcagtacctttttctggtaaattttgtagcagaaataaaatgacaattcctaagagccactgacatccaaaaaattcattacttacgcttcgggttcattctaaagtaaggaagacaatttaaaggcagtaaattcaaactgctgcataatttccagagctcctagtttctcaagtttgatacacaccaaaaacgtatttggaaatggcttgtatcaaatgttaggcaaattgctaaagaaaagaggatgttcttattggcctactcaatatggaactacaaagaatccaggtagaacacaaaattttgtatattgcaattatgaatattgactgtcttccacccatctgtgttctttcgggtgaaattacctcattttatttagtgaggaaagacaggtttattccctgttacatggggatttggaaattgggtatcctaaagcaagtaactgttcaaccaccagtcaaaagaggggagggatgttgtgcgagtaatgagtgatggtataccatcaccattccactcggccacaaagccagatacttgaaataaacctactccaaatgtatcagttcagtcttgaaccatggattacatatgtttacactaaatatttcaaattggcttatttggaaatctatgtaatataaactgatgtaaagtgtgttgtaacttttcagctgagacagttgatgccttcgtcatgattttagaataaattcttaagttaatgcaagtgctttttaagagactttttacagatttgtatgctttcctaaagcactaaagttacaaattaaaaagctttaaaaactttgaccaaaaatttgacaaaatgacatgtaaactgacttttcccgtattagtattccaaagatgcttaaaagtggcttgtggcatttatgagaaagtctttgtgtcacatttcaggaaaggactttgatttctctttgttatttaatcactgatgtggtctaaacccacgataatatgtatctttccttttaaactggattttatgttgtctcattaaaatctgcttaaagatagaataaaattcattatttgtaaaaaaaaaaaa

SEQ ID NO: 37269 - DNA, 6823 bp, Homo sapiens
tgagacagagtcttactctgtcgcccgggctggagtgcagtggcgtgatctcggctcactgcaagctccacctcctgggttcatgccattctcctccctcagcctccccagtagctgggactacagtaacagtgaaagccttttaggtctcctgacttcagataaacccttgcaaggagatggctatagtggagccaaaccaattcctggtggtcaaaccattgggcctcgaaatacattcaattttggaagcaaaaatgtgtctggaatttcatttacagaaaacatggggtcgagtcagcaaaagaattctggttttcggcgaagtgatgatatgtttactttccatggtccagggaaatcagtatttggaacacccactttagagacagcaaacaagaatcatgagacagatggaggaagtgcccatggggatgatgatgatgacggtcctcactttgagcctgtagtacctcttcctgataagattgaagtaaaaactggtgaggaagatgaagaagaattcttttgcaaccgcgcgaaattgtttcgtttcgatgtagaatccaaagaatggaaagaacgtgggattggcaatgtaaaaatactgaggcataaaacatctggtaaaattcgccttctaatgagacgagagcaagtattgaaaatctgtgcaaatcattacatcagtccagatatgaaattgacaccaaatgctggatcagacagatcttttgtatggcatgcccttgattatgcagatgagttgccaaaaccagaacaacttgctattaggttcaaaactcctgaggaagcagcactttttaaatgcaagtttgaagaagcccagagcattttaaaagccccaggaacaaatgtagccatggcgtcaaatcaggctgtcagaattgtaaaagaacccacaagtcatgataacaaggatatttgcaaatctgatgctggaaacctgaattttgaatttcaggttgcaaagaaagaagggtcttggtggcattgtaacagctgctcattaaagaatgcttcaactgctaagaaatgtgtatcatgccaaaatctaaacccaagcaataaagagctcgttggcccaccattagctgaaactgtttttactcctaaaaccagcccagagaatgttcaagatcgatttgcattggtgactccaaagaaagaaggtcactgggattgtagtatttgtttagtaagaaatgaacctactgtatctaggtgcattgcgtgtcagaatacaaaatctgctaacaaaagtggatcttcatttgttcatcaagcttcatttaaatttggccagggagatcttcctaaacctattaacagtgatttcagatctgttttttctacaaaggaaggacagtgggattgcagtgcatgtttggtacaaaatgaggggagctctacaaaatgtgctgcttgtcagaatccgagaaaacagagtctacctgctacttctattccaacacctgcctcttttaagtttggtacttcagagacaagtaaaactctaaaaagtggatttgaagacatgtttgctaagaaggaaggacagtgggattgcagttcatgcttagtgcgaaatgaagcaaatgctacaagatgtgttgcttgtcagaatccggataaaccaagtccatctacttctgttccagctcctgcctcttttaagtttggtacttcagagacaagcaaggctccaaagagcggatttgagggaatgttcactaagaaggagggacagtgggattgcagtgtgtgcttagtaagaaatgaagccagtgctaccaaatgtattgcttgtcagaatccaggtaaacaaaatcaaactacttctgcagtttcaacacctgcctcttcagagacaagcaaggctccaaagagcggatttgagggaatgttcactaagaaggagggacagtgggattgcagtgtgtgcttagtaagaaatgaagccagtgctaccaaatgtattgcttgtcagaatccaggtaaacaaaatcaaactacttctgcagtttcaacacctgcctcttcagagacaagcaaggctccaaagagcggatttgagggaatgttcactaagaaggaaggacagtgggattgcagtgtgtgcttagtaagaaatgaagccagtgctaccaaatgtattgcttgtcagtgtccaagtaaacaaaatcaaacaactgcaatttcaacacctgcctcttcggagataagcaaggctccaaagagtggatttgaaggaatgttcatcaggaaaggacagtgggattgtagtgtttgctgtgtacaaaatgagagttcttccttaaaatgtgtggcttgtgatgcctctaaaccaactcataaacctattgcagaagctccttcagctttcacactgggctcagaaatgaagttgcatgactcttctggaagtcaggtgggaacaggatttaaaagtaatttctcagaaaaagcttctaagtttggcaatacagagcaaggattcaaatttgggcatgtggatcaagaaaattcaccttcatttatgtttcagggttcttctaatacagaatttaagtcaaccaaagaaggattttccatccctgtgtctgctgatggatttaaatttggcatttcggaaccaggaaatcaagaaaagaaaagtgaaaagcctcttgaaaatggtactggcttccaggctcaggatattagtggccagaagaatggccgtggtgtgatttttggccaaacaagtagcacttttacatttgcagatcttgcaaaatcaacttcaggagaaggatttcagtttggcaaaaaagaccccaatttcaagggattttcaggtgctggagaaaaattattctcatcacaatacggtaaaatggccaataaagcaaacacttccggtgactttgagaaagatgatgatgcctataagactgaggacagcgatgacatccattttgaaccagtagttcaaatgcccgaaaaagtagaacttgtaacaggagaagaagatgaaaaagttctgtattcacagcgggtaaaactatttagatttgatgctgaggtaagtcagtggaaagaaaggggcttggggaacttaaaaattctcaaaaacgaggtcaatggcaaactaagaatgctgatgcgaagagaacaagtactaaaagtgtgtgctaatcattggataacgactacgatgaacctgaagcctctctctggatcagatagagcatggatgtggttagccagtgatttctctgatggtgatgccaaactagagcagttggcagcaaaatttaaaacaccagagctggctgaagaattcaagcagaaatttgaggaatgccagcggcttctgttagacataccacttcaaactccccataaacttgtagatactggcagagctgccaagttaatacagagagctgaagaaatgaagagtggactgaaagatttcaaaacatttttgacaaatgatcaaacaaaagtcactgaggaagaaaataagggttcaggtacaggtgcggccggtgcctcagacacaacaataaaacccaatcctgaaaacactgggcccacattagaatgggataactatgatttaagggaagatgctttggatgatagtgtcagtagtagctcagtacatgcttctccattggcaagtagccctgtgagaaaaaatcttttccgttttggtgagtcaacaacaggatttaacttcagttttaaatctgctttgagtccatctaagtctcctgccaagttgaatcagagtgggacttcagttggcactgatgaagaatctgatgttactcaagaagaagagagagatggacagtactttgaacctgttgttcctttacctgatctagttgaagtatccagtggtgaggaaaatgaacaagttgtttttagtcacagggcaaaactctacagatatgataaagatgttggtcaatggaaagaaaggggcattggtgatataaagattttacagaattatgataataagcaagttcgtatagtgatgagaagggaccaagtattaaaactttgtgccaatcacagaataactccagacatgactttgcaaaatatgaaagggacagaaagagtatggttgtggactgcatgtgattttgcagatggagaaagaaaagtagagcatttagctgttcgttttaaactacaggatgttgcagactcgtttaagaaaatttttgatgaagcaaaaacagcccaggaaaaagattctttgataacacctcatgtttctcggtcaagcactcccagagagtcaccatgtggcaaaattgctgtagctgtattagaagaaaccacaagagagaggacagatgttattcagggtgatgatgtagcagatgcaacttcagaagttgaagtgtctagcacatctgaaacaacaccaaaagcagtggtttctcctccaaagtttgtatttggttcagagtctgttaaaagcatttttagtagtgaaaaatcaaaaccatttgcattcggcaacagttcagccactgggtctttgtttggatttagttttaatgcacctttgaaaagtaacaatagtgaaactagttcagtagcccagagtggatctgaaagcaaagtggaacctaaaaaatgtgaactgtcaaagaactctgatatcgaacagtcttcagatagcaaagtcaaaaatctctttgcttcctttccaacggaagaatcttcaatcaactacacatttaaaacaccagaaaaggcaaaagagaagaaaaaacctgaagattctccctcagatgatgatgttctcattgtatatgaactaactccaaccgctgagcagaaagcccttgcaaccaaacttaaacttcctccaactttcttctgctacaagaatagaccagattatgttagtgaagaagaggaggatgatgaagatttcgaaacagctgtcaagaaacttaatggaaaactatatttggatggctcagaaaaatgtagacccttggaagaaaatacagcagataatgagaaagaatgtattattgtttgggaaaagaaaccaacagttgaagagaaggcaaaagcagatacgttaaaacttccacctacatttttttgtggagtctgtagtgatactgatgaagacaatggaaatggggaagactttcaatcagagcttcaaaaagttcaggaagctcaaaaatctcagacagaagaaataactagcacaactgacagtgtatatacaggtgggactgaagtgatggtaccttctttctgtaaatctgaagaacctgattctattaccaaatccattagttcaccatctgtttcctctgaaactatggacaaacctgtagatttgtcaactagaaaggaaattgatacagattctacaagccaaggggaaagcaagatagtttcatttggatttggaagtagcacagggctctcatttgcagacttggcttccagtaattctggagattttgcttttggttctaaagataaaaatttccaatgggcaaatactggagcagctgtgtttggaacacagtcagtcggaacccagtcagccggtaaagttggtgaagatgaagatggtagtgatgaagaagtagttcataatgaagatatccattttgaaccaatagtgtcactaccagaggtagaagtaaaatctggagaagaagatgaagaaattttgtttaaagagagagccaaactttatagatgggatcgggatgtcagtcagtggaaggagcgcggtgttggagatataaagattctttggcatacaatgaagaattattaccggatcctaatgagaagagaccaggtttttaaagtgtgtgcaaaccacgttattactaaaacaatggaattaaagcccttaaatgtttcaaataatgctttagtttggactgcctcagattatgctgatggagaagcaaaagtagaacagcttgcagtgagatttaaaactaaagaagtagctgattgtttcaagaaaacatttgaagaatgtcagcagaatttaatgaaactccagaaaggacatgtatcactggcagcagaattatcaaaggagaccaatcctgtggtgttttttgatgtttgtgcggacggtgaacctctagggcggataactatggaattattttcaaacattgttcctcggactgctgagaacttcagagcactatgcactggagagaaaggctttggtttcaagaattccatttttcacagagtaattccagattttgtttgccaaggaggagatatcaccaaacatgatggaacaggcggacagtccatttatggagacaaatttgaagatgaaaattttgatgtgaaacatactggtcctggtttactatccatggccaatcaaggccagaataccaataattctcaatttgttataacactgaagaaagcagaacatttggactttaagcatgtagtatttgggtttgttaaggatggcatggatactgtgaaaaagattgaatcatttggttctcccaaagggtctgtttgtcgaagaataactatcacagaatgtggacagatataaaatcattgttgttcatagaaaatttcatctgtataagcagttggattgaagcttagctattacaatttgatagttatgttcagcttttgaaaatggacgtttccgatttacaaatgtaaaattgcagcttatagctgttgtcactttttaatgtgttataattgaccttgcatggtgtgaaataaaagtttaaacactggtgta

SEQ ID NO: 37270 - DNA, 11667 bp, Homo sapiens
acacagtggtcctccgccggctacggcgctgcgtcactggtttgcaggcgctttcctcttggaagtggcgactgctgcgggcctgagcgctggtctcacgcgcctcgggagccaggttggcggcgcgatgaggcgcagcaaggctgacgtggagcggtacatcgcctcggtgcagggctccaccccgtcgcctcgacagaagtcaatgaaaggattctattttgcaaagctgtattatgaagctaaagaatatgatcttgctaaaaaatacatatgtacttacattaatgtgcaagagagggatcccaaagctcacagatttctgggtcttctttatgaattggaagaaaacacagacaaagccgttgaatgttacaggcgttcagtggaattaaacccaacacaaaaagatcttgtgttgaagattgcagaattgctttgtaaaaatgatgttactgatggaagagcaaaatactggcttgaaagagcagccaaacttttcccaggaagtcctgcaatttataaactaaaggaacagcttctagattgtgaaggtgaagatggatggaataaactttttgacttgattcagtcagaactttatgtaagacctgatgacgtccatgtgaacatccggctagtggaggtgtatcgctcaactaaaagattgaaggatgctgtggcccactgccatgaggcagagaggaacatagctttgcgttcaagtttagaatggaattcgtgtgttgtacagacccttaaggaatatctggagtctttacagtgtttggagtctgataaaagtgactggcgagcaaccaatacagacttactgctggcctatgctaatcttatgcttcttacgctttccactagagatgtgcaggaaagtagagaattactgcaaagttttgatagtgctcttcagtctgtgaaatctttgggtggaaatgatgaactgtcagctactttcttagaaatgaaaggacatttctacatgcatgctggttctctgcttttgaagatgggtcagcatagtagtaatgttcaatggcgagctctttctgagctggctgcattgtgctatctcatagcatttcaggttccaagaccaaagattaaattaataaaaggtgaagctggacaaaatctgctggaaatgatggcctgtgaccgactgagccaatcagggcacatgttgctaaacttaagtcgtggcaagcaagattttttaaaagagattgttgaaacttttgccaacaaaagcgggcagtctgcattatatgatgctctgttttctagtcagtcacctaaggatacatcttttcttggtagcgatgatattggaaacattgatgtacgagaaccagagcttgaagatttgactagatacgatgttggtgctattcgagcacataatggtagtcttcagcaccttacttggcttggcttacagtggaattcattgcctgctttacctggaatccgaaaatggctaaaacagcttttccatcatttgccccatgaaacctcaaggcttgaaacaaatgcacctgaatcaatatgtattttagatcttgaagtatttctccttggagtagtatataccagccacttacaattaaaggagaaatgtaattctcaccacagctcctatcagccgttatgcctgccccttcctgtgtgtaaacagctttgtacagaaagacaaaaatcttggtgggatgcggtttgtactctgattcacagaaaagcagtacctggaaacgtagcaaaattgagacttctagttcagcatgaaataaacactctaagagcccaggaaaaacatggccttcaacctgctctgcttgtacattgggcagaatgccttcagaaaacgggcagcggtcttaattctttttatgatcaacgagaatacatagggagaagtgttcattattggaagaaagttttgccattgttgaagataataaaaaagaagaacagtattcctgaacctattgatcctctgtttaaacattttcatagtgtagacattcaggcatcagaaattgttgaatatgaagaagacgcacacataacttttgctatattggatgcagtaaatggaaatatagaagatgctgtgactgcttttgaatctataaaaagtgttgtttcttattggaatcttgcactgatttttcacaggaaggcagaagacattgaaaatgatgccctttctcctgaagaacaagaagaatgcaaaaattatctgagaaagaccagggactacctaataaagattatagatgacagtgattcaaatctttcagtggtcaagaaattgcctgtgcccctggagtctgtaaaagagatgcttaattcagtcatgcaggaactcgaagactatagtgaaggaggtcctctctataaaaatggttctttgcgaaatgcagattcagaaataaaacattctacaccgtctcctaccagatattcactatcaccaagtaaaagttacaagtattctcccaaaacaccacctcgatgggcagaagatcagaattctttactgaaaatgatttgccaacaagtagaggccattaagaaagaaatgcaggagttgaaactaaatagcagtaactcagcatcccctcatcgttggcccacagagaattatggaccagactcggtgcctgatggatatcaggggtcacagacatttcatggggctccactaacagttgcaactactggcccttcagtatattatagtcagtcaccagcatataattcccagtatcttctcagaccagcagctaatgttactcccacaaagggcccagtctatggcatgaataggcttccaccccaacagcatatttatgcctatccgcaacagatgcacacaccgccagtgcaaagctcatctgcttgtatgttctctcaggagatgtatggtcctcctgcattgcgttttgagtctcctgcaacgggaattctatcgcccaggggtgatgattactttaattacaatgttcaacagacaagcacaaatccacctttgccagaaccaggatatttcacaaaacctccgattgcagctcatgcttcaagatctgcagaatctaagactatagaatttgggaaaactaattttgttcagcccatgccgggtgaaggattaaggccatctttgccaacacaagcacacacaacacagccaactccttttaaatttaactcaaatttcaaatcaaatgatggtgacttcacgttttcctcaccacaggttgtgacacagccccctcctgcagcttacagtaacagtgaaagccttttaggtctcctgacttcagataaacccttgcaaggagatggctatagtggagccaaaccaattcctggtggtcaaaccattgggcctcgaaatacattcaattttggaagcaaaaatgtgtctggaatttcatttacagaaaacatggggtcgagtcagcaaaagaattctggttttcggcgaagtgatgatatgtttactttccatggtccagggaaatcagtatttggaacacccactttagagacagcaaacaagaatcatgagacagatggaggaagtgcccatggggatgatgatgatgacggtcctcactttgagcctgtagtacctcttcctgataagattgaagtaaaaactggtgaggaagatgaagaagaattcttttgcaaccgcgcgaaattgtttcgtttcgatgtagaatccaaagaatggaaagaacgtgggattggcaatgtaaaaatactgaggcataaaacatctggtaaaattcgccttctaatgagacgagagcaagtattgaaaatctgtgcaaatcattacatcagtccagatatgaaattgacaccaaatgctggatcagacagatcttttgtatggcatgcccttgattatgcagatgagttgccaaaaccagaacaacttgctattaggttcaaaactcctgaggaagcagcactttttaaatgcaagtttgaagaagcccagagcattttaaaagccccaggaacaaatgtagccatggcgtcaaatcaggctgtcagaattgtaaaagaacccacaagtcatgataacaaggatatttgcaaatctgatgctggaaacctgaattttgaatttcaggttgcaaagaaagaagggtcttggtggcattgtaacagctgctcattaaagaatgcttcaactgctaagaaatgtgtatcatgccaaaatctaaacccaagcaataaagagctcgttggcccaccattagctgaaactgtttttactcctaaaaccagcccagagaatgttcaagatcgatttgcattggtgactccaaagaaagaaggtcactgggattgtagtatttgtttagtaagaaatgaacctactgtatctaggtgcattgcgtgtcagaatacaaaatctgctaacaaaagtggatcttcatttgttcatcaagcttcatttaaatttggccagggagatcttcctaaacctattaacagtgatttcagatctgttttttctacaaaggaaggacagtgggattgcagtgcatgtttggtacaaaatgaggggagctctacaaaatgtgctgcttgtcagaatccgagaaaacagagtctacctgctacttctattccaacacctgcctcttttaagtttggtacttcagagacaagtaaaactctaaaaagtggatttgaagacatgtttgctaagaaggaaggacagtgggattgcagttcatgcttagtgcgaaatgaagcaaatgctacaagatgtgttgcttgtcagaatccggataaaccaagtccatctacttctgttccagctcctgcctcttttaagtttggtacttcagagacaagcaaggctccaaagagcggatttgagggaatgttcactaagaaggagggacagtgggattgcagtgtgtgcttagtaagaaatgaagccagtgctaccaaatgtattgcttgtcagaatccaggtaaacaaaatcaaactacttctgcagtttcaacacctgcctcttcagagacaagcaaggctccaaagagcggatttgagggaatgttcactaagaaggagggacagtgggattgcagtgtgtgcttagtaagaaatgaagccagtgctaccaaatgtattgcttgtcagaatccaggtaaacaaaatcaaactacttctgcagtttcaacacctgcctcttcagagacaagcaaggctccaaagagcggatttgagggaatgttcactaagaaggaaggacagtgggattgcagtgtgtgcttagtaagaaatgaagccagtgctaccaaatgtattgcttgtcagtgtccaagtaaacaaaatcaaacaactgcaatttcaacacctgcctcttcggagataagcaaggctccaaagagtggatttgaaggaatgttcatcaggaaaggacagtgggattgtagtgtttgctgtgtacaaaatgagagttcttccttaaaatgtgtggcttgtgatgcctctaaaccaactcataaacctattgcagaagctccttcagctttcacactgggctcagaaatgaagttgcatgactcttctggaagtcaggtgggaacaggatttaaaagtaatttctcagaaaaagcttctaagtttggcaatacagagcaaggattcaaatttgggcatgtggatcaagaaaattcaccttcatttatgtttcagggttcttctaatacagaatttaagtcaaccaaagaaggattttccatccctgtgtctgctgatggatttaaatttggcatttcggaaccaggaaatcaagaaaagaaaagtgaaaagcctcttgaaaatggtactggcttccaggctcaggatattagtggccagaagaatggccgtggtgtgatttttggccaaacaagtagcacttttacatttgcagatcttgcaaaatcaacttcaggagaaggatttcagtttggcaaaaaagaccccaatttcaagggattttcaggtgctggagaaaaattattctcatcacaatacggtaaaatggccaataaagcaaacacttccggtgactttgagaaagatgatgatgcctataagactgaggacagcgatgacatccattttgaaccagtagttcaaatgcccgaaaaagtagaacttgtaacaggagaagaagatgaaaaagttctgtattcacagcgggtaaaactatttagatttgatgctgaggtaagtcagtggaaagaaaggggcttggggaacttaaaaattctcaaaaacgaggtcaatggcaaactaagaatgctgatgcgaagagaacaagtactaaaagtgtgtgctaatcattggataacgactacgatgaacctgaagcctctctctggatcagatagagcatggatgtggttagccagtgatttctctgatggtgatgccaaactagagcagttggcagcaaaatttaaaacaccagagctggctgaagaattcaagcagaaatttgaggaatgccagcggcttctgttagacataccacttcaaactccccataaacttgtagatactggcagagctgccaagttaatacagagagctgaagaaatgaagagtggactgaaagatttcaaaacatttttgacaaatgatcaaacaaaagtcactgaggaagaaaataagggttcaggtacaggtgcggccggtgcctcagacacaacaataaaacccaatcctgaaaacactgggcccacattagaatgggataactatgatttaagggaagatgctttggatgatagtgtcagtagtagctcagtacatgcttctccattggcaagtagccctgtgagaaaaaatcttttccgttttggtgagtcaacaacaggatttaacttcagttttaaatctgctttgagtccatctaagtctcctgccaagttgaatcagagtgggacttcagttggcactgatgaagaatctgatgttactcaagaagaagagagagatggacagtactttgaacctgttgttcctttacctgatctagttgaagtatccagtggtgaggaaaatgaacaagttgtttttagtcacagggcaaaactctacagatatgataaagatgttggtcaatggaaagaaaggggcattggtgatataaagattttacagaattatgataataagcaagttcgtatagtgatgagaagggaccaagtattaaaactttgtgccaatcacagaataactccagacatgactttgcaaaatatgaaagggacagaaagagtatggttgtggactgcatgtgattttgcagatggagaaagaaaagtagagcatttagctgttcgttttaaactacaggatgttgcagactcgtttaagaaaatttttgatgaagcaaaaacagcccaggaaaaagattctttgataacacctcatgtttctcggtcaagcactcccagagagtcaccatgtggcaaaattgctgtagctgtattagaagaaaccacaagagagaggacagatgttattcagggtgatgatgtagcagatgcaacttcagaagttgaagtgtctagcacatctgaaacaacaccaaaagcagtggtttctcctccaaagtttgtatttggttcagagtctgttaaaagcatttttagtagtgaaaaatcaaaaccatttgcattcggcaacagttcagccactgggtctttgtttggatttagttttaatgcacctttgaaaagtaacaatagtgaaactagttcagtagcccagagtggatctgaaagcaaagtggaacctaaaaaatgtgaactgtcaaagaactctgatatcgaacagtcttcagatagcaaagtcaaaaatctctttgcttcctttccaacggaagaatcttcaatcaactacacatttaaaacaccagaaaaggcaaaagagaagaaaaaacctgaagattctccctcagatgatgatgttctcattgtatatgaactaactccaaccgctgagcagaaagcccttgcaaccaaacttaaacttcctccaactttcttctgctacaagaatagaccagattatgttagtgaagaagaggaggatgatgaagatttcgaaacagctgtcaagaaacttaatggaaaactatatttggatggctcagaaaaatgtagacccttggaagaaaatacagcagataatgagaaagaatgtattattgtttgggaaaagaaaccaacagttgaagagaaggcaaaagcagatacgttaaaacttccacctacatttttttgtggagtctgtagtgatactgatgaagacaatggaaatggggaagactttcaatcagagcttcaaaaagttcaggaagctcaaaaatctcagacagaagaaataactagcacaactgacagtgtatatacaggtgggactgaagtgatggtaccttctttctgtaaatctgaagaacctgattctattaccaaatccattagttcaccatctgtttcctctgaaactatggacaaacctgtagatttgtcaactagaaaggaaattgatacagattctacaagccaaggggaaagcaagatagtttcatttggatttggaagtagcacagggctctcatttgcagacttggcttccagtaattctggagattttgcttttggttctaaagtcggaacccagtcagccggtaaagttggtgaagatgaagatggtagtgatgaagaagtagttcataatgaagatatccattttgaaccaatagtgtcactaccagaggtagaagtaaaatctggagaagaagatgaagaaattttgtttaaagagagagccaaactttatagatgggatcgggatgtcagtcagtggaaggagcgcggtgttggagatataaagattctttggcatacaatgaagaattattaccggatcctaatgagaagagaccaggtttttaaagtgtgtgcaaaccacgttattactaaaacaatggaattaaagcccttaaatgtttcaaataatgctttagtttggactgcctcagattatgctgatggagaagcaaaagtagaacagcttgcagtgagatttaaaactaaagaagtagctgattgtttcaagaaaacatttgaagaatgtcagcagaatttaatgaaactccagaaaggacatgtatcactggcagcagaattatcaaaggagaccaatcctgtggtgttttttgatgtttgtgcggacggtgaacctctagggcggataactatggaattattttcaaacattgttcctcggactgctgagaacttcagagcactatgcactggagagaaaggctttggtttcaagaattccatttttcacagagtaattccagattttgtttgccaaggaggagatatcaccaaacatgatggaacaggcggacagtccatttatggagacaaatttgaagatgaaaattttgatgtgaaacatactggtcctggtttactatccatggccaatcaaggccagaataccaataattctcaatttgttataacactgaagaaagcagaacatttggactttaagcatgtagtatttgggtttgttaaggatggcatggatactgtgaaaaagattgaatcatttggttctcccaaagggtctgtttgtcgaagaataactatcacagaatgtggacagatataaaatcattgttgttcatagaaaatttcatctgtataagcagttggattgaagcttagctattacaatttgatagttatgttcagcttttgaaaatggacgtttccgatttacaaatgtaaaattgcagcttatagctgttgtcactttttaatgtgttataattgaccttgcatggtgtgaaataaaagtttaaacactggtgtatttcaggtgtacttgtgtttatgtactcctgacgtattaaaatggaataatactaatcttgttaaaagcaatagacctcaaactattgaaggaatatgatatatgcaatttaattttaattccttttaagatatttggacttcctgcatggatatacttaccatttgaataaagggaccacaacttggataatttaattttaggtttgaaatatatttggtaatcttaactattggtgtactcatttatgcatagagactcgtttatgaatgggtagagccacagaacgtatagagttaaccaaagtgctcttctctagaatctttacacctcctgtgtggttacaagttaactttgtaagtagcgtaccttccttccttaaaatatctagcttcctgtgccctttcatagatattcgattaatttttacattttaaacaagttgactatttcctttaggggttttgtttcaaacttttctgtcatctgtctctactacctcagaaactgcagcttggttctgatgatagaaattgaatttttccttgtagttattgtgataaagtatgaatatttttagaaagtctataccatgttctttcgttaaagatttgctttatacaagattgttgcagtacctttttctggtaaattttgtagcagaaataaaatgacaattcctaagagccactgacatccaaaaaattcattacttacgcttcgggttcattctaaagtaaggaagacaatttaaaggcagtaaattcaaactgctgcataatttccagagctcctagtttctcaagtttgatacacaccaaaaacgtatttggaaatggcttgtatcaaatgttaggcaaattgctaaagaaaagaggatgttcttattggcctactcaatatggaactacaaagaatccaggtagaacacaaaattttgtatattgcaattatgaatattgactgtcttccacccatctgtgttctttcgggtgaaattacctcattttatttagtgaggaaagacaggtttattccctgttacatggggatttggaaattgggtatcctaaagcaagtaactgttcaaccaccagtcaaaagaggggagggatgttgtgcgagtaatgagtgatggtataccatcaccattccactcggccacaaagccagatacttgaaataaacctactccaaatgtatcagttcagtcttgaaccatggattacatatgtttacactaaatatttcaaattggcttatttggaaatctatgtaatataaactgatgtaaagtgtgttgtaacttttcagctgagacagttgatgccttcgtcatgattttagaataaattcttaagttaatgcaagtgctttttaagagactttttacagatttgtatgctttcctaaagcactaaagttacaaattaaaaagctttaaaaactttgaccaaaaatttgacaaaatgacatgtaaactgacttttcccgtattagtattccaaagatgcttaaaagtggcttgtggcatttatgagaaagtctttgtgtcacatttcaggaaaggactttgatttctctttgttatttaatcactgatgtggtctaaacccacgataatatgtatctttccttttaaactggattttatgttgtctcattaaaatctgcttaaagatagaataaaattcattatttgtaaaaaaaaaaaa

SEQ ID NO: 37271 - DNA, 11667 bp, Homo sapiens
acacagtggtcctccgccggctacggcgctgcgtcactggtttgcaggcgctttcctcttggaagtggcgactgctgcgggcctgagcgctggtctcacgcgcctcgggagccaggttggcggcgcgatgaggcgcagcaaggctgacgtggagcggtacatcgcctcggtgcagggctccaccccgtcgcctcgacagaagtcaatgaaaggattctattttgcaaagctgtattatgaagctaaagaatatgatcttgctaaaaaatacatatgtacttacattaatgtgcaagagagggatcccaaagctcacagatttctgggtcttctttatgaattggaagaaaacacagacaaagccgttgaatgttacaggcgttcagtggaattaaacccaacacaaaaagatcttgtgttgaagattgcagaattgctttgtaaaaatgatgttactgatggaagagcaaaatactggcttgaaagagcagccaaacttttcccaggaagtcctgcaatttataaactaaaggaacagcttctagattgtgaaggtgaagatggatggaataaactttttgacttgattcagtcagaactttatgtaagacctgatgacgtccatgtgaacatccggctagtggaggtgtatcgctcaactaaaagattgaaggatgctgtggcccactgccatgaggcagagaggaacatagctttgcgttcaagtttagaatggaattcgtgtgttgtacagacccttaaggaatatctggagtctttacagtgtttggagtctgataaaagtgactggcgagcaaccaatacagacttactgctggcctatgctaatcttatgcttcttacgctttccactagagatgtgcaggaaagtagagaattactgcaaagttttgatagtgctcttcagtctgtgaaatctttgggtggaaatgatgaactgtcagctactttcttagaaatgaaaggacatttctacatgcatgctggttctctgcttttgaagatgggtcagcatagtagtaatgttcaatggcgagctctttctgagctggctgcattgtgctatctcatagcatttcaggttccaagaccaaagattaaattaataaaaggtgaagctggacaaaatctgctggaaatgatggcctgtgaccgactgagccaatcagggcacatgttgctaaacttaagtcgtggcaagcaagattttttaaaagagattgttgaaacttttgccaacaaaagcgggcagtctgcattatatgatgctctgttttctagtcagtcacctaaggatacatcttttcttggtagcgatgatattggaaacattgatgtacgagaaccagagcttgaagatttgactagatacgatgttggtgctattcgagcacataatggtagtcttcagcaccttacttggcttggcttacagtggaattcattgcctgctttacctggaatccgaaaatggctaaaacagcttttccatcatttgccccatgaaacctcaaggcttgaaacaaatgcacctgaatcaatatgtattttagatcttgaagtatttctccttggagtagtatataccagccacttacaattaaaggagaaatgtaattctcaccacagctcctatcagccgttatgcctgccccttcctgtgtgtaaacagctttgtacagaaagacaaaaatcttggtgggatgcggtttgtactctgattcacagaaaagcagtacctggaaacgtagcaaaattgagacttctagttcagcatgaaataaacactctaagagcccaggaaaaacatggccttcaacctgctctgcttgtacattgggcagaatgccttcagaaaacgggcagcggtcttaattctttttatgatcaacgagaatacatagggagaagtgttcattattggaagaaagttttgccattgttgaagataataaaaaagaagaacagtattcctgaacctattgatcctctgtttaaacattttcatagtgtagacattcaggcatcagaaattgttgaatatgaagaagacgcacacataacttttgctatattggatgcagtaaatggaaatatagaagatgctgtgactgcttttgaatctataaaaagtgttgtttcttattggaatcttgcactgatttttcacaggaaggcagaagacattgaaaatgatgccctttctcctgaagaacaagaagaatgcaaaaattatctgagaaagaccagggactacctaataaagattatagatgacagtgattcaaatctttcagtggtcaagaaattgcctgtgcccctggagtctgtaaaagagatgcttaattcagtcatgcaggaactcgaagactatagtgaaggaggtcctctctataaaaatggttctttgcgaaatgcagattcagaaataaaacattctacaccgtctcctaccagatattcactatcaccaagtaaaagttacaagtattctcccaaaacaccacctcgatgggcagaagatcagaattctttactgaaaatgatttgccaacaagtagaggccattaagaaagaaatgcaggagttgaaactaaatagcagtaactcagcatcccctcatcgttggcccacagagaattatggaccagactcggtgcctgatggatatcaggggtcacagacatttcatggggctccactaacagttgcaactactggcccttcagtatattatagtcagtcaccagcatataattcccagtatcttctcagaccagcagctaatgttactcccacaaagggcccagtctatggcatgaataggcttccaccccaacagcatatttatgcctatccgcaacagatgcacacaccgccagtgcaaagctcatctgcttgtatgttctctcaggagatgtatggtcctcctgcattgcgttttgagtctcctgcaacgggaattctatcgcccaggggtgatgattactttaattacaatgttcaacagacaagcacaaatccacctttgccagaaccaggatatttcacaaaacctccgattgcagctcatgcttcaagatctgcagaatctaagactatagaatttgggaaaactaattttgttcagcccatgccgggtgaaggattaaggccatctttgccaacacaagcacacacaacacagccaactccttttaaatttaactcaaatttcaaatcaaatgatggtgacttcacgttttcctcaccacaggttgtgacacagccccctcctgcagcttacagtaacagtgaaagccttttaggtctcctgacttcagataaacccttgcaaggagatggctatagtggagccaaaccaattcctggtggtcaaaccattgggcctcgaaatacattcaattttggaagcaaaaatgtgtctggaatttcatttacagaaaacatggggtcgagtcagcaaaagaattctggttttcggcgaagtgatgatatgtttactttccatggtccagggaaatcagtatttggaacacccactttagagacagcaaacaagaatcatgagacagatggaggaagtgcccatggggatgatgatgatgacggtcctcactttgagcctgtagtacctcttcctgataagattgaagtaaaaactggtgaggaagatgaagaagaattcttttgcaaccgcgcgaaattgtttcgtttcgatgtagaatccaaagaatggaaagaacgtgggattggcaatgtaaaaatactgaggcataaaacatctggtaaaattcgccttctaatgagacgagagcaagtattgaaaatctgtgcaaatcattacatcagtccagatatgaaattgacaccaaatgctggatcagacagatcttttgtatggcatgcccttgattatgcagatgagttgccaaaaccagaacaacttgctattaggttcaaaactcctgaggaagcagcactttttaaatgcaagtttgaagaagcccagagcattttaaaagccccaggaacaaatgtagccatggcgtcaaatcaggctgtcagaattgtaaaagaacccacaagtcatgataacaaggatatttgcaaatctgatgctggaaacctgaattttgaatttcaggttgcaaagaaagaagggtcttggtggcattgtaacagctgctcattaaagaatgcttcaactgctaagaaatgtgtatcatgccaaaatctaaacccaagcaataaagagctcgttggcccaccattagctgaaactgtttttactcctaaaaccagcccagagaatgttcaagatcgatttgcattggtgactccaaagaaagaaggtcactgggattgtagtatttgtttagtaagaaatgaacctactgtatctaggtgcattgcgtgtcagaatacaaaatctgctaacaaaagtggatcttcatttgttcatcaagcttcatttaaatttggccagggagatcttcctaaacctattaacagtgatttcagatctgttttttctacaaaggaaggacagtgggattgcagtgcatgtttggtacaaaatgaggggagctctacaaaatgtgctgcttgtcagaatccgagaaaacagagtctacctgctacttctattccaacacctgcctcttttaagtttggtacttcagagacaagtaaaactctaaaaagtggatttgaagacatgtttgctaagaaggaaggacagtgggattgcagttcatgcttagtgcgaaatgaagcaaatgctacaagatgtgttgcttgtcagaatccggataaaccaagtccatctacttctgttccagctcctgcctcttttaagtttggtacttcagagacaagcaaggctccaaagagcggatttgagggaatgttcactaagaaggagggacagtgggattgcagtgtgtgcttagtaagaaatgaagccagtgctaccaaatgtattgcttgtcagaatccaggtaaacaaaatcaaactacttctgcagtttcaacacctgcctcttcagagacaagcaaggctccaaagagcggatttgagggaatgttcactaagaaggagggacagtgggattgcagtgtgtgcttagtaagaaatgaagccagtgctaccaaatgtattgcttgtcagaatccaggtaaacaaaatcaaactacttctgcagtttcaacacctgcctcttcagagacaagcaaggctccaaagagcggatttgagggaatgttcactaagaaggaaggacagtgggattgcagtgtgtgcttagtaagaaatgaagccagtgctaccaaatgtattgcttgtcagtgtccaagtaaacaaaatcaaacaactgcaatttcaacacctgcctcttcggagataagcaaggctccaaagagtggatttgaaggaatgttcatcaggaaaggacagtgggattgtagtgtttgctgtgtacaaaatgagagttcttccttaaaatgtgtggcttgtgatgcctctaaaccaactcataaacctattgcagaagctccttcagctttcacactgggctcagaaatgaagttgcatgactcttctggaagtcaggtgggaacaggatttaaaagtaatttctcagaaaaagcttctaagtttggcaatacagagcaaggattcaaatttgggcatgtggatcaagaaaattcaccttcatttatgtttcagggttcttctaatacagaatttaagtcaaccaaagaaggattttccatccctgtgtctgctgatggatttaaatttggcatttcggaaccaggaaatcaagaaaagaaaagtgaaaagcctcttgaaaatggtactggcttccaggctcaggatattagtggccagaagaatggccgtggtgtgatttttggccaaacaagtagcacttttacatttgcagatcttgcaaaatcaacttcaggagaaggatttcagtttggcaaaaaagaccccaatttcaagggattttcaggtgctggagaaaaattattctcatcacaatacggtaaaatggccaataaagcaaacacttccggtgactttgagaaagatgatgatgcctataagactgaggacagcgatgacatccattttgaaccagtagttcaaatgcccgaaaaagtagaacttgtaacaggagaagaagatgaaaaagttctgtattcacagcgggtaaaactatttagatttgatgctgaggtaagtcagtggaaagaaaggggcttggggaacttaaaaattctcaaaaacgaggtcaatggcaaactaagaatgctgatgcgaagagaacaagtactaaaagtgtgtgctaatcattggataacgactacgatgaacctgaagcctctctctggatcagatagagcatggatgtggttagccagtgatttctctgatggtgatgccaaactagagcagttggcagcaaaatttaaaacaccagagctggctgaagaattcaagcagaaatttgaggaatgccagcggcttctgttagacataccacttcaaactccccataaacttgtagatactggcagagctgccaagttaatacagagagctgaagaaatgaagagtggactgaaagatttcaaaacatttttgacaaatgatcaaacaaaagtcactgaggaagaaaataagggttcaggtacaggtgcggccggtgcctcagacacaacaataaaacccaatcctgaaaacactgggcccacattagaatgggataactatgatttaagggaagatgctttggatgatagtgtcagtagtagctcagtacatgcttctccattggcaagtagccctgtgagaaaaaatcttttccgttttggtgagtcaacaacaggatttaacttcagttttaaatctgctttgagtccatctaagtctcctgccaagttgaatcagagtgggacttcagttggcactgatgaagaatctgatgttactcaagaagaagagagagatggacagtactttgaacctgttgttcctttacctgatctagttgaagtatccagtggtgaggaaaatgaacaagttgtttttagtcacagggcaaaactctacagatatgataaagatgttggtcaatggaaagaaaggggcattggtgatataaagattttacagaattatgataataagcaagttcgtatagtgatgagaagggaccaagtattaaaactttgtgccaatcacagaataactccagacatgactttgcaaaatatgaaagggacagaaagagtatggttgtggactgcatgtgattttgcagatggagaaagaaaagtagagcatttagctgttcgttttaaactacaggatgttgcagactcgtttaagaaaatttttgatgaagcaaaaacagcccaggaaaaagattctttgataacacctcatgtttctcggtcaagcactcccagagagtcaccatgtggcaaaattgctgtagctgtattagaagaaaccacaagagagaggacagatgttattcagggtgatgatgtagcagatgcaacttcagaagttgaagtgtctagcacatctgaaacaacaccaaaagcagtggtttctcctccaaagtttgtatttggttcagagtctgttaaaagcatttttagtagtgaaaaatcaaaaccatttgcattcggcaacagttcagccactgggtctttgtttggatttagttttaatgcacctttgaaaagtaacaatagtgaaactagttcagtagcccagagtggatctgaaagcaaagtggaacctaaaaaatgtgaactgtcaaagaactctgatatcgaacagtcttcagatagcaaagtcaaaaatctctttgcttcctttccaacggaagaatcttcaatcaactacacatttaaaacaccagaaaaggcaaaagagaagaaaaaacctgaagattctccctcagatgatgatgttctcattgtatatgaactaactccaaccgctgagcagaaagcccttgcaaccaaacttaaacttcctccaactttcttctgctacaagaatagaccagattatgttagtgaagaagaggaggatgatgaagatttcgaaacagctgtcaagaaacttaatggaaaactatatttggatggctcagaaaaatgtagacccttggaagaaaatacagcagataatgagaaagaatgtattattgtttgggaaaagaaaccaacagttgaagagaaggcaaaagcagatacgttaaaacttccacctacatttttttgtggagtctgtagtgatactgatgaagacaatggaaatggggaagactttcaatcagagcttcaaaaagttcaggaagctcaaaaatctcagacagaagaaataactagcacaactgacagtgtatatacaggtgggactgaagtgatggtaccttctttctgtaaatctgaagaacctgattctattaccaaatccattagttcaccatctgtttcctctgaaactatggacaaacctgtagatttgtcaactagaaaggaaattgatacagattctacaagccaaggggaaagcaagatagtttcatttggatttggaagtagcacagggctctcatttgcagacttggcttccagtaattctggagattttgcttttggttctaaagataaaaatttccaatgggcaaatactggagcagctgtgtttggaacacagtcagtcggaacccagtcagccggtaaagttggtgaagatgaagatggtagtgatgaagaagtagttcataatgaagatatccattttgaaccaatagtgtcactaccagaggtagaagtaaaatctggagaagaagatgaagaaattttgtttaaagagagagccaaactttatagatgggatcgggatgtcagtcagtggaaggagcgcggtgttggagatataaagattctttggcatacaatgaagaattattaccggatcctaatgagaagagaccaggtttttaaagtgtgtgcaaaccacgttattactaaaacaatggaattaaagcccttaaatgtttcaaataatgctttagtttggactgcctcagattatgctgatggagaagcaaaagtagaacagcttgcagtgagatttaaaactaaagaagtagctgattgtttcaagtcactggcagcagaattatcaaaggagaccaatcctgtggtgttttttgatgtttgtgcggacggtgaacctctagggcggataactatggaattattttcaaacattgttcctcggactgctgagaacttcagagcactatgcactggagagaaaggctttggtttcaagaattccatttttcacagagtaattccagattttgtttgccaaggaggagatatcaccaaacatgatggaacaggcggacagtccatttatggagacaaatttgaagatgaaaattttgatgtgaaacatactggtcctggtttactatccatggccaatcaaggccagaataccaataattctcaatttgttataacactgaagaaagcagaacatttggactttaagcatgtagtatttgggtttgttaaggatggcatggatactgtgaaaaagattgaatcatttggttctcccaaagggtctgtttgtcgaagaataactatcacagaatgtggacagatataaaatcattgttgttcatagaaaatttcatctgtataagcagttggattgaagcttagctattacaatttgatagttatgttcagcttttgaaaatggacgtttccgatttacaaatgtaaaattgcagcttatagctgttgtcactttttaatgtgttataattgaccttgcatggtgtgaaataaaagtttaaacactggtgtatttcaggtgtacttgtgtttatgtactcctgacgtattaaaatggaataatactaatcttgttaaaagcaatagacctcaaactattgaaggaatatgatatatgcaatttaattttaattccttttaagatatttggacttcctgcatggatatacttaccatttgaataaagggaccacaacttggataatttaattttaggtttgaaatatatttggtaatcttaactattggtgtactcatttatgcatagagactcgtttatgaatgggtagagccacagaacgtatagagttaaccaaagtgctcttctctagaatctttacacctcctgtgtggttacaagttaactttgtaagtagcgtaccttccttccttaaaatatctagcttcctgtgccctttcatagatattcgattaatttttacattttaaacaagttgactatttcctttaggggttttgtttcaaacttttctgtcatctgtctctactacctcagaaactgcagcttggttctgatgatagaaattgaatttttccttgtagttattgtgataaagtatgaatatttttagaaagtctataccatgttctttcgttaaagatttgctttatacaagattgttgcagtacctttttctggtaaattttgtagcagaaataaaatgacaattcctaagagccactgacatccaaaaaattcattacttacgcttcgggttcattctaaagtaaggaagacaatttaaaggcagtaaattcaaactgctgcataatttccagagctcctagtttctcaagtttgatacacaccaaaaacgtatttggaaatggcttgtatcaaatgttaggcaaattgctaaagaaaagaggatgttcttattggcctactcaatatggaactacaaagaatccaggtagaacacaaaattttgtatattgcaattatgaatattgactgtcttccacccatctgtgttctttcgggtgaaattacctcattttatttagtgaggaaagacaggtttattccctgttacatggggatttggaaattgggtatcctaaagcaagtaactgttcaaccaccagtcaaaagaggggagggatgttgtgcgagtaatgagtgatggtataccatcaccattccactcggccacaaagccagatacttgaaataaacctactccaaatgtatcagttcagtcttgaaccatggattacatatgtttacactaaatatttcaaattggcttatttggaaatctatgtaatataaactgatgtaaagtgtgttgtaacttttcagctgagacagttgatgccttcgtcatgattttagaataaattcttaagttaatgcaagtgctttttaagagactttttacagatttgtatgctttcctaaagcactaaagttacaaattaaaaagctttaaaaactttgaccaaaaatttgacaaaatgacatgtaaactgacttttcccgtattagtattccaaagatgcttaaaagtggcttgtggcatttatgagaaagtctttgtgtcacatttcaggaaaggactttgatttctctttgttatttaatcactgatgtggtctaaacccacgataatatgtatctttccttttaaactggattttatgttgtctcattaaaatctgcttaaagatagaataaaattcattatttgtaaaaaaaaaaaa

SEQ ID NO: 37272 - DNA, 11669 bp, Homo sapiens
acacagtggtcctccgccggctacggcgctgcgtcactggtttgcaggcgctttcctcttggaagtggcgactgctgcgggcctgagcgctggtctcacgcgcctcgggagccaggttggcggcgcgatgaggcgcagcaaggctgacgtggagcggtacatcgcctcggtgcagggctccaccccgtcgcctcgacagaagtcaatgaaaggattctattttgcaaagctgtattatgaagctaaagaatatgatcttgctaaaaaatacatatgtacttacattaatgtgcaagagagggatcccaaagctcacagatttctgggtcttctttatgaattggaagaaaacacagacaaagccgttgaatgttacaggcgttcagtggaattaaacccaacacaaaaagatcttgtgttgaagattgcagaattgctttgtaaaaatgatgttactgatggaagagcaaaatactggcttgaaagagcagccaaacttttcccaggaagtcctgcaatttataaactaaaggaacagcttctagattgtgaaggtgaagatggatggaataaactttttgacttgattcagtcagaactttatgtaagacctgatgacgtccatgtgaacatccggctagtggaggtgtatcgctcaactaaaagattgaaggatgctgtggcccactgccatgaggcagagaggaacatagctttgcgttcaagtttagaatggaattcgtgtgttgtacagacccttaaggaatatctggagtctttacagtgtttggagtctgataaaagtgactggcgagcaaccaatacagacttactgctggcctatgctaatcttatgcttcttacgctttccactagagatgtgcaggaaagtagagaattactgcaaagttttgatagtgctcttcagtctgtgaaatctttgggtggaaatgatgaactgtcagctactttcttagaaatgaaaggacatttctacatgcatgctggttctctgcttttgaagatgggtcagcatagtagtaatgttcaatggcgagctctttctgagctggctgcattgtgctatctcatagcatttcaggttccaagaccaaagattaaattaataaaaggtgaagctggacaaaatctgctggaaatgatggcctgtgaccgactgagccaatcagggcacatgttgctaaacttaagtcgtggcaagcaagattttttaaaagagattgttgaaacttttgccaacaaaagcgggcagtctgcattatatgatgctctgttttctagtcagtcacctaaggatacatcttttcttggtagcgatgatattggaaacattgatgtacgagaaccagagcttgaagatttgactagatacgatgttggtgctattcgagcacataatggtagtcttcagcaccttacttggcttggcttacagtggaattcattgcctgctttacctggaatccgaaaatggctaaaacagcttttccatcatttgccccatgaaacctcaaggcttgaaacaaatgcacctgaatcaatatgtattttagatcttgaagtatttctccttggagtagtatataccagccacttacaattaaaggagaaatgtaattctcaccacagctcctatcagccgttatgcctgccccttcctgtgtgtaaacagctttgtacagaaagacaaaaatcttggtgggatgcggtttgtactctgattcacagaaaagcagtacctggaaacgtagcaaaattgagacttctagttcagcatgaaataaacactctaagagcccaggaaaaacatggccttcaacctgctctgcttgtacattgggcagaatgccttcagaaaacgggcagcggtcttaattctttttatgatcaacgagaatacatagggagaagtgttcattattggaagaaagttttgccattgttgaagataataaaaaagaagaacagtattcctgaacctattgatcctctgtttaaacattttcatagtgtagacattcaggcatcagaaattgttgaatatgaagaagacgcacacataacttttgctatattggatgcagtaaatggaaatatagaagatgctgtgactgcttttgaatctataaaaagtgttgtttcttattggaatcttgcactgatttttcacaggaaggcagaagacattgaaaatgatgccctttctcctgaagaacaagaagaatgcaaaaattatctgagaaagaccagggactacctaataaagattatagatgacagtgattcaaatctttcagtggtcaagaaattgcctgtgcccctggagtctgtaaaagagatgcttaattcagtcatgcaggaactcgaagactatagtgaaggaggtcctctctataaaaatggttctttgcgaaatgcagattcagaaataaaacattctacaccgtctcctaccagatattcactatcaccaagtaaaagttacaagtattctcccaaaacaccacctcgatgggcagaagatcagaattctttactgaaaatgatttgccaacaagtagaggccattaagaaagaaatgcaggagttgaaactaaatagcagtaactcagcatcccctcatcgttggcccacagagaattatggaccagactcggtgcctgatggatatcaggggtcacagacatttcatggggctccactaacagttgcaactactggcccttcagtatattatagtcagtcaccagcatataattcccagtatcttctcagaccagcagctaatgttactcccacaaagggcccagtctatggcatgaataggcttccaccccaacagcatatttatgcctatccgcaacagatgcacacaccgccagtgcaaagctcatctgcttgtatgttctctcaggagatgtatggtcctcctgcattgcgttttgagtctcctgcaacgggaattctatcgcccaggggtgatgattactttaattacaatgttcaacagacaagcacaaatccacctttgccagaaccaggatatttcacaaaacctccgattgcagctcatgcttcaagatctgcagaatctaagactatagaatttgggaaaactaattttgttcagcccatgccgggtgaaggattaaggccatctttgccaacacaagcacacacaacacagccaactccttttaaatttaactcaaatttcaaatcaaatgatggtgacttcacgttttcctcaccacaggttgtgacacagccccctcctgcagcttacagtaacagtgaaagccttttaggtctcctgacttcagataaacccttgcaaggagatggctatagtggagccaaaccaattcctggtggtcaaaccattgggcctcgaaatacattcaattttggaagcaaaaatgtgtctggaatttcatttacagaaaacatggggtcgagtcagcaaaagaattctggttttcggcgaagtgatgatatgtttactttccatggtccagggaaatcagtatttggaacacccactttagagacagcaaacaagaatcatgagacagatggaggaagtgcccatggggatgatgatgatgacggtcctcactttgagcctgtagtacctcttcctgataagattgaagtaaaaactggtgaggaagatgaagaagaattcttttgcaaccgcgcgaaattgtttcgtttcgatgtagaatccaaagaatggaaagaacgtgggattggcaatgtaaaaatactgaggcataaaacatctggtaaaattcgccttctaatgagacgagagcaagtattgaaaatctgtgcaaatcattacatcagtccagatatgaaattgacaccaaatgctggatcagacagatcttttgtatggcatgcccttgattatgcagatgagttgccaaaaccagaacaacttgctattaggttcaaaactcctgaggaagcagcactttttaaatgcaagtttgaagaagcccagagcattttaaaagccccaggaacaaatgtagccatggcgtcaaatcaggctgtcagaattgtaaaagaacccacaagtcatgataacaaggatatttgcaaatctgatgctggaaacctgaattttgaatttcaggttgcaaagaaagaagggtcttggtggcattgtaacagctgctcattaaagaatgcttcaactgctaagaaatgtgtatcatgccaaaatctaaacccaagcaataaagagctcgttggcccaccattagctgaaactgtttttactcctaaaaccagcccagagaatgttcaagatcgatttgcattggtgactccaaagaaagaaggtcactgggattgtagtatttgtttagtaagaaatgaacctactgtatctaggtgcattgcgtgtcagaatacaaaatctgctaacaaaagtggatcttcatttgttcatcaagcttcatttaaatttggccagggagatcttcctaaacctattaacagtgatttcagatctgttttttctacaaaggaaggacagtgggattgcagtgcatgtttggtacaaaatgaggggagctctacaaaatgtgctgcttgtcagaatccgagaaaacagagtctacctgctacttctattccaacacctgcctcttttaagtttggtacttcagagacaagtaaaactctaaaaagtggatttgaagacatgtttgctaagaaggaaggacagtgggattgcagttcatgcttagtgcgaaatgaagcaaatgctacaagatgtgttgcttgtcagaatccggataaaccaagtccatctacttctgttccagctcctgcctcttttaagtttggtacttcagagacaagcaaggctccaaagagcggatttgagggaatgttcactaagaaggagggacagtgggattgcagtgtgtgcttagtaagaaatgaagccagtgctaccaaatgtattgcttgtcagaatccaggtaaacaaaatcaaactacttctgcagtttcaacacctgcctcttcagagacaagcaaggctccaaagagcggatttgagggaatgttcactaagaaggagggacagtgggattgcagtgtgtgcttagtaagaaatgaagccagtgctaccaaatgtattgcttgtcagaatccaggtaaacaaaatcaaactacttctgcagtttcaacacctgcctcttcagagacaagcaaggctccaaagagcggatttgagggaatgttcactaagaaggaaggacagtgggattgcagtgtgtgcttagtaagaaatgaagccagtgctaccaaatgtattgcttgtcagtgtccaagtaaacaaaatcaaacaactgcaatttcaacacctgcctcttcggagataagcaaggctccaaagagtggatttgaaggaatgttcatcaggaaaggacagtgggattgtagtgtttgctgtgtacaaaatgagagttcttccttaaaatgtgtggcttgtgatgcctctaaaccaactcataaacctattgcagaagctccttcagctttcacactgggctcagaaatgaagttgcatgactcttctggaagtcaggtgggaacaggatttaaaagtaatttctcagaaaaagcttctaagtttggcaatacagagcaaggattcaaatttgggcatgtggatcaagaaaattcaccttcatttatgtttcagggttcttctaatacagaatttaagtcaaccaaagaaggattttccatccctgtgtctgctgatggatttaaatttggcatttcggaaccaggaaatcaagaaaagaaaagtgaaaagcctcttgaaaatggtactggcttccaggctcaggatattagtggccagaagaatggccgtggtgtgatttttggccaaacaagtagcacttttacatttgcagatcttgcaaaatcaacttcaggagaaggatttcagtttggcaaaaaagaccccaatttcaagggattttcaggtgctggagaaaaattattctcatcacaatacggtaaaatggccaataaagcaaacacttccggtgactttgagaaagatgatgatgcctataagactgaggacagcgatgacatccattttgaaccagtagttcaaatgcccgaaaaagtagaacttgtaacaggagaagaagatgaaaaagttctgtattcacagcgggtaaaactatttagatttgatgctgaggtaagtcagtggaaagaaaggggcttggggaacttaaaaattctcaaaaacgaggtcaatggcaaactaagaatgctgatgcgaagagaacaagtactaaaagtgtgtgctaatcattggataacgactacgatgaacctgaagcctctctctggatcagatagagcatggatgtggttagccagtgatttctctgatggtgatgccaaactagagcagttggcagcaaaatttaaaacaccagagctggctgaagaattcaagcagaaatttgaggaatgccagcggcttctgttagacataccacttcaaactccccataaacttgtagatactggcagagctgccaagttaatacagagagctgaagaaatgaagagtggactgaaagatttcaaaacatttttgacaaatgatcaaacaaaagtcactgaggaagaaaataagggttcaggtacaggtgcggccggtgcctcagacacaacaataaaacccaatcctgaaaacactgggcccacattagaatgggataactatgatttaagggaagatgctttggatgatagtgtcagtagtagctcagtacatgcttctccattggcaagtagccctgtgagaaaaaatcttttccgttttggtgagtcaacaacaggatttaacttcagttttaaatctgctttgagtccatctaagtctcctgccaagttgaatcagagtgggacttcagttggcactgatgaagaatctgatgttactcaagaagaagagagagatggacagtactttgaacctgttgttcctttacctgatctagttgaagtatccagtggtgaggaaaatgaacaagttgtttttagtcacagggcaaaactctacagatatgataaagatgttggtcaatggaaagaaaggggcattggtgatataaagattttacagaattatgataataagcaagttcgtatagtgatgagaagggaccaagtattaaaactttgtgccaatcacagaataactccagacatgactttgcaaaatatgaaagggacagaaagagtatggttgtggactgcatgtgattttgcagatggagaaagaaaagtagagcatttagctgttcgttttaaactacaggatgttgcagactcgtttaagaaaatttttgatgaagcaaaaacagcccaggaaaaagattctttgataacacctcatgtttctcggtcaagcactcccagagagtcaccatgtggcaaaattgctgtagctgtattagaagaaaccacaagagagaggacagatgttattcagggtgatgatgtagcagatgcaacttcagaagttgaagtgtctagcacatctgaaacaacaccaaaagcagtggtttctcctccaaagtttgtatttggttcagagtctgttaaaagcatttttagtagtgaaaaatcaaaaccatttgcattcggcaacagttcagccactgggtctttgtttggatttagttttaatgcacctttgaaaagtaacaatagtgaaactagttcagtagcccagagtggatctgaaagcaaagtggaacctaaaaaatgtgaactgtcaaagaactctgatatcgaacagtcttcagatagcaaagtcaaaaatctctttgcttcctttccaacggaagaatcttcaatcaactacacatttaaaacaccagaaaaggcaaaagagaagaaaaaacctgaagattctccctcagatgatgatgttctcattgtatatgaactaactccaaccgctgagcagaaagcccttgcaaccaaacttaaacttcctccaactttcttctgctacaagaatagaccagattatgttagtgaagaagaggaggatgatgaagatttcgaaacagctgtcaagaaacttaatggaaaactatatttggatggctcagaaaaatgtagacccttggaagaaaatacagcagataatgagaaagaatgtattattgtttgggaaaagaaaccaacagttgaagagaaggcaaaagcagatacgttaaaacttccacctacatttttttgtggagtctgtagtgatactgatgaagacaatggaaatggggaagactttcaatcagagcttcaaaaagttcaggaagctcaaaaatctcagacagaagaaataactagcacaactgacagtgtatatacaggtgggactgaagtgatggtaccttctttctgtaaatctgaagaacctgattctattaccaaatccattagttcaccatctgtttcctctgaaactatggacaaacctgtagatttgtcaactagaaaggaaattgatacagattctacaagccaaggggaaagcaagatagtttcatttggatttggaagtagcacagggctctcatttgcagacttggcttccagtaattctggagattttgcttttggttctaaagataaaaatttccaatgggcaaatactggagcagctgtgtttggaacacagtcagtcggaacccagtcagccggtaaagttggtgaagatgaagatggtagtgatgaagaagtagttcataatgaagatatccattttgaaccaatagtgtcactaccagaggtagaagtaaaatctggagaagaagatgaagaaattttgtttaaagagagagccaaactttatagatgggatcgggatgtcagtcagtggaaggagcgcggtgttggagatataaagattctttggcatacaatgaagaattattaccggatcctaatgagaagagaccaggtttttaaagtgtgtgcaaaccacgttattactaaaacaatggaattaaagcccttaaatgtttcaaataatgctttagtttggactgcctcagattatgctgatggagaagcaaaagtagaacagcttgcagtgagatttagaatttaatgaaactccagaaaggacatgtatcactggcagcagaattatcaaaggagaccaatcctgtggtgttttttgatgtttgtgcggacggtgaacctctagggcggataactatggaattattttcaaacattgttcctcggactgctgagaacttcagagcactatgcactggagagaaaggctttggtttcaagaattccatttttcacagagtaattccagattttgtttgccaaggaggagatatcaccaaacatgatggaacaggcggacagtccatttatggagacaaatttgaagatgaaaattttgatgtgaaacatactggtcctggtttactatccatggccaatcaaggccagaataccaataattctcaatttgttataacactgaagaaagcagaacatttggactttaagcatgtagtatttgggtttgttaaggatggcatggatactgtgaaaaagattgaatcatttggttctcccaaagggtctgtttgtcgaagaataactatcacagaatgtggacagatataaaatcattgttgttcatagaaaatttcatctgtataagcagttggattgaagcttagctattacaatttgatagttatgttcagcttttgaaaatggacgtttccgatttacaaatgtaaaattgcagcttatagctgttgtcactttttaatgtgttataattgaccttgcatggtgtgaaataaaagtttaaacactggtgtatttcaggtgtacttgtgtttatgtactcctgacgtattaaaatggaataatactaatcttgttaaaagcaatagacctcaaactattgaaggaatatgatatatgcaatttaattttaattccttttaagatatttggacttcctgcatggatatacttaccatttgaataaagggaccacaacttggataatttaattttaggtttgaaatatatttggtaatcttaactattggtgtactcatttatgcatagagactcgtttatgaatgggtagagccacagaacgtatagagttaaccaaagtgctcttctctagaatctttacacctcctgtgtggttacaagttaactttgtaagtagcgtaccttccttccttaaaatatctagcttcctgtgccctttcatagatattcgattaatttttacattttaaacaagttgactatttcctttaggggttttgtttcaaacttttctgtcatctgtctctactacctcagaaactgcagcttggttctgatgatagaaattgaatttttccttgtagttattgtgataaagtatgaatatttttagaaagtctataccatgttctttcgttaaagatttgctttatacaagattgttgcagtacctttttctggtaaattttgtagcagaaataaaatgacaattcctaagagccactgacatccaaaaaattcattacttacgcttcgggttcattctaaagtaaggaagacaatttaaaggcagtaaattcaaactgctgcataatttccagagctcctagtttctcaagtttgatacacaccaaaaacgtatttggaaatggcttgtatcaaatgttaggcaaattgctaaagaaaagaggatgttcttattggcctactcaatatggaactacaaagaatccaggtagaacacaaaattttgtatattgcaattatgaatattgactgtcttccacccatctgtgttctttcgggtgaaattacctcattttatttagtgaggaaagacaggtttattccctgttacatggggatttggaaattgggtatcctaaagcaagtaactgttcaaccaccagtcaaaagaggggagggatgttgtgcgagtaatgagtgatggtataccatcaccattccactcggccacaaagccagatacttgaaataaacctactccaaatgtatcagttcagtcttgaaccatggattacatatgtttacactaaatatttcaaattggcttatttggaaatctatgtaatataaactgatgtaaagtgtgttgtaacttttcagctgagacagttgatgccttcgtcatgattttagaataaattcttaagttaatgcaagtgctttttaagagactttttacagatttgtatgctttcctaaagcactaaagttacaaattaaaaagctttaaaaactttgaccaaaaatttgacaaaatgacatgtaaactgacttttcccgtattagtattccaaagatgcttaaaagtggcttgtggcatttatgagaaagtctttgtgtcacatttcaggaaaggactttgatttctctttgttatttaatcactgatgtggtctaaacccacgataatatgtatctttccttttaaactggattttatgttgtctcattaaaatctgcttaaagatagaataaaattcattatttgtaaaaaaaaaaaa

SEQ ID NO: 37273 - DNA, 11691 bp, Homo sapiens
acacagtggtcctccgccggctacggcgctgcgtcactggtttgcaggcgctttcctcttggaagtggcgactgctgcgggcctgagcgctggtctcacgcgcctcgggagccaggttggcggcgcgatgaggcgcagcaaggctgacgtggagcggtacatcgcctcggtgcagggctccaccccgtcgcctcgacagaagtcaatgaaaggattctattttgcaaagctgtattatgaagctaaagaatatgatcttgctaaaaaatacatatgtacttacattaatgtgcaagagagggatcccaaagctcacagatttctgggtcttctttatgaattggaagaaaacacagacaaagccgttgaatgttacaggcgttcagtggaattaaacccaacacaaaaagatcttgtgttgaagattgcagaattgctttgtaaaaatgatgttactgatggaagagcaaaatactggcttgaaagagcagccaaacttttcccaggaagtcctgcaatttataaactaaaggaacagcttctagattgtgaaggtgaagatggatggaataaactttttgacttgattcagtcagaactttatgtaagacctgatgacgtccatgtgaacatccggctagtggaggtgtatcgctcaactaaaagattgaaggatgctgtggcccactgccatgaggcagagaggaacatagctttgcgttcaagtttagaatggaattcgtgtgttgtacagacccttaaggaatatctggagtctttacagtgtttggagtctgataaaagtgactggcgagcaaccaatacagacttactgctggcctatgctaatcttatgcttcttacgctttccactagagatgtgcaggaaagtagagaattactgcaaagttttgatagtgctcttcagtctgtgaaatctttgggtggaaatgatgaactgtcagctactttcttagaaatgaaaggacatttctacatgcatgctggttctctgcttttgaagatgggtcagcatagtagtaatgttcaatggcgagctctttctgagctggctgcattgtgctatctcatagcatttcaggttccaagaccaaagattaaattaataaaaggtgaagctggacaaaatctgctggaaatgatggcctgtgaccgactgagccaatcagggcacatgttgctaaacttaagtcgtggcaagcaagattttttaaaagagattgttgaaacttttgccaacaaaagcgggcagtctgcattatatgatgctctgttttctagtcagtcacctaaggatacatcttttcttggtagcgatgatattggaaacattgatgtacgagaaccagagcttgaagatttgactagatacgatgttggtgctattcgagcacataatggtagtcttcagcaccttacttggcttggcttacagtggaattcattgcctgctttacctggaatccgaaaatggctaaaacagcttttccatcatttgccccatgaaacctcaaggcttgaaacaaatgcacctgaatcaatatgtattttagatcttgaagtatttctccttggagtagtatataccagccacttacaattaaaggagaaatgtaattctcaccacagctcctatcagccgttatgcctgccccttcctgtgtgtaaacagctttgtacagaaagacaaaaatcttggtgggatgcggtttgtactctgattcacagaaaagcagtacctggaaacgtagcaaaattgagacttctagttcagcatgaaataaacactctaagagcccaggaaaaacatggccttcaacctgctctgcttgtacattgggcagaatgccttcagaaaacgggcagcggtcttaattctttttatgatcaacgagaatacatagggagaagtgttcattattggaagaaagttttgccattgttgaagataataaaaaagaagaacagtattcctgaacctattgatcctctgtttaaacattttcatagtgtagacattcaggcatcagaaattgttgaatatgaagaagacgcacacataacttttgctatattggatgcagtaaatggaaatatagaagatgctgtgactgcttttgaatctataaaaagtgttgtttcttattggaatcttgcactgatttttcacaggaaggcagaagacattgaaaatgatgccctttctcctgaagaacaagaagaatgcaaaaattatctgagaaagaccagggactacctaataaagattatagatgacagtgattcaaatctttcagtggtcaagaaattgcctgtgcccctggagtctgtaaaagagatgcttaattcagtcatgcaggaactcgaagactatagtgaaggaggtcctctctataaaaatggttctttgcgaaatgcagattcagaaataaaacattctacaccgtctcctaccagatattcactatcaccaagtaaaagttacaagtattctcccaaaacaccacctcgatgggcagaagatcagaattctttactgaaaatgatttgccaacaagtagaggccattaagaaagaaatgcaggagttgaaactaaatagcagtaactcagcatcccctcatcgttggcccacagagaattatggaccagactcggtgcctgatggatatcaggggtcacagacatttcatggggctccactaacagttgcaactactggcccttcagtatattatagtcagtcaccagcatataattcccagtatcttctcagaccagcagctaatgttactcccacaaagggcccagtctatggcatgaataggcttccaccccaacagcatatttatgcctatccgcaacagatgcacacaccgccagtgcaaagctcatctgcttgtatgttctctcaggagatgtatggtcctcctgcattgcgttttgagtctcctgcaacgggaattctatcgcccaggggtgatgattactttaattacaatgttcaacagacaagcacaaatccacctttgccagaaccaggatatttcacaaaacctccgattgcagctcatgcttcaagatctgcagaatctaagactatagaatttgggaaaactaattttgttcagcccatgccgggtgaaggattaaggccatctttgccaacacaagcacacacaacacagccaactccttttaaatttaactcaaatttcaaatcaaatgatggtgacttcacgttttcctcaccacaggttgtgacacagccccctcctgcagcttacagtaacagtgaaagccttttaggtctcctgacttcagataaacccttgcaaggagatggctatagtggagccaaaccaattcctggtggtcaaaccattgggcctcgaaatacattcaattttggaagcaaaaatgtgtctggaatttcatttacagaaaacatggggtcgagtcagcaaaagaattctggttttcggcgaagtgatgatatgtttactttccatggtccagggaaatcagtatttggaacacccactttagagacagcaaacaagaatcatgagacagatggaggaagtgcccatggggatgatgatgatgacggtcctcactttgagcctgtagtacctcttcctgataagattgaagtaaaaactggtgaggaagatgaagaagaattcttttgcaaccgcgcgaaattgtttcgtttcgatgtagaatccaaagaatggaaagaacgtgggattggcaatgtaaaaatactgaggcataaaacatctggtaaaattcgccttctaatgagacgagagcaagtattgaaaatctgtgcaaatcattacatcagtccagatatgaaattgacaccaaatgctggatcagacagatcttttgtatggcatgcccttgattatgcagatgagttgccaaaaccagaacaacttgctattaggttcaaaactcctgaggaagcagcactttttaaatgcaagtttgaagaagcccagagcattttaaaagccccaggaacaaatgtagccatggcgtcaaatcaggctgtcagaattgtaaaagaacccacaagtcatgataacaaggatatttgcaaatctgatgctggaaacctgaattttgaatttcaggttgcaaagaaagaagggtcttggtggcattgtaacagctgctcattaaagaatgcttcaactgctaagaaatgtgtatcatgccaaaatctaaacccaagcaataaagagctcgttggcccaccattagctgaaactgtttttactcctaaaaccagcccagagaatgttcaagatcgatttgcattggtgactccaaagaaagaaggtcactgggattgtagtatttgtttagtaagaaatgaacctactgtatctaggtgcattgcgtgtcagaatacaaaatctgctaacaaaagtggatcttcatttgttcatcaagcttcatttaaatttggccagggagatcttcctaaacctattaacagtgatttcagatctgttttttctacaaaggaaggacagtgggattgcagtgcatgtttggtacaaaatgaggggagctctacaaaatgtgctgcttgtcagaatccgagaaaacagagtctacctgctacttctattccaacacctgcctcttttaagtttggtacttcagagacaagtaaaactctaaaaagtggatttgaagacatgtttgctaagaaggaaggacagtgggattgcagttcatgcttagtgcgaaatgaagcaaatgctacaagatgtgttgcttgtcagaatccggataaaccaagtccatctacttctgttccagctcctgcctcttttaagtttggtacttcagagacaagcaaggctccaaagagcggatttgagggaatgttcactaagaaggagggacagtgggattgcagtgtgtgcttagtaagaaatgaagccagtgctaccaaatgtattgcttgtcagaatccaggtaaacaaaatcaaactacttctgcagtttcaacacctgcctcttcagagacaagcaaggctccaaagagcggatttgagggaatgttcactaagaaggagggacagtgggattgcagtgtgtgcttagtaagaaatgaagccagtgctaccaaatgtattgcttgtcagaatccaggtaaacaaaatcaaactacttctgcagtttcaacacctgcctcttcagagacaagcaaggctccaaagagcggatttgagggaatgttcactaagaaggaaggacagtgggattgcagtgtgtgcttagtaagaaatgaagccagtgctaccaaatgtattgcttgtcagtgtccaagtaaacaaaatcaaacaactgcaatttcaacacctgcctcttcggagataagcaaggctccaaagagtggatttgaaggaatgttcatcaggaaaggacagtgggattgtagtgtttgctgtgtacaaaatgagagttcttccttaaaatgtgtggcttgtgatgcctctaaaccaactcataaacctattgcagaagctccttcagctttcacactgggctcagaaatgaagttgcatgactcttctggaagtcaggtgggaacaggatttaaaagtaatttctcagaaaaagcttctaagtttggcaatacagagcaaggattcaaatttgggcatgtggatcaagaaaattcaccttcatttatgtttcagggttcttctaatacagaatttaagtcaaccaaagaaggattttccatccctgtgtctgctgatggatttaaatttggcatttcggaaccaggaaatcaagaaaagaaaagtgaaaagcctcttgaaaatggtactggcttccaggctcaggatattagtggccagaagaatggccgtggtgtgatttttggccaaacaagtagcacttttacatttgcagatcttgcaaaatcaacttcaggagaaggatttcagtttggcaaaaaagaccccaatttcaagggattttcaggtgctggagaaaaattattctcatcacaatacggtaaaatggccaataaagcaaacacttccggtgactttgagaaagatgatgatgcctataagactgaggacagcgatgacatccattttgaaccagtagttcaaatgcccgaaaaagtagaacttgtaacaggagaagaagatgaaaaagttctgtattcacagcgggtaaaactatttagatttgatgctgaggtaagtcagtggaaagaaaggggcttggggaacttaaaaattctcaaaaacgaggtcaatggcaaactaagaatgctgatgcgaagagaacaagtactaaaagtgtgtgctaatcattggataacgactacgatgaacctgaagcctctctctggatcagatagagcatggatgtggttagccagtgatttctctgatggtgatgccaaactagagcagttggcagcaaaatttaaaacaccagagctggctgaagaattcaagcagaaatttgaggaatgccagcggcttctgttagacataccacttcaaactccccataaacttgtagatactggcagagctgccaagttaatacagagagctgaagaaatgaagagtggactgaaagatttcaaaacatttttgacaaatgatcaaacaaaagtcactgaggaagaaaataagggttcaggtacaggtgcggccggtgcctcagacacaacaataaaacccaatcctgaaaacactgggcccacattagaatgggataactatgatttaagggaagatgctttggatgatagtgtcagtagtagctcagtacatgcttctccattggcaagtagccctgtgagaaaaaatcttttccgttttggtgagtcaacaacaggatttaacttcagttttaaatctgctttgagtccatctaagtctcctgccaagttgaatcagagtgggacttcagttggcactgatgaagaatctgatgttactcaagaagaagagagagatggacagtactttgaacctgttgttcctttacctgatctagttgaagtatccagtggtgaggaaaatgaacaagttgtttttagtcacagggcaaaactctacagatatgataaagatgttggtcaatggaaagaaaggggcattggtgatataaagattttacagaattatgataataagcaagttcgtatagtgatgagaagggaccaagtattaaaactttgtgccaatcacagaataactccagacatgactttgcaaaatatgaaagggacagaaagagtatggttgtggactgcatgtgattttgcagatggagaaagaaaagtagagcatttagctgttcgttttaaactacaggatgttgcagactcgtttaagaaaatttttgatgaagcaaaaacagcccaggaaaaagattctttgataacacctcatgtttctcggtcaagcactcccagagagtcaccatgtggcaaaattgctgtagctgtattagaagaaaccacaagagagaggacagatgttattcagggtgatgatgtagcagatgcaacttcagaagttgaagtgtctagcacatctgaaacaacaccaaaagcagtggtttctcctccaaagtttgtatttggttcagagtctgttaaaagcatttttagtagtgaaaaatcaaaaccatttgcattcggcaacagttcagccactgggtctttgtttggatttagttttaatgcacctttgaaaagtaacaatagtgaaactagttcagtagcccagagtggatctgaaagcaaagtggaacctaaaaaatgtgaactgtcaaagaactctgatatcgaacagtcttcagatagcaaagtcaaaaatctctttgcttcctttccaacggaagaatcttcaatcaactacacatttaaaacaccagaaaaggcaaaagagaagaaaaaacctgaagattctccctcagatgatgatgttctcattgtatatgaactaactccaaccgctgagcagaaagcccttgcaaccaaacttaaacttcctccaactttcttctgctacaagaatagaccagattatgttagtgaagaagaggaggatgatgaagatttcgaaacagctgtcaagaaacttaatggaaaactatatttggatggctcagaaaaatgtagacccttggaagaaaatacagcagataatgagaaagaatgtattattgtttgggaaaagaaaccaacagttgaagagaaggcaaaagcagatacgttaaaacttccacctacatttttttgtggagtctgtagtgatactgatgaagacaatggaaatggggaagactttcaatcagagcttcaaaaagttcaggaagctcaaaaatctcagacagaagaaataactagcacaactgacagtgtatatacaggtgggactgaagtgatggtaccttctttctgtaaatctgaagaacctgattctattaccaaatccattagttcaccatctgtttcctctgaaactatggacaaacctgtagatttgtcaactagaaaggaaattgatacagattctacaagccaaggggaaagcaagatagtttcatttggatttggaagtagcacagggctctcatttgcagacttggcttccagtaattctggagattttgcttttggttctaaagataaaaatttccaatgggcaaatactggagcagctgtgtttggaacacagtcagtcggaacccagtcagccggtaaagttggtgaagatgaagatggtagtgatgaagaagtagttcataatgaagatatccattttgaaccaatagtgtcactaccagaggtagaagtaaaatctggagaagaagatgaagaaattttgtttaaagagagagccaaactttatagatgggatcgggatgtcagtcagtggaaggagcgcggtgttggagatataaagattctttggcatacaatgaagaattattaccggatcctaatgagaagagaccaggtttttaaagtgtgtgcaaaccacgttattactaaaacaatggaattaaagcccttaaatgtttcaaataatgctttagtttggactgcctcagattatgctgatggagaagcaaaagtagaacagcttgcagtgagatttaaaactaaagaagtagctgattgtttcaagaaaacatttgaagaatgtcagcagaatttaatgaaactccagaaaggacatgtatcactggcagcagaattatcaaaggagaccaatcctgtggtgttttttgatgtttgtgcggacggtgaacctctagggcggataactatggaattattttcaaacattgttcctcggactgctgagaacttcagagcactatgcactggagagaaaggctttggtttcaagaattccatttttcacagagtaattccagattttgtttgccaaggaggagatatcaccaaacatgatggaacaggcggacagtccatttatggagacaaatttgaagatgaaaattttgatgtgaaacatactggtcctggtttactatccatggccaatcaaggccagaataccaataattctcaatttgttataacactgaagaaagcagaacatttggactttaagcatgtagtatttgggtttgttaaggatggcatggatactgtgaaaaagattgaatcatttggttctcccaaagggtctgtttgtcgaagaataactatcacagaatgtggacagatataaaatcattgttgttcatagaaaatttcatctgtataagcagttggattgaagcttagctattacaatttgatagttatgttcagcttttgaaaatggacgtttccgatttacaaatgtaaaattgcagcttatagctgttgtcactttttaatgtgttataattgaccttgcatggtgtgaaataaaagtttaaacactggtgtatttcaggtgtacttgtgtttatgtactcctgacgtattaaaatggaataatactaatcttgttaaaagcaatagacctcaaactattgaaggaatatgatatatgcaatttaattttaattccttttaagatatttggacttcctgcatggatatacttaccatttgaataaagggaccacaacttggataatttaattttaggtttgaaatatatttggtaatcttaactattggtgtactcatttatgcatagagactcgtttatgaatgggtagagccacagaacgtatagagttaaccaaagtgctcttctctagaatctttacacctcctgtgtggttacaagttaactttgtaagtagcgtaccttccttccttaaaatatctagcttcctgtgccctttcatagatattcgattaatttttacattttaaacaagttgactatttcctttaggggttttgtttcaaacttttctgtcatctgtctctactacctcagaaactgcagcttggttctgatgatagaaattgaatttttccttgtagttattgtgataaagtatgaatatttttagaaagtctataccatgttctttcgttaaagatttgctttatacaagattgttgcagtacctttttctggtaaattttgtagcagaaataaaatgacaattcctaagagccactgacatccaaaaaattcattacttacgcttcgggttcattctaaagtaaggaagacaatttaaaggcagtaaattcaaactgctgcataatttccagagctcctagtttctcaagtttgatacacaccaaaaacgtatttggaaatggcttgtatcaaatgttaggcaaattgctaaagaaaagaggatgttcttattggcctactcaatatggaactacaaagaatccaggtagaacacaaaattttgtatattgcaattatgaatattgactgtcttccacccatctgtgttctttcgggtgaaattacctcattttatttagtgaggaaagacaggtttattccctgttacatggggatttggaaattgggtatcctaaagcaagtaactgttcaaccaccagtcaaaagaggggagggatgttgtgcgagtaatgagtgatggtataccatcaccattccactcggccacaaagccagatacttgaaataaacctactccaaatgtatcagttcagtcttgaaccatggattacatatgtttacactaaatatttcaaattggcttatttggaaatctatgtaatataaactgatgtaaagtgtgttgtaacttttcagctgagacagttgatgccttcgtcatgattttagaataaattcttaagttaatgcaagtgctttttaagagactttttacagatttgtatgctttcctaaagcactaaagttacaaattaaaaagctttaaaaactttgaccaaaaatttgacaaaatgacatgtaaactgacttttcccgtattagtattccaaagatgcttaaaagtggcttgtggcatttatgagaaagtctttgtgtcacatttcaggaaaggactttgatttctctttgttatttaatcactgatgtggtctaaccaagatatttgttcttctttaactggtttatgtggttcataaatctgtaagatgataatcttttggcctccc

SEQ ID NO: 37274 - DNA, 11076 bp, Homo sapiens
acacagtggtcctccgccggctacggcgctgcgtcactggtttgcaggcgctttcctcttggaagtggcgactgctgcgggcctgagcgctggtctcacgcgcctcgggagccaggttggcggcgcgatgaggcgcagcaaggctgacgtggagcggtacatcgcctcggtgcagggctccaccccgtcgcctcgacagaagtcaatgaaaggattctattttgcaaagctgtattatgaagctaaagaatatgatcttgctaaaaaatacatatgtacttacattaatgtgcaagagagggatcccaaagctcacagatttctgggtcttctttatgaattggaagaaaacacagacaaagccgttgaatgttacaggcgttcagtggaattaaacccaacacaaaaagatcttgtgttgaagattgcagaattgctttgtaaaaatgatgttactgatggaagagcaaaatactggcttgaaagagcagccaaacttttcccaggaagtcctgcaatttataaactaaaggaacagcttctagattgtgaaggtgaagatggatggaataaactttttgacttgattcagtcagaactttatgtaagacctgatgacgtccatgtgaacatccggctagtggaggtgtatcgctcaactaaaagattgaaggatgctgtggcccactgccatgaggcagagaggaacatagctttgcgttcaagtttagaatggaattcgtgtgttgtacagacccttaaggaatatctggagtctttacagtgtttggagtctgataaaagtgactggcgagcaaccaatacagacttactgctggcctatgctaatcttatgcttcttacgctttccactagagatgtgcaggaaagtagagaattactgcaaagttttgatagtgctcttcagtctgtgaaatctttgggtggaaatgatgaactgtcagctactttcttagaaatgaaaggacatttctacatgcatgctggttctctgcttttgaagatgggtcagcatagtagtaatgttcaatggcgagctctttctgagctggctgcattgtgctatctcatagcatttcaggttccaagaccaaagattaaattaataaaaggtgaagctggacaaaatctgctggaaatgatggcctgtgaccgactgagccaatcagggcacatgttgctaaacttaagtcgtggcaagcaagattttttaaaagagattgttgaaacttttgccaacaaaagcgggcagtctgcattatatgatgctctgttttctagtcagtcacctaaggatacatcttttcttggtagcgatgatattggaaacattgatgtacgagaaccagagcttgaagatttgactagatacgatgttggtgctattcgagcacataatggtagtcttcagcaccttacttggcttggcttacagtggaattcattgcctgctttacctggaatccgaaaatggctaaaacagcttttccatcatttgccccatgaaacctcaaggcttgaaacaaatgcacctgaatcaatatgtattttagatcttgaagtatttctccttggagtagtatataccagccacttacaattaaaggagaaatgtaattctcaccacagctcctatcagccgttatgcctgccccttcctgtgtgtaaacagctttgtacagaaagacaaaaatcttggtgggatgcggtttgtactctgattcacagaaaagcagtacctggaaacgtagcaaaattgagacttctagttcagcatgaaataaacactctaagagcccaggaaaaacatggccttcaacctgctctgcttgtacattgggcagaatgccttcagaaaacgggcagcggtcttaattctttttatgatcaacgagaatacatagggagaagtgttcattattggaagaaagttttgccattgttgaagataataaaaaagaagaacagtattcctgaacctattgatcctctgtttaaacattttcatagtgtagacattcaggcatcagaaattgttgaatatgaagaagacgcacacataacttttgctatattggatgcagtaaatggaaatatagaagatgctgtgactgcttttgaatctataaaaagtgttgtttcttattggaatcttgcactgatttttcacaggaaggcagaagacattgaaaatgatgccctttctcctgaagaacaagaagaatgcaaaaattatctgagaaagaccagggactacctaataaagattatagatgacagtgattcaaatctttcagtggtcaagaaattgcctgtgcccctggagtctgtaaaagagatgcttaattcagtcatgcaggaactcgaagactatagtgaaggaggtcctctctataaaaatggttctttgcgaaatgcagattcagaaataaaacattctacaccgtctcctaccagatattcactatcaccaagtaaaagttacaagtattctcccaaaacaccacctcgatgggcagaagatcagaattctttactgaaaatgatttgccaacaagtagaggccattaagaaagaaatgcaggagttgaaactaaatagcagtaactcagcatcccctcatcgttggcccacagagaattatggaccagactcggtgcctgatggatatcaggggtcacagacatttcatggggctccactaacagttgcaactactggcccttcagtatattatagtcagtcaccagcatataattcccagtatcttctcagaccagcagctaatgttactcccacaaagggcccagtctatggcatgaataggcttccaccccaacagcatatttatgcctatccgcaacagatgcacacaccgccagtgcaaagctcatctgcttgtatgttctctcaggagatgtatggtcctcctgcattgcgttttgagtctcctgcaacgggaattctatcgcccaggggtgatgattactttaattacaatgttcaacagacaagcacaaatccacctttgccagaaccaggatatttcacaaaacctccgattgcagctcatgcttcaagatctgcagaatctaagactatagaatttgggaaaactaattttgttcagcccatgccgggtgaaggattaaggccatctttgccaacacaagcacacacaacacagccaactccttttaaatttaactcaaatttcaaatcaaatgatggtgacttcacgttttcctcaccacaggttgtgacacagccccctcctgcagcttacagtaacagtgaaagccttttaggtctcctgacttcagataaacccttgcaaggagatggctatagtggagccaaaccaattcctggtggtcaaaccattgggcctcgaaatacattcaattttggaagcaaaaatgtgtctggaatttcatttacagaaaacatggggtcgagtcagcaaaagaattctggttttcggcgaagtgatgatatgtttactttccatggtccagggaaatcagtatttggaacacccactttagagacagcaaacaagaatcatgagacagatggaggaagtgcccatggggatgatgatgatgacggtcctcactttgagcctgtagtacctcttcctgataagattgaagtaaaaactggtgaggaagatgaagaagaattcttttgcaaccgcgcgaaattgtttcgtttcgatgtagaatccaaagaatggaaagaacgtgggattggcaatgtaaaaatactgaggcataaaacatctggtaaaattcgccttctaatgagacgagagcaagtattgaaaatctgtgcaaatcattacatcagtccagatatgaaattgacaccaaatgctggatcagacagatcttttgtatggcatgcccttgattatgcagatgagttgccaaaaccagaacaacttgctattaggttcaaaactcctgaggaagcagcactttttaaatgcaagtttgaagaagcccagagcattttaaaagccccaggaacaaatgtagccatggcgtcaaatcaggctgtcagaattgtaaaagaacccacaagtcatgataacaaggatatttgcaaatctgatgctggaaacctgaattttgaatttcaggttgcaaagaaagaagggtcttggtggcattgtaacagctgctcattaaagaatgcttcaactgctaagaaatgtgtatcatgccaaaatctaaacccaagcaataaagagctcgttggcccaccattagctgaaactgtttttactcctaaaaccagcccagagaatgttcaagatcgatttgcattggtgactccaaagaaagaaggtcactgggattgtagtatttgtttagtaagaaatgaacctactgtatctaggtgcattgcgtgtcagaatacaaaatctgctaacaaaagtggatcttcatttgttcatcaagcttcatttaaatttggccagggagatcttcctaaacctattaacagtgatttcagatctgttttttctacaaaggaaggacagtgggattgcagtgcatgtttggtacaaaatgaggggagctctacaaaatgtgctgcttgtcagaatccgagaaaacagagtctacctgctacttctattccaacacctgcctcttttaagtttggtacttcagagacaagtaaaactctaaaaagtggatttgaagacatgtttgctaagaaggaaggacagtgggattgcagttcatgcttagtgcgaaatgaagcaaatgctacaagatgtgttgcttgtcagaatccggataaaccaagtccatctacttctgttccagctcctgcctcttttaagtttggtacttcagagacaagcaaggctccaaagagcggatttgagggaatgttcactaagaaggagggacagtgggattgcagtgtgtgcttagtaagaaatgaagccagtgctaccaaatgtattgcttgtcagaatccaggtaaacaaaatcaaactacttctgcagtttcaacacctgcctcttcagagacaagcaaggctccaaagagcggatttgagggaatgttcactaagaaggagggacagtgggattgcagtgtgtgcttagtaagaaatgaagccagtgctaccaaatgtattgcttgtcagaatccaggtaaacaaaatcaaactacttctgcagtttcaacacctgcctcttcagagacaagcaaggctccaaagagcggatttgagggaatgttcactaagaaggaaggacagtgggattgcagtgtgtgcttagtaagaaatgaagccagtgctaccaaatgtattgcttgtcagtgtccaagtaaacaaaatcaaacaactgcaatttcaacacctgcctcttcggagataagcaaggctccaaagagtggatttgaaggaatgttcatcaggaaaggacagtgggattgtagtgtttgctgtgtacaaaatgagagttcttccttaaaatgtgtggcttgtgatgcctctaaaccaactcataaacctattgcagaagctccttcagctttcacactgggctcagaaatgaagttgcatgactcttctggaagtcaggtgggaacaggatttaaaagtaatttctcagaaaaagcttctaagtttggcaatacagagcaaggattcaaatttgggcatgtggatcaagaaaattcaccttcatttatgtttcagggttcttctaatacagaatttaagtcaaccaaagaaggattttccatccctgtgtctgctgatggatttaaatttggcatttcggaaccaggaaatcaagaaaagaaaagtgaaaagcctcttgaaaatggtactggcttccaggctcaggatattagtggccagaagaatggccgtggtgtgatttttggccaaacaagtagcacttttacatttgcagatcttgcaaaatcaacttcaggagaaggatttcagtttggcaaaaaagaccccaatttcaagggattttcaggtgctggagaaaaattattctcatcacaatacggtaaaatggccaataaagcaaacacttccggtgactttgagaaagatgatgatgcctataagactgaggacagcgatgacatccattttgaaccagtagttcaaatgcccgaaaaagtagaacttgtaacaggagaagaagatgaaaaagttctgtattcacagcgggtaaaactatttagatttgatgctgaggtaagtcagtggaaagaaaggggcttggggaacttaaaaattctcaaaaacgaggtcaatggcaaactaagaatgctgatgcgaagagaacaagtactaaaagtgtgtgctaatcattggataacgactacgatgaacctgaagcctctctctggatcagatagagcatggatgtggttagccagtgatttctctgatggtgatgccaaactagagcagttggcagcaaaatttaaaacaccagagctggctgaagaattcaagcagaaatttgaggaatgccagcggcttctgttagacataccacttcaaactccccataaacttgtagatactggcagagctgccaagttaatacagagagctgaagaaatgaagagtggactgaaagatttcaaaacatttttgacaaatgatcaaacaaaagtcactgaggaagaaaataagggttcaggtacaggtgcggccggtgcctcagacacaacaataaaacccaatcctgaaaacactgggcccacattagaatgggataactatgatttaagggaagatgctttggatgatagtgtcagtagtagctcagtacatgcttctccattggcaagtagccctgtgagaaaaaatcttttccgttttggtgagtcaacaacaggatttaacttcagttttaaatctgctttgagtccatctaagtctcctgccaagttgaatcagagtgggacttcagttggcactgatgaagaatctgatgttactcaagaagaagagagagatggacagtactttgaacctgttgttcctttacctgatctagttgaagtatccagtggtgaggaaaatgaacaagttgtttttagtcacagggcaaaactctacagatatgataaagatgttggtcaatggaaagaaaggggcattggtgatataaagattttacagaattatgataataagcaagttcgtatagtgatgagaagggaccaagtattaaaactttgtgccaatcacagaataactccagacatgactttgcaaaatatgaaagggacagaaagagtatggttgtggactgcatgtgattttgcagatggagaaagaaaagtagagcatttagctgttcgttttaaactacaggatgttgcagactcgtttaagaaaatttttgatgaagcaaaaacagcccaggaaaaagattctttgataacacctcatgtttctcggtcaagcactcccagagagtcaccatgtggcaaaattgctgtagctgtattagaagaaaccacaagagagaggacagatgttattcagggtgatgatgtagcagatgcaacttcagaagttgaagtgtctagcacatctgaaacaacaccaaaagcagtggtttctcctccaaagtttgtatttggttcagagtctgttaaaagcatttttagtagtgaaaaatcaaaaccatttgcattcggcaacagttcagccactgggtctttgtttggatttagttttaatgcacctttgaaaagtaacaatagtgaaactagttcagtagcccagagtggatctgaaagcaaagtggaacctaaaaaatgtgaactgtcaaagaactctgatatcgaacagtcttcagatagcaaagtcaaaaatctctttgcttcctttccaacggaagaatcttcaatcaactacacatttaaaacaccagaaaaggcaaaagagaagaaaaaacctgaagattctccctcagatgatgatgttctcattgtatatgaactaactccaaccgctgagcagaaagcccttgcaaccaaacttaaacttcctccaactttcttctgctacaagaatagaccagattatgttagtgaagaagaggaggatgatgaagatttcgaaacagctgtcaagaaacttaatggaaaactatatttggatggctcagaaaaatgtagacccttggaagaaaatacagcagataatgagaaagaatgtattattgtttgggaaaagaaaccaacagttgaagagaaggcaaaagcagatacgttaaaacttccacctacatttttttgtggagtctgtagtgatactgatgaagacaatggaaatggggaagactttcaatcagagcttcaaaaagttcaggaagctcaaaaatctcagacagaagaaataactagcacaactgacagtgtatatacaggtgggactgaagtgatggtaccttctttctgtaaatctgaagaacctgattctattaccaaatccattagttcaccatctgtttcctctgaaactatggacaaacctgtagatttgtcaactagaaaggaaattgataagaatttaatgaaactccagaaaggacatgtatcactggcagcagaattatcaaaggagaccaatcctgtggtgttttttgatgtttgtgcggacggtgaacctctagggcggataactatggaattattttcaaacattgttcctcggactgctgagaacttcagagcactatgcactggagagaaaggctttggtttcaagaattccatttttcacagagtaattccagattttgtttgccaaggaggagatatcaccaaacatgatggaacaggcggacagtccatttatggagacaaatttgaagatgaaaattttgatgtgaaacatactggtcctggtttactatccatggccaatcaaggccagaataccaataattctcaatttgttataacactgaagaaagcagaacatttggactttaagcatgtagtatttgggtttgttaaggatggcatggatactgtgaaaaagattgaatcatttggttctcccaaagggtctgtttgtcgaagaataactatcacagaatgtggacagatataaaatcattgttgttcatagaaaatttcatctgtataagcagttggattgaagcttagctattacaatttgatagttatgttcagcttttgaaaatggacgtttccgatttacaaatgtaaaattgcagcttatagctgttgtcactttttaatgtgttataattgaccttgcatggtgtgaaataaaagtttaaacactggtgtatttcaggtgtacttgtgtttatgtactcctgacgtattaaaatggaataatactaatcttgttaaaagcaatagacctcaaactattgaaggaatatgatatatgcaatttaattttaattccttttaagatatttggacttcctgcatggatatacttaccatttgaataaagggaccacaacttggataatttaattttaggtttgaaatatatttggtaatcttaactattggtgtactcatttatgcatagagactcgtttatgaatgggtagagccacagaacgtatagagttaaccaaagtgctcttctctagaatctttacacctcctgtgtggttacaagttaactttgtaagtagcgtaccttccttccttaaaatatctagcttcctgtgccctttcatagatattcgattaatttttacattttaaacaagttgactatttcctttaggggttttgtttcaaacttttctgtcatctgtctctactacctcagaaactgcagcttggttctgatgatagaaattgaatttttccttgtagttattgtgataaagtatgaatatttttagaaagtctataccatgttctttcgttaaagatttgctttatacaagattgttgcagtacctttttctggtaaattttgtagcagaaataaaatgacaattcctaagagccactgacatccaaaaaattcattacttacgcttcgggttcattctaaagtaaggaagacaatttaaaggcagtaaattcaaactgctgcataatttccagagctcctagtttctcaagtttgatacacaccaaaaacgtatttggaaatggcttgtatcaaatgttaggcaaattgctaaagaaaagaggatgttcttattggcctactcaatatggaactacaaagaatccaggtagaacacaaaattttgtatattgcaattatgaatattgactgtcttccacccatctgtgttctttcgggtgaaattacctcattttatttagtgaggaaagacaggtttattccctgttacatggggatttggaaattgggtatcctaaagcaagtaactgttcaaccaccagtcaaaagaggggagggatgttgtgcgagtaatgagtgatggtataccatcaccattccactcggccacaaagccagatacttgaaataaacctactccaaatgtatcagttcagtcttgaaccatggattacatatgtttacactaaatatttcaaattggcttatttggaaatctatgtaatataaactgatgtaaagtgtgttgtaacttttcagctgagacagttgatgccttcgtcatgattttagaataaattcttaagttaatgcaagtgctttttaagagactttttacagatttgtatgctttcctaaagcactaaagttacaaattaaaaagctttaaaaactttgaccaaaaatttgacaaaatgacatgtaaactgacttttcccgtattagtattccaaagatgcttaaaagtggcttgtggcatttatgagaaagtctttgtgtcacatttcaggaaaggactttgatttctctttgttatttaatcactgatgtggtctaaacccacgataatatgtatctttccttttaaactggattttatgttgtctcattaaaatctgcttaaagatagaataaaattcattatttgtaaaaaaaaaaaa

SEQ ID NO: 37275 - DNA, 10330 bp, Homo sapiens
acacagtggtcctccgccggctacggcgctgcgtcactggtttgcaggcgctttcctcttggaagtggcgactgctgcgggcctgagcgctggtctcacgcgcctcgggagccaggttggcggcgcgatgaggcgcagcaaggctgacgtggagcggtacatcgcctcggtgcagggctccaccccgtcgcctcgacagaagtcaatgaaaggattctattttgcaaagctgtattatgaagctaaagaatatgatcttgctaaaaaatacatatgtacttacattaatgtgcaagagagggatcccaaagctcacagatttctgggtcttctttatgaattggaagaaaacacagacaaagccgttgaatgttacaggcgttcagtggaattaaacccaacacaaaaagatcttgtgttgaagattgcagaattgctttgtaaaaatgatgttactgatggaagagcaaaatactggcttgaaagagcagccaaacttttcccaggaagtcctgcaatttataaactaaaggaacagcttctagattgtgaaggtgaagatggatggaataaactttttgacttgattcagtcagaactttatgtaagacctgatgacgtccatgtgaacatccggctagtggaggtgtatcgctcaactaaaagattgaaggatgctgtggcccactgccatgaggcagagaggaacatagctttgcgttcaagtttagaatggaattcgtgtgttgtacagacccttaaggaatatctggagtctttacagtgtttggagtctgataaaagtgactggcgagcaaccaatacagacttactgctggcctatgctaatcttatgcttcttacgctttccactagagatgtgcaggaaagtagagaattactgcaaagttttgatagtgctcttcagtctgtgaaatctttgggtggaaatgatgaactgtcagctactttcttagaaatgaaaggacatttctacatgcatgctggttctctgcttttgaagatgggtcagcatagtagtaatgttcaatggcgagctctttctgagctggctgcattgtgctatctcatagcatttcaggttccaagaccaaagattaaattaataaaaggtgaagctggacaaaatctgctggaaatgatggcctgtgaccgactgagccaatcagggcacatgttgctaaacttaagtcgtggcaagcaagattttttaaaagagattgttgaaacttttgccaacaaaagcgggcagtctgcattatatgatgctctgttttctagtcagtcacctaaggatacatcttttcttggtagcgatgatattggaaacattgatgtacgagaaccagagcttgaagatttgactagatacgatgttggtgctattcgagcacataatggtagtcttcagcaccttacttggcttggcttacagtggaattcattgcctgctttacctggaatccgaaaatggctaaaacagcttttccatcatttgccccatgaaacctcaaggcttgaaacaaatgcacctgaatcaatatgtattttagatcttgaagtatttctccttggagtagtatataccagccacttacaattaaaggagaaatgtaattctcaccacagctcctatcagccgttatgcctgccccttcctgtgtgtaaacagctttgtacagaaagacaaaaatcttggtgggatgcggtttgtactctgattcacagaaaagcagtacctggaaacgtagcaaaattgagacttctagttcagcatgaaataaacactctaagagcccaggaaaaacatggccttcaacctgctctgcttgtacattgggcagaatgccttcagaaaacgggcagcggtcttaattctttttatgatcaacgagaatacatagggagaagtgttcattattggaagaaagttttgccattgttgaagataataaaaaagaagaacagtattcctgaacctattgatcctctgtttaaacattttcatagtgtagacattcaggcatcagaaattgttgaatatgaagaagacgcacacataacttttgctatattggatgcagtaaatggaaatatagaagatgctgtgactgcttttgaatctataaaaagtgttgtttcttattggaatcttgcactgatttttcacaggaaggcagaagacattgaaaatgatgccctttctcctgaagaacaagaagaatgcaaaaattatctgagaaagaccagggactacctaataaagattatagatgacagtgattcaaatctttcagtggtcaagaaattgcctgtgcccctggagtctgtaaaagagatgcttaattcagtcatgcaggaactcgaagactatagtgaaggaggtcctctctataaaaatggttctttgcgaaatgcagattcagaaataaaacattctacaccgtctcctaccagatattcactatcaccaagtaaaagttacaagtattctcccaaaacaccacctcgatgggcagaagatcagaattctttactgaaaatgatttgccaacaagtagaggccattaagaaagaaatgcaggagttgaaactaaatagcagtaactcagcatcccctcatcgttggcccacagagaattatggaccagactcggtgcctgatggatatcaggggtcacagacatttcatggggctccactaacagttgcaactactggcccttcagtatattatagtcagtcaccagcatataattcccagtatcttctcagaccagcagctaatgttactcccacaaagggcccagtctatggcatgaataggcttccaccccaacagcatatttatgcctatccgcaacagatgcacacaccgccagtgcaaagctcatctgcttgtatgttctctcaggagatgtatggtcctcctgcattgcgttttgagtctcctgcaacgggaattctatcgcccaggggtgatgattactttaattacaatgttcaacagacaagcacaaatccacctttgccagaaccaggatatttcacaaaacctccgattgcagctcatgcttcaagatctgcagaatctaagactatagaatttgggaaaactaattttgttcagcccatgccgggtgaaggattaaggccatctttgccaacacaagcacacacaacacagccaactccttttaaatttaactcaaatttcaaatcaaatgatggtgacttcacgttttcctcaccacaggttgtgacacagccccctcctgcagcttacagtaacagtgaaagccttttaggtctcctgacttcagataaacccttgcaaggagatggctatagtggagccaaaccaattcctggtggtcaaaccattgggcctcgaaatacattcaattttggaagcaaaaatgtgtctggaatttcatttacagaaaacatggggtcgagtcagcaaaagaattctggttttcggcgaagtgatgatatgtttactttccatggtccagggaaatcagtatttggaacacccactttagagacagcaaacaagaatcatgagacagatggaggaagtgcccatggggatgatgatgatgacggtcctcactttgagcctgtagtacctcttcctgataagattgaagtaaaaactggtgaggaagatgaagaagaattcttttgcaaccgcgcgaaattgtttcgtttcgatgtagaatccaaagaatggaaagaacgtgggattggcaatgtaaaaatactgaggcataaaacatctggtaaaattcgccttctaatgagacgagagcaagtattgaaaatctgtgcaaatcattacatcagtccagatatgaaattgacaccaaatgctggatcagacagatcttttgtatggcatgcccttgattatgcagatgagttgccaaaaccagaacaacttgctattaggttcaaaactcctgaggaagcagcactttttaaatgcaagtttgaagaagcccagagcattttaaaagccccaggaacaaatgtagccatggcgtcaaatcaggctgtcagaattgtaaaagaacccacaagtcatgataacaaggatatttgcaaatctgatgctggaaacctgaattttgaatttcaggttgcaaagaaagaagggtcttggtggcattgtaacagctgctcattaaagaatgcttcaactgctaagaaatgtgtatcatgccaaaatctaaacccaagcaataaagagctcgttggcccaccattagctgaaactgtttttactcctaaaaccagcccagagaatgttcaagatcgatttgcattggtgactccaaagaaagaaggtcactgggattgtagtatttgtttagtaagaaatgaacctactgtatctaggtgcattgcgtgtcagaatacaaaatctgctaacaaaagtggatcttcatttgttcatcaagcttcatttaaatttggccagggagatcttcctaaacctattaacagtgatttcagatctgttttttctacaaaggaaggacagtgggattgcagtgcatgtttggtacaaaatgaggggagctctacaaaatgtgctgcttgtcagaatccgagaaaacagagtctacctgctacttctattccaacacctgcctcttttaagtttggtacttcagagacaagtaaaactctaaaaagtggatttgaagacatgtttgctaagaaggaaggacagtgggattgcagttcatgcttagtgcgaaatgaagcaaatgctacaagatgtgttgcttgtcagaatccggataaaccaagtccatctacttctgttccagctcctgcctcttttaagtttggtacttcagagacaagcaaggctccaaagagcggatttgagggaatgttcactaagaaggagggacagtgggattgcagtgtgtgcttagtaagaaatgaagccagtgctaccaaatgtattgcttgtcagaatccaggtaaacaaaatcaaactacttctgcagtttcaacacctgcctcttcagagacaagcaaggctccaaagagcggatttgagggaatgttcactaagaaggagggacagtgggattgcagtgtgtgcttagtaagaaatgaagccagtgctaccaaatgtattgcttgtcagaatccaggtaaacaaaatcaaactacttctgcagtttcaacacctgcctcttcagagacaagcaaggctccaaagagcggatttgagggaatgttcactaagaaggaaggacagtgggattgcagtgtgtgcttagtaagaaatgaagccagtgctaccaaatgtattgcttgtcagtgtccaagtaaacaaaatcaaacaactgcaatttcaacacctgcctcttcggagataagcaaggctccaaagagtggatttgaaggaatgttcatcaggaaaggacagtgggattgtagtgtttgctgtgtacaaaatgagagttcttccttaaaatgtgtggcttgtgatgcctctaaaccaactcataaacctattgcagaagctccttcagctttcacactgggctcagaaatgaagttgcatgactcttctggaagtcaggtgggaacaggatttaaaagtaatttctcagaaaaagcttctaagtttggcaatacagagcaaggattcaaatttgggcatgtggatcaagaaaattcaccttcatttatgtttcagggttcttctaatacagaatttaagtcaaccaaagaaggattttccatccctgtgtctgctgatggatttaaatttggcatttcggaaccaggaaatcaagaaaagaaaagtgaaaagcctcttgaaaatggtactggcttccaggctcaggatattagtggccagaagaatggccgtggtgtgatttttggccaaacaagtagcacttttacatttgcagatcttgcaaaatcaacttcaggagaaggatttcagtttggcaaaaaagaccccaatttcaagggattttcaggtgctggagaaaaattattctcatcacaatacggtaaaatggccaataaagcaaacacttccggtgactttgagaaagatgatgatgcctataagactgaggacagcgatgacatccattttgaaccagtagttcaaatgcccgaaaaagtagaacttgtaacaggagaagaagatgaaaaagttctgtattcacagcgggtaaaactatttagatttgatgctgaggtaagtcagtggaaagaaaggggcttggggaacttaaaaattctcaaaaacgaggtcaatggcaaactaagaatgctgatgcgaagagaacaagtactaaaagtgtgtgctaatcattggataacgactacgatgaacctgaagcctctctctggatcagatagagcatggatgtggttagccagtgatttctctgatggtgatgccaaactagagcagttggcagcaaaatttaaaacaccagagctggctgaagaattcaagcagaaatttgaggaatgccagcggcttctgttagacataccacttcaaactccccataaacttgtagatactggcagagctgccaagttaatacagagagctgaagaaatgaagagtggactgaaagatttcaaaacatttttgacaaatgatcaaacaaaagtcactgaggaagaaaataagggttcaggtacaggtgcggccggtgcctcagacacaacaataaaacccaatcctgaaaacactgggcccacattagaatgggataactatgatttaagggaagatgctttggatgatagtgtcagtagtagctcagtacatgcttctccattggcaagtagccctgtgagaaaaaatcttttccgttttggtgagtcaacaacaggatttaacttcagttttaaatctgctttgagtccatctaagtctcctgccaagttgaatcagagtgggacttcagttggcactgatgaagaatctgatgttactcaagaagaagagagagatggacagtactttgaacctgttgttcctttacctgatctagttgaagtatccagtggtgaggaaaatgaacaagttgtttttagtcacagggcaaaactctacagatatgataaagatgttggtcaatggaaagaaaggggcattggtgatataaagattttacagaattatgataataagcaagttcgtatagtgatgagaagggaccaagtattaaaactttgtgccaatcacagaataactccagacatgactttgcaaaatatgaaagggacagaaagagtatggttgtggactgcatgtgattttgcagatggagaaagaaaagtagagcatttagctgttcgttttaaactacaggatgttgcagactcgtttaagaaaatttttgatgaagcaaaaacagcccaggaaaaagattctttgataacacctcatgtttctcggtcaagcactcccagagagtcaccatgtggcaaaattgctgtagctgtattagaagaaaccacaagagagaggacagatgttattcagggtgatgatgtagcagatgcaacttcagaagttgaagtgtctagcacatctgaaacaacaccaaaagcagtggtttctcctccaaagtttgtatttggttcagagtctgttaaaagcatttttagtagtgaaaaatcaaaaccatttgcattcggcaacagttcagccactgggtctttgtttggatttagttttaatgcacctttgaaaagtaacaatagtgaaactagttcagtagcccagagtggatctgaaagcaaagtggaacctaaaaaatgtgaactgtcaaagaactctgatatcgaacagtcttcagatagcaaagtcaaaaatctctttgcttcctttccaacggaagaatcttcaatcaactacacatttaaaacaccagaaaaggcaaaagagaagaaaaaacctgaagattctccctcagatgatgatgttctcattgtatatgaactaactccaaccgctgagcagaaagcccttgcaaccaaacttaaacttcctccaactttcttctgctacaagaatagaccagattatgttagtgaagaagaggaggatgatgaagatttcgaaacagctgtcaagaaacttaatggaaaactatatttggatggctcagaaaaatgtagacccttggaagaaaatacagcagataatgagaaagaatgtattattgtttgggaaaagaaaccaacagttgaagagaaggcaaaagcagatacgttaaaacttccacctacatttttttgtggagtctgtagtgatactgatgaagacaatggaaatggggaagactttcaatcagagcttcaaaaagttcaggaagctcaaaaatctcagacagaagaaataactagcacaactgacagtgtatatacaggtgggactgaagtgatggtaccttctttctgtaaatctgaagaacctgattctattaccaaatccattagttcaccatctgtttcctctgaaactatggacaaacctgtagatttgtcaactagaaaggaaattgatacagattctacaagccaaggggaaagcaagatagtttcatttggatttggaagtagcacagggctctcatttgcagacttggcttccagtaattctggagattttgcttttggttctaaagataaaaatttccaatgggcaaatactggagcagctgtgtttggaacacagtcagtcggaacccagtcagccggtaaagttggtgaagatgaagatggtagtgatgaagaagtagttcataatgaagatatccattttgaaccaatagtgtcactaccagaggtagaagtaaaatctggagaagaagatgaagaaattttgtttaaagagagagccaaactttatagatgggatcgggatgtcagtcagtggaaggagcgcggtgttggagatataaagattctttggcatacaatgaagaattattaccggatcctaatgagaagagaccaggtttttaaagtgtgtgcaaaccacgttattactaaaacaatggaattaaagcccttaaatgtttcaaataatgctttagtttggactgcctcagattatgctgatggagaagcaaaagtagaacagcttgcagtgagatttaaaactaaagaagtagctgattgtttcaagaaaacatttgaagaatgtcagcagaatttaatgaaactccagaaaggacatgtatcactggcagcagaattatcaaaggagaccaatcctgtggtgttttttgatgtttgtgcggacggtgaacctctagggcggataactatggaattattttcaaacattgttcctcggactgctgagaacttcagagcactatgcactggagagaaaggctttggtttcaagaattccatttttcacagagtaattccagattttgtttgccaaggaggagatatcaccaaacatgatggaacaggcggacagtccatttatggagacaaatttgaagatgaaaattttgatgtgaaacatactggtcctggtttactatccatggccaatcaaggccagaataccaataattctcaatttgttataacactgaagaaagcagaacatttggactttaagcatgtagtatttgggtttgttaaggatggcatggatactgtgaaaaagattgaatcatttggttctcccaaagggtctgtttgtcgaagaataactatcacagaatgtggacagatataaaatcattgttgttcatagaaaatttcatctgtataagcagttggattgaagcttagctattacaatttgatagttatgttcagcttttgaaaatggacgtttccgatttacaaatgtaaaattgcagcttatagctgttgtcactttttaatgtgttataattgaccttgcatggtgtgaaataaaagtttaaacactggtgtaaaaaaaaaaaaaaaaaaaatcggggattatatggggggggggaaaaaagaggtacggaaggcgcatggtcataaggtgttccgggaccaatttcgtggtccaagggtgaaatcgggcggctccccaaggggagcgtaaaattcgaaagcaggtaactgtagacttgtgcggaacacgggaagacaggaacaggaaccaccagcacacaaggaacaaacagcaacaacataccgacaccaacagagaagccaagcatccgagaacaagagcacgacacagccgcacgcgagacgaacagcacgagacagcacagaaaaaaacaac

SEQ ID NO: 37276 - DNA, 3719 bp, Homo sapiens
aacgatggtcctcagctaaggaagtacagttacgtgcttctggactccaacgatggtcctcagcggtttcgaaatcttaaacttcctccaactttcttctgctacaagaatagaccagattatgttagtgaagaagaggaggatgatgaagatttcgaaacagctgtcaagaaacttaatggaaaactatatttggatggctcagaaaaatgtagacccttggaagaaaatacagcagataatgagaaagaatgtattattgtttgggaaaagaaaccaacagttgaagagaaggcaaaagcagatacgttaaaacttccacctacatttttttgtggagtctgtagtgatactgatgaagacaatggaaatggggaagactttcaatcagagcttcaaaaagttcaggaagctcaaaaatctcagacagaagaaataactagcacaactgacagtgtatatacaggtgggactgaagtgatggtaccttctttctgtaaatctgaagaacctgattctattaccaaatccattagttcaccatctgtttcctctgaaactatggacaaacctgtagatttgtcaactagaaaggaaattgatacagattctacaagccaaggggaaagcaagatagtttcatttggatttggaagtagcacagggctctcatttgcagacttggcttccagtaattctggagattttgcttttggttctaaagataaaaatttccaatgggcaaatactggagcagctgtgtttggaacacagtcagtcggaacccagtcagccggtaaagttggtgaagatgaagatggtagtgatgaagaagtagttcataatgaagatatccattttgaaccaatagtgtcactaccagaggtagaagtaaaatctggagaagaagatgaagaaattttgtttaaagagagagccaaactttatagatgggatcgggatgtcagtcagtggaaggagcgcggtgttggagatataaagattctttggcatacaatgaagaattattaccggatcctaatgagaagagaccaggtttttaaagtgtgtgcaaaccacgttattactaaaacaatggaattaaagcccttaaatgtttcaaataatgctttagtttggactgcctcagattatgctgatggagaagcaaaagtagaacagcttgcagtgagatttaaaactaaagaagtagctgattgtttcaagaaaacatttgaagaatgtcagcagaatttaatgaaactccagaaaggacatgtatcactggcagcagaattatcaaaggagaccaatcctgtggtgttttttgatgtttgtgcggacggtgaacctctagggcggataactatggaattattttcaaacattgttcctcggactgctgagaacttcagagcactatgcactggagagaaaggctttggtttcaagaattccatttttcacagagtaattccagattttgtttgccaaggaggagatatcaccaaacatgatggaacaggcggacagtccatttatggagacaaatttgaagatgaaaattttgatgtgaaacatactggtcctggtttactatccatggccaatcaaggccagaataccaataattctcaatttgttataacactgaagaaagcagaacatttggactttaagcatgtagtatttgggtttgttaaggatggcatggatactgtgaaaaagattgaatcatttggttctcccaaagggtctgtttgtcgaagaataactatcacagaatgtggacagatataaaatcattgttgttcatagaaaatttcatctgtataagcagttggattgaagcttagctattacaatttgatagttatgttcagcttttgaaaatggacgtttccgatttacaaatgtaaaattgcagcttatagctgttgtcactttttaatgtgttataattgaccttgcatggtgtgaaataaaagtttaaacactggtgtatttcaggtgtacttgtgtttatgtactcctgacgtattaaaatggaataatactaatcttgttaaaagcaatagacctcaaactattgaaggaatatgatatatgcaatttaattttaattccttttaagatatttggacttcctgcatggatatacttaccatttgaataaagggaccacaacttggataatttaattttaggtttgaaatatatttggtaatcttaactattggtgtactcatttatgcatagagactcgtttatgaatgggtagagccacagaacgtatagagttaaccaaagtgctcttctctagaatctttacacctcctgtgtggttacaagttaactttgtaagtagcgtaccttccttccttaaaatatctagcttcctgtgccctttcatagatattcgattaatttttacattttaaacaagttgactatttcctttaggggttttgtttcaaacttttctgtcatctgtctctactacctcagaaactgcagcttggttctgatgatagaaattgaatttttccttgtagttattgtgataaagtatgaatatttttagaaagtctataccatgttctttcgttaaagatttgctttatacaagattgttgcagtacctttttctggtaaattttgtagcagaaataaaatgacaattcctaagagccactgacatccaaaaaattcattacttacgcttcgggttcattctaaagtaaggaagacaatttaaaggcagtaaattcaaactgctgcataatttccagagctcctagtttctcaagtttgatacacaccaaaaacgtatttggaaatggcttgtatcaaatgttaggcaaattgctaaagaaaagaggatgttcttattggcctactcaatatggaactacaaagaatccaggtagaacacaaaattttgtatattgcaattatgaatattgactgtcttccacccatctgtgttctttcgggtgaaattacctcattttatttagtgaggaaagacaggtttattccctgttacatggggatttggaaattgggtatcctaaagcaagtaactgttcaaccaccagtcaaaagaggggagggatgttgtgcgagtaatgagtgatggtataccatcaccattccactcggccacaaagccagatacttgaaataaacctactccaaatgtatcagttcagtcttgaaccatggattacatatgtttacactaaatatttcaaattggcttatttggaaatctatgtaatataaactgatgtaaagtgtgttgtaacttttcagctgagacagttgatgccttcgtcatgattttagaataaattcttaagttaatgcaagtgctttttaagagactttttacagatttgtatgctttcctaaagcactaaagttacaaattaaaaagctttaaaaactttgaccaaaaatttgacaaaatgacatgtaaactgacttttcccgtattagtattccaaagatgcttaaaagtggcttgtggcatttatgagaaagtctttgtgtcacatttcaggaaaggactttgatttctctttgttatttaatcactgatgtggtctaaacccacgataatatgtatctttccttttaaactggattttatgttgtctcattaaaatctgcttaaagatagaataaaattcattatttgtaaaaaaaaaaaa

SEQ ID NO: 37277 - DNA, 9041 bp, Homo sapiens
acacagtggtcctccgccggctacggcgctgcgtcactggtttgcaggcgctttcctcttggaagtggcgactgctgcgggcctgagcgctggtctcacgcgcctcgggagccaggttggcggcgcgatgaggcgcagcaaggctgacgtggagcggtacatcgcctcggtgcagggctccaccccgtcgcctcgacagaagtcaatgaaaggattctattttgcaaagctgtattatgaagctaaagaatatgatcttgctaaaaaatacatatgtacttacattaatgtgcaagagagggatcccaaagctcacagatttctgggtcttctttatgaattggaagaaaacacagacaaagccgttgaatgttacaggcgttcagtggaattaaacccaacacaaaaagatcttgtgttgaagattgcagaattgctttgtaaaaatgatgttactgatggaagagcaaaatactggcttgaaagagcagccaaacttttcccaggaagtcctgcaatttataaactaaaggaacagcttctagattgtgaaggtgaagatggatggaataaactttttgacttgattcagtcagaactttatgtaagacctgatgacgtccatgtgaacatccggctagtggaggtgtatcgctcaactaaaagattgaaggatgctgtggcccactgccatgaggcagagaggaacatagctttgcgttcaagtttagaatggaattcgtgtgttgtacagacccttaaggaatatctggagtctttacagtgtttggagtctgataaaagtgactggcgagcaaccaatacagacttactgctggcctatgctaatcttatgcttcttacgctttccactagagatgtgcaggaaagtagagaattactgcaaagttttgatagtgctcttcagtctgtgaaatctttgggtggaaatgatgaactgtcagctactttcttagaaatgaaaggacatttctacatgcatgctggttctctgcttttgaagatgggtcagcatagtagtaatgttcaatggcgagctctttctgagctggctgcattgtgctatctcatagcatttcaggttccaagaccaaagattaaattaataaaaggtgaagctggacaaaatctgctggaaatgatggcctgtgaccgactgagccaatcagggcacatgttgctaaacttaagtcgtggcaagcaagattttttaaaagagattgttgaaacttttgccaacaaaagcgggcagtctgcattatatgatgctctgttttctagtcagtcacctaaggatacatcttttcttggtagcgatgatattggaaacattgatgtacgagaaccagagcttgaagatttgactagatacgatgttggtgctattcgagcacataatggtagtcttcagcaccttacttggcttggcttacagtggaattcattgcctgctttacctggaatccgaaaatggctaaaacagcttttccatcatttgccccatgaaacctcaaggcttgaaacaaatgcacctgaatcaatatgtattttagatcttgaagtatttctccttggagtagtatataccagccacttacaattaaaggagaaatgtaattctcaccacagctcctatcagccgttatgcctgccccttcctgtgtgtaaacagctttgtacagaaagacaaaaatcttggtgggatgcggtttgtactctgattcacagaaaagcagtacctggaaacgtagcaaaattgagacttctagttcagcatgaaataaacactctaagagcccaggaaaaacatggccttcaacctgctctgcttgtacattgggcagaatgccttcagaaaacgggcagcggtcttaattctttttatgatcaacgagaatacatagggagaagtgttcattattggaagaaagttttgccattgttgaagataataaaaaagaagaacagtattcctgaacctattgatcctctgtttaaacattttcatagtgtagacattcaggcatcagaaattgttgaatatgaagaagacgcacacataacttttgctatattggatgcagtaaatggaaatatagaagatgctgtgactgcttttgaatctataaaaagtgttgtttcttattggaatcttgcactgatttttcacaggaaggcagaagacattgaaaatgatgccctttctcctgaagaacaagaagaatgcaaaaattatctgagaaagaccagggactacctaataaagattatagatgacagtgattcaaatctttcagtggtcaagaaattgcctgtgcccctggagtctgtaaaagagatgcttaattcagtcatgcaggaactcgaagactatagtgaaggaggtcctctctataaaaatggttctttgcgaaatgcagattcagaaataaaacattctacaccgtctcctaccagatattcactatcaccaagtaaaagttacaagtattctcccaaaacaccacctcgatgggcagaagatcagaattctttactgaaaatgatttgccaacaagtagaggccattaagaaagaaatgcaggagttgaaactaaatagcagtaactcagcatcccctcatcgttggcccacagagaattatggaccagactcggtgcctgatggatatcaggggtcacagacatttcatggggctccactaacagttgcaactactggcccttcagtatattatagtcagtcaccagcatataattcccagtatcttctcagaccagcagctaatgttactcccacaaagggcccagtctatggcatgaataggcttccaccccaacagcatatttatgcctatccgcaacagatgcacacaccgccagtgcaaagctcatctgcttgtatgttctctcaggagatgtatggtcctcctgcattgcgttttgagtctcctgcaacgggaattctatcgcccaggggtgatgattactttaattacaatgttcaacagacaagcacaaatccacctttgccagaaccaggatatttcacaaaacctccgattgcagctcatgcttcaagatctgcagaatctaagactatagaatttgggaaaactaattttgttcagcccatgccgggtgaaggattaaggccatctttgccaacacaagcacacacaacacagccaactccttttaaatttaactcaaatttcaaatcaaatgatggtgacttcacgttttcctcaccacaggttgtgacacagccccctcctgcagcttacagtaacagtgaaagccttttaggtctcctgacttcagataaacccttgcaaggagatggctatagtggagccaaaccaattcctggtggtcaaaccattgggcctcgaaatacattcaattttggaagcaaaaatgtgtctggaatttcatttacagaaaacatggggtcgagtcagcaaaagaattctggttttcggcgaagtgatgatatgtttactttccatggtccagggaaatcagtatttggaacacccactttagagacagcaaacaagaatcatgagacagatggaggaagtgcccatggggatgatgatgatgacggtcctcactttgagcctgtagtacctcttcctgataagattgaagtaaaaactggtgaggaagatgaagaagaattcttttgcaaccgcgcgaaattgtttcgtttcgatgtagaatccaaagaatggaaagaacgtgggattggcaatgtaaaaatactgaggcataaaacatctggtaaaattcgccttctaatgagacgagagcaagtattgaaaatctgtgcaaatcattacatcagtccagatatgaaattgacaccaaatgctggatcagacagatcttttgtatggcatgcccttgattatgcagatgagttgccaaaaccagaacaacttgctattaggttcaaaactcctgaggaagcagcactttttaaatgcaagtttgaagaagcccagagcattttaaaagccccaggaacaaatgtagccatggcgtcaaatcaggctgtcagaattgtaaaagaacccacaagtcatgataacaaggatatttgcaaatctgatgctggaaacctgaattttgaatttcaggttgcaaagaaagaagggtcttggtggcattgtaacagctgctcattaaagaatgcttcaactgctaagaaatgtgtatcatgccaaaatctaaacccaagcaataaagagctcgttggcccaccattagctgaaactgtttttactcctaaaaccagcccagagaatgttcaagatcgatttgcattggtgactccaaagaaagaaggtcactgggattgtagtatttgtttagtaagaaatgaacctactgtatctaggtgcattgcgtgtcagaatacaaaatctgctaacaaaagtggatcttcatttgttcatcaagcttcatttaaatttggccagggagatcttcctaaacctattaacagtgatttcagatctgttttttctacaaaggaaggacagtgggattgcagtgcatgtttggtacaaaatgaggggagctctacaaaatgtgctgcttgtcagaatccgagaaaacagagtctacctgctacttctattccaacacctgcctcttttaagtttggtacttcagagacaagtaaaactctaaaaagtggatttgaagacatgtttgctaagaaggaaggacagtgggattgcagttcatgcttagtgcgaaatgaagcaaatgctacaagatgtgttgcttgtcagaatccggataaaccaagtccatctacttctgttccagctcctgcctcttttaagtttggtacttcagagacaagcaaggctccaaagagcggatttgagggaatgttcactaagaaggagggacagtgggattgcagtgtgtgcttagtaagaaatgaagccagtgctaccaaatgtattgcttgtcagaatccaggtaaacaaaatcaaactacttctgcagtttcaacacctgcctcttcagagacaagcaaggctccaaagagcggatttgagggaatgttcactaagaaggagggacagtgggattgcagtgtgtgcttagtaagaaatgaagccagtgctaccaaatgtattgcttgtcagaatccaggtaaacaaaatcaaactacttctgcagtttcaacacctgcctcttcagagacaagcaaggctccaaagagcggatttgagggaatgttcactaagaaggaaggacagtgggattgcagtgtgtgcttagtaagaaatgaagccagtgctaccaaatgtattgcttgtcagtgtccaagtaaacaaaatcaaacaactgcaatttcaacacctgcctcttcggagataagcaaggctccaaagagtggatttgaaggaatgttcatcaggaaaggacagtgggattgtagtgtttgctgtgtacaaaatgagagttcttccttaaaatgtgtggcttgtgatgcctctaaaccaactcataaacctattgcagaagctccttcagctttcacactgggctcagaaatgaagttgcatgactcttctggaagtcaggtgggaacaggatttaaaagtaatttctcagaaaaagcttctaagtttggcaatacagagcaaggattcaaatttgggcatgtggatcaagaaaattcaccttcatttatgtttcagggttcttctaatacagaatttaagtcaaccaaagaaggattttccatccctgtgtctgctgatggatttaaatttggcatttcggaaccaggaaatcaagaaaagaaaagtgaaaagcctcttgaaaatggtactggcttccaggctcaggatattagtggccagaagaatggccgtggtgtgatttttggccaaacaagtagcacttttacatttgcagatcttgcaaaatcaacttcaggagaaggatttcagtttggcaaaaaagaccccaatttcaagggattttcaggtgctggagaaaaattattctcatcacaatacggtaaaatggccaataaagcaaacacttccggtgactttgagaaagatgatgatgcctataagactgaggacagcgatgacatccattttgaaccagtagttcaaatgcccgaaaaagtagaacttgtaacaggagaagaagatgaaaaagttctgtattcacagcgggtaaaactatttagatttgatgctgaggtaagtcagtggaaagaaaggggcttggggaacttaaaaattctcaaaaacgaggtcaatggcaaactaagaatgctgatgcgaagagaacaagtactaaaagtgtgtgctaatcattggataacgactacgatgaacctgaagcctctctctggatcagatagagcatggatgtggttagccagtgatttctctgatggtgatgccaaactagagcagttggcagcaaaatttaaaacaccagagctggctgaagaattcaagcagaaatttgaggaatgccagcggcttctgttagacataccacttcaaactccccataaacttgtagatactggcagagctgccaagttaatacagagagctgaagaaatgaagagtggactgaaagatttcaaaacatttttgacaaatgatcaaacaaaagtcactgaggaagaaaataagggttcaggtacaggtgcggccggtgcctcagacacaacaataaaacccaatcctgaaaacactgggcccacattagaatgggataactatgatttaagggaagatgctttggatgatagtgtcagtagtagctcagtacatgcttctccattggcaagtagccctgtgagaaaaaatcttttccgttttggtgagtcaacaacaggatttaacttcagttttaaatctgctttgagtccatctaagtctcctgccaagttgaatcagagtgggacttcagttggcactgatgaagaatctgatgttactcaagaagaagagagagatggacagtactttgaacctgttgttcctttacctgatctagttgaagtatccagtggtgaggaaaatgaacaagttgtttttagtcacagggcaaaactctacagatatgataaagatgttggtcaatggaaagaaaggggcattggtgatataaagattttacagaattatgataataagcaagttcgtatagtgatgagaagggaccaagtattaaaactttgtgccaatcacagaataactccagacatgactttgcaaaatatgaaagggacagaaagagtatggttgtggactgcatgtgattttgcagatggagaaagaaaagtagagcatttagctgttcgttttaaactacaggatgttgcagactcgtttaagaaaatttttgatgaagcaaaaacagcccaggaaaaagattctttgataacacctcatgtttctcggtcaagcactcccagagagtcaccatgtggcaaaattgctgtagctgtattagaagaaaccacaagagagaggacagatgttattcagggtgatgatgtagcagatgcaacttcagaagttgaagtgtctagcacatctgaaacaacaccaaaagcagtggtttctcctccaaagtttgtatttggttcagagtctgttaaaagcatttttagtagtgaaaaatcaaaaccatttgcattcggcaacagttcagccactgggtctttgtttggatttagttttaatgcacctttgaaaagtaacaatagtgaaactagttcagtagcccagagtggatctgaaagcaaagtggaacctaaaaaatgtgaactgtcaaagaactctgatatcgaacagtcttcagatagcaaagtcaaaaatctctttgcttcctttccaacggaagaatcttcaatcaactacacatttaaaacaccagaaaaggcaaaagagaagaaaaaacctgaagattctccctcagatgatgatgttctcattgtatatgaactaactccaaccgctgagcagaaagcccttgcaaccaaacttaaacttcctccaactttcttctgctacaagaatagaccagattatgttagtgaagaagaggaggatgatgaagatttcgaaacagctgtcaagaaacttaatggaaaactatatttggatggctcagaaaaatgtagacccttggaagaaaatacagcagataatgagaaagaatgtattattgtttgggaaaagaaaccaacagttgaagagaaggcaaaagcagatacgttaaaacttccacctacatttttttgtggagtctgtagtgatactgatgaagacaatggaaatggggaagactttcaatcagagcttcaaaaagttcaggaagctcaaaaatctcagacagaagaaataactagcacaactgacagtgtatatacaggtgggactgaagtgatggtaccttctttctgtaaatctgaagaacctgattctattaccaaatccattagttcaccatctgtttcctctgaaactatggacaaacctgtagatttgtcaactagaaaggaaattgatacagattctacaagccaaggggaaagcaagatagtttcatttggatttggaagtagcacagggctctcatttgcagacttggcttccagtaattctggagattttgcttttggttctaaagataaaaatttccaatgggcaaatactggagcagctgtgtttggaacacagtcagtcggaacccagtcagccggtaaagttggtgaagatgaagatggtagtgatgaagaagtagttcataatgaagatatccattttgaaccaatagtgtcactaccagaggtagaagtaaaatctggagaagaagatgaagaaattttgtttaaagagagagccaaactttatagatgggatcgggggggaaaaatttgggggggtttttccccccaaaaaagggggttttttcccccccaaaatgaagaattattaccggatc

SEQ ID NO: 37278 - DNA, 8812 bp, Homo sapiens
acacagtggtcctccgccggctacggcgctgcgtcactggtttgcaggcgctttcctcttggaagtggcgactgctgcgggcctgagcgctggtctcacgcgcctcgggagccaggttggcggcgcgatgaggcgcagcaaggctgacgtggagcggtacatcgcctcggtgcagggctccaccccgtcgcctcgacagaagtcaatgaaaggattctattttgcaaagctgtattatgaagctaaagaatatgatcttgctaaaaaatacatatgtacttacattaatgtgcaagagagggatcccaaagctcacagatttctgggtcttctttatgaattggaagaaaacacagacaaagccgttgaatgttacaggcgttcagtggaattaaacccaacacaaaaagatcttgtgttgaagattgcagaattgctttgtaaaaatgatgttactgatggaagagcaaaatactggcttgaaagagcagccaaacttttcccaggaagtcctgcaatttataaactaaaggaacagcttctagattgtgaaggtgaagatggatggaataaactttttgacttgattcagtcagaactttatgtaagacctgatgacgtccatgtgaacatccggctagtggaggtgtatcgctcaactaaaagattgaaggatgctgtggcccactgccatgaggcagagaggaacatagctttgcgttcaagtttagaatggaattcgtgtgttgtacagacccttaaggaatatctggagtctttacagtgtttggagtctgataaaagtgactggcgagcaaccaatacagacttactgctggcctatgctaatcttatgcttcttacgctttccactagagatgtgcaggaaagtagagaattactgcaaagttttgatagtgctcttcagtctgtgaaatctttgggtggaaatgatgaactgtcagctactttcttagaaatgaaaggacatttctacatgcatgctggttctctgcttttgaagatgggtcagcatagtagtaatgttcaatggcgagctctttctgagctggctgcattgtgctatctcatagcatttcaggttccaagaccaaagattaaattaataaaaggtgaagctggacaaaatctgctggaaatgatggcctgtgaccgactgagccaatcagggcacatgttgctaaacttaagtcgtggcaagcaagattttttaaaagagattgttgaaacttttgccaacaaaagcgggcagtctgcattatatgatgctctgttttctagtcagtcacctaaggatacatcttttcttggtagcgatgatattggaaacattgatgtacgagaaccagagcttgaagatttgactagatacgatgttggtgctattcgagcacataatggtagtcttcagcaccttacttggcttggcttacagtggaattcattgcctgctttacctggaatccgaaaatggctaaaacagcttttccatcatttgccccatgaaacctcaaggcttgaaacaaatgcacctgaatcaatatgtattttagatcttgaagtatttctccttggagtagtatataccagccacttacaattaaaggagaaatgtaattctcaccacagctcctatcagccgttatgcctgccccttcctgtgtgtaaacagctttgtacagaaagacaaaaatcttggtgggatgcggtttgtactctgattcacagaaaagcagtacctggaaacgtagcaaaattgagacttctagttcagcatgaaataaacactctaagagcccaggaaaaacatggccttcaacctgctctgcttgtacattgggcagaatgccttcagaaaacgggcagcggtcttaattctttttatgatcaacgagaatacatagggagaagtgttcattattggaagaaagttttgccattgttgaagataataaaaaagaagaacagtattcctgaacctattgatcctctgtttaaacattttcatagtgtagacattcaggcatcagaaattgttgaatatgaagaagacgcacacataacttttgctatattggatgcagtaaatggaaatatagaagatgctgtgactgcttttgaatctataaaaagtgttgtttcttattggaatcttgcactgatttttcacaggaaggcagaagacattgaaaatgatgccctttctcctgaagaacaagaagaatgcaaaaattatctgagaaagaccagggactacctaataaagattatagatgacagtgattcaaatctttcagtggtcaagaaattgcctgtgcccctggagtctgtaaaagagatgcttaattcagtcatgcaggaactcgaagactatagtgaaggaggtcctctctataaaaatggttctttgcgaaatgcagattcagaaataaaacattctacaccgtctcctaccagatattcactatcaccaagtaaaagttacaagtattctcccaaaacaccacctcgatgggcagaagatcagaattctttactgaaaatgatttgccaacaagtagaggccattaagaaagaaatgcaggagttgaaactaaatagcagtaactcagcatcccctcatcgttggcccacagagaattatggaccagactcggtgcctgatggatatcaggggtcacagacatttcatggggctccactaacagttgcaactactggcccttcagtatattatagtcagtcaccagcatataattcccagtatcttctcagaccagcagctaatgttactcccacaaagggcccagtctatggcatgaataggcttccaccccaacagcatatttatgcctatccgcaacagatgcacacaccgccagtgcaaagctcatctgcttgtatgttctctcaggagatgtatggtcctcctgcattgcgttttgagtctcctgcaacgggaattctatcgcccaggggtgatgattactttaattacaatgttcaacagacaagcacaaatccacctttgccagaaccaggatatttcacaaaacctccgattgcagctcatgcttcaagatctgcagaatctaagactatagaatttgggaaaactaattttgttcagcccatgccgggtgaaggattaaggccatctttgccaacacaagcacacacaacacagccaactccttttaaatttaactcaaatttcaaatcaaatgatggtgacttcacgttttcctcaccacaggttgtgacacagccccctcctgcagcttacagtaacagtgaaagccttttaggtctcctgacttcagataaacccttgcaaggagatggctatagtggagccaaaccaattcctggtggtcaaaccattgggcctcgaaatacattcaattttggaagcaaaaatgtgtctggaatttcatttacagaaaacatggggtcgagtcagcaaaagaattctggttttcggcgaagtgatgatatgtttactttccatggtccagggaaatcagtatttggaacacccactttagagacagcaaacaagaatcatgagacagatggaggaagtgcccatggggatgatgatgatgacggtcctcactttgagcctgtagtacctcttcctgataagattgaagtaaaaactggtgaggaagatgaagaagaattcttttgcaaccgcgcgaaattgtttcgtttcgatgtagaatccaaagaatggaaagaacgtgggattggcaatgtaaaaatactgaggcataaaacatctggtaaaattcgccttctaatgagacgagagcaagtattgaaaatctgtgcaaatcattacatcagtccagatatgaaattgacaccaaatgctggatcagacagatcttttgtatggcatgcccttgattatgcagatgagttgccaaaaccagaacaacttgctattaggttcaaaactcctgaggaagcagcactttttaaatgcaagtttgaagaagcccagagcattttaaaagccccaggaacaaatgtagccatggcgtcaaatcaggctgtcagaattgtaaaagaacccacaagtcatgataacaaggatatttgcaaatctgatgctggaaacctgaattttgaatttcaggttgcaaagaaagaagggtcttggtggcattgtaacagctgctcattaaagaatgcttcaactgctaagaaatgtgtatcatgccaaaatctaaacccaagcaataaagagctcgttggcccaccattagctgaaactgtttttactcctaaaaccagcccagagaatgttcaagatcgatttgcattggtgactccaaagaaagaaggtcactgggattgtagtatttgtttagtaagaaatgaacctactgtatctaggtgcattgcgtgtcagaatacaaaatctgctaacaaaagtggatcttcatttgttcatcaagcttcatttaaatttggccagggagatcttcctaaacctattaacagtgatttcagatctgttttttctacaaaggaaggacagtgggattgcagtgcatgtttggtacaaaatgaggggagctctacaaaatgtgctgcttgtcagaatccgagaaaacagagtctacctgctacttctattccaacacctgcctcttttaagtttggtacttcagagacaagtaaaactctaaaaagtggatttgaagacatgtttgctaagaaggaaggacagtgggattgcagttcatgcttagtgcgaaatgaagcaaatgctacaagatgtgttgcttgtcagaatccggataaaccaagtccatctacttctgttccagctcctgcctcttttaagtttggtacttcagagacaagcaaggctccaaagagcggatttgagggaatgttcactaagaaggagggacagtgggattgcagtgtgtgcttagtaagaaatgaagccagtgctaccaaatgtattgcttgtcagaatccaggtaaacaaaatcaaactacttctgcagtttcaacacctgcctcttcagagacaagcaaggctccaaagagcggatttgagggaatgttcactaagaaggagggacagtgggattgcagtgtgtgcttagtaagaaatgaagccagtgctaccaaatgtattgcttgtcagaatccaggtaaacaaaatcaaactacttctgcagtttcaacacctgcctcttcagagacaagcaaggctccaaagagcggatttgagggaatgttcactaagaaggaaggacagtgggattgcagtgtgtgcttagtaagaaatgaagccagtgctaccaaatgtattgcttgtcagtgtccaagtaaacaaaatcaaacaactgcaatttcaacacctgcctcttcggagataagcaaggctccaaagagtggatttgaaggaatgttcatcaggaaaggacagtgggattgtagtgtttgctgtgtacaaaatgagagttcttccttaaaatgtgtggcttgtgatgcctctaaaccaactcataaacctattgcagaagctccttcagctttcacactgggctcagaaatgaagttgcatgactcttctggaagtcaggtgggaacaggatttaaaagtaatttctcagaaaaagcttctaagtttggcaatacagagcaaggattcaaatttgggcatgtggatcaagaaaattcaccttcatttatgtttcagggttcttctaatacagaatttaagtcaaccaaagaaggattttccatccctgtgtctgctgatggatttaaatttggcatttcggaaccaggaaatcaagaaaagaaaagtgaaaagcctcttgaaaatggtactggcttccaggctcaggatattagtggccagaagaatggccgtggtgtgatttttggccaaacaagtagcacttttacatttgcagatcttgcaaaatcaacttcaggagaaggatttcagtttggcaaaaaagaccccaatttcaagggattttcaggtgctggagaaaaattattctcatcacaatacggtaaaatggccaataaagcaaacacttccggtgactttgagaaagatgatgatgcctataagactgaggacagcgatgacatccattttgaaccagtagttcaaatgcccgaaaaagtagaacttgtaacaggagaagaagatgaaaaagttctgtattcacagcgggtaaaactatttagatttgatgctgaggtaagtcagtggaaagaaaggggcttggggaacttaaaaattctcaaaaacgaggtcaatggcaaactaagaatgctgatgcgaagagaacaagtactaaaagtgtgtgctaatcattggataacgactacgatgaacctgaagcctctctctggatcagatagagcatggatgtggttagccagtgatttctctgatggtgatgccaaactagagcagttggcagcaaaatttaaaacaccagagctggctgaagaattcaagcagaaatttgaggaatgccagcggcttctgttagacataccacttcaaactccccataaacttgtagatactggcagagctgccaagttaatacagagagctgaagaaatgaagagtggactgaaagatttcaaaacatttttgacaaatgatcaaacaaaagtcactgaggaagaaaataagggttcaggtacaggtgcggccggtgcctcagacacaacaataaaacccaatcctgaaaacactgggcccacattagaatgggataactatgatttaagggaagatgctttggatgatagtgtcagtagtagctcagtacatgcttctccattggcaagtagccctgtgagaaaaaatcttttccgttttggtgagtcaacaacaggatttaacttcagttttaaatctgctttgagtccatctaagtctcctgccaagttgaatcagagtgggacttcagttggcactgatgaagaatctgatgttactcaagaagaagagagagatggacagtactttgaacctgttgttcctttacctgatctagttgaagtatccagtggtgaggaaaatgaacaagttgtttttagtcacagggcaaaactctacagatatgataaagatgttggtcaatggaaagaaaggggcattggtgatataaagattttacagaattatgataataagcaagttcgtatagtgatgagaagggaccaagtattaaaactttgtgccaatcacagaataactccagacatgactttgcaaaatatgaaagggacagaaagagtatggttgtggactgcatgtgattttgcagatggagaaagaaaagtagagcatttagctgttcgttttaaactacaggatgttgcagactcgtttaagaaaatttttgatgaagcaaaaacagcccaggaaaaagattctttgataacacctcatgtttctcggtcaagcactcccagagagtcaccatgtggcaaaattgctgtagctgtattagaagaaaccacaagagagaggacagatgttattcagggtgatgatgtagcagatgcaacttcagaagttgaagtgtctagcacatctgaaacaacaccaaaagcagtggtttctcctccaaagtttgtatttggttcagagtctgttaaaagcatttttagtagtgaaaaatcaaaaccatttgcattcggcaacagttcagccactgggtctttgtttggatttagttttaatgcacctttgaaaagtaacaatagtgaaactagttcagtagcccagagtggatctgaaagcaaagtggaacctaaaaaatgtgaactgtcaaagaactctgatatcgaacagtcttcagatagcaaagtcaaaaatctctttgcttcctttccaacggaagaatcttcaatcaactacacatttaaaacaccagaaaaggcaaaagagaagaaaaaacctgaagattctccctcagatgatgatgttctcattgtatatgaactaactccaaccgctgagcagaaagcccttgcaaccaaacttaaacttcctccaactttcttctgctacaagaatagaccagattatgttagtgaagaagaggaggatgatgaagatttcgaaacagctgtcaagaaacttaatggaaaactatatttggatggctcagaaaaatgtagacccttggaagaaaatacagcagataatgagaaagaatgtattattgtttgggaaaagaaaccaacagttgaagagaaggcaaaagcagatacgttaaaacttccacctacatttttttgtggagtctgtagtgatactgatgaagacaatggaaatggggaagactttcaatcagagcttcaaaaagttcaggaagctcaaaaatctcagacagaagaaataactagcacaactgacagtgtatatacaggtgggactgaagtgatggtaccttctttctgtaaatctgaagaacctgattctattaccaaatccattagttcaccatctgtttcctctgaaactatggacaaacctgtagatttgtcaactagaaaggaaattgatacagattctacaagccaaggggaaagcaagatagtttcatttggatttggaagtagcacagggctctcatttgcagacttggcttccagtaattctggagattttgcttttggttctaaaggatgtcactctgttgcccaggctggagtgcagtggcatgaacacagctcactgctgccttgacctcctgggctctaaagcaatcct

SEQ ID NO: 37279 - DNA, 8749 bp, Homo sapiens
acacagtggtcctccgccggctacggcgctgcgtcactggtttgcaggcgctttcctcttggaagtggcgactgctgcgggcctgagcgctggtctcacgcgcctcgggagccaggttggcggcgcgatgaggcgcagcaaggctgacgtggagcggtacatcgcctcggtgcagggctccaccccgtcgcctcgacagaagtcaatgaaaggattctattttgcaaagctgtattatgaagctaaagaatatgatcttgctaaaaaatacatatgtacttacattaatgtgcaagagagggatcccaaagctcacagatttctgggtcttctttatgaattggaagaaaacacagacaaagccgttgaatgttacaggcgttcagtggaattaaacccaacacaaaaagatcttgtgttgaagattgcagaattgctttgtaaaaatgatgttactgatggaagagcaaaatactggcttgaaagagcagccaaacttttcccaggaagtcctgcaatttataaactaaaggaacagcttctagattgtgaaggtgaagatggatggaataaactttttgacttgattcagtcagaactttatgtaagacctgatgacgtccatgtgaacatccggctagtggaggtgtatcgctcaactaaaagattgaaggatgctgtggcccactgccatgaggcagagaggaacatagctttgcgttcaagtttagaatggaattcgtgtgttgtacagacccttaaggaatatctggagtctttacagtgtttggagtctgataaaagtgactggcgagcaaccaatacagacttactgctggcctatgctaatcttatgcttcttacgctttccactagagatgtgcaggaaagtagagaattactgcaaagttttgatagtgctcttcagtctgtgaaatctttgggtggaaatgatgaactgtcagctactttcttagaaatgaaaggacatttctacatgcatgctggttctctgcttttgaagatgggtcagcatagtagtaatgttcaatggcgagctctttctgagctggctgcattgtgctatctcatagcatttcaggttccaagaccaaagattaaattaataaaaggtgaagctggacaaaatctgctggaaatgatggcctgtgaccgactgagccaatcagggcacatgttgctaaacttaagtcgtggcaagcaagattttttaaaagagattgttgaaacttttgccaacaaaagcgggcagtctgcattatatgatgctctgttttctagtcagtcacctaaggatacatcttttcttggtagcgatgatattggaaacattgatgtacgagaaccagagcttgaagatttgactagatacgatgttggtgctattcgagcacataatggtagtcttcagcaccttacttggcttggcttacagtggaattcattgcctgctttacctggaatccgaaaatggctaaaacagcttttccatcatttgccccatgaaacctcaaggcttgaaacaaatgcacctgaatcaatatgtattttagatcttgaagtatttctccttggagtagtatataccagccacttacaattaaaggagaaatgtaattctcaccacagctcctatcagccgttatgcctgccccttcctgtgtgtaaacagctttgtacagaaagacaaaaatcttggtgggatgcggtttgtactctgattcacagaaaagcagtacctggaaacgtagcaaaattgagacttctagttcagcatgaaataaacactctaagagcccaggaaaaacatggccttcaacctgctctgcttgtacattgggcagaatgccttcagaaaacgggcagcggtcttaattctttttatgatcaacgagaatacatagggagaagtgttcattattggaagaaagttttgccattgttgaagataataaaaaagaagaacagtattcctgaacctattgatcctctgtttaaacattttcatagtgtagacattcaggcatcagaaattgttgaatatgaagaagacgcacacataacttttgctatattggatgcagtaaatggaaatatagaagatgctgtgactgcttttgaatctataaaaagtgttgtttcttattggaatcttgcactgatttttcacaggaaggcagaagacattgaaaatgatgccctttctcctgaagaacaagaagaatgcaaaaattatctgagaaagaccagggactacctaataaagattatagatgacagtgattcaaatctttcagtggtcaagaaattgcctgtgcccctggagtctgtaaaagagatgcttaattcagtcatgcaggaactcgaagactatagtgaaggaggtcctctctataaaaatggttctttgcgaaatgcagattcagaaataaaacattctacaccgtctcctaccagatattcactatcaccaagtaaaagttacaagtattctcccaaaacaccacctcgatgggcagaagatcagaattctttactgaaaatgatttgccaacaagtagaggccattaagaaagaaatgcaggagttgaaactaaatagcagtaactcagcatcccctcatcgttggcccacagagaattatggaccagactcggtgcctgatggatatcaggggtcacagacatttcatggggctccactaacagttgcaactactggcccttcagtatattatagtcagtcaccagcatataattcccagtatcttctcagaccagcagctaatgttactcccacaaagggcccagtctatggcatgaataggcttccaccccaacagcatatttatgcctatccgcaacagatgcacacaccgccagtgcaaagctcatctgcttgtatgttctctcaggagatgtatggtcctcctgcattgcgttttgagtctcctgcaacgggaattctatcgcccaggggtgatgattactttaattacaatgttcaacagacaagcacaaatccacctttgccagaaccaggatatttcacaaaacctccgattgcagctcatgcttcaagatctgcagaatctaagactatagaatttgggaaaactaattttgttcagcccatgccgggtgaaggattaaggccatctttgccaacacaagcacacacaacacagccaactccttttaaatttaactcaaatttcaaatcaaatgatggtgacttcacgttttcctcaccacaggttgtgacacagccccctcctgcagcttacagtaacagtgaaagccttttaggtctcctgacttcagataaacccttgcaaggagatggctatagtggagccaaaccaattcctggtggtcaaaccattgggcctcgaaatacattcaattttggaagcaaaaatgtgtctggaatttcatttacagaaaacatggggtcgagtcagcaaaagaattctggttttcggcgaagtgatgatatgtttactttccatggtccagggaaatcagtatttggaacacccactttagagacagcaaacaagaatcatgagacagatggaggaagtgcccatggggatgatgatgatgacggtcctcactttgagcctgtagtacctcttcctgataagattgaagtaaaaactggtgaggaagatgaagaagaattcttttgcaaccgcgcgaaattgtttcgtttcgatgtagaatccaaagaatggaaagaacgtgggattggcaatgtaaaaatactgaggcataaaacatctggtaaaattcgccttctaatgagacgagagcaagtattgaaaatctgtgcaaatcattacatcagtccagatatgaaattgacaccaaatgctggatcagacagatcttttgtatggcatgcccttgattatgcagatgagttgccaaaaccagaacaacttgctattaggttcaaaactcctgaggaagcagcactttttaaatgcaagtttgaagaagcccagagcattttaaaagccccaggaacaaatgtagccatggcgtcaaatcaggctgtcagaattgtaaaagaacccacaagtcatgataacaaggatatttgcaaatctgatgctggaaacctgaattttgaatttcaggttgcaaagaaagaagggtcttggtggcattgtaacagctgctcattaaagaatgcttcaactgctaagaaatgtgtatcatgccaaaatctaaacccaagcaataaagagctcgttggcccaccattagctgaaactgtttttactcctaaaaccagcccagagaatgttcaagatcgatttgcattggtgactccaaagaaagaaggtcactgggattgtagtatttgtttagtaagaaatgaacctactgtatctaggtgcattgcgtgtcagaatacaaaatctgctaacaaaagtggatcttcatttgttcatcaagcttcatttaaatttggccagggagatcttcctaaacctattaacagtgatttcagatctgttttttctacaaaggaaggacagtgggattgcagtgcatgtttggtacaaaatgaggggagctctacaaaatgtgctgcttgtcagaatccgagaaaacagagtctacctgctacttctattccaacacctgcctcttttaagtttggtacttcagagacaagtaaaactctaaaaagtggatttgaagacatgtttgctaagaaggaaggacagtgggattgcagttcatgcttagtgcgaaatgaagcaaatgctacaagatgtgttgcttgtcagaatccggataaaccaagtccatctacttctgttccagctcctgcctcttttaagtttggtacttcagagacaagcaaggctccaaagagcggatttgagggaatgttcactaagaaggagggacagtgggattgcagtgtgtgcttagtaagaaatgaagccagtgctaccaaatgtattgcttgtcagaatccaggtaaacaaaatcaaactacttctgcagtttcaacacctgcctcttcagagacaagcaaggctccaaagagcggatttgagggaatgttcactaagaaggagggacagtgggattgcagtgtgtgcttagtaagaaatgaagccagtgctaccaaatgtattgcttgtcagaatccaggtaaacaaaatcaaactacttctgcagtttcaacacctgcctcttcagagacaagcaaggctccaaagagcggatttgagggaatgttcactaagaaggaaggacagtgggattgcagtgtgtgcttagtaagaaatgaagccagtgctaccaaatgtattgcttgtcagtgtccaagtaaacaaaatcaaacaactgcaatttcaacacctgcctcttcggagataagcaaggctccaaagagtggatttgaaggaatgttcatcaggaaaggacagtgggattgtagtgtttgctgtgtacaaaatgagagttcttccttaaaatgtgtggcttgtgatgcctctaaaccaactcataaacctattgcagaagctccttcagctttcacactgggctcagaaatgaagttgcatgactcttctggaagtcaggtgggaacaggatttaaaagtaatttctcagaaaaagcttctaagtttggcaatacagagcaaggattcaaatttgggcatgtggatcaagaaaattcaccttcatttatgtttcagggttcttctaatacagaatttaagtcaaccaaagaaggattttccatccctgtgtctgctgatggatttaaatttggcatttcggaaccaggaaatcaagaaaagaaaagtgaaaagcctcttgaaaatggtactggcttccaggctcaggatattagtggccagaagaatggccgtggtgtgatttttggccaaacaagtagcacttttacatttgcagatcttgcaaaatcaacttcaggagaaggatttcagtttggcaaaaaagaccccaatttcaagggattttcaggtgctggagaaaaattattctcatcacaatacggtaaaatggccaataaagcaaacacttccggtgactttgagaaagatgatgatgcctataagactgaggacagcgatgacatccattttgaaccagtagttcaaatgcccgaaaaagtagaacttgtaacaggagaagaagatgaaaaagttctgtattcacagcgggtaaaactatttagatttgatgctgaggtaagtcagtggaaagaaaggggcttggggaacttaaaaattctcaaaaacgaggtcaatggcaaactaagaatgctgatgcgaagagaacaagtactaaaagtgtgtgctaatcattggataacgactacgatgaacctgaagcctctctctggatcagatagagcatggatgtggttagccagtgatttctctgatggtgatgccaaactagagcagttggcagcaaaatttaaaacaccagagctggctgaagaattcaagcagaaatttgaggaatgccagcggcttctgttagacataccacttcaaactccccataaacttgtagatactggcagagctgccaagttaatacagagagctgaagaaatgaagagtggactgaaagatttcaaaacatttttgacaaatgatcaaacaaaagtcactgaggaagaaaataagggttcaggtacaggtgcggccggtgcctcagacacaacaataaaacccaatcctgaaaacactgggcccacattagaatgggataactatgatttaagggaagatgctttggatgatagtgtcagtagtagctcagtacatgcttctccattggcaagtagccctgtgagaaaaaatcttttccgttttggtgagtcaacaacaggatttaacttcagttttaaatctgctttgagtccatctaagtctcctgccaagttgaatcagagtgggacttcagttggcactgatgaagaatctgatgttactcaagaagaagagagagatggacagtactttgaacctgttgttcctttacctgatctagttgaagtatccagtggtgaggaaaatgaacaagttgtttttagtcacagggcaaaactctacagatatgataaagatgttggtcaatggaaagaaaggggcattggtgatataaagattttacagaattatgataataagcaagttcgtatagtgatgagaagggaccaagtattaaaactttgtgccaatcacagaataactccagacatgactttgcaaaatatgaaagggacagaaagagtatggttgtggactgcatgtgattttgcagatggagaaagaaaagtagagcatttagctgttcgttttaaactacaggatgttgcagactcgtttaagaaaatttttgatgaagcaaaaacagcccaggaaaaagattctttgataacacctcatgtttctcggtcaagcactcccagagagtcaccatgtggcaaaattgctgtagctgtattagaagaaaccacaagagagaggacagatgttattcagggtgatgatgtagcagatgcaacttcagaagttgaagtgtctagcacatctgaaacaacaccaaaagcagtggtttctcctccaaagtttgtatttggttcagagtctgttaaaagcatttttagtagtgaaaaatcaaaaccatttgcattcggcaacagttcagccactgggtctttgtttggatttagttttaatgcacctttgaaaagtaacaatagtgaaactagttcagtagcccagagtggatctgaaagcaaagtggaacctaaaaaatgtgaactgtcaaagaactctgatatcgaacagtcttcagatagcaaagtcaaaaatctctttgcttcctttccaacggaagaatcttcaatcaactacacatttaaaacaccagaaaaggcaaaagagaagaaaaaacctgaagattctccctcagatgatgatgttctcattgtatatgaactaactccaaccgctgagcagaaagcccttgcaaccaaacttaaacttcctccaactttcttctgctacaagaatagaccagattatgttagtgaagaagaggaggatgatgaagatttcgaaacagctgtcaagaaacttaatggaaaactatatttggatggctcagaaaaatgtagacccttggaagaaaatacagcagataatgagaaagaatgtattattgtttgggaaaagaaaccaacagttgaagagaaggcaaaagcagatacgttaaaacttccacctacatttttttgtggagtctgtagtgatactgatgaagacaatggaaatggggaagactttcaatcagagcttcaaaaagttcaggaagctcaaaaatctcagacagaaggaaaacaactttttatgtatagcttctaaaaggggaaaaaaaaaaaaaagagaaaccctttgacttccacgtgcccatctcaagacattccactcacagatttgaggttctggattccaggtctggagttttccaatgttaatgtaaacagaactggcacacacacattaagatgaatgtaattattattcctcttgctggtcactaccgtcgctttctatttctctttctttgtgtgaatttatttaaaagaaaaaaaactttttgtaacgactatttgcagtttaaaaatcaataaaccccgttttttcaag

SEQ ID NO: 37280 - DNA, 7294 bp, Homo sapiens
acacagtggtcctccgccggctacggcgctgcgtcactggtttgcaggcgctttcctcttggaagtggcgactgctgcgggcctgagcgctggtctcacgcgcctcgggagccaggttggcggcgcgatgaggcgcagcaaggctgacgtggagcggtacatcgcctcggtgcagggctccaccccgtcgcctcgacagaagtcaatgaaaggattctattttgcaaagctgtattatgaagctaaagaatatgatcttgctaaaaaatacatatgtacttacattaatgtgcaagagagggatcccaaagctcacagatttctgggtcttctttatgaattggaagaaaacacagacaaagccgttgaatgttacaggcgttcagtggaattaaacccaacacaaaaagatcttgtgttgaagattgcagaattgctttgtaaaaatgatgttactgatggaagagcaaaatactggcttgaaagagcagccaaacttttcccaggaagtcctgcaatttataaactaaaggaacagcttctagattgtgaaggtgaagatggatggaataaactttttgacttgattcagtcagaactttatgtaagacctgatgacgtccatgtgaacatccggctagtggaggtgtatcgctcaactaaaagattgaaggatgctgtggcccactgccatgaggcagagaggaacatagctttgcgttcaagtttagaatggaattcgtgtgttgtacagacccttaaggaatatctggagtctttacagtgtttggagtctgataaaagtgactggcgagcaaccaatacagacttactgctggcctatgctaatcttatgcttcttacgctttccactagagatgtgcaggaaagtagagaattactgcaaagttttgatagtgctcttcagtctgtgaaatctttgggtggaaatgatgaactgtcagctactttcttagaaatgaaaggacatttctacatgcatgctggttctctgcttttgaagatgggtcagcatagtagtaatgttcaatggcgagctctttctgagctggctgcattgtgctatctcatagcatttcaggttccaagaccaaagattaaattaataaaaggtgaagctggacaaaatctgctggaaatgatggcctgtgaccgactgagccaatcagggcacatgttgctaaacttaagtcgtggcaagcaagattttttaaaagagattgttgaaacttttgccaacaaaagcgggcagtctgcattatatgatgctctgttttctagtcagtcacctaaggatacatcttttcttggtagcgatgatattggaaacattgatgtacgagaaccagagcttgaagatttgactagatacgatgttggtgctattcgagcacataatggtagtcttcagcaccttacttggcttggcttacagtggaattcattgcctgctttacctggaatccgaaaatggctaaaacagcttttccatcatttgccccatgaaacctcaaggcttgaaacaaatgcacctgaatcaatatgtattttagatcttgaagtatttctccttggagtagtatataccagccacttacaattaaaggagaaatgtaattctcaccacagctcctatcagccgttatgcctgccccttcctgtgtgtaaacagctttgtacagaaagacaaaaatcttggtgggatgcggtttgtactctgattcacagaaaagcagtacctggaaacgtagcaaaattgagacttctagttcagcatgaaataaacactctaagagcccaggaaaaacatggccttcaacctgctctgcttgtacattgggcagaatgccttcagaaaacgggcagcggtcttaattctttttatgatcaacgagaatacatagggagaagtgttcattattggaagaaagttttgccattgttgaagataataaaaaagaagaacagtattcctgaacctattgatcctctgtttaaacattttcatagtgtagacattcaggcatcagaaattgttgaatatgaagaagacgcacacataacttttgctatattggatgcagtaaatggaaatatagaagatgctgtgactgcttttgaatctataaaaagtgttgtttcttattggaatcttgcactgatttttcacaggaaggcagaagacattgaaaatgatgccctttctcctgaagaacaagaagaatgcaaaaattatctgagaaagaccagggactacctaataaagattatagatgacagtgattcaaatctttcagtggtcaagaaattgcctgtgcccctggagtctgtaaaagagatgcttaattcagtcatgcaggaactcgaagactatagtgaaggaggtcctctctataaaaatggttctttgcgaaatgcagattcagaaataaaacattctacaccgtctcctaccagatattcactatcaccaagtaaaagttacaagtattctcccaaaacaccacctcgatgggcagaagatcagaattctttactgaaaatgatttgccaacaagtagaggccattaagaaagaaatgcaggagttgaaactaaatagcagtaactcagcatcccctcatcgttggcccacagagaattatggaccagactcggtgcctgatggatatcaggggtcacagacatttcatggggctccactaacagttgcaactactggcccttcagtatattatagtcagtcaccagcatataattcccagtatcttctcagaccagcagctaatgttactcccacaaagggcccagtctatggcatgaataggcttccaccccaacagcatatttatgcctatccgcaacagatgcacacaccgccagtgcaaagctcatctgcttgtatgttctctcaggagatgtatggtcctcctgcattgcgttttgagtctcctgcaacgggaattctatcgcccaggggtgatgattactttaattacaatgttcaacagacaagcacaaatccacctttgccagaaccaggatatttcacaaaacctccgattgcagctcatgcttcaagatctgcagaatctaagactatagaatttgggaaaactaattttgttcagcccatgccgggtgaaggattaaggccatctttgccaacacaagcacacacaacacagccaactccttttaaatttaactcaaatttcaaatcaaatgatggtgacttcacgttttcctcaccacaggttgtgacacagccccctcctgcagcttacagtaacagtgaaagccttttaggtctcctgacttcagataaacccttgcaaggagatggctatagtggagccaaaccaattcctggtggtcaaaccattgggcctcgaaatacattcaattttggaagcaaaaatgtgtctggaatttcatttacagaaaacatggggtcgagtcagcaaaagaattctggttttcggcgaagtgatgatatgtttactttccatggtccagggaaatcagtatttggaacacccactttagagacagcaaacaagaatcatgagacagatggaggaagtgcccatggggatgatgatgatgacggtcctcactttgagcctgtagtacctcttcctgataagattgaagtaaaaactggtgaggaagatgaagaagaattcttttgcaaccgcgcgaaattgtttcgtttcgatgtagaatccaaagaatggaaagaacgtgggattggcaatgtaaaaatactgaggcataaaacatctggtaaaattcgccttctaatgagacgagagcaagtattgaaaatctgtgcaaatcattacatcagtccagatatgaaattgacaccaaatgctggatcagacagatcttttgtatggcatgcccttgattatgcagatgagttgccaaaaccagaacaacttgctattaggttcaaaactcctgaggaagcagcactttttaaatgcaagtttgaagaagcccagagcattttaaaagccccaggaacaaatgtagccatggcgtcaaatcaggctgtcagaattgtaaaagaacccacaagtcatgataacaaggatatttgcaaatctgatgctggaaacctgaattttgaatttcaggttgcaaagaaagaagggtcttggtggcattgtaacagctgctcattaaagaatgcttcaactgctaagaaatgtgtatcatgccaaaatctaaacccaagcaataaagagctcgttggcccaccattagctgaaactgtttttactcctaaaaccagcccagagaatgttcaagatcgatttgcattggtgactccaaagaaagaaggtcactgggattgtagtatttgtttagtaagaaatgaacctactgtatctaggtgcattgcgtgtcagaatacaaaatctgctaacaaaagtggatcttcatttgttcatcaagcttcatttaaatttggccagggagatcttcctaaacctattaacagtgatttcagatctgttttttctacaaaggaaggacagtgggattgcagtgcatgtttggtacaaaatgaggggagctctacaaaatgtgctgcttgtcagaatccgagaaaacagagtctacctgctacttctattccaacacctgcctcttttaagtttggtacttcagagacaagtaaaactctaaaaagtggatttgaagacatgtttgctaagaaggaaggacagtgggattgcagttcatgcttagtgcgaaatgaagcaaatgctacaagatgtgttgcttgtcagaatccggataaaccaagtccatctacttctgttccagctcctgcctcttttaagtttggtacttcagagacaagcaaggctccaaagagcggatttgagggaatgttcactaagaaggagggacagtgggattgcagtgtgtgcttagtaagaaatgaagccagtgctaccaaatgtattgcttgtcagaatccaggtaaacaaaatcaaactacttctgcagtttcaacacctgcctcttcagagacaagcaaggctccaaagagcggatttgagggaatgttcactaagaaggagggacagtgggattgcagtgtgtgcttagtaagaaatgaagccagtgctaccaaatgtattgcttgtcagaatccaggtaaacaaaatcaaactacttctgcagtttcaacacctgcctcttcagagacaagcaaggctccaaagagcggatttgagggaatgttcactaagaaggaaggacagtgggattgcagtgtgtgcttagtaagaaatgaagccagtgctaccaaatgtattgcttgtcagtgtccaagtaaacaaaatcaaacaactgcaatttcaacacctgcctcttcggagataagcaaggctccaaagagtggatttgaaggaatgttcatcaggaaaggacagtgggattgtagtgtttgctgtgtacaaaatgagagttcttccttaaaatgtgtggcttgtgatgcctctaaaccaactcataaacctattgcagaagctccttcagctttcacactgggctcagaaatgaagttgcatgactcttctggaagtcaggtgggaacaggatttaaaagtaatttctcagaaaaagcttctaagtttggcaatacagagcaaggattcaaatttgggcatgtggatcaagaaaattcaccttcatttatgtttcagggttcttctaatacagaatttaagtcaaccaaagaaggattttccatccctgtgtctgctgatggatttaaatttggcatttcggaaccaggaaatcaagaaaagaaaagtgaaaagcctcttgaaaatggtactggcttccaggctcaggatattagtggccagaagaatggccgtggtgtgatttttggccaaacaagtagcacttttacatttgcagatcttgcaaaatcaacttcaggagaaggatttcagtttggcaaaaaagaccccaatttcaagggattttcaggtgctggagaaaaattattctcatcacaatacggtaaaatggccaataaagcaaacacttccggtgactttgagaaagatgatgatgcctataagactgaggacagcgatgacatccattttgaaccagtagttcaaatgcccgaaaaagtagaacttgtaacaggagaagaagatgaaaaagttctgtattcacagcgggtaaaactatttagatttgatgctgaggtaagtcagtggaaagaaaggggcttggggaacttaaaaattctcaaaaacgaggtcaatggcaaactaagaatgctgatgcgaagagaacaagtactaaaagtgtgtgctaatcattggataacgactacgatgaacctgaagcctctctctggatcagatagagcatggatgtggttagccagtgatttctctgatggtgatgccaaactagagcagttggcagcaaaatttaaaacaccagagctggctgaagaattcaagcagaaatttgaggaatgccagcggcttctgttagacataccacttcaaactccccataaacttgtagatactggcagagctgccaagttaatacagagagctgaagaaatgaagagtggactgaaagatttcaaaacatttttgacaaatgatcaaacaaaagtcactgaggaagaaaataagggttcaggtacaggtgcggccggtgcctcagacacaacaataaaacccaatcctgaaaacactgggcccacattagaatgggataactatgatttaagggaagatgctttggatgatagtgtcagtagtagctcagtacatgcttctccattggcaagtagccctgtgagaaaaaatcttttccgttttggtgagtcaacaacaggatttaacttcagttttaaatctgctttgagtccatctaagtctcctgccaagttgaatcagagtgggacttcagttggcactgatgaagaatctgatgttactcaagaagaagagagagatggacagtactttgaacctgttgttcctttacctgatctagttgaagtatccagtggtgaggaaaatgaacaagttgtttttagtcacagggcaaaactctacagatatgataaagatgttggtcaatggaaagaaaggggcattggtgatataaagattttacagaattatgataataagcaagttcgtatagtgatgagaaagggaaccgtcgacgcggccgcgaatttagtagtagtaggcggccgc

SEQ ID NO: 37281 - DNA, 2313 bp, Homo sapiens
acacagtggtcctccgccggctacggcgctgcgtcactggtttgcaggcgctttcctcttggaagtggcgactgctgcgggcctgagcgctggtctcacgcgcctcgggagccaggttggcggcgcgatgaggcgcagcaaggctgacgtggagcggtacatcgcctcggtgcagggctccaccccgtcgcctcgacagaagtcaatgaaaggattctattttgcaaagctgtattatgaagctaaagaatatgatcttgctaaaaaatacatatgtacttacattaatgtgcaagagagggatcccaaagctcacagatttctgggtcttctttatgaattggaagaaaacacagacaaagccgttgaatgttacaggcgttcagtggaattaaacccaacacaaaaagatcttgtgttgaagattgcagaattgctttgtaaaaatgatgttactgatggaagagcaaaatactggcttgaaagagcagccaaacttttcccaggaagtcctgcaatttataaactaaaggaacagcttctagattgtgaaggtgaagatggatggaataaactttttgacttgattcagtcagaactttatgtaagacctgatgacgtccatgtgaacatccggctagtggaggtgtatcgctcaactaaaagattgaaggatgctgtggcccactgccatgaggcagagaggaacatagctttgcgttcaagtttagaatggaattcgtgtgttgtacagacccttaaggaatatctggagtctttacagtgtttggagtctgataaaagtgactggcgagcaaccaatacagacttactgctggcctatgctaatcttatgcttcttacgctttccactagagatgtgcaggaaagtagagaattactgcaaagttttgatagtgctcttcagtctgtgaaatctttgggtggaaatgatgaactgtcagctactttcttagaaatgaaaggacatttctacatgcatgctggttctctgcttttgaagatgggtcagcatagtagtaatgttcaatggcgagctctttctgagctggctgcattgtgctatctcatagcatttcaggttccaagaccaaagattaaattaataaaaggtgaagctggacaaaatctgctggaaatgatggcctgtgaccgactgagccaatcagggcacatgttgctaaacttaagtcgtggcaagcaagattttttaaaagagattgttgaaacttttgccaacaaaagcgggcagtctgcattatatgatgctctgttttctagtcagtcacctaaggatacatcttttcttggtagcgatgatattggaaacattgatgtacgagaaccagagcttgaagatttgactagatacgatgttggtgctattcgagcacataatggtagtcttcagcaccttacttggcttggcttacagtggaattcattgcctgctttacctggaatccgaaaatggctaaaacagcttttccatcatttgccccatgaaacctcaaggcttgaaacaaatgcacctgaatcaatatgtattttagatcttgaagtatttctccttggagtagtatataccagccacttacaattaaaggagaaatgtaattctcaccacagctcctatcagccgttatgcctgccccttcctgtgtgtaaacagctttgtacagaaagacaaaaatcttggtgggatgcggtttgtactctgattcacagaaaagcagtgtaagtagtaaaacaaaaatattgctttcacttagtgcgtaggttttaccggggatttaatcctcatgtgaagatttaatttgtcatgtgacccattaacatatatgtatgtaagccctgaactgtgtatttagaaagcaattttagtaaattgaactattttttagacctggaaacgtagcaaaattgagacttctagttcagcatgaaataaacactctaagagcccaggaaaaacatggccttcaacctgctctgcttgtacattgggcagaatgccttcagaaaacggtgagttttaaagtataagcatttttaaagaacattaccttaattttttaaaatcatgaactttttattgaaagttttttttttctgaaaacagcagcttggtcacattatgacagatgtgttttttattgctgcaaaatagttaatgtagttaaatataagcacttagaggagcaatgcctggcacacagtgaatgttacatattagctgagctgttactgttattccttaataattaagttctgataattattcagcctgaa

SEQ ID NO: 37282 - DNA, 1448 bp, Homo sapiens
acacagtggtcctccgccggctacggcgctgcgtcactggtttgcaggcgctttcctcttggaagtggcgactgctgcgggcctgagcgctggtctcacgcgcctcgggagccaggttggcggcgcgatgaggcgcagcaaggctgacgtggagcggtacatcgcctcggtgcagggctccaccccgtcgcctcgacagaagtcaatgaaaggattctattttgcaaagctgtattatgaagctaaagaatatgatcttgctaaaaaatacatatgtacttacattaatgtgcaagagagggatcccaaagctcacagatttctgggtcttctttatgaattggaagaaaacacagacaaagccgttgaatgttacaggcgttcagtggaattaaacccaacacaaaaagatcttgtgttgaagattgcagaattgctttgtaaaaatgatgttactgatggaagagcaaaatactggcttgaaagagcagccaaacttttcccaggaagtcctgcaatttataaactaaaggaacagcttctagattgtgaaggtgaagatggatggaataaactttttgacttgattcagtcagaactttatgtaagacctgatgacgtccatgtgaacatccggctagtggaggtgtatcgctcaactaaaagattgaaggatgctgtggcccactgccatgaggcagagaggaacatagctttgcgttcaagtttagaatggaattcgtgtgttgtacagacccttaaggaatatctggagtctttacagtgtttggagtctgataaaagtgactggcgagcaaccaatacagacttactgctggcctatgctaatcttatgcttcttacgctttccactagagatgtgcaggaaagtagagaattactgcaaagttttgatagtgctcttcagtctgtgaaatctttgggtggaaatgatgaactgtcagctactttcttagaaatgaaaggacatttctacatgcatgctggttctctgcttttgaagatgggtcagcatagtagtaatgttcaatggcgagctctttctgagctggctgcattgtgctatctcatagcatttcaggtaagtcttccacttgtaggagcaattgacatttcactgagtcttgatgtgtttgaaatgaaggtgtgctctggtatgtaatgacaatatgtgaacaaacctgtggaattaaagttgaaatagtcaatttgatacagtggaaaataactaagcatacacaatactggtgaggctggtgaaacagggatgttgaatgcactcttgttgaaagcctgcattgccatgatttgtttgtagacaaatttgaagagtttgatctttttactctgccatttttgggaacatgataaagatgtaatctcgtattatgggtaaagcttgattcagaaagatgtgttacttggac

SEQ ID NO: 37283 - DNA, 361 bp, Homo sapiens
gtccataattccacatcatactgatctttcttagaaaaggcaacagttactttcttctttattccttttttaatgcttgtgaggtagttgttcttgttgatcacagcaatgctattctcttattcttcatgtcatatttagcagtttttttctagtttgtcatttgataatcttgattggtgtattttgatgtacagaaatttaaaatttatgtagttaaatctttctttaatttctattgcctttgtatttatagctcttgcctagatagtcttaactgtagtatagactttaacagtgttttctttattttctttttgtttttttagttgcaactactggcccttcagtatattatagt

SEQ ID NO: 37284 - DNA, 317 bp, Homo sapiens
gtagtcttcagcaccttacttggcttggcttacagtggaattcattgcctgctttacctggaatccgaaaatggctaaaacagcttttccatcatttgccccatgaaacctcaaggcttgaaacaaatgcacctgaatcaatatgtattttagatcttgaagtaagcaaagattttaacaaattaaatattctgaattttgtttaattttttttctaacttaacttttccttaaatgaaacaggtatttctccttggagtagtatataccagccacttacaattaaaggagaaatgtaattctcaccacagctccta

SEQ ID NO: 37285 - DNA, 646 bp, Homo sapiens
gggaaagcaagatagtttcatttggatttggaagtagcacagggctctcatttgcagacttggcttccagtaattctggagattttgcttttggttctaaaggtaagatcaagaggagagacttttaatgacattgttacagaatcaagcacaactgaaaaactagttttttgttgcagtttttagtttttagtttttagttgtttagtttttagtgttttaataatgaagggcttctacactttattttttgacgtcaatataatcttaagaattttctcttaattttatataagccatgctgatagtcctccccattctgaaatgcagaaccatttttgagctttggaatgactctgactttgatccttactcttttaactatactttcatatgtgatttgttaatatttcaggatttgtgagtttatactttttaaggatatgattttgtagttttcttttttgtactatctttggatttcagtattagggttgtgctaatttattgtgctaagtttataattggtgtgcttgcccatcttctttagtggagtttctatttttaatccattttggtaacatttctagaaaagaatccatttccctgattgtatccggtttactagtgtaaggccattcattat

SEQ ID NO: 37286 - DNA, 592 bp, Homo sapiens
ggacaagaacattgttctaggaaaattactttgtcattttttaacctcagtcagtagctaatatttctcttcagtagcaaacacttttgaaacctctctgtcctataaagaaaagcatttaatttccaaagggaaaatgaatattatataaaagaaaatgtttaatgataaatcaggtctttactccctcagccaaatcagatatattcctagccctaagatatataaccagttatcacattaacaaattctctttgtcatcacaaagaaaatgccttaaaagaatttggatctttgaaatttgtcatggaatttattataagcagcagcttatagagaatttcatctcctattataggtagaagtaaaatctggagaagaagatgaagaaattttgtttaaagagagagccaaactttatagatgggatcgggatgtcagtcagtggaaggagcgcggtgttggagatataaagattctttggcatacaatgaagaattattaccggatcctaatgagaagagaccaggtttttaaagtgtgtgcaaaccacgttattactaaaacaatggaattaaagcccttaaatgtt

SEQ ID NO: 37287 - DNA, 373 bp, Homo sapiens
gatctagtagaaactaagggatgggaaaaaccttttcatttttcatcttctttccaacaatatgaatttcttagttttcaaactatactcaggaaagctgggctttaggatttaacatgtagtgatgagttctgtgtgtattttaatattttactcaggattcctattaattgaaaaaaatttttaacttttttattataaatctttttttcagggaggagatatcaccaaacatgatggaacaggcggacagtccatttatggagacaaatttgaagatgaaaattttgatgtgaaacatactggtcctggtttactatccatggccaatcaaggccagaataccaataattctcaatttgttataacactg

SEQ ID NO: 37288 - DNA, 398 bp, Homo sapiens
ggcaggcacagaaggttaaagagggttctaaggtggaggatttatcactgctcactctggatagagagatcgcaggataaggggagcaatttttctctagaaaaataaccctggaaaaacattattttcctctttttagagccacttaaatgcaaaagcagaaaacgacaagttgaacatgaatagatgaatatatgatatatgaatatagtttgcctgtgaaggtgcaacacctacagtatgaaacattttgtgttaaaatagagtttatggctgggcacggtggctcacgcctgtaatcccagcagtttgggaggctgaggcagaaggatcgcttgaccccaggagtttaagaccagcctgggcaacacagcgagaccctgtctcaactgaaaaaa

SEQ ID NO: 37289 - DNA, 496 bp, Homo sapiens
attcaaatacaccagacaccttcactcccaggtgcatctgcaaggggcaggcagatattccccagctggtgcccagacccaaaccaattctctcctttttggggtcttgaaacatccctggggaatatagcagcttccaggctacaactgagcagctatgagtgtcaaagcctcaaaacctggaacctggaagtccatgctgagtgtttggataagacaatgtcccagcgacacaggtctagacctggccacactgttcaatcctggagcacaaacaccactccagggcttcatgacctggccatgccacctctcctgcctcttctcttgctacctccccattatgtccttcactccagtcaggccaaaccacaggcaattcctggaagttgcattgcactaactttgcccatgaagttccctctgatggggaggctcttccacctgacccaataagcctcagctcagctcccctctttcattaagctttccctaa

SEQ ID NO: 37290 - DNA, 784 bp, Homo sapiens
aaatgtaatagttggtgtcttttggtatagctaacttttaaacagtacaggtggctcttggacagtcactgttttaaacaagcagcagtaaggcagactgaagacagtaggaaaaatgatcaacatggtggaaggaaagaaagcagtcagtaacaacttatataataatttgcaggaactcttagaactgaaccttacagttaagttgtgatatctggggtagattgtattatttccttatttcagaagaactgaggccccaggtcacatggctgtttatctgcagagctggcattccactctgcttagctaagtgctccctcaaccttgatgctatttttcctgagctgggtgccaggggagcttggatatgtaaagcttggttgatgtccttgataggtgcatggttctaagattgtgattttcatcctaagtttaggaagttacacacctgcgtggacaaggtgggtctaattatttttcattctggtttaatgttgacaagaaaacagacatggaagaggactttcctgcactcctggtcttccttttccttaagtagtgctacaagggtctgaccggaagatctttttactggtggcttgctgcttaatataatacaggttttgagtacaatcatttcttcgtattgtttttaaagtagagcaatgatatgactagtctgaagtgaacatagtctagaagtcacttgcttggtttggggattagaagtatttgcaaggtgaaccacccattctcttctgcttatttacactacactgct

SEQ ID NO: 37291 - DNA, 370 bp, Homo sapiens
aagctggaaactgggttccagtcctggctctgtgcctctctgagtctcattgcaaaatagaggtcaccagaaggattactggatgaaaaatgaggtagcattgcagacgtgcatggcacgtacactctaggttgcttcctagacagaaagctcagttcgaggctggtggcatccatgctggcagcagccaactgtctgcgacagagtgaggaggggcatgccacgtgaaggaccagcatcagaatgacatgggaagaaactctcacaatagcagaagaaagagctccttcagcctaacatgtagaactcaagtcttcttgtcgcgcttctgtcccctcgcccctcctcccccactgagaactagctttta

SEQ ID NO: 37292 - DNA, 958 bp, Homo sapiens
caggtggactttaaagaatccccctttggggctctgcgcagtcagtttaacattatcacaaatatttttcattttaattgtggtaggacctttgaatttgttcatcaactggaaagaaatcctaccctctgtagacacatacacacacatttatatatctatgtgtttgaattgtgactagtatagcactttacattttctcaagtaacaggaagttattgccttcaatattgattggaaattgttttctattgaagtctatactgtagagttttccatttatattgagagtttgaacaattaagctcctattggaacttttccttaagccacatgagcatgaacaatctctgtgacacttgggtgctagagaaacacaacagtggctaaagtagccaagagcaagactgaatgtatagcagagtgccttgttagagtggtaacctagtcttggaagcaattcagtggatgtttcataaagaggactagaacttcaagaagcctcctgtgctggctgaggtgagcccttttggtatatgtacactactgggttgcctagaagccaattcatgaagaataacagcaggatgagaaaaagagtcactgtaacctgtggaacaacaacgtaagaatcaccaacccctaggctgagctagaactggaagccaggaatatggcaatgagtttcaagatttgccctcagaagatgaactgggtgaggtatgggttgaggtgagggcacaagcactcatcctacctaccctgctgctgttgaggagctagaagtaaaacatattggttaggattttaacagttggagtagcctcccattatcagattaagtgggggtcacttttgcttccaaactcagaataagtttgtaaacatgggaaagtctaagccaagagatctaaagctctagaaatattaatgacatttctgggagtaaaactactaa

SEQ ID NO: 37293 - DNA, 818 bp, Homo sapiens
caggtggactttaaagaatccccctttggggctctgcgcagtcagtttaacattatcacaaatatttttcattttaattgtggtaggacctttgaatttgttcatcaactggaaagaaatcctaccctctgtagacacatacacacacatttatatatctatgtgtttgaattgtgactagtatagcactttacattttctcaagtaacaggaagttattgccttcaatattgattggaaattgttttctattgaagtctatactgtagagttttccatttatattgagagtttgaacaattaagctcctattggaacttttccttaagccacatgagcatgaacaatctctgtgacacttgggtgctagagaaacacaacagtggctaaagtagccaagagcaagactgaatgtatagcagagtgccttgttagagtggtaacctagtcttggaagcaattcagtggatgtttcataaagaggactagaacttcaagaagcctcctgtgctggctgaggtgagcccttttggtatatgtacactactgggttgcctagaagccaattcatgaagaataacagcaggatgagaaaaagagtcactgtaacctgtggaacaacaacgtaagaatcaccaacccctaggcagaagcaggaagcgcgtcctgcttctgccagggtgttgccattcaggtccagcttcttcagttctgtctttgtcttccttgtgcctcttgctacattctcaggtcagtcatcctctcttgatctctactgtatgtacttttctgttcttttagtcttttttttttttttt

SEQ ID NO: 37294 - DNA, 238 bp, Homo sapiens
tcaaaaaatgttaaaaaataagaatgcaggtgttaagacttgtaaatgatgttttgccagaatcctccagaacaatgctgaaaatacctcccactcccacccaagctttccagggaacaccatgtttagggccttaagtaatcctttgagtcttagcaaacttatattttgcttggttccattttaatacaaaatgaacatatggtctggaaacagaagtttgtctatttggcggtta

SEQ ID NO: 37295 - DNA, 204 bp, Homo sapiens
taactgagaggcttcctttatctaccaattcatgaaactagaaacctgagagtccattttgattcctcccattccctctctttgcctcctctcccacttccagttcatttacagtcctagcttgtaaatgctaactcccaaaacctcttgaatccacctacttctacccaggtccactgccaccactcttttttactttaccat

SEQ ID NO: 37296 - DNA, 2441 bp, Homo sapiens
aaataataataataaaatacaaatacttagaaattaacttcgcctttgccttcaggcacttttgctacatgttagcatcagaggctattgtacaactagatggttattccctgtttcttggccgatttttggtacctttctttgaagaagagggttagattttaagaaagaaagtgtgcttatttcactcatgtctttgcagaatttaactttgctttactttaaaaattccaatcatcatgtacctataaaggttaaaatatagtgaaagtttctgcttcatgtgaattcaattctgagcacctgcaggtcatatcaggtgtctgatgcagttacctttatagatcgtggcaggtccttacatttcaacaggcttatgcatttccatggggggaagagattctgtttctaggaaattacaaagggcacaccactgcagggagtgtaaacaattctttgttgcaacagacaagattttttttaaaaaaagaaaaaaggatgcattttaggtacacagggtatggacgcattcaacatttacttttatctccacagatgccaacctccccttgttgcaggcagttgggcttttccaactcattgctaacaaagctggcatctgcattaatttcaatgagaatttcaagtactgaagatgaaaagttggggagattcatgtttgaaaaatgaaaaatgaacaaaaaatccaccttgtgcagtgagatagctaacgctgatatatcaggaataattttaaactatttttgctgtaatgtgtagctttaatgtctcttttcagttatggacccataaaagtattcctatatcttgtgaataaagatcattcttgtggactagtacgtggatgcattcataggctttgggaagcagtggtgtgcgtatgtgtgtctatatcaatattttatgtttataactctgcgtattaagtttatatagaaaaaaataatgtctttctttagtgtttgggggactcaatggtaatatgaccattgcagtgtaatctgactgctcactctagagaacacttctgttatacacaatgcacatacaaacatacacccctaaagcgtagctaactgctcccactagataattgctgctaaaaacaaaacaaaacaaaacaatacaaaacaaaaaaaaccctaagtaatggaggaagaaatagcattcttttaaaaggggcttttctgaagagtaaaatgtaaatacaggacatgtggggagggtggggccgcctgcaaaatgtcctgaagatggacaaatagccttttaaattctactttttaaccatctttaccgtgtgtgcctatttgtattgcagatgtgaactactatttttggaggttgatatcagtatgttttgaaactgaattattacataaaatcagagtaacctctttctccatcctccttttccacactattcttgccaaatatttctactgaaacccagtttcagcaaggcaaaatgatgggactctcaaacctccctcctcatcttcccttcccctctgtcttatgcctggcctggccttttttgttgttgttggcttttcataagtaagaaaaatttattgtagtatttcaagactgcagaatttcaagtgtatatctataaatctttttttaaaatcttcggctacacagtaacatcaattaaaacagaagagtgagtctaagtctgtaatatgctgtaggaccagataagattttgaatgagactaaacttgactgccatattttaagaggaaattgaaactttatggtggagaatggatgagagcaagtctatgatatatatgtagtcattgtataattagaaacaccaaatgctgaatcctatcactgtgttcttgggggccaggccttggatttggttgtcatttaaactccttgaagattatatgtaattataatgagcagaaggcaaataaagtttttgaacaaaagcccttgttttcagtatttaaaatttggtaatatattttctttttcagttaaactatcttccccacaaaaaatattatacttcagttaaactatcttccccacagaaattattatactacgaacaagttatgagtgagactgagaagcttgaagaagctggtttttaagcagctcatataatattttgtgttaaagaaagtgtcattgtttcctgttgggaggcaaataacaacaacaacaaaagaaattgtcatgattctttctgagccaaactgtcacgaaatgttctgtgacagaaccactactcttttttctgccattctgcctactggagagttctatgttgtatttgtttttaatccttgattttaaaaatattaatggttttagtgttgcttagcttcagtttgaagtataactttcactaataactgcaataaaaagaaaagctttgctcttaaactttctct

SEQ ID NO: 37297 - DNA, 2055 bp, Homo sapiens
ataatatcacgatcatagcatagtagtaaggtcatcagggcggatccatatgctgtggcagggcgtcaagaatgccaactggttggccaaagccatccattccaaggctgccaggaaatgaatgcgtccgttcgacggacgcattcaacatttacttttatctccacagatgccaacctccccttgttgcaggcagttgggcttttccaactcattgctaacaaagctggcatctgcattaatttcaatgagaatttcaagtactgaagatgaaaagttggggagattcatgtttgaaaaatgaaaaatgaacaaaaaatccaccttgtgcagtgagatagctaacgctgatatatcaggaataattttaaactatttttgctgtaatgtgtagctttaatgtctcttttcagttatggacccataaaagtattcctatatcttgtgaataaagatcattcttgtggactagtacgtggatgcattcataggctttgggaagcagtggtgtgcgtatgtgtgtctatatcaatattttatgtttataactctgcgtattaagtttatatagaaaaaaataatgtctttctttagtgtttgggggactcaatggtaatatgaccattgcagtgtaatctgactgctcactctagagaacacttctgttatacacaatgcacatacaaacatacacccctaaagcgtagctaactgctcccactagataattgctgctaaaaacaaaacaaaacaaaacaatacaaaacaaaaaaaaccctaagtaatggaggaagaaatagcattcttttaaaaggggcttttctgaagagtaaaatgtaaatacaggacatgtggggagggtggggccgcctgcaaaatgtcctgaagatggacaaatagccttttaaattctactttttaaccatctttaccgtgtgtgcctatttgtattgcagatgtgaactactatttttggaggttgatatcagtatgttttgaaactgaattattacataaaatcagagtaacctctttctccatcctccttttccacactattcttgccaaatatttctactgaaacccagtttcagcaaggcaaaatgatgggactctcaaacctccctcctcatcttcccttcccctctgtcttatgcctggcctggccttttttgttgttgttggcttttcataagtaagaaaaatttattgtagtatttcaagactgcagaatttcaagtgtatatctataaatctttttttaaaatcttcggctacacagtaacatcaattaaaacagaagagtgagtctaagtctgtaatatgctgtaggaccagataagattttgaatgagactaaacttgactgccatattttaagaggaaattgaaactttatggtggagaatggatgagagcaagtctatgatatatatgtagtcattgtataattagaaacaccaaatgctgaatcctatcactgtgttcttgggggccaggccttggatttggttgtcatttaaactccttgaagattatatgtaattataatgagcagaaggcaaataaagtttttgaacaaaagcccttgttttcagtatttaaaatttggtaatatattttctttttcagttaaactatcttccccacaaaaaatattatacttcagttaaactatcttccccacagaaattattatactacgaacaagttatgagtgagactgagaagcttgaagaagctggtttttaagcagctcatataatattttgtgttaaagaaagtgtcattgtttcctgttgggaggcaaataacaacaacaacaaaagaaattgtcatgattctttctgagccaaactgtcacgaaatgttctgtgacagaaccactactcttttttctgccattctgcctactggagagttctatgttgtatttgtttttaatccttgattttaaaaatattaatggttttagtgttgcttagcttcagtttgaagtataactttcactaataactgcaataaaaagaaaagctttgctcttaaactttctct

SEQ ID NO: 37298 - DNA, 358 bp, Homo sapiens
accccaaggttttcctaaggcaaatgaattccttgaaaatctcttgggagaaaaagtgcattcataatttaaatgactatgctgctaatttatctgttacaaaagctcagaaccttgtgtctcttttgtctttcaaagtgatatacactgaggctccaaaattctgctctagaaaaattatggtggaaatctcttgggagccctgggtttgtgtgccaattttgtagccctgggcaagtcaccttattcctttgggcctcagtttccccacatctgtagaccgggttgtggaacggcaccaaggtcttgcctggcttcaacactctccatctagactcagggctaacgctcactgttg

SEQ ID NO: 37299 - DNA, 198 bp, Homo sapiens
ggataagactcagggagatgctgcaggaagcacgggcaggagagaaaaagcagaagctttggacagatcatcgggctaaagccacagctaagaaagtgaccatctctggagagacctttaatgtcttctgatggcctaccaatgacctccacgctcaaagagaaaattctgcaattaagaaattagctgggtgagttc

SEQ ID NO: 37300 - DNA, 2481 bp, Homo sapiens
acagctatcaggatgactacggattcactggccgtagatttaaaccaagaaaatggtatcacctttgttatataaatcctttctgctttgtaagttttctctttttgggattttccgcagatcagggcaacacagaatgactaccttcccagccatgtctctgcagtcatcctgtgtaatcatgttctagtccagtgttgctcaaacagttaaaatccaggctgcttttggtaaacatacaaattctgatatagagcctctgtggcaaagggaatttctcagttcctgccccagcccccttgtttatcattacacagctaagatttttatttaacttagcattttagcaagttttcttatgaaaatacctttgtgctttctaagtataaagatttaaattatttttaatacggtttttagaaccacagactatccctctttttagagcatcctgatcaattgcaagtacttccacttcttccctaaatgcgctttgtgtgttttccacctcagtagccttgcacacatcattacttctgcatccttctttgtgaccaagtgaatacctacctacctcttaggactcagcttcagtgattctgttttcataggctttttaaagcccttttcagtcaaattagatgctcctttgttctggtcctttactcttcccctcccatgttgtcgcactgatcacactgctttgtaattattttctttattgttggtaaactccatattttaaaaatttacctgtatacatagtgcttaatgcatggtaggcccttagtaatgtttttgaattaatgaggcatgattctaaatgccaaactttgcacaaaaagttgttgctattggattccaaactgctatgccctctataccagtggctgacaaggcatatagggatatatgccatcctgagaggagtaaagtgtttagattctgaacctgagaaaagagaactttctcttaagaagttggaaacttcattttaccttcgtgaccctggtagaccacttggtctcactggttggtacaattatgagggtagtactgggtgctttttatacaactttccatcccccacacagttggagaataatttgtagaccatggcagttaaaatgctttttactctggtgtattatagaataatgaacacatttttatatatgttaaagcctgctaaatcattcacttagaatgaagtaacctcaaggtaccaaataccccacataaggaaagtactacactaaattcactcaactattgtatgcctaccatatgccagattttatcctagaccctgaggatatagctttttaaaaccccctcctgtttcagagcttatattctagtggaggaagttagacaagcattttaagtaataaatgtatagagagtgtcaagtgatgagtaccatgaagaagaataaatgagggtaaggggctagtgtgatagggagaggggtgggatgccatcatatttaggggtggttgggaactgtctactgctttagcatttgtgtcttcaaatttctctcctttggttatataccttgcgtattccgcacattgataaagtttctttcttacagaagttctgatattgaattaaggaatgggtcactacttaagactttatcatttcagctacacataaaaggtttctctcccctatggattttgctaatggttgagtgatacctaaaggccttgttgcattttttacacttggggtttctcttcggtttgaattctctcatggttaccaaaactctgttaaaggacttttcacagtcgttaaatgtgtatggctctttcccaatatgaatttttttgatgttaactaggcttttagacttagttaaagacctgtgtgctctgctgcatttatagggttttgggctgctgagaataattgatgctgattaaggtgcaaatcatgactaaagacttttctttcttcttttgcatatagtagagtgaggtgagggtcgtggctaaaaccccacaataactttacattcctagctttacagtcttgctgtgaattctctggtgttcattaaagtgtgagctgtgttaaaaggcattcttagattcattttaaccacatttttaaaaactcacagttggttaacatgatggtttcagattgcttgcctcttttctctttctaccttacagggctccttttctagcttaaataagggtactccatctgccacagaatccaggattctatagttttttagtttcacttccctatgttctttttttttttttaatttttaacaatgagatgataccatgttacagcggtattacattaagatacatttaatatagccacaattaaagtatgtattatgtatttatgctggtgttctttcatgttatttcttctagtgaaaatttccaagtaaactgttattgagcatatacatttttaaaaaaataaaaccatacaccccta

SEQ ID NO: 37301 - DNA, 2447 bp, Homo sapiens
  misc_feature (1677)..(1677): n is a, c, g, or t
ggcgtcacttccgcctccagcctccgggccgaagcttggcctatggtgcggggaggtagtagtttcttccgcgagggtgcgggagggccccggggcgcccttgggaaccgggctggaggcagagacaggcccggaggaccaggcggacgtaaggatcaggcctctggacgcaactgcggagccggaacagaccaggagggcgcggttgggcgggtacagccaggaagtgctcgtcgcgagcgcggccgcggttcggccacagcgagaagcccgcgggtgccgggagtgctcggtcttctctcgatctctgcagggagtcactggccccgttcctttttatctgtctgaacatcacgccgaacttttaacagttgattccactgcattttcaatgtggtatttttttttttctgtaaatgttcatctatttttcgcttcaaatatgcgtttctgttacttttctaatgtaccgtaggagccaagaccacctatactacgttgcaaaatagcactgataccaggggttctcccaaggttcattcagaaatgtcacatgattccagtaacaatacgaaaaggtttttttttgggaaccaggcatatggatcctggagttcacatggaggaacaaatgtctcataacgcagacgacgcggacaaacaaaagcgcaatgcccgacagatgcgaaaacagcctctgtcattaaaactgtgtgctactgacacatgaacaggaaacaaatggaatatccagacatcaacccagtaacatggaaatttggttcataaacataatttcagagcggtggaacaaacatgcagtttataatgaaaggtgctaagacaaatggttagccgtctgagaaatgatgaaattaattctggatctcacagggataaactccaaacggatcaggagtctaaatgtgaaaaacaaaacaaaaccacatgtgaagtgttcacgtgatttcgtggctgattaagaaacaagatgtgcccaggaggtggcggtggcgcacaagctttgacaggttggagggtgagggagtctcacgcaccatgagattacccacaggcttcgaattgggggtcactactcagaaaagagaaaaaaatgagcgtgggcggggggcgcgcagagaactcccagagaagaaggagatcagacagggggagggctgacgtgactagatcacgtttctcagcagcctgacaggtgtctgagtcacaaagctctgaagggcagcaacggcttgcagtctttagagccccaggatttatcttatctatggctagcagagattggacacaatttcacgaagtatacaaagcaaccacatgctaaatggttcaacactatgagtgtttgggatgtgttttatttattatttattaattttgatacggagtctccctctgtcgtccaggctggagtgcagtggcacgatcttggctcactgcaacctccgcctcccaggttccagctattctcctgcctcagcctcccaagtagctgggattacaggtgcccaccttgtaatttttagtagagacggagtttcaccatgttggccaggctggtctcaaacttctcacttcaggtgatccacccgcctcggcctcccaaagtggtgggattacagacgtgagccactgcagccaccgtgcctgcccttnggatatgtttttttttcttttaattttgttttgttttgtttttttgagacgaagtcttgctctgtcgaccaggctggagtgcaggggcacaatcttggctcaccgcaacctccgcctcccaggttcaagcgattctcctgcctcagcctccagagtagctgggattacaggcacgtgccaccaagcccagctaatttttgtatttttagtagagatggggtttcaccatgttagccaggatggtatctatctcttgacctcgtgatcctcctgcctcagcctcccagactgctgagattacaggcgtgagccaccgcacggatatgttttaagtaactgaatgtattaaaatttgactttggcaccagcaggctattgtgaataatgttgctttgagcatcgtgtgcaaaaatatcctggacccttgttctcagcacttttggatatatatgcaaaagtggaatggctgggtcacatgataattctgtctgatgttttgagaaaccactgtcctgttttccagagctgctgcaccattttgtattcccatgagcaggtgcacaaggttccaactttaccacatccagccaacagttacctcctatttaatggctaagagccatcaccaccggggtaatgtgatctcactgtggcttttgttttcatttccctaatgtttagttatgttgatcatcttttcatgttcttattggccatctgttatcttctttattataagtccttttctgaattaaattggttttgttgtt

SEQ ID NO: 37302 - DNA, 2498 bp, Homo sapiens
  misc_feature (1677)..(1677): n is a, c, g, or t
ggcgtcacttccgcctccagcctccgggccgaagcttggcctatggtgcggggaggtagtagtttcttccgcgagggtgcgggagggccccggggcgcccttgggaaccgggctggaggcagagacaggcccggaggaccaggcggacgtaaggatcaggcctctggacgcaactgcggagccggaacagaccaggagggcgcggttgggcgggtacagccaggaagtgctcgtcgcgagcgcggccgcggttcggccacagcgagaagcccgcgggtgccgggagtgctcggtcttctctcgatctctgcagggagtcactggccccgttcctttttatctgtctgaacatcacgccgaacttttaacagttgattccactgcattttcaatgtggtatttttttttttctgtaaatgttcatctatttttcgcttcaaatatgcgtttctgttacttttctaatgtaccgtaggagccaagaccacctatactacgttgcaaaatagcactgataccaggggttctcccaaggttcattcagaaatgtcacatgattccagtaacaatacgaaaaggtttttttttgggaaccaggcatatggatcctggagttcacatggaggaacaaatgtctcataacgcagacgacgcggacaaacaaaagcgcaatgcccgacagatgcgaaaacagcctctgtcattaaaactgtgtgctactgacacatgaacaggaaacaaatggaatatccagacatcaacccagtaacatggaaatttggttcataaacataatttcagagcggtggaacaaacatgcagtttataatgaaaggtgctaagacaaatggttagccgtctgagaaatgatgaaattaattctggatctcacagggataaactccaaacggatcaggagtctaaatgtgaaaaacaaaacaaaaccacatgtgaagtgttcacgtgatttcgtggctgattaagaaacaagatgtgcccaggaggtggcggtggcgcacaagctttgacaggttggagggtgagggagtctcacgcaccatgagattacccacaggcttcgaattgggggtcactactcagaaaagagaaaaaaatgagcgtgggcggggggcgcgcagagaactcccagagaagaaggagatcagacagggggagggctgacgtgactagatcacgtttctcagcagcctgacaggtgtctgagtcacaaagctctgaagggcagcaacggcttgcagtctttagagccccaggatttatcttatctatggctagcagagattggacacaatttcacgaagtatacaaagcaaccacatgctaaatggttcaacactatgagtgtttgggatgtgttttatttattatttattaattttgatacggagtctccctctgtcgtccaggctggagtgcagtggcacgatcttggctcactgcaacctccgcctcccaggttccagctattctcctgcctcagcctcccaagtagctgggattacaggtgcccaccttgtaatttttagtagagacggagtttcaccatgttggccaggctggtctcaaacttctcacttcaggtgatccacccgcctcggcctcccaaagtggtgggattacagacgtgagccactgcagccaccgtgcctgcccttnggatatgtttttttttcttttaattttgttttgttttgtttttttgagacgaagtcttgctctgtcgaccaggctggagtgcaggggcacaatcttggctcaccgcaacctccgcctcccaggttcaagcgattctcctgcctcagcctccagagtagctgggattacaggcacgtgccaccaagcccagctaatttttgtatttttagtagagatggggtttcaccatgttagccaggatggtatctatctcttgacctcgtgatcctcctgcctcagcctcccagactgctgagattacaggcgtgagccaccgcacggatatgttttaagtaactgaatgtattaaaatttgactttggcaccagcaggctattgtgaataatgttgctttgagcatcgtgtgcaaaaatatcctggacccttgttctcagcacttttggatatatatgcaaaagtggaatggctgggtcacatgataattctgtctgatgttttgagaaaccactgtcctgttttccagagctgctgcaccattttgtattcccatgagcaggtgcacaaggttccaactttaccacatccagccaacagttacctcctatttaatggctaagagccatcaccaccggggtaatgtgatctcactgtggcttttgttttcatttccctaatgtttagttatgttgatcatcttttcatgttcttattggccatctgttatcttctttattataagtccttttctgaattaaattggttttgttgttattcttgagttataggagttcttaataaactgaatattaatccttaagcaa

SEQ ID NO: 37303 - DNA, 2439 bp, Homo sapiens
  misc_feature (1677)..(1677): n is a, c, g, or t
ggcgtcacttccgcctccagcctccgggccgaagcttggcctatggtgcggggaggtagtagtttcttccgcgagggtgcgggagggccccggggcgcccttgggaaccgggctggaggcagagacaggcccggaggaccaggcggacgtaaggatcaggcctctggacgcaactgcggagccggaacagaccaggagggcgcggttgggcgggtacagccaggaagtgctcgtcgcgagcgcggccgcggttcggccacagcgagaagcccgcgggtgccgggagtgctcggtcttctctcgatctctgcagggagtcactggccccgttcctttttatctgtctgaacatcacgccgaacttttaacagttgattccactgcattttcaatgtggtatttttttttttctgtaaatgttcatctatttttcgcttcaaatatgcgtttctgttacttttctaatgtaccgtaggagccaagaccacctatactacgttgcaaaatagcactgataccaggggttctcccaaggttcattcagaaatgtcacatgattccagtaacaatacgaaaaggtttttttttgggaaccaggcatatggatcctggagttcacatggaggaacaaatgtctcataacgcagacgacgcggacaaacaaaagcgcaatgcccgacagatgcgaaaacagcctctgtcattaaaactgtgtgctactgacacatgaacaggaaacaaatggaatatccagacatcaacccagtaacatggaaatttggttcataaacataatttcagagcggtggaacaaacatgcagtttataatgaaaggtgctaagacaaatggttagccgtctgagaaatgatgaaattaattctggatctcacagggataaactccaaacggatcaggagtctaaatgtgaaaaacaaaacaaaaccacatgtgaagtgttcacgtgatttcgtggctgattaagaaacaagatgtgcccaggaggtggcggtggcgcacaagctttgacaggttggagggtgagggagtctcacgcaccatgagattacccacaggcttcgaattgggggtcactactcagaaaagagaaaaaaatgagcgtgggcggggggcgcgcagagaactcccagagaagaaggagatcagacagggggagggctgacgtgactagatcacgtttctcagcagcctgacaggtgtctgagtcacaaagctctgaagggcagcaacggcttgcagtctttagagccccaggatttatcttatctatggctagcagagattggacacaatttcacgaagtatacaaagcaaccacatgctaaatggttcaacactatgagtgtttgggatgtgttttatttattatttattaattttgatacggagtctccctctgtcgtccaggctggagtgcagtggcacgatcttggctcactgcaacctccgcctcccaggttccagctattctcctgcctcagcctcccaagtagctgggattacaggtgcccaccttgtaatttttagtagagacggagtttcaccatgttggccaggctggtctcaaacttctcacttcaggtgatccacccgcctcggcctcccaaagtggtgggattacagacgtgagccactgcagccaccgtgcctgcccttnggatatgtttttttttcttttaattttgttttgttttgtttttttgagacgaagtcttgctctgtcgaccaggctggagtgcaggggcacaatcttggctcaccgcaacctccgcctcccaggttcaagcgattctcctgcctcagcctccagagtagctgggattacaggcacgtgccaccaagcccagctaatttttgtatttttagtagagatggggtttcaccatgttagccaggatggtatctatctcttgacctcgtgatcctcctgcctcagcctcccagactgctgagattacaggcgtgagccaccgcacggatatgttttaagtaactgaatgtattaaaatttgactttggcaccagcaggctattgtgaataatgttgctttgagcatcgtgtgcaaaaatatcctggacccttgttctcagcacttttggatatatatgcaaaagtggaatggctgggtcacatgataattctgtctgatgttttgagaaaccactgtcctgttttccagagctgctgcaccattttgtattcccatgagcaggtgcacaaggttccaactttaccacatccagccattaaataggaggtaactgttggctggatgtggttatgttgatcatcttttcatgttcttattggccatctgttatcttctttattataagtccttttctgaattaaattggttttgttgttattcttgagttataggagttcttaataaactgaatattaatccttaagcaa

SEQ ID NO: 37304 - DNA, 501 bp, Homo sapiens
tacaggtacccgccatcatgcccagctaagtttttgtatttttagtagagacgagtttcaccatgttggccaggttggtctctagctcctaacctcatgattcacctgccttggcctcccaaagtgctgggattacaggcatgagccactgctcccggccccaccaacctttctttctaactaccgctcacctatacaaagccctgttctagttaaactctacttgggcttttcattttcctttctaaacacctttgcacacgtcatttcccatgatgtcccttttctccatcaaccaaaaacttacccatcttttagggctaaagagtttacctcttcctttttcactcctggacttctcttaccaggggagcttgcttttcctctgtagctgctgtaggacgtgtccaaatcactcacttaggcactcatcattactatgttttgatcgtgatattttccctgcatctctgtcttatctctcttaatatcttataagca

SEQ ID NO: 37305 - DNA, 472 bp, Homo sapiens
attttaatcatggtaatatgaatggattgattaaagaattagatataaaataacatgctaaattcatattccaaaaacctacattatttcacattttagcctgtcttcagttggaatgtatcttacaatattgatgtggtagtgatattttttcactttattagagatatataaaataattcatcttgaaatgggtgatgtcttagatttgaagatacattgtaacttacccgctctgccatcgttatagtcgtctagtcactggagaactcttctttttgtcactcaatttgaaacctcaagggttgtaccttacaataaatttccttagcttcatcagtgggagtgaagtgagtttagtgcagaatgatataaatgatagtacttcttacatcaaaatccttatactttgaacagacactttatcaagtgcctgagcaaacacagcagcttttgaagtatttgaagagcc

SEQ ID NO: 37306 - DNA, 88 bp, Homo sapiens
gactttgctaaaaccagctgcctgggccctgcgccggaggcgtctggggaagccccagaacctgtgtttcatttgttttccccgattt

SEQ ID NO: 37307 - DNA, 215 bp, Homo sapiens
tattattatttttactttcactcctaaatttttttctaagtcctctaaatacttttgtgtaaaatccaaagctttaaaatggagcccagggcatttctggctagccatagacataactggaaaatggcctcatggttcttgatttctgcacttctattcctgcctcccagtgtgatgcttcccatctcttacagggctaccttctggattcattg

SEQ ID NO: 37308 - DNA, 1200 bp, Homo sapiens
tacgtgcgcccgttctattttctggtgggggagtattatttatagccatggaggccttgtcttttgtttggggcatgatggcgcaactgcactccagcctgggcaatgaagcaagaccccatttcaaaaactaaacaaataaataaataaaagcccagctaaaagcaacttattgaccatgtccccaggtcgtggaattaagggaagaagcagaaaagttctagaagaggactggagaagtagaaggactacagaccccatgatgcacatggaaatgggcgtaaatctgcacgacttgttccggggcatgcgcatgtgtaagcgcacaataatctcttaagaattaaagaaaccttgtaacaaagaaaagtagtgaagaaaagccttaaggaaaagagaaggaatgtgtgtagtccctctgcttaaggaaaagatagagggtgggaagatcttccttcaacaatttagatcaacatttgttaggtatatgtggtttgccaggaaactgcatgtgtgttgtggaccatatgtgttgaagatgcagtgatcaaaaagacttagtcccagctattaaggagatcacagtttggcagcaaattattatagaatgtgatggctgttctaacagacatataaaggaagtgctatggatggaagcacagaggaagaagaggttaatagtgtctaagaacctagaagggatgaagatgaaaattgagatttgaaaggtgagaaagtcattaagacaaggatgacttaaaggtattccaaactcctaagaaatacagggagttttggtggatgcagaatgattgaggaaggctgtgaaagtcttctcttaacaaaaatctctttctgtaatggttgcttgtttatgggatgagaaactagggggtcatttgcttgcttaaagcctctggcttctcctgatgcaacttccaggccagtctaccttctcttctcaaatcccccagcttttgcttcaagtttacttccagcctggcaaggagtgagtcttctgagcacaaccacccagtgtccaagcagggcgggaacacctccttcctcatctctcccacacatactccttccatacccaccaagaagaaaggcagccaggaagagtggacaggtccagaaccacagagggtgatgaacagatgcagaagtatcaatcctgaggctaaagagtaattgggc

SEQ ID NO: 37309 - DNA, 902 bp, Homo sapiens
gcttcagtttgcagaggaggaaactgagcccagagagggagcatgactgaggtgtcacaggggcagagtgagagtgtggcccaggctctccaggagctcaggctctcagcacagtatttgcacctgtctaggctgctgccttggagagtgtggtggggagcaggccctactctgtatccagggtactaccgctgccttctgttttccttcagatgttgccatgcaggccctgtgaaactgtctctttctgctcagtaatttatggatagaattttaccagaatacacatagtacaagatgtggttgtcactgatttttggaatatcttgaggggaaaggcaatgaacattaagaggctcctgtttctgtgtgaacatagaaagactgagaaactgaagcttgttttgttcctcagtaacctcaaacaccacctcttggtcacacattttctcccgctaggatgtgctcctatatcactactaatattaattattagtgttattaatacttggctgctgagtacttactgtacgtcagtgcatgtgaagtgttcagcacaatgcatgtatcatttaatccacccagaaactctacaaagatggtactgtaattttctccattttgtaaatgaggaaacaggttaaggtcacagagtaggggggagaactgagattcaaatccctccaatttatgaagcctaaattggcttgttccagctctgttgtactgatttctgtggaggtgattaccgtaaaccccacctgcctgctcctcttctccagccaaatttgaagcatttgatgtccctgtgttagtctgctagggctggcgttacaaaataacacaggctgggtagcattaatgatagaagtttattttcttggctgggcgcggtggctcat

SEQ ID NO: 37310 - DNA, 395 bp, Homo sapiens
gatttttccaacacatctcacacccaagtaggtgataccaggagtgaggaagtagtgacagctacctggtgtctcctctttttatccctgaacctgaaacttgaaagaatttcattataattcagtagtttagccttaatatttctacttctcaaaataataaaatttcaaagctatcttttgatctaaatgtgaggaatgttaacagtgcacgtatgtattagaagatatggactcttacttttttttttttttttgcaaactttataaattgttttctttcattgctgaaggtcagaatctcagtgattaatggtgactaaagaagtttgtgacagaaatttaacccagatactcacacatccagtcctatcttcctcttacctgtaggggca

SEQ ID NO: 37311 - DNA, 434 bp, Homo sapiens
atgatcttcagcttaaggtaacaatagttaaaatggagccaaataaactcccatcaaatttgtgcctgtatgctaaagaaatgtgttcatactgaactctgctgtacagcagaagagggtgaccaaatagcaagatgtaattccttcccttgtaatccatttctgaagttcccctcttgccttcctagaaatttgattttcaaattttgtctgtagagtttttgcttggaattttaaaagggtaagagaacatcacctaattttatagatgattagattgaggtataaagataataagctttgttcaaggtatatagttgcaaggctaggcctagatctgaaactgattttttagttcccatttcagtgctttcttcctgataaccatttgccagtgactttttttttattattaataaagtatttgttattgc

SEQ ID NO: 37312 - DNA, 375 bp, Homo sapiens
ggttgctgggatttacgaagaggataacctaaggttatgatgataaaaacactcacagatggctccacgactggtactgaattaatgagtggaaatgtgcaaggactgataggagacatgtaggagacctaaaggaaaactgtggcaacttccctttcccctgggactctgcttcttttgattgtgcttcatgtagatcgtcttgatcattctgtgtgtaaaaaatgtcttgcggctgggtgcggtggctcacaccagcacttttggaggcccaggcaggtggatcacttgagatcaggagttgaagaccaagcctggccaacatggtgaaacctcatctctactgaatatacaaaaattagccaggtgtggtgg

SEQ ID NO: 37313 - DNA, 359 bp, Homo sapiens
cctattaaaaataattatgtagataagtataaaagattgtatcattccttgtttgtaaactgagttaagaacatatcgcggccaggcgtggtggttcatgcctgtaatctcagcactttgggaggccgaggcaggcagatcacgaggtcaggagatcaagaccatcctggccaacatggtgaaaccctgtctctacttaaaatacaaaaattagctgggcgtggtgacgcttgcctgtagtcccagctattcgggaggctgaggcaggagaattgcttgaacctgggaagtggaggttgcagtaagccgagattgcaccactgcactccagcctggtgacagagtgagactccgtcaaa

SEQ ID NO: 37314 - DNA, 507 bp, Homo sapiens
actggaactacgcagagccagaccagcgggaccacagaatgggctgaggcggcggcggctgtttggataaagtcaacagcgggacgtggggcgtgacgccggtccggcatcctaagacgtgtggtttgagttgcgggcgagaccaggctttttttaggaccttgggcctgataagtgggcgactgcagtagtgcgggaacctattatttgacaggaacatgacaggaagtgtagggaccccatgcttgatggatggtgacttatagtgtggtagtctcagtgttgatgggcatgaccgagacagcaggagtacccctaagttctggtgagaggtggagcctcagaaggacaccttactcaagctgtctttagttcccaaagacaaaaaggctcagtggaaaagattccttttttttttttaatgtctctatatttgagactgtgggtttattgtggatatgcattatctagttttaataaataaaagtataaacgtttaacattttc

SEQ ID NO: 37315 - DNA, 422 bp, Homo sapiens
  misc_feature (14)..(14): n is a, c, g, or t
  misc_feature (25)..(25): n is a, c, g, or t
  misc_feature (405)..(405): n is a, c, g, or t
ggcacgaggcgtgngcctgccgctnggaatgtgagtttcagccagacacctgtggatatctgggctttgggctgtatgatcattgagatggccactggaaatccctatcttcctagtagttctgatttggatttactccataaaattgttttgaaagtgggattcatgccagaactgaaagctaaattactgcaggaagcaaaagtcaattcattaataaagccaaaagagagttctaaagaaaatgaactcaggaaagatgaaagaaaaacagtttataccaatacactgctaagtagttcagttttgggaaagaaataggaaaaaggaggaaaaagccccaagggagatccaaagtccagagttatttaaagtccaaaggggggaggagggagatttcttccnggaccccaaaaaggaag

SEQ ID NO: 37316 - DNA, 1622 bp, Homo sapiens
actggaactacgcagagccagaccagcgggaccacagaatgggctgaggcggcggcggctgtttggataaagtcaacagcgggacgtggggcgtgacgccgtagtaaaagcccagcttgaaaatggagatgtatgaaacccttggaaaagtgggagagggaagttacggaacagtcatgaaatgtaaacataagaatactgggcagatagtggccattaagatattttatgagagaccagaacaatctgtcaacaaaattgcgatgagagaaataaagtttctaaagcaatttcatcacgaaaacctggtcaatctgattgaagtttttagacagaaaaagaaaattcatttggtatttgaatttattgaccacacagtattagatgagttacaacattattgtcatggactagagagtaagcgacttagaaaatacctcttccagatccttcgagcaattgactatcttcacagtaataatatcattcatcgagatataaaacctgagaatattttagtatcccagtcaggaattactaagctctgtgattttggttttgcacgaacactagcagctcctggggacatttatacggactatgtggccacacgctggtatagagctcccgaattagtattaaaagatacttcttatggaaaacctgtggatatctgggctttgggctgtatgatcattgagatggccactggaaatccctatcttcctagtagttctgatttggatttactccataaaattgttttgaaagtgggcaatttgtcacctcacttgcagaatatcttttccaagagccccatttttgctggggtagttcttcctcaagttcaacaccccaaaaatgcaagaaaaaaatatccaaagcttaatggattgttggcagatatagttcatgcttgtttacaaattgatcctgctgacaggatatcatctagtgatcttttgcatcatgagtattttactagagatggatttattgaaaaattcatgccagaactgaaagctaaattactgcaggaagcaaaagtcaattcattaataaagccaaaagagagttctaaagaaaatgaactcaggaaagatgaaagaaaaacagtttataccaatacactgctaagtagttcagttttgggaaaggaaatagaaaaagagaaaaagcccaaggagatcaaagtcagagttattaaagtcaaaggaggaagaggagatatctcagaaccaaaaaagaaagagtatgaaggtggacttggtcaacaggatgcaaatgaaaatgttcatcctatgtctccagatacaaaacttgtaaccattgaaccaccaaaccctatcaatcccagcactaactgtaatggcttgaaagaaaatccacattgcggaggttctgtgacaatgccacccatcaatctaactaacagtaatttgatggctgcaaatctcagttcaaatctctttcaccccagtgtgaggtgagctgtaacagagaagaaacctaaataatacaacattcctgtataatggtatttcaaagaatcgtgttcatagtgtctgtatgtaaactgaacttgaagaaaatatattgaaattaaagctgtataatgggcc

SEQ ID NO: 37317 - DNA, 2442 bp, Homo sapiens
actggaactacgcagagccagaccagcgggaccacagaatgggctgaggcggcggcggctgtttggataaagtcaacagcgggacgtggggcgtgacgccgtagtaaaagcccagcttgaaaatggagatgtatgaaacccttggaaaagtgggagagggaagttacggaacagtcatgaaatgtaaacataagaatactgggcagatagtggccattaagatattttatgagagaccagaacaatctgtcaacaaaattgcgatgagagaaataaagtttctaaagcaatttcatcacgaaaacctggtcaatctgattgaagtttttagacagaaaaagaaaattcatttggtatttgaatttattgaccacacagtattagatgagttacaacattattgtcatggactagagagtaagcgacttagaaaatacctcttccagatccttcgagcaattgactatcttcacagtaataatatcattcatcgagatataaaacctgagaatattttagtatcccagtcaggaattactaagctctgtgattttggttttgcacgaacactagcagctcctggggacatttatacggactatgtggccacacgctggtatagagctcccgaattagtattaaaagatacttcttatggaaaacctgtggatatctgggctttgggctgtatgatcattgagatggccactggaaatccctatcttcctagtagttctgatttggatttactccataaaattgttttgaaagtgggcaatttgtcacctcacttgcagaatatcttttccaagagccccatttttgctggggtagttcttcctcaagttcaacaccccaaaaatgcaagaaaaaaatatccaaagcttaatggattgttggcagatatagttcatgcttgtttacaaattgatcctgctgacaggatatcatctagtgatcttttgcatcatgagtattttactagagatggatttattgaaaaattcatgccagaactgaaagctaaattactgcaggaagcaaaagtcaattcattaataaagccaaaagagagttctaaagaaaatgaactcaggaaagatgaaagaaaaacagtttataccaatacactgctaagtagttcagttttgggaaaggaaatagaaaaagagaaaaagcccaaggagatcaaagtcagagttattaaagtcaaaggaggaagaggagatatctcagaaccaaaaaagaaagagtatgaaggtggacttggtcaacaggatgcaaatgaaaatgttcatcctatgtctccagatacaaaacttgtaaccattgaaccaccaaaccctatcaatcccagcactaactgtaatggcttgaaagaaaatccacattgcggaggttctgtgacaatgccacccatcaatctaactaacagtaatttgatggctgcaaatctcagttcaaatctctttcaccccagtgtgaggttaactgaaagagcaaaaaagagacgcacttcttcacaatctattggacaagttatgcctaatagcaggcaagaggatccaggtcctattcaagagccaaatggagaagggtatatttaatgagcgaacaggtcacagtgaccaaatggcaaatgagaacaaaaggaagctgaatttttccagatctgacaggaaagaattccattttccagaattgcctgtcacaatacagtcaaaagatacaaaaggaatggaagttaaacagataaaaatgctgaagagggagtcaaagaaaacagagtcatctaagataccaactttacttaacgtggatcaaaatcaagaaaaacaagagggtggagatggccattgcgaggggaagaatttgaagagaaacaggttttttttctggtagtgtcttttcttttacatagtccaaaaaatacaagatgacaactcttcccgttttatttatctacaatagaagtgtgatgtgagttgttgttaagacagccatccatgtgcatgagcatcatccagctttttttgttagcaaaacatttactgttttcttttcccttttaagactctgttgatgtgataatttgatttggaattataaagtcatctcttctctgcctacttcttttttttgccatgattactgagtggataacacaagccgtgacatgatacaaactgtacttatacttaatgatctctgccttcttgtagccacataacttcgagtcagttatctcctataacacacaggcctctttaaatgagttcttaataaaatatttgagccgttgttttaaaagctattcatggctgggtgcaatggctcatgcctgtaatcccaacactttgggaggctgaggcaggcggatcacttgaggtcaggagttcgaaaccagcctgaccaacacggtgaaacaccatctctactaaa

SEQ ID NO: 37318 - DNA, 2060 bp, Homo sapiens
actggaactacgcagagccagaccagcgggaccacagaatgggctgaggcggcggcggctgtttggataaagtcaacagcgggacgtggggcgtgacgccgtagtaaaagcccagcttgaaaatggagatgtatgaaacccttggaaaagtgggagagggaagttacggaacagtcatgaaatgtaaacataagaatactgggcagatagtggccattaagatattttatgagagaccagaacaatctgtcaacaaaattgcgatgagagaaataaagtttctaaagcaatttcatcacgaaaacctggtcaatctgattgaagtttttagacagaaaaagaaaattcatttggtatttgaatttattgaccacacagtattagatgagttacaacattattgtcatggactagagagtaagcgacttagaaaatacctcttccagatccttcgagcaattgactatcttcacagtaataatatcattcatcgagatataaaacctgagaatattttagtatcccagtcaggaattactaagctctgtgattttggttttgcacgaacactagcagctcctggggacatttatacggactatgtggccacacgctggtatagagctcccgaattagtattaaaagatacttcttatggaaaacctgtggatatctgggctttgggctgtatgatcattgagatggccactggaaatccctatcttcctagtagttctgatttggatttactccataaaattgttttgaaagtggggaaatagaaaaagagaaaaagcccaaggagatcaaagtcagagttattaaagtcaaaggaggaagaggagatatctcagaaccaaaaaagaaagagtatgaaggtggacttggtcaacaggatgcaaatgaaaatgttcatcctatgtctccagatacaaaacttgtaaccattgaaccaccaaaccctatcaatcccagcactaactgtaatggcttgaaagaaaatccacattgcggaggttctgtgacaatgccacccatcaatctaactaacagtaatttgatggctgcaaatctcagttcaaatctctttcaccccagtgtgaggttaactgaaagagcaaaaaagagacgcacttcttcacaatctattggacaagttatgcctaatagcaggcaagaggatccaggtcctattcaagagccaaatggagaagggtatatttaatgagcgaacaggtcacagtgaccaaatggcaaatgagaacaaaaggaagctgaatttttccagatctgacaggaaagaattccattttccagaattgcctgtcacaatacagtcaaaagatacaaaaggaatggaagttaaacagataaaaatgctgaagagggagtcaaagaaaacagagtcatctaagataccaactttacttaacgtggatcaaaatcaagaaaaacaagagggtggagatggccattgcgaggggaagaatttgaagagaaacaggttttttttctggtagtgtcttttcttttacatagtccaaaaaatacaagatgacaactcttcccgttttatttatctacaatagaagtgtgatgtgagttgttgttaagacagccatccatgtgcatgagcatcatccagctttttttgttagcaaaacatttactgttttcttttcccttttaagactctgttgatgtgataatttgatttggaattataaagtcatctcttctctgcctacttcttttttttgccatgattactgagtggataacacaagccgtgacatgatacaaactgtacttatacttaatgatctctgccttcttgtagccacataacttcgagtcagttatctcctataacacacaggcctctttaaatgagttcttaataaaatatttgagccgttgttttaaaagctattcatggctgggtgcaatggctcatgcctgtaatcccaacactttgggaggctgaggcaggcggatcacttgaggtcaggagttcgaaaccagcctgaccaacacggtgaaacaccatctctactaaa

SEQ ID NO: 37319 - DNA, 1745 bp, Homo sapiens
actggaactacgcagagccagaccagcgggaccacagaatgggctgaggcggcggcggctgtttggataaagtcaacagcgggacgtggggcgtgacgccgtagtaaaagcccagcttgaaaatggagatgtatgaaacccttggaaaagtgggagagggaagttacggaacagtcatgaaatgtaaacataagaatactgggcagatagtggccattaagatattttatgagagaccagaacaatctgtcaacaaaattgcgatgagagaaataaagtttctaaagcaatttcatcacgaaaacctggtcaatctgattgaagtttttagacagaaaaagaaaattcatttggtatttgaatttattgaccacacagtattagatgagttacaacattattgtcatggactagagagtaagcgacttagaaaatacctcttccagatccttcgagcaattgactatcttcacagtaataatatcattcatcgagatataaaacctgagaatattttagtatcccagtcaggaattactaagctctgtgattttggttttgcacgaacactagcagctcctggggacatttatacggactatgtggccacacgctggtatagagctcccgaattagtattaaaagatacttcttatggaaaacctgtggatatctgggctttgggctgtatgatcattgagatggccactggaaatccctatcttcctagtagttctgatttggatttactccataaaattgttttgaaagtgggcaatttgtcacctcacttgcagaatatcttttccaagagccccatttttgctggggtagttcttcctcaagttcaacaccccaaaaatgcaagaaaaaaatatccaaagcttaatggattgttggcagatatagttcatgcttgtttacaaattgatcctgctgacaggatatcatctagtgatcttttgcatcatgagtattttactagagatggatttattgaaaaattcatgccagaactgaaagctaaattactgcaggaagcaaaagtcaattcattaataaagccaaaagagagttctaaagaaaatgaactcaggaaagatgaaagaaaaacagtttataccaatacactgctaagtagttcagttttgggaaaggaaatagaaaaagagaaaaagcccaaggagatcaaagtcagagttattaaagtcaaaggaggaagaggagatatctcagaaccaaaaaagaaagagtatgaaggtggacttggtcaacaggatgcaaatgaaaatgttcatcctatgtctccagatacaaaacttgtaaccattgaaccaccaaaccctatcaatcccagcactaactgtaatggcttgaaagaaaatccacattgcggaggttctgtgacaatgccacccatcaatctaactaacagtaatttgatggctgcaaatctcagttcaaatctctttcaccccagtgtgaggtgagctgtaacagagaagaaacctaaataatacaacattcctgtataatggtatttcaaagaatcgtgttcatagtgtctgtatgtaaactgaacttgaagaaaatatattgaaattaaagctgtataatgggccatttactgagtgtttcttatggatgctgtagaagaaattaacttttcttggccatatagatgtttaaattttcactaatgtcttcttgaaaaaccttattaaaaaaaaagaccctttgaaaaa

SEQ ID NO: 37320 - DNA, 2263 bp, Homo sapiens
actggaactacgcagagccagaccagcgggaccacagaatgggctgaggcggcggcggctgtttggataaagtcaacagcgggacgtggggcgtgacgccgtagtaaaagcccagcttgaaaatggagatgtatgaaacccttggaaaagtgggagagggaagttacggaacagtcatgaaatgtaaacataagaatactgggcagatagtggccattaagatattttatgagagaccagaacaatctgtcaacaaaattgcgatgagagaaataaagtttctaaagcaatttcatcacgaaaacctggtcaatctgattgaagtttttagacagaaaaagaaaattcatttggtatttgaatttattgaccacacagtattagatgagttacaacattattgtcatggactagagagtaagcgacttagaaaatacctcttccagatccttcgagcaattgactatcttcacagtaataatacctgtggatatctgggctttgggctgtatgatcattgagatggccactggaaatccctatcttcctagtagttctgatttggatttactccataaaattgttttgaaagtgggcaatttgtcacctcacttgcagaatatcttttccaagagccccatttttgctggggtagttcttcctcaagttcaacaccccaaaaatgcaagaaaaaaatatccaaagcttaatggattgttggcagatatagttcatgcttgtttacaaattgatcctgctgacaggatatcatctagtgatcttttgcatcatgagtattttactagagatggatttattgaaaaattcatgccagaactgaaagctaaattactgcaggaagcaaaagtcaattcattaataaagccaaaagagagttctaaagaaaatgaactcaggaaagatgaaagaaaaacagtttataccaatacactgctaagtagttcagttttgggaaaggaaatagaaaaagagaaaaagcccaaggagatcaaagtcagagttattaaagtcaaaggaggaagaggagatatctcagaaccaaaaaagaaagagtatgaaggtggacttggtcaacaggatgcaaatgaaaatgttcatcctatgtctccagatacaaaacttgtaaccattgaaccaccaaaccctatcaatcccagcactaactgtaatggcttgaaagaaaatccacattgcggaggttctgtgacaatgccacccatcaatctaactaacagtaatttgatggctgcaaatctcagttcaaatctctttcaccccagtgtgaggttaactgaaagagcaaaaaagagacgcacttcttcacaatctattggacaagttatgcctaatagcaggcaagaggatccaggtcctattcaagagccaaatggagaagggtatatttaatgagcgaacaggtcacagtgaccaaatggcaaatgagaacaaaaggaagctgaatttttccagatctgacaggaaagaattccattttccagaattgcctgtcacaatacagtcaaaagatacaaaaggaatggaagttaaacagataaaaatgctgaagagggagtcaaagaaaacagagtcatctaagataccaactttacttaacgtggatcaaaatcaagaaaaacaagagggtggagatggccattgcgaggggaagaatttgaagagaaacaggttttttttctggtagtgtcttttcttttacatagtccaaaaaatacaagatgacaactcttcccgttttatttatctacaatagaagtgtgatgtgagttgttgttaagacagccatccatgtgcatgagcatcatccagctttttttgttagcaaaacatttactgttttcttttcccttttaagactctgttgatgtgataatttgatttggaattataaagtcatctcttctctgcctacttcttttttttgccatgattactgagtggataacacaagccgtgacatgatacaaactgtacttatacttaatgatctctgccttcttgtagccacataacttcgagtcagttatctcctataacacacaggcctctttaaatgagttcttaataaaatatttgagccgttgttttaaaagctattcatggctgggtgcaatggctcatgcctgtaatcccaacactttgggaggctgaggcaggcggatcacttgaggtcaggagttcgaaaccagcctgaccaacacggtgaaacaccatctctactaaa

SEQ ID NO: 37321 - DNA, 1502 bp, Homo sapiens
actggaactacgcagagccagaccagcgggaccacagaatgggctgaggcggcggcggctgtttggataaagtcaacagcgggacgtggggcgtgacgccgtagtaaaagcccagcttgaaaatggagatgtatgaaacccttggaaaagtgggagagggaagttacggaacagtcatgaaatgtaaacataagaatactgggcagatagtggccattaagatattttatgagagaccagaacaatctgtcaacaaaattgcgatgagagaaataaagtttctaaagcaatttcatcacgaaaacctggtcaatctgattgaagtttttagacagaaaaagaaaattcatttggtatttgaatttattgaccacacagtattagatgagttacaacattattgtcatggactagagagtaagcgacttagaaaatacctcttccagatccttcgagcaattgactatcttcacagtaataatatcattcatcgagatataaaacctgagaatattttagtatcccagtcaggaattactaagctctgtgattttggttttgcacgaacactagcagctcctggggacatttatacggactatgtggccacacgctggtatagagctcccgaattagtattaaaagatacttcttatggaaaacctgtggatatctgggctttgggctgtatgatcattgagatggccactggaaatccctatcttcctagtagttctgatttggatttactccataaaattgttttgaaagtgggcaatttgtcacctcacttgcagaatatcttttccaagagccccatttttgctggggtagttcttcctcaagttcaacaccccaaaaatgcaagaaaaaaatatccaaagcttaatggattgttggcagatatagttcatgaaatagaaaaagagaaaaagcccaaggagatcaaagtcagagttattaaagtcaaaggaggaagaggagatatctcagaaccaaaaaagaaagagtatgaaggtggacttggtcaacaggatgcaaatgaaaatgttcatcctatgtctccagatacaaaacttgtaaccattgaaccaccaaaccctatcaatcccagcactaactgtaatggcttgaaagaaaatccacattgcggaggttctgtgacaatgccacccatcaatctaactaacagtaatttgatggctgcaaatctcagttcaaatctctttcaccccagtgtgaggtgagctgtaacagagaagaaacctaaataatacaacattcctgtataatggtatttcaaagaatcgtgttcatagtgtctgtatgtaaactgaacttgaagaaaatatattgaaattaaagctgtataatgggccatttactgagtgtttcttatggatgctgtagaagaaattaacttttcttggccatatagatgtttaaattttcactaatgtcttcttgaaaaaccttattaaaaaaaaagaccctttgaaaaa

SEQ ID NO: 37322 - DNA, 1239 bp, Homo sapiens
gcccgcggccttgtcaacaatccacccctgagtgggagggggagaagtatctagaaccacgtgtccctatgacgcgtttagaacgggtcacgtgagcgcctcgcctggatgtgagtttcagccagacctgtggatatctgggctttgggctgtatgatcattgagatggccactggaaatccctatcttcctagtagttctgatttggatttactccataaaattgttttgaaagtgggcaatttgtcacctcacttgcagaatatcttttccaagagccccatttttgctggggtagttcttcctcaagttcaacaccccaaaaatgcaagaaaaaaatatccaaagcttaatggattgttggcagatatagttcatagccaaatggagaagggtatatttaatgagcgaacaggtcacagtgaccaaatggcaaatgagaacaaaaggaagctgaatttttccagatctgacaggaaagaattccattttccagaattgcctgtcacaatacagtcaaaagatacaaaaggaatggaagttaaacagataaaaatgctgaagagggagtcaaagaaaacagagtcatctaagataccaactttacttaacgtggatcaaaatcaagaaaaacaagagggtggagatggccattgcgaggggaagaatttgaagagaaacaggttttttttctggtagtgtcttttcttttacatagtccaaaaaatacaagatgacaactcttcccgttttatttatctacaatagaagtgtgatgtgagttgttgttaagacagccatccatgtgcatgagcatcatccagctttttttgttagcaaaacatttactgttttcttttcccttttaagactctgttgatgtgataatttgatttggaattataaagtcatctcttctctgcctacttcttttttttgccatgattactgagtggataacacaagccgtgacatgatacaaactgtacttatacttaatgatctctgccttcttgtagccacataacttcgagtcagttatctcctataacacacaggcctctttaaatgagttcttaataaaatatttgagccgttgttttaaaagctattcatggctgggtgcaatggctcatgcctgtaatcccaacactttgggaggctgaggcaggcggatcacttgaggtcaggagttcgaaaccagcctgaccaacacggtgaaacaccatctctactaaa

SEQ ID NO: 37323 - DNA, 1476 bp, Homo sapiens
actggaactacgcagagccagaccagcgggaccacagaatgggctgaggcggcggcggctgtttggataaagtcaacagcgggacgtggggcgtgacgccgtagtaaaagcccagcttgaaaatggagatgtatgaaacccttggaaaagtgggagagggaagttacggaacagtcatgaaatgtaaacataagaatactgggcagatagtggccattaagatattttatgagagaccagaacaatctgtcaacaaaattgcgatgagagaaataaagtttctaaagcaatttcatcacgaaaacctggtcaatctgattgaagtttttagacagaaaaagaaaattcatttggtatttgaatttattgaccacacagtattagatgagttacaacattattgtcatggactagagagtaagcgacttagaaaatacctcttccagatccttcgagcaattgactatcttcacagtaataatatcattcatcgagatataaaacctgagaatattttagtatcccagtcaggaattactaagctctgtgattttggttttgcacgaacactagcagctcctggggacatttatacggactatgtggccacacgctggtatagagctcccgaattagtattaaaagatacttcttatggaaaacctgtggatatctgggctttgggctgtatgatcattgagatggccactggaaatccctatcttcctagtagttctgatttggatttactccataaaattgttttgaaagtgggcaatttgtcacctcacttgcagaatatcttttccaagagccccatttttgctggggtagttcttcctcaagttcaacaccccaaaaatgcaagaaaaaaatatccaaagcttaatggattgttggcagatatagttcatgcttgtttacaaattgatcctgctgacaggatatcatctagtgatcttttgcatcatgagtattttactagagatggatttattgaaaagttaactgaaagagcaaaaaagagacgcacttcttcacaatctattggacaagttatgcctaatagcaggcaagaggatccaggtcctattcaagagccaaatggagaagggtatatttaatgagcgaacaggtcacagtgaccaaatggcaaatgagaacaaaaggaagctgaatttttccagatctgacaggaaagaattccattttccagaattgcctgtcacaatacagtcaaaagatacaaaaggaatggaagttaaacagataaaaatgctgaagagggagtcaaagaaaacagagtcatctaagataccaactttacttaacgtggatcaaaatcaagaaaaacaagaggtaactctttttgtatatagcttttactaaggcatgttgtttagaggacttgactcagtgtataaatttagttattactattggaaagctatataaaaattcaaaattttataatct

SEQ ID NO: 37324 - DNA, 531 bp, Homo sapiens
actggaactacgcagagccagaccagcgggaccacagaatgggctgaggcggcggcggctgtttggataaagtcaacagcgggacgtggggcgtgacgccggtccggcatcctaagacgtgtggtttgagttgcgggcgagaccaggctttttttaggaccttgggcctgataagtgggcgactgcagtagtgcgggaacctattatttgacaggaacatgacaggaagtgtagggaccccatgcttgatggatggtgacttatagtgtggtagtctcagtgttgatgggcatgaccgagacagcaggagtacccctaagttctggtgagaggtggagcctcagaaggacaccttactcaagctgtctttagttcccaaagacaaaaaggctcagtggaaaagattccttttttttttttaatgtctctatatttgagactgtgggtttattgtggatatgcattatctagttttaataaataaaagtataaacgtttaacattttcagaaaaaaaaacctcgtgcccaat

SEQ ID NO: 37325 - DNA, 819 bp, Homo sapiens
tcttgagtgacagtgaatagttagatcgaataataggctaaccaagaagcttaaaaggaaaagctgggaaatgagatgttcataaggaaatttaagaagctctggtatatttctgggaatctagaaggctatgtgcatgtgtagggttgtgtgctgcatgcttaggaaagaactaagaaggtcctaagctgtcagttctgattaatctctagactttgtgcaagcaagaagtaaaggctaaggaagggttgtaaactgcttggctgaatgtgaaaggtatgccctaacacatgtagttaggctgtcaatacacactgagtcttatactggttttaagcatttaaggaagtctctgcccagtcattagctgatcacaaatgaacagcagagactttagtgaccacatatgatagaaaattaatattttagataattagttccaggaaagtcactaaaagaaacaacaataaacagtaacaacagtaaacagtaataacaacaaataccctggtaggggaagaatcctgatttttcgagttgtcacattaccttatttaaaatgtttagttttcaagagactgttattacaaagcatgcaaaaaaccacttaagtatggtccacacataggagagaaagcagtaaattagaaaatgttccctgaggaagcccaaatgttagactttagtattaggcaaagactttaaatcagccatttaaaatatgttcaaagggcctggtatggtggcttgcacttactgaggagggacaattgccactgcactccagcctgggtgacagagcaagacctcatttcttta

SEQ ID NO: 37326 - DNA, 761 bp, Homo sapiens
ggaactttctacaacaatggaactggtctatgtttgtactgtctaatccatagccactagccacacatgactactgagcacttgaaatgtgattagtatgactgagaaactggatttttagttgtactaagtaattgttaatttaaattgaaattcaagtagccacacgagcctagtgactactatatttgacagagaagttttttgttcttttgttttattttgttttgttttcgagatggagtctcgttctgtggcccaggctggagtgcagcagcatgatctcggctcactgcaacctccgcctcccaggttcaagcaatccccctgcttcagcctccagagtagctgggactacaggggtgcaccaccacacctggctaatttttatatttttagtagagacagggattcaccatgttgaccaggctggtctcaaactcctggcctcagatgatctgcctgccttggtttcccaaagtgctcggattagaggtgtgagccactgtggccggccctaacagtgaagttttaaagtataaaaaataatataagagaagatgaattatatctcattaaagctgttaaagcaatataagcatttaaaatgtgctcagtatattatgtttaaaatttaattgtaatgtagaaatgagtttggatttcaaaatagagaatgtagacacagcagaagtattggagtttttatttaaattgcttattttctagcacaataaaaagcgatccagcattgagttttc

SEQ ID NO: 37327 - DNA, 817 bp, Homo sapiens
cacaatcaaggggtcacccacttagttccagttgagcttaaataagtgagcatctcatgtagatgccatagttgggcaggaagcagccccaccatgcatggcttcctgagcactgcacaggctgccgctgggatttgtgtctatggcttcgcccaaggttcccagcactccctccctccagcaacctggcagttttagtgcctctggttttcttccctgacacttaggaagacgaaagtataaagatctagaagactgggacaccatgcatgttcattttgaagttggaattggtcttctgcctacctctgatctggcagaggtatctgcattttggtttgttaacaaggtaaaactcctggtgtcactgacctcctcctgtcagataacttacatgattaaggttaagagtaaagcagagtgttcacgtccagcttccttctcagccttaacaggaaaaggcttgtgctttttttctaactatgctttgacccttaactcctatggcatgatggggccctgggagaagccaggcagcacaagccagtcatgctgagctgcctccagataatcctggctccaggccagagcccgtgtctgccctcatccctctctcctactgtgagctctccagtcctttcccaacagcgatgtggttgtctgcttagccacatgcctgtatagttccttccagaagaaatgtataatggtggaagatgtatttctgtgtgaaaattttcaccaagtcatacaacacagctgatgctggagccaggattaaaattggggtgtacaagtctcccagtgtgagtatccc

SEQ ID NO: 37328 - DNA, 501 bp, Homo sapiens
  misc_feature (6)..(6): n is a, c, g, or t
  misc_feature (27)..(27): n is a, c, g, or t
  misc_feature (35)..(35): n is a, c, g, or t
gtgggngtcgccttcgtcttcctaagngtcagggnaagaaaaccagaggcactgacctcctcctgtcagataacttacatgattaaggttaagagtaaagcagagtgttcacgtccagcttccttctcagccttaacaggaaaaggcttgtgctttttttctaactatgctttgacccttaactcctatggcatgatggggccctgggagaagccaggcagcacaagccagtcatgctgagctgcctccagataatcctggctccaggccagagcccgtgtctgccctcatccctctctcctactgtgagctctccagtcctttcccaacagcgatgtggttgtctgcttagccacatgcctgtatagttccttccagaagaaatgtataatggtggaagatgtatttctgtgtgaaaattttcaccaagtcatacaacacagctgatgctggagccaggattaaaattggggtgtacaagtctcccagtgtgagtatccc

SEQ ID NO: 37329 - DNA, 393 bp, Homo sapiens
gtttattttccatgtatttgtgtagttttaggagttccttctggagttgatttctagttttattccactgtggtctgaaaaaaatagttgatatgatttcaattaaaaaaaattattcggccaggtgtggtagctcatgcctgtaatcccagcactttgggaggccaaggtgggcgaatcatctgaggccaggaattcaagaccagcctggccaacatggtgaaaccacatctctattaaaaatacaaaaattagccaggtgtggtggtgcatgcctgtaatctcagctactcgggaggctgaggcaggagaattgcttgaacccgggaggcagaagttgcagtgagccaagattgtgtcactgcactccagtccatgtgacagagcaagact

SEQ ID NO: 37330 - DNA, 402 bp, Homo sapiens
tcagaagggagatcccaaaggtggtggatggcactcttaacttcctgtttaatgaaatcatgattttgtcttctggtgggaacatttctttttccaggatgaagacttctaggtcagcagagcataaagtcatggaagcaggaagaaaacattttgctaatgggacactaggggaagtcatgagtagtgtcacttcaattttgaaccttgatttctggacctaagaattttggctatcagacaaacagcaccaaatattggatgctgattcagaacatagtcttctggagaacactgcctcaaccctcaaggtattatcacctagctggtcctgtaaccaagacttcaaatggccattcaaccattctatcaagatggctacttcaggatagtgggggatgt

SEQ ID NO: 37331 - DNA, 352 bp, Homo sapiens
tgagacagagtgtccctctgtcgcccaggctggcatgcagtggcgcaatctcagctcactgcaaactccgcctccgggttcacatgattctcctcctcagcctcccaagtagttgggaatataggtgtgcgcccagctaattttttgtatttttagtagagatagggttttgccatgttggccaggctggttttgaactcctaacctcacgtgatctgcctgccttggcgtccgaaagtgctacaattacaggcatgagccacagtgcccagcctccagggatgacacctgtaaatactagctgaaaacataataagtaggctcaaaaaagatttaggaatagaatttaaag

SEQ ID NO: 37332 - DNA, 285 bp, Homo sapiens
taagacctcaataaaaatcctggaagaaaacctaggaaatacctttctcaacatcagctttggcaaagaatttatggctaagtccccaaaagcaatgaaaacaaaaccaaaaattgacaagtgagacctaattaaactaaagagtttctacatagcaaaaaaaaaaaaaaaaaaaagtcaacagaataaacaggctacataatgggagaaactattcaccaaatatgcatccgataacagtctaatatccagaatctacaaggaacttaaacaaatgagcaagaa

SEQ ID NO: 37333 - DNA, 321 bp, Homo sapiens
gtgctaggcacagtataagggctgaatgaacatcaattgttaataactatttttcctctttcgtaaacactataataacaagtcacttttgctctgctcacaatttccaataaaagatcacttggataatctaatggagttctacattttattttgaactattttggcaatattcataaaaattccatcacaataggtactataaggcaagacagtcaaatgacaattagattttaacagctagtggattataaagtttactattatccatctttttcttcaaataaacatttgaattattgctctataattaaacctgag

SEQ ID NO: 37334 - DNA, 1164 bp, Homo sapiens
ctctcccctgcctcacatttccctattgcccattgctgctttgtttttctccccagcagttgttacttcgtaacacacaccatcgtttatttatattgtttacatattttacttatatttatagtattatttgtattgtttatggtctctcttccctcatcagaatgtaggctccaagtgggcagggatgtatgctcttctgttcaccactgtattcccattgccagaaacacagtaggtgctcagtaagtatttgatgggaggagcttctgcagttcattctgcacgtcagccatggctggtcctgctcttcagcctccaagcccagcagcttcctggtgggctgcagttttctcatcggaaatagagaagagtagcagtgccgattctgcctcccttgcagggtcgttttagtgcatctagttggaaaaatacaggcaggtttgcaggggaacacagttttcaaagtgtaaaagctcagtgcaggtgctaggtcatggtgttttttgtcacactgggatcctgcgggagaggtaagtttagctgattggagtggaagatccagcccattcttcgtggtgcctgccgcagagcctgcaagcctgcagaaagacagggagtagccacgtctttctgtagttcacacctgtgtgtctccccacctgataatccctcagcacttctgtttgccttgcatgtaaagcccgacctttgcatggcaggcacacagactgaaactctttcctcctccagcctttcttggactcatccacagaatgacaaagaagtattctgtgaatattggttgaatgaagggaagggcacggctttttaaaaaagatgaaaaaaaaaaaagttatgaaaagctttaaaacttgctattggctgggcgtggtggctcacacctataatcccagcactttgggaggccgaggcgggcagatcacctgaggtcaggagtttgagaccagcctggccaacatggcaaaaccccgtctctactaaaaatacaaaaattagctgggcgtggtggtgggtgcctgtaatcccagctacttgggaggctgaggaaggagaatcacttgaacctgggaggcggaggttgcagtgagccgagatcgcgccattgcactccagcccggacaacagagcgagacttcatct

SEQ ID NO: 37335 - DNA, 794 bp, Homo sapiens
tctttagctaacttcttccagcccatcacggaggactctgttgatctcactagagcaagctcccagttttccgtatgtctgccttctcacgagccaaataatcagtttaggggtgattaaaagaatataatggctgggtgcggtgcctcacacctgtaatcccagcagtttgggaggccgaggcgggcagatcacttgaggtcaggagtttgagaccagcttggccaacatggtgaaaccccgtctctactaaaaaattaaaaaaatgagccaggtgtggtggcgggtgcctgtaatcccagctactggggaagctgaagcaagataatcacttgaacccaggaggcggaggctgcagggagctgagatcgcaccattgcattccagcctgggcaacagagtgagactctgtctcaaaaaaaaaaaaaaaactggtttataataatagccaatacttatagaatacttacaatatcaatataccaggtactctgctaataagtgttttacactggccgggcatggtggttcacacctgttatctcagcactttgggaggccgaggtgggcggatcacctgaggtcgggagttcgagaccatcctggccaacatggggaaaccccgtttctactaaaaattatctgggtgtggtggtgtgtacctgtaaccccagctacttgggaggctgaggcaggagaatcgcttgaacccgggaggtggagcttgcagtgagccgagatcgcgccactgcactccagcctgggcagcagagggagactgcgtctaaaaaaaa

SEQ ID NO: 37336 - DNA, 2229 bp, Homo sapiens
cagagtcaacagctgttgcagcatgagcgatacgcttggttctcctaactagcaccttcccctctcccctgactcagctggtagcccctcctccccgcacctgcccaaaggtcactggacaggcatttgtctggccttcccttttactgctggctgggaaggaggagcatcagaccacagatcctggaaggcacttctctccctgactgccgctcacactgccgtgagaacctgcttatatccaggaccaaggaggcaatgccaggaagctggtgaagggtttcctctcctccaccatggttgacagcactgagtatgaagtggcctcccagcctgaggtggaaacctcccctttgggtgatggggccagcccagggccggagcaggtgaagctgaagaaggagatctcactgcttaacggcgtgtgcctgattgtggggaacatgatcggctcaggcatctttgtttcccccaagggtgtgctcatatacagtgcctcctttggtctctctctggtcatctgggctgtcgggggcctcttctccgtctttggggccctttgttatgcggaactgggcaccaccattaagaaatctggggccagctatgcctatatcctggaggcctttggaggattccttgctttcatcagactctggacctccctgctcatcattgagcccaccagccaggccatcattgccatcacctttgccaactacatggtacagcctctcttcccgagctgcttcgccccttatgctgccagccgcctgctggctgctgcctgcatctgtctcttaaccttcattaactgtgcctatgtcaaatggggaaccctggtacaagatattttcacctatgctaaagtattggcactgatcgcggtcatcgttgcaggcattgttagacttggccagggagcctctactcattttgagaattcctttgagggttcatcatttgcagtgggtgacattgccctggcactgtactcagctctgttctcctactcaggctgggacaccctcaactatgtcactgaagagatcaagaatcctgagaggaacctgcccctctccattggcatctccatgcccattgtcaccatcatctatatcttgaccaatgtggcctattatactgtgctagacatgagagacatcttggccagtgatgctgttgctgtgacttttgcagatcagatatttggaatatttaactggataattccactgtcagttgcattatcctgttttggtggcctcaatgcctccattgtggctgcttctaggcttttctttgtgggctcaagagaaggccatctccctgatgccatctgcatgatccatgttgagcggttcacaccagtgccttctctgctcttcaatggtatcatggcattgatctacttgtgcgtggaagacatcttccagctcattaactactacagcttcagctactggttctttgtggggctttctattgtgggtcagctttatctgcgctggaaggagcctgatcgacctcgtcccctcaagctcagcgttttcttcccgattgtcttctgcctctgcaccatcttcctggtggctgttccactttacagtgatactatcaactccctcatcggcattgccattgccctctcaggcctgcccttttacttcctcatcatcagagtgccagaacataagcgaccgctttacctccgaaggatcgtggggtctgccacaaggtacctccaggtcctgtgtatgtcagttgctgcagaaatggatttggaagatggaggagagatgcccaagcaacgggatcccaagtctaactaaacaccatctggaatcctgatgtggaaagcaggggtttctggtctactggctagagctaaggaagttgaaaaggaaagctcacttctttggaggcacctgtccagaagcctggcctaggcagcttcaacctttgaacttactttttgaaatgaaaagtaatttatttgttttgctacatactgttccagacttttaaaggggacaatgaaggtgactgtggggaggagcatgtcaggtttgggcttggttgttttagaagcacctgggtgtgcctacctactcctcttttcttttaaaagggcccacaatgctccaatttcctgtctcctttagagagacatgaaactatcacaggtgctggatgacaataaaagtttatgttcctaaaaaaaaaaag

SEQ ID NO: 37337 - DNA, 2560 bp, Homo sapiens
tcctgtaatctcagcatgggaacaagcctttgtgtcacactgtgcaaccttcctccctttcttaaatgcttggggtgagagagaagagaggctagggtggggcatggaggacacagagagagagagtgctgtgtattccttccccgctactgtcctgtcctcagctaacttgctctgggacagcttccccagggctacagatactgcactcagctgactgtcctttcttctgggcccctggtcccagagcagagctgacaaaggagattcctgagagagcaccttcttatcacagaaagtgctgagccaagagctcctagctgccccttttgcagatgtgaagggccagtgaaccttggacccagatggttgcttaatactcctttccccctccctcactccttcctttgcgggctgcctcacctcctccacccttcttgcttaaatccataggcatttgtctggccttcccttttactgctggctgggaaggaggagcatcagaccacagatcctggaaggcacttctctccctgactgccgctcacactgccgtgagaacctgcttatatccaggaccaaggaggcaatgccaggaagctggtgaagggtttcctctcctccaccatggttgacagcactgagtatgaagtggcctcccagcctgaggtggaaacctcccctttgggtgatggggccagcccagggccggagcaggtgaagctgaagaaggagatctcactgcttaacggcgtgtgcctgattgtggggaacatgatcggctcaggcatctttgtttcccccaagggtgtgctcatatacagtgcctcctttggtctctctctggtcatctgggctgtcgggggcctcttctccgtctttggggccctttgttatgcggaactgggcaccaccattaagaaatctggggccagctatgcctatatcctggaggcctttggaggattccttgctttcatcagactctggacctccctgctcatcattgagcccaccagccaggccatcattgccatcacctttgccaactacatggtacagcctctcttcccgagctgcttcgccccttatgctgccagccgcctgctggctgctgcctgcatctgtctcttaaccttcattaactgtgcctatgtcaaatggggaaccctggtacaagatattttcacctatgctaaagtattggcactgatcgcggtcatcgttgcaggcattgttagacttggccagggagcctctactcattttgagaattcctttgagggttcatcatttgcagtgggtgacattgccctggcactgtactcagctctgttctcctactcaggctgggacaccctcaactatgtcactgaagagatcaagaatcctgagaggaacctgcccctctccattggcatctccatgcccattgtcaccatcatctatatcttgaccaatgtggcctattatactgtgctagacatgagagacatcttggccagtgatgctgttgctgtgacttttgcagatcagatatttggaatatttaactggataattccactgtcagttgcattatcctgttttggtggcctcaatgcctccattgtggctgcttctaggcttttctttgtgggctcaagagaaggccatctccctgatgccatctgcatgatccatgttgagcggttcacaccagtgccttctctgctcttcaatggtatcatggcattgatctacttgtgcgtggaagacatcttccagctcattaactactacagcttcagctactggttctttgtggggctttctattgtgggtcagctttatctgcgctggaaggagcctgatcgacctcgtcccctcaagctcagcgttttcttcccgattgtcttctgcctctgcaccatcttcctggtggctgttccactttacagtgatactatcaactccctcatcggcattgccattgccctctcaggcctgcccttttacttcctcatcatcagagtgccagaacataagcgaccgctttacctccgaaggatcgtggggtctgccacaaggtacctccaggtcctgtgtatgtcagttgctgcagaaatggatttggaagatggaggagagatgcccaagcaacgggatcccaagtctaactaaacaccatctggaatcctgatgtggaaagcaggggtttctggtctactggctagagctaaggaagttgaaaaggaaagctcacttctttggaggcacctgtccagaagcctggcctaggcagcttcaacctttgaacttactttttgaaatgaaaagtaatttatttgttttgctacatactgttccagacttttaaaggggacaatgaaggtgactgtggggaggagcatgtcaggtttgggcttggttgttttagaagcacctgggtgtgcctacctactcctcttttcttttaaaagggcccacaatgctccaatttcctgtctcctttagagagacatgaaactatcacaggtgctggatgacaataaaagtttatgttcctaaaaaaaaaaag

SEQ ID NO: 37338 - DNA, 2181 bp, Homo sapiens
tcctgtaatctcagcatgggaacaagcctttgtgtcacactgtgcaaccttcctccctttcttaaatgcttggggcatttgtctggccttcccttttactgctggctgggaaggaggagcatcagaccacagatcctggaaggcacttctctccctgactgccgctcacactgccgtgagaacctgcttatatccaggaccaaggaggcaatgccaggaagctggtgaagggtttcctctcctccaccatggttgacagcactgagtatgaagtggcctcccagcctgaggtggaaacctcccctttgggtgatggggccagcccagggccggagcaggtgaagctgaagaaggagatctcactgcttaacggcgtgtgcctgattgtggggaacatgatcggctcaggcatctttgtttcccccaagggtgtgctcatatacagtgcctcctttggtctctctctggtcatctgggctgtcgggggcctcttctccgtctttggggccctttgttatgcggaactgggcaccaccattaagaaatctggggccagctatgcctatatcctggaggcctttggaggattccttgctttcatcagactctggacctccctgctcatcattgagcccaccagccaggccatcattgccatcacctttgccaactacatggtacagcctctcttcccgagctgcttcgccccttatgctgccagccgcctgctggctgctgcctgcatctgtctcttaaccttcattaactgtgcctatgtcaaatggggaaccctggtacaagatattttcacctatgctaaagtattggcactgatcgcggtcatcgttgcaggcattgttagacttggccagggagcctctactcattttgagaattcctttgagggttcatcatttgcagtgggtgacattgccctggcactgtactcagctctgttctcctactcaggctgggacaccctcaactatgtcactgaagagatcaagaatcctgagaggaacctgcccctctccattggcatctccatgcccattgtcaccatcatctatatcttgaccaatgtggcctattatactgtgctagacatgagagacatcttggccagtgatgctgttgctgtgacttttgcagatcagatatttggaatatttaactggataattccactgtcagttgcattatcctgttttggtggcctcaatgcctccattgtggctgcttctaggcttttctttgtgggctcaagagaaggccatctccctgatgccatctgcatgatccatgttgagcggttcacaccagtgccttctctgctcttcaatggtatcatggcattgatctacttgtgcgtggaagacatcttccagctcattaactactacagcttcagctactggttctttgtggggctttctattgtgggtcagctttatctgcgctggaaggagcctgatcgacctcgtcccctcaagctcagcgttttcttcccgattgtcttctgcctctgcaccatcttcctggtggctgttccactttacagtgatactatcaactccctcatcggcattgccattgccctctcaggcctgcccttttacttcctcatcatcagagtgccagaacataagcgaccgctttacctccgaaggatcgtggggtctgccacaaggtacctccaggtcctgtgtatgtcagttgctgcagaaatggatttggaagatggaggagagatgcccaagcaacgggatcccaagtctaactaaacaccatctggaatcctgatgtggaaagcaggggtttctggtctactggctagagctaaggaagttgaaaaggaaagctcacttctttggaggcacctgtccagaagcctggcctaggcagcttcaacctttgaacttactttttgaaatgaaaagtaatttatttgttttgctacatactgttccagacttttaaaggggacaatgaaggtgactgtggggaggagcatgtcaggtttgggcttggttgttttagaagcacctgggtgtgcctacctactcctcttttcttttaaaagggcccacaatgctccaatttcctgtctcctttagagagacatgaaactatcacaggtgctggatgacaataaaagtttatgttcctaaaaaaaaaaag

SEQ ID NO: 37339 - DNA, 2356 bp, Homo sapiens
atctgggttttcaatcacggctccgccatcttgggtcatcgtacggaaggagagacaaaactgcagtacaggtttttgagagctgtcaaatctctgctatatcagtactggctaaattaggtgttaaatgattgagcttcaagatgggcaaatcatgacttcggactacattcctccttgcctggcggctgggaaattccgtccgcgctgctgctaagacttcagatgaaagacgctccggggactccggcatttgtctggccttcccttttactgctggctgggaaggaggagcatcagaccacagatcctggaaggcacttctctccctgactgccgctcacactgccgtgagaacctgcttatatccaggaccaaggaggcaatgccaggaagctggtgaagggtttcctctcctccaccatggttgacagcactgagtatgaagtggcctcccagcctgaggtggaaacctcccctttgggtgatggggccagcccagggccggagcaggtgaagctgaagaaggagatctcactgcttaacggcgtgtgcctgattgtggggaacatgatcggctcaggcatctttgtttcccccaagggtgtgctcatatacagtgcctcctttggtctctctctggtcatctgggctgtcgggggcctcttctccgtctttggggccctttgttatgcggaactgggcaccaccattaagaaatctggggccagctatgcctatatcctggaggcctttggaggattccttgctttcatcagactctggacctccctgctcatcattgagcccaccagccaggccatcattgccatcacctttgccaactacatggtacagcctctcttcccgagctgcttcgccccttatgctgccagccgcctgctggctgctgcctgcatctgtctcttaaccttcattaactgtgcctatgtcaaatggggaaccctggtacaagatattttcacctatgctaaagtattggcactgatcgcggtcatcgttgcaggcattgttagacttggccagggagcctctactcattttgagaattcctttgagggttcatcatttgcagtgggtgacattgccctggcactgtactcagctctgttctcctactcaggctgggacaccctcaactatgtcactgaagagatcaagaatcctgagaggaacctgcccctctccattggcatctccatgcccattgtcaccatcatctatatcttgaccaatgtggcctattatactgtgctagacatgagagacatcttggccagtgatgctgttgctgtgacttttgcagatcagatatttggaatatttaactggataattccactgtcagttgcattatcctgttttggtggcctcaatgcctccattgtggctgcttctaggcttttctttgtgggctcaagagaaggccatctccctgatgccatctgcatgatccatgttgagcggttcacaccagtgccttctctgctcttcaatggtatcatggcattgatctacttgtgcgtggaagacatcttccagctcattaactactacagcttcagctactggttctttgtggggctttctattgtgggtcagctttatctgcgctggaaggagcctgatcgacctcgtcccctcaagctcagcgttttcttcccgattgtcttctgcctctgcaccatcttcctggtggctgttccactttacagtgatactatcaactccctcatcggcattgccattgccctctcaggcctgcccttttacttcctcatcatcagagtgccagaacataagcgaccgctttacctccgaaggatcgtggggtctgccacaaggtacctccaggtcctgtgtatgtcagttgctgcagaaatggatttggaagatggaggagagatgcccaagcaacgggatcccaagtctaactaaacaccatctggaatcctgatgtggaaagcaggggtttctggtctactggctagagctaaggaagttgaaaaggaaagctcacttctttggaggcacctgtccagaagcctggcctaggcagcttcaacctttgaacttactttttgaaatgaaaagtaatttatttgttttgctacatactgttccagacttttaaaggggacaatgaaggtgactgtggggaggagcatgtcaggtttgggcttggttgttttagaagcacctgggtgtgcctacctactcctcttttcttttaaaagggcccacaatgctccaatttcctgtctcctttagagagacatgaaactatcacaggtgctggatgacaataaaagtttatgttcctaaaaaaaaaaag

SEQ ID NO: 37340 - DNA, 2086 bp, Homo sapiens
gtaaggatgactgtcgatatcattgaattacatgaagtaattgtactcatggtacgctagatgttagagctcacactgccgtgagaacctgcttatatccaggaccaaggaggcaatgccaggaagctggtgaagggtttcctctcctccaccatggttgacagcactgagtatgaagtggcctcccagcctgaggtggaaacctcccctttgggtgatggggccagcccagggccggagcaggtgaagctgaagaaggagatctcactgcttaacggcgtgtgcctgattgtggggaacatgatcggctcaggcatctttgtttcccccaagggtgtgctcatatacagtgcctcctttggtctctctctggtcatctgggctgtcgggggcctcttctccgtctttggggccctttgttatgcggaactgggcaccaccattaagaaatctggggccagctatgcctatatcctggaggcctttggaggattccttgctttcatcagactctggacctccctgctcatcattgagcccaccagccaggccatcattgccatcacctttgccaactacatggtacagcctctcttcccgagctgcttcgccccttatgctgccagccgcctgctggctgctgcctgcatctgtctcttaaccttcattaactgtgcctatgtcaaatggggaaccctggtacaagatattttcacctatgctaaagtattggcactgatcgcggtcatcgttgcaggcattgttagacttggccagggagcctctactcattttgagaattcctttgagggttcatcatttgcagtgggtgacattgccctggcactgtactcagctctgttctcctactcaggctgggacaccctcaactatgtcactgaagagatcaagaatcctgagaggaacctgcccctctccattggcatctccatgcccattgtcaccatcatctatatcttgaccaatgtggcctattatactgtgctagacatgagagacatcttggccagtgatgctgttgctgtgacttttgcagatcagatatttggaatatttaactggataattccactgtcagttgcattatcctgttttggtggcctcaatgcctccattgtggctgcttctaggcttttctttgtgggctcaagagaaggccatctccctgatgccatctgcatgatccatgttgagcggttcacaccagtgccttctctgctcttcaatggtatcatggcattgatctacttgtgcgtggaagacatcttccagctcattaactactacagcttcagctactggttctttgtggggctttctattgtgggtcagctttatctgcgctggaaggagcctgatcgacctcgtcccctcaagctcagcgttttcttcccgattgtcttctgcctctgcaccatcttcctggtggctgttccactttacagtgatactatcaactccctcatcggcattgccattgccctctcaggcctgcccttttacttcctcatcatcagagtgccagaacataagcgaccgctttacctccgaaggatcgtggggtctgccacaaggtacctccaggtcctgtgtatgtcagttgctgcagaaatggatttggaagatggaggagagatgcccaagcaacgggatcccaagtctaactaaacaccatctggaatcctgatgtggaaagcaggggtttctggtctactggctagagctaaggaagttgaaaaggaaagctcacttctttggaggcacctgtccagaagcctggcctaggcagcttcaacctttgaacttactttttgaaatgaaaagtaatttatttgttttgctacatactgttccagacttttaaaggggacaatgaaggtgactgtggggaggagcatgtcaggtttgggcttggttgttttagaagcacctgggtgtgcctacctactcctcttttcttttaaaagggcccacaatgctccaatttcctgtctcctttagagagacatgaaactatcacaggtgctggatgacaataaaagtttatgttcctaaaaaaaaaaag

SEQ ID NO: 37341 - DNA, 2097 bp, Homo sapiens
cagagtcaacagctgttgcagcatgagcgatacgcttggttctcctaactagcaccttcccctctcccctgactcagctggtagcccctcctccccgcacctgcccaaaggtcactggacagggcaatgccaggaagctggtgaagggtttcctctcctccaccatggttgacagcactgagtatgaagtggcctcccagcctgaggtggaaacctcccctttgggtgatggggccagcccagggccggagcaggtgaagctgaagaaggagatctcactgcttaacggcgtgtgcctgattgtggggaacatgatcggctcaggcatctttgtttcccccaagggtgtgctcatatacagtgcctcctttggtctctctctggtcatctgggctgtcgggggcctcttctccgtctttggggccctttgttatgcggaactgggcaccaccattaagaaatctggggccagctatgcctatatcctggaggcctttggaggattccttgctttcatcagactctggacctccctgctcatcattgagcccaccagccaggccatcattgccatcacctttgccaactacatggtacagcctctcttcccgagctgcttcgccccttatgctgccagccgcctgctggctgctgcctgcatctgtctcttaaccttcattaactgtgcctatgtcaaatggggaaccctggtacaagatattttcacctatgctaaagtattggcactgatcgcggtcatcgttgcaggcattgttagacttggccagggagcctctactcattttgagaattcctttgagggttcatcatttgcagtgggtgacattgccctggcactgtactcagctctgttctcctactcaggctgggacaccctcaactatgtcactgaagagatcaagaatcctgagaggaacctgcccctctccattggcatctccatgcccattgtcaccatcatctatatcttgaccaatgtggcctattatactgtgctagacatgagagacatcttggccagtgatgctgttgctgtgacttttgcagatcagatatttggaatatttaactggataattccactgtcagttgcattatcctgttttggtggcctcaatgcctccattgtggctgcttctaggcttttctttgtgggctcaagagaaggccatctccctgatgccatctgcatgatccatgttgagcggttcacaccagtgccttctctgctcttcaatggtatcatggcattgatctacttgtgcgtggaagacatcttccagctcattaactactacagcttcagctactggttctttgtggggctttctattgtgggtcagctttatctgcgctggaaggagcctgatcgacctcgtcccctcaagctcagcgttttcttcccgattgtcttctgcctctgcaccatcttcctggtggctgttccactttacagtgatactatcaactccctcatcggcattgccattgccctctcaggcctgcccttttacttcctcatcatcagagtgccagaacataagcgaccgctttacctccgaaggatcgtggggtctgccacaaggtacctccaggtcctgtgtatgtcagttgctgcagaaatggatttggaagatggaggagagatgcccaagcaacgggatcccaagtctaactaaacaccatctggaatcctgatgtggaaagcaggggtttctggtctactggctagagctaaggaagttgaaaaggaaagctcacttctttggaggcacctgtccagaagcctggcctaggcagcttcaacctttgaacttactttttgaaatgaaaagtaatttatttgttttgctacatactgttccagacttttaaaggggacaatgaaggtgactgtggggaggagcatgtcaggtttgggcttggttgttttagaagcacctgggtgtgcctacctactcctcttttcttttaaaagggcccacaatgctccaatttcctgtctcctttagagagacatgaaactatcacaggtgctggatgacaataaaagtttatgttcctaaaaaaaaaaag

SEQ ID NO: 37342 - DNA, 2410 bp, Homo sapiens
tcctgtaatctcagcatgggaacaagcctttgtgtcacactgtgcaaccttcctccctttcttaaatgcttggggtgagagagaagagaggctagggtggggcatggaggacacagagagagagagtgctgtgtattccttccccgctactgtcctgtcctcagctaacttgctctgggacagcttccccagggctacagatactgcactcagctgactgtcctttcttctgggcccctggtcccagagcagagctgacaaaggagattcctgagagagcaccttcttatcacagaaagtgctgagccaagagctcctagctgccccttttgcagatgtgaagggccagtgaaccttggacccagatggttgcttaatactcctttccccctccctcactccttcctttgcgggctgcctcacctcctccacccttcttgcttaaatccataggcatttgtctggccttcccttttactgctggctgggaaggaggagcatcagaccacagatcctggaaggcacttctctccctgactgccgctcacactgccgtgagaacctgcttatatccaggaccaaggaggcaatgccaggaagctggtgaagggtttcctctcctccaccatggttgacagcactgagtatgaagtggcctcccagcctgaggtggaaacctcccctttgggtgatggggccagcccagggccggagcaggtgaagctgaagaaggagatctcactgcttaacggcgtgtgcctgattgtggggaacatgatcggctcaggcatctttgtttcccccaagggtgtgctcatatacagtgcctcctttggtctctctctggtcatctgggctgtcgggggcctcttctccgtctttggggccctttgttatgcggaactgggcaccaccattaagaaatctggggccagctatgcctatatcctggaggcctttggaggattccttgctttcatcagactctggacctccctgctcatcattgagcccaccagccaggccatcattgccatcacctttgccaactacatggtacagcctctcttcccgagctgcttcgccccttatgctgccagccgcctgctggctgctgcctgcatctgtctcttaaccttcattaactgtgcctatgtcaaatggggaaccctggtacaagatattttcacctatgctaaagtattggcactgatcgcggtcatcgttgcaggcattgttagacttggccagggagcctctactcattttgagaattcctttgagggttcatcatttgcagtgggtgacattgccctggcactgtactcagctctgttctcctactcaggctgggacaccctcaactatgtcactgaagagatcaagaatcctgagaggaacctgcccctctccattggcatctccatgcccattgtcaccatcatctatatcttgaccaatgtggcctattatactgtgctagacatgagagacatcttggccagtgatgctgttgctgtgacttttgcagatcagatatttggaatatttaactggataattccactgtcagttgcattatcctgttttggtggcctcaatgcctccattgtggctgcttctaggcttttctttgtgggctcaagagaaggccatctccctgatgccatctgcatgatccatgttgagcggttcacaccagtgccttctctgctcttcaatctcagcgttttcttcccgattgtcttctgcctctgcaccatcttcctggtggctgttccactttacagtgatactatcaactccctcatcggcattgccattgccctctcaggcctgcccttttacttcctcatcatcagagtgccagaacataagcgaccgctttacctccgaaggatcgtggggtctgccacaaggtacctccaggtcctgtgtatgtcagttgctgcagaaatggatttggaagatggaggagagatgcccaagcaacgggatcccaagtctaactaaacaccatctggaatcctgatgtggaaagcaggggtttctggtctactggctagagctaaggaagttgaaaaggaaagctcacttctttggaggcacctgtccagaagcctggcctaggcagcttcaacctttgaacttactttttgaaatgaaaagtaatttatttgttttgctacatactgttccagacttttaaaggggacaatgaaggtgactgtggggaggagcatgtcaggtttgggcttggttgttttagaagcacctgggtgtgcctacctactcctcttttcttttaaaagggcccacaatgctccaatttcctgtctcctttagagagacatgaaactatcacaggtgctggatgacaataaaagtttatgttcctaaaaaaaaaaag

SEQ ID NO: 37343 - DNA, 2456 bp, Homo sapiens
tcctgtaatctcagcatgggaacaagcctttgtgtcacactgtgcaaccttcctccctttcttaaatgcttggggtgagagagaagagaggctagggtggggcatggaggacacagagagagagagtgctgtgtattccttccccgctactgtcctgtcctcagctaacttgctctgggacagcttccccagggctacagatactgcactcagctgactgtcctttcttctgggcccctggtcccagagcagagctgacaaaggagattcctgagagagcaccttcttatcacagaaagtgctgagccaagagctcctagctgccccttttgcagatgtgaagggccagtgaaccttggacccagatggttgcttaatactcctttccccctccctcactccttcctttgcgggctgcctcacctcctccacccttcttgcttaaatccataggcatttgtctggccttcccttttactgctggctgggaaggaggagcatcagaccacagatcctggaaggcacttctctccctgactgccgctcacactgccgtgagaacctgcttatatccaggaccaaggaggcaatgccaggaagctggtgaagggtttcctctcctccaccatggttgacagcactgagtatgaagtggcctcccagcctgaggtggaaacctcccctttgggtgatggggccagcccagggccggagcaggtgaagctgaagaaggagatctcactgcttaacggcgtgtgcctgattgtggggaacatgatcggctcaggcatctttgtttcccccaagggtgtgctcatatacagtgcctcctttggtctctctctggtcatctgggctgtcgggggcctcttctccgtctttggggccctttgttatgcggaactgggcaccaccattaagaaatctggggccagctatgcctatatcctggaggcctttggaggattccttgctttcatcagactctggacctccctgctcatcattgagcccaccagccaggccatcattgccatcacctttgccaactacatggtacagcctctcttcccgagctgcttcgccccttatgctgccagccgcctgctggctgctgcctgcatctgtctcttaaccttcattaactgtgcctatgtcaaatggggaaccctggtacaagatattttcacctatgctaaagtattggcactgatcgcggtcatcgttgcaggcattgttagacttggccagggagcctctactcattttgagaattcctttgagggttcatcatttgcagtgggtgacattgccctggcactgtactcagctctgttctcctactcaggctgggacaccctcaactatgtcactgaagagatcaagaatcctgagaggaacctgcccctctccattggcatctccatgcccattgtcaccatcatctatatcttgaccaatgtggcctattatactgtgctagacatgagagacatcttggccagtgatgctgttgctgtgacttttgcagatcagatatttggaatatttaactggataattccactgtcagttgcattatcctgttttggtggcctcaatgcctccattgtggctgcttctaggcttttctttgtgggctcaagagaaggccatctccctgatgccatctgcatgatccatgttgagcggttcacaccagtgccttctctgctcttcaatggtatcatggcattgatctacttgtgcgtggaagacatcttccagctcattaactactacagcttcagctactggttctttgtggggctttctattgtgggtcagctttatctgcgctggaaggagcctgatcgacctcgtcccctcaagctcagcgttttcttcccgattgtcttctgcctctgcaccatcttcctggtggctgttccactttacagtgatactatcaactccctcatcggcattgccattgccctctcaggcctgcccttttacttcctcatcatcagagtgccagaacataagcgaccgctttacctccgaaggatcgtggggtctgccacaaggtacctccaggtcctgtgtatgtcagttgctgcagaaatggatttggaagatggaggagagatgcccaagcaacgggatcccaagtctaactaaacaccatctggaatcctgatgtggaaagcaggggtttctggtctactggctagagctaaggaagttgaaaaggaaagctcacttctttggaggcacctgtccagaagcctggcctaggcagcttcaacctttgaacttactttttgaaatgaaaagtaatttatttgttttgctactcctcttttcttttaaaagggcccacaatgctccaatttcctgtctcctttagagagacatgaaactatcacaggtgctggatgacaataaaagtttatgttcctaaaaaaaaaaag

SEQ ID NO: 37344 - DNA, 2776 bp, Homo sapiens
tcctgtaatctcagcatgggaacaagcctttgtgtcacactgtgcaaccttcctccctttcttaaatgcttggggtgagagagaagagaggctagggtggggcatggaggacacagagagagagagtgctgtgtattccttccccgctactgtcctgtcctcagctaacttgctctgggacagcttccccagggctacagatactgcactcagctgactgtcctttcttctgggcccctggtcccagagcagagctgacaaaggagattcctgagagagcaccttcttatcacagaaagtgctgagccaagagctcctagctgccccttttgcagatgtgaagggccagtgaaccttggacccagatggttgcttaatactcctttccccctccctcactccttcctttgcgggctgcctcacctcctccacccttcttgcttaaatccataggcatttgtctggccttcccttttactgctggctgggaaggaggagcatcagaccacagatcctggaaggcacttctctccctgactgccgctcacactgccgtgagaacctgcttatatccaggaccaaggaggcaatgccaggaagctggtgaagggtttcctctcctccaccatggttgacagcactgagtatgaagtggcctcccagcctgaggtggaaacctcccctttgggtgatggggccagcccagggccggagcaggtgaagctgaagaaggagatctcactgcttaacggcgtgtgcctgattgtggggaacatgatcggctcaggcatctttgtttcccccaagggtgtgctcatatacagtgcctcctttggtctctctctggtcatctgggctgtcgggggcctcttctccgtctttggggccctttgttatgcggaactgggcaccaccattaagaaatctggggccagctatgcctatatcctggaggcctttggaggattccttgctttcatcagactctggacctccctgctcatcattgagcccaccagccaggccatcattgccatcacctttgccaactacatggtacagcctctcttcccgagctgcttcgccccttatgctgccagccgcctgctggctgctgcctgcatctgtctcttaaccttcattaactgtgcctatgtcaaatggggaaccctggtacaagatattttcacctatgctaaagtattggcactgatcgcggtcatcgttgcaggcattgttagacttggccagggagcctctactcattttgagaattcctttgagggttcatcatttgcagtgggtgacattgccctggcactgtactcagctctgttctcctactcaggctgggacaccctcaactatgtcactgaagagatcaagaatcctgagaggaacctgcccctctccattggcatctccatgcccattgtcaccatcatctatatcttgaccaatgtggcctattatactgtgctagacatgagagacatcttggccagtgatgctgttgctgtgacttttgcagatcagatatttggaatatttaactggataattccactgtcagttgcattatcctgttttggtggcctcaatgcctccattgtggctgcttctaggcttttctttgtgggctcaagagaaggccatctccctgatgccatctgcatgatccatgttgagcggttcacaccagtgccttctctgctcttcaatggtatcatggcattgatctacttgtgcgtggaagacatcttccagctcattaactactacagcttcagctactggttctttgtggggctttctattgtgggtcagctttatctgcgctggaaggagcctgatcgacctcgtcccctcaagctcagcgttttcttcccgattgtcttctgcctctgcaccatcttcctggtggctgttccactttacagtgatactatcaactccctcatcggcattgccattgccctctcaggcctgcccttttacttcctcatcatcagagtgccagaacataagcgaccgctttacctccgaaggatcgtgggtaagccgtgcatccttaagtccgctcagctattgcagagcttggtttttgcctttttctgtaaatccagcctccaaagacatctttgccttagccccttcttatgaacccttcggcttagtggaatcactcccctcacactgagttccattcagtgacacttgaactcagcccagctgacctcttctcaattccaactcaaagttctctttgtagggtctgccacaaggtacctccaggtcctgtgtatgtcagttgctgcagaaatggatttggaagatggaggagagatgcccaagcaacgggatcccaagtctaactaaacaccatctggaatcctgatgtggaaagcaggggtttctggtctactggctagagctaaggaagttgaaaaggaaagctcacttctttggaggcacctgtccagaagcctggcctaggcagcttcaacctttgaacttactttttgaaatgaaaagtaatttatttgttttgctacatactgttccagacttttaaaggggacaatgaaggtgactgtggggaggagcatgtcaggtttgggcttggttgttttagaagcacctgggtgtgcctacctactcctcttttcttttaaaagggcccacaatgctccaatttcctgtctcctttagagagacatgaaactatcacaggtgctggatgacaataaaagtttatgttcctaaaaaaaaaaag

SEQ ID NO: 37345 - DNA, 1267 bp, Homo sapiens
tcctgtaatctcagcatgggaacaagcctttgtgtcacactgtgcaaccttcctccctttcttaaatgcttggggtgagagagaagagaggctagggtggggcatggaggacacagagagagagagtgctgtgtattccttccccgctactgtcctgtcctcagctaacttgctctgggacagcttccccagggctacagatactgcactcagctgactgtcctttcttctgggcccctggtcccagagcagagctgacaaaggagattcctgagagagcaccttcttatcacagaaagtgctgagccaagagctcctagctgccccttttgcagatgtgaagggccagtgaaccttggacccagatggttgcttaatactcctttccccctccctcactccttcctttgcgggctgcctcacctcctccacccttcttgcttaaatccataggcatttgtctggccttcccttttactgctggctgggaaggaggagcatcagaccacagatcctggaaggcacttctctccctgactgccgctcacactgccgtgagaacctgcttatatccaggaccaaggaggcaatgccaggaagctggtgaagggtttcctctcctccaccatggctgttccactttacagtgatactatcaactccctcatcggcattgccattgccctctcaggcctgcccttttacttcctcatcatcagagtgccagaacataagcgaccgctttacctccgaaggatcgtggggtctgccacaaggtacctccaggtcctgtgtatgtcagttgctgcagaaatggatttggaagatggaggagagatgcccaagcaacgggatcccaagtctaactaaacaccatctggaatcctgatgtggaaagcaggggtttctggtctactggctagagctaaggaagttgaaaaggaaagctcacttctttggaggcacctgtccagaagcctggcctaggcagcttcaacctttgaacttactttttgaaatgaaaagtaatttatttgttttgctacatactgttccagacttttaaaggggacaatgaaggtgactgtggggaggagcatgtcaggtttgggcttggttgttttagaagcacctgggtgtgcctacctactcctcttttcttttaaaagggcccacaatgctccaatttcctgtctcctttagagagacatgaaactatcacaggtgctggatgacaataaaagtttatgttcctaaaaaaaaaaag

SEQ ID NO: 37346 - DNA, 1058 bp, Homo sapiens
cagagtcaacagctgttgcagcatgagcgatacgcttggttctcctaactagcaccttcccctctcccctgactcagctggtagcccctcctccccgcacctgcccaaaggtcactggacaggcatttgtctggccttcccttttactgctggctgggaaggaggagcatcagaccacagatcctggaaggcacttctctccctgactgccgctcacactgccgtgagaacctgcttatatccaggaccaaggaggcaatgccaggaagctggtgaagggtttcctctcctccaccatggttgacagcactgagtatgaagtggcctcccagcctgaggtggaaacctcccctttgggtgatggggccagcccagggccggagcaggtgaagctgaagaaggagatctcactgcttaacggcgtgtgcctgattgtggggaacatgatcggctcaggcatctttgtttcccccaagggtgtgctcatatacagtgcctcctttggtctctctctggtcatctgggctgtcgggggcctcttctccgtctttggggccctttgttatgcggaactgggcaccaccattaagaaatctggggccagctatgcctatatcctggaggcctttggaggattccttgctttcatcagactctggacctccctgctcatcattgagcccaccagccaggccatcattgccatcacctttgccaactacatggtacagcctctcttcccgagctgcttcgccccttatgctgccagccgcctgctggctgctgcctgcatctgtctcttaaccttcattaactgtgcctatgtcaaatggggaaccctggtacaagatattttcacctatgctaaagtattggcactgatcgcggtcatcgttgcaggcattgttagacttggccagggagcctcaactcattctggttattcctcaatgtgttcatcatttgcagtgggtgtcactgtaatgactcggtggtcagctcccgttcgggggtcgcgtaggtagttagcatgccagagtctcgttcgttctcgaatc

SEQ ID NO: 37347 - DNA, 1482 bp, Homo sapiens
tcctgtaatctcagcatgggaacaagcctttgtgtcacactgtgcaaccttcctccctttcttaaatgcttggggtgagagagaagagaggctagggtggggcatggaggacacagagagagagagtgctgtgtattccttccccgctactgtcctgtcctcagctaacttgctctgggacagcttccccagggctacagatactgcactcagctgactgtcctttcttctgggcccctggtcccagagcagagctgacaaaggagattcctgagagagcaccttcttatcacagaaagtgctgagccaagagctcctagctgccccttttgcagatgtgaagggccagtgaaccttggacccagatggttgcttaatactcctttccccctccctcactccttcctttgcgggctgcctcacctcctccacccttcttgcttaaatccataggcatttgtctggccttcccttttactgctggctgggaaggaggagcatcagaccacagatcctggaaggcacttctctccctgactgccgctcacactgccgtgagaacctgcttatatccaggaccaaggaggcaatgccaggaagctggtgaagggtttcctctcctccaccatggttgacagcactgagtatgaagtggcctcccagcctgaggtggaaacctcccctttgggtgatggggccagcccagggccggagcaggtgaagctgaagaaggagatctcactgcttaacggcgtagtagcctagatatagtagggagaacatagatacgagctacggagcatactatatagtattacaccccacaaagggtagtagctacataataacacgtgcctaccatatataggtactactactactaggtacatactagggctagtacaggggagcctactatactaccgatactatatagggagagccctatatagtatgatagacgggagactaggggcaaccacgcaatataaagaaaatactaggggccaaggataatagcctaataatacctaggaagggacctataggtgaagggatataccctatgactattaacatacaggagctactagagacactaccctagctacaatacaatatagaaagcacacaaccaagacacaaaaagacccatgcaatatagcaacaatacaatacatatattggcccgagacattaacaatttgcataacaaagacactacttactatccacccggaaatcataggaatataagacacccacctatattgctttgaccaagaccagacactagatagagtatagggcaagcacttgacaataaaaagtaactactattaaacctatcaaattaaacttgtgcccatatttgtcaacatcgagagaaaccctggtaaacaaagataattattacacataatgtaaaagataatggaagatcaccagacataagatacaaatatataagaaagacaaaac

SEQ ID NO: 37348 - DNA, 640 bp, Homo sapiens
gttagacattttacttgagtcttttcatatcacggtatgcctttattttaccctcatatataattaattttcatctgggcatatatttccagattagaaatcatttcttttcatacattttaaggaatttatacatttgcatctgaaattgtattcattatcttctagaaaccaagagtggacttggtatccgtctgattatattttctttgttggtaaagagcctcttttttccctttttattttcatcttctctttctctagtgtttataatcttatttttatgaatgtagtctaattatttagaacactgtctccgagtatgtgtttatttgggtttgtgttttgaacattgcctccaggtgcgagtttatgtgtgtttatgtttcctatttgaggttggacacttagaaaattttctcaattcgaaaactattttccttcagcactcagaaatttttatcaaagattatttccacgattatttcctgtccttggtttttcgtgttcttaacctagaattcaattgtttaatgttagaccttacacatcttcaatgtatcatatatatttcactcatattatttattgtcatatcttttggactattgtgtgaaagcaataaatgtatattacttta

SEQ ID NO: 37349 - DNA, 973 bp, Homo sapiens
gttagacattttacttgagtcttttcatatcacggtatgcctttattttaccctcatatataattaattttcatctgggcatatatttccagattagaaatcatttcttttcatacattttaaggaatttatacatttgcatctgaaattgtattcattatcttctagaaaccaagagtggacttggtatccgtctgattatattttctttgttggtaaagagcctcttttttccctttttattttcatcttctctttctctagtgtttataatcttatttttatgaatgtagtctaattatttagaacactgtctccgagtatgtgtttatttgggtttgtgttttgaacattgcctccaggtgcgagtttatgtgtgtttatgtttcctatttgaggttggacacttagaaaattttctcaattcgaaaactattttccttcagcactcagaaatttttatcaaagattatttccacgattatttcctgtccttggtttttcgtgttcttaacctagaattcaattgtttaatgttagaccttacacatcttcaatgtatcatatatatttcactcatattatttattgtcatatcttttggactattgtgtgaaagcaataaatgtatattactttatttattggtaatgctcttcattttcaaatttaatacacacaaattgtgcatacccacacacatataccacagatatattcattttcaggatttctttaagtgttattttaaaaataatcatattcttattttgtgaactgtgggatttcttgaaactttttgaaaactctcattagtctgtgtttgtgtggtttctttaaattatctcttccttcagaattacttttgtgttttgaatttgagtctttgccattcataaggcgggctttccttgaataccagataactctgagtttcctgttcatatttaagaataaataacctaatttgaag

SEQ ID NO: 37350 - DNA, 369 bp, Homo sapiens
ccagtcctagctgcttttactggtgattttctaaattttatttttcagtttcctgataatttattctttcccccaaactatagtgccaatagcctgagtaagaatgagactttcttacttagtgtagttcttctttcttttagcctccttgcactgaatgaagctattatctctttctttttaaattgaatattttgaataggcaatatagttcaaaaataaaaagaataagaaggcatgtcatgaaaattctcctttccactcctttcatcatgcttagttcctaaacaccccaaccccaataatcagtattcttagtttgtattctatcttttcagagtttctttttttttttcaagactgagtctt

SEQ ID NO: 37351 - DNA, 368 bp, Homo sapiens
gtctgatccctctctggagtataagctcactgagtacagagacctgtctcaccatggtctccctagcgcagcctggcacatgacagaggctgaaatatttacggaatgaacaaacggagaatgacctgtaacactcaggccttgcatttcatctgaggctcaaagagatggagtttgtccagagattgcaggctctgagccctcacatctcctatggccttatttccatctggcttctctggggtcctgggtatgaggtcctagctcaagtcaagacatggagacatcagagctgggtaccacctcttgcaccctcattgcaccctagccctctctggggttcctgcagtcctcccagaacctctgca

SEQ ID NO: 37352 - DNA, 825 bp, Homo sapiens
ctagtagtgggagaaagggagaacaagtatttgaaaaatggccaaaagctaggctgaaattcagactgtttataactcctgtggcttccattaatctctggtggcttgagcaggtcagagaggtaaactgtcctctcaaaaggactaagtgtacaatgagattccgagatacccatgaagataagcctcagagagcaaaactatgccagcatgtggccacttttgaaccatacatcataaatagggtagccatagagcagatttatctcagacaactcagttttattgcctgtttttctggcaggcataattattaagattgcagctcttgctttcaaaatgtgcctcggttgagatagtaaattacatagtcactctaatccataaggcaaagggacatgagacaaatcccctgagacaggggaaatgttctctgtattttttgaggcagaagttgaaatgagcagaatcagggcaaagtggaagagagcagggaggaataaacccattgtgaagtctctccttaccatgagctgggttccatgggggagcactttaatgccagtgctccataccgaagctagagatgaagaagtgagtagaagcagatgactttagggagcctctgccaaacatctaattctataaattctgctgggagggagcaagtgtgctgaaatttgagagaagctttaaaaggaaactagtataaggattctccactgataggcatttgagcttccaatgatgatatacaacaatacaagaaatctgcaagttttataaagcacaaaattagaaaaaactactttaaatttcaaatgg

SEQ ID NO: 37353 - DNA, 297 bp, Homo sapiens
acaaaacttcttgaaagagttatgtttgttgcttttttactgcacactctttctgaatccactcctcttgagtcttggccctctctttttccctgaaactactctcactatggtatcaatgactttcatatggccaattcccctggtcacttctttgtatacatatattttttcttttttaaaaattgaggtaaaagtcatttatcataaaattcctattgtgtataaattggccagcctgaagtattttgttatagtatcggaatggagtaaaatacttaaattttctatgtcttc

SEQ ID NO: 37354 - DNA, 439 bp, Homo sapiens
gctcgactgatccacccatctcagcctcccaacgtggtgggattacatgaggtcaggggttcaagacctgccttggcctgttgaagtgctgggattacagcgtgagccaccgtgcccagccatggacatagagaactgctttctgaatgctttggaagaacacaggattggcattgctgggagggcctctgccaaagagggctctccaggccgagggaagacagaggtggatacaaccctttgtgaggagtgtggggcactgggaccctctagacagccagtgcttgccacacccttgtgcctgccagaactgcagccttgaggcagtcccttgcctggttattgaagtggagatgggatggtggggggtgagttggatgtcccccgggacactattactcagctttgaagctgcagcagttcccagcacacgtgaagt

SEQ ID NO: 37355 - DNA, 368 bp, Homo sapiens
gccatatttgaccattgtcttacagattggtggttatttatttaatcagttcagcctgtgttttggcattaaatagataatatcacatgatttgttcattcattacttaacaattattaggagcctattatattctaagtgctgcgctgggtatgtggcatattaaatgagataggacttccctttaagtacatcattgtctaatgatcacacaccaaataattgtactataccatgataagtctaggaatggagatgaacacaaggtttgtcatttatattagtgtatttttacaagaccaaaaagtgtttttctatatgagttgtatcttctctgttgagaattctttctgcattctagtaaaaaa

SEQ ID NO: 37356 - DNA, 214 bp, Homo sapiens
acgatgacatcacaaaggaacacttactaagaaacacttaaggcctgaatgaatcatgttaaatttacatagtcaatcaaggatgtctgcatttagagaaaagcactctaaaagattaacactacctgtttttaagaaatcaattactttatcatcagtcataacccaactggttaatgaaccatactagtatttatatcatgctagagtacaa

SEQ ID NO: 37357 - DNA, 666 bp, Homo sapiens
ccgtctcaataataatactgatacttaaaatatctttgcgaggcccaagtaggtttacagaaaatcatcttaggacaattttttaatttgagaaagtcactttggcagttctttgcacacaattttgacaagtgtatgtattataagttgtattgtattcatatttaaaaggaaattgggtagtttgccttttgaagaatgcgctttttaaaaaggaaccatatcagatccttatgaagcagccgatgcctgccatggttcctacaggtcctgtacagactcggggctttgtccaagtctccactaaacatgctaagcttcgatgcgccctggagaatttccacggggtgatccacgcacctccatgagaccctgcagcttgcttgtatgactggaagcattggataagcttcgcgtgctggctctccagttctttccttctctttacgactgttgtagcttttagctaatggagtggtgcggtccaagtgcggccacctacgggaggtgcagggctgcctcggaagctggcaggggaccccagtctttgcgttcataaagacatttagaaccggatgaatgttgttccttttttgaagttgttattaaagtaggtgcaacaaccaaaaatcaataaataataaataaattgactaaatatttttt

SEQ ID NO: 37358 - DNA, 208 bp, Homo sapiens
tcaacagtcctcaccagcctcggcaacatagtaagaccccatctctgaaaataaaaaatgaaaaattggcccagcatggtggcacacacttgtagtctcagctactctgaaggttgaggcaggaggattgtttgggttcctgtcatatgtaatcaacagtcctcaccagcctcggcaacatagtaagaccccatctctgaaaaaaaaa

SEQ ID NO: 37359 - DNA, 357 bp, Homo sapiens
ggaaagtctagagtctgcagggtggaccaggaggctggagacccagggaatagtcgatgttgtagtttaaggctgaaggctgtctgctggcagagttcttccttctgtgggggaggtcagtctttgttctgttaggatcttcaactgatagatgaggcccaccattgttgcaggatctgctttactccaagtccaccgatttaaatagtcatccgctgggtacggtgcctcaggtctataatcctagccttttgagaagctgaggctggaggattgcttgagcccaggagttcaagaccagcctgggcaatgtggtgagaccctgtctgtagaaaaaatcagaaaaattagttgggc

SEQ ID NO: 37360 - DNA, 395 bp, Homo sapiens
gacttgatcctgtaatgggttgagacttttcagatcttggtatgaaatgaatatattttctatgtggatctgatgtgaatgttttgttttgttttgttttggagacagggtctcactctgtcacccaggctggagtgcagtggcgtgaccatggctcactgcagcctctatctcccaagttcaggtgatcttcccatctcagcctcccgagtagctggtactacaggtgcataccaccacgcccgggtaatttttgtactttttgtagagatgggtaatgtattgagaccctgtttctacagaaaaatttttaaaaattagccacatgtggtgatacatgcctggagtcctagctactcgggaagctgaagtgggaagattgtttgagcgtggga

SEQ ID NO: 37361 - DNA, 387 bp, Homo sapiens
ctcagtgcggtgtgtagatccctgcagctctcaaggggaaagcatttccctcatggggaaaattatggatgccccgatggaacctattgtctactctctgcataacactagctttggtgacctggtctctggggataaaattaaaattagtgccaggcacatacaaccctttcttcttccctgccatctttatagaaaccctcaatagagttctaatgcccacatttgacaatgatgtcttttgggaggtcaggaagcagagagagtaaaaaaaattctctcccaatgtggttttacaaatgggcattagccacaggctgttccagctcaagggtgaagagtagcacaaactcttttctttctctgcaataaaaagaatgaaattac

SEQ ID NO: 37362 - DNA, 416 bp, Homo sapiens
ttcttttaaaaaatgtattatttagtttttgtggagatggagtgtcgctatgtttcccaggctggagcacagtggctattcacaggcactatttttgcacactacagctttgaacttctgggctcaagggatcctcctccctcagtctccctaatattgggaatacaggtgtgcacccccagcctggctctatctagtttcttaaaaaaaaacaaatataataaaatagagaaagaaaggaaaatgaaaggaaatgaaagaaaacaaatttcaagtaaaaaaaaagtaaagtggagaaaaacaatagatttttaaaaggacttccagttgcaatgttcagttcagatctcaactctttttcttttctttgagacggagtctcactccagcctgggggacagagctagactccgtct

SEQ ID NO: 37363 - DNA, 762 bp, Homo sapiens
tcgtcgacattgaccctgtggacctgctttctgtcattgccttccctgccctcagtctcaggagcctgagactggcttctagatgggtttggacaatggatagcactggcaggaggagagtagagttgctgtgtttattttcctggtttcctcctgcaagatcatgtcatgttggctctcccagagggcatggctcatatcatggggccctctttgtctttccaagcctgtagatgatagcagcttcaggaggttgcactatcttttgactgtgcccacacccttcacaccttgtaaatagtccctttcttaaactctccttaaattacccagtttgggggtgctatctgtttcctgctgggatcctgatggctgtgttgcccaaacctaaatgtcagtcatgcttgcagttacagctgtgttattttcctgtagtactgatttccctcttttattaaaagttctgtggtggctgggcatggtggtttatatgtgtaatcccagcactttgggaggccgaggcaggaggattgcttgagtccaggagtttgagaccagcctaggaaacatagtgagactctgtccctaccaaaaaaaaaaaaagaaaaaattagccaggaatggtagcacaggcctgtagtcacagctacttgggaggctgaggtgagaggattgcctgagcccaagagttcaaggttacaatgaactatgatcctaccactggactccaccctaggtgacagagtaagacccagtctctta

SEQ ID NO: 37364 - DNA, 441 bp, Homo sapiens
acttatgctgagctttaaatgacaaagattcatataatccaagagagaagtattatttagagggattcttttaccatgtgatatataataaatgcatccaatgttatacatcaatttaaaaaacaagtaaataactttaaagaaaagataactactggccaggtgcagtggctcacacctgtattcccagcactttgggaggctgaggcaggcagatcgcctgtcaggagttcaaggccagactggccaacatggtgaaacctcatctctactaaaaatacaaaaatgagtcgggcatggtggcagagacctgtaatctcagctactcgggaggctgaggcaggagaatggcttgagcccaggagctggaggttgtagtgagccgagattgcaccacttcactccagcctgggcgactgagtggagcggaactctgtctca

SEQ ID NO: 37365 - DNA, 376 bp, Homo sapiens
tactatctatctttagagatctcaaagcaatgagtatgttgaaaataatagaatagaggacatgtgatgaattaggagtcaagccagttattcatacacctatacaaaagtgcctggagtttttaaaaaagctgtaggaagagaggatgtaaacaaatgctgcttataaatcatttttcttcaggcagtgggtaaaatgagtgatgcataggaatttgcatttctacattggcttacgctatcacatttaatcataacttgattttcttaataaaacatttctttctatagaacacatttattatttaccataatcatgttttaattttttgaaacatcctagtctatcatagttttagatatattgttgttcatt

SEQ ID NO: 37366 - DNA, 504 bp, Homo sapiens
tagggctgctgtagggattaaatgagatggtgcagatatagatctggctcatcacagcttcagccagcatgggagctgagtttgccacccttgggatgaaggagggctgggaagatccgccgtgcggcctcagcgaggcctgctgtatgtatgctgggcctcagtttccccaactaggctccctgagaacccatctccttggaccggcttctgagatgacccagcactggccccacatgcaacatgtgaagtgaaggggctgaaactctatgcagcagttcagctctgcctccaggtcaccagcacagagacagaggtcaccctgcccgccccaccggccgggattagcccgaaatgccttctgcctctttatggaagagacaagcagatggctgttgagcctgttgggattagagctggaccaagggagggagaggccccagaaccagcttactgcagggaggggccacctttggccctgactcagcagcccccagctcggca

SEQ ID NO: 37367 - DNA, 525 bp, Homo sapiens
gaataccccgtgctaccagaatggctgtcttagtacttcgcctgacagttgtcctgggactgcttgtcttattcctgacctgctatgcagacgacaaaccagacaagccagacgacaagccagacgactcgggcaaagacccaaagccagacttccccaaattcctaagcctcctgggcacagagatcattgagaatgcagtcgagttcatcctccgctccatgtccaggagcacaggatttatggaatttgatgataatgaaggaaaacattcatcaaagtgacatcctcaggacacacccatgtggctcctggacaatccaagagcagccaaatcctgcttttccagtttggctccacaagtcctccaggacagagccctcaaagcaactcccaacgagttctcaggattcaggctctggcttcaaccaaacagaactcattttgaacaccctgactgcatttttgcttttagaaagttagaataaatatggcgctttgggatcacatagttgatggagagga

SEQ ID NO: 37368 - DNA, 668 bp, Homo sapiens
gaataccccgtgctaccagaatggctgtcttagtacttcgcctgacagttgtcctgggactgcttgtcttattcctgacctgctatgcagacgacaaaccagacaagccagacgacaagccagacgactcgggcaaagacccaaagccagacttccccaaattcctaagcctcctgggcacagagatcattgagaatgcagtcgagttcatcctccgctccatgtccaggagcacgtaagcactgagaaaaacgttgctttttgtccaattctctgttgataatgaccacacaatgacctcatggcattaaaatacatgagaaacaaaaaaaaaaaaaaaaaaaaaaaaaacaaaaaaaaaaaaaaaaaaaaaaaaaaaaaaaaaaaaaaaaaaaaaagggggggggggggcggacccaaagaagaatacaaaacaaacccaggggggcagacgaggcgacaccccacaagaagagaagaaagaagcacggccacatagagtgtgtctcacagaaagacaccgggcgggcaaacaacagcgaggggggggttccccccaaaaaaaaagcgcgcgcgggggaacacaacgagctacgcatcacaaccccccgaggggtgtgcgagacacacagggggcaccaagacagcgacgcccagggcgcatatta

SEQ ID NO: 37369 - DNA, 2694 bp, Homo sapiens
tatgctttaactggacagaagaaatatttctcagacaatgtcgatgctgctgatgacaactgagatgcctggagctcacccttgatggagacttccttggtgattggagatgggggactctggtggcagaaatggctttggggtaggtgtgaagtcgcttcagtccctctgagttgcctcttctggatggaacgtgtgtatcaacaacaatgaaatgcacctccgtgtgcatggaggcggctgatgagaatacagataggccagtcctcgctcttccctccagaaccggccgctcccggtctgacgttggagcacgtgaactaagagtgacaattttttctacttgcttctgtgaataaagtgttctacagtcagcccagcactaaactcaccagaaaagaggagggaacagcacggagccattcatctggaattactcgatgtgcagaggctgccccttggccgcacttgggaacatcgtggacatcttccttcctctcaggctcctcctgacagactcctggcagcactggagacctcaggactatggagatcagaattgtaatggctttgtcatctcagtgtggccactcctgaggcaagaggctcctcctgggagcaggagagagagagtttgtgatgttggttggaaaataggatttatggatgcaggagggccgtgctaggcccctctgcccgcttctctccctgctgttggcggtgaccaggtctcaggagcggagacgaggctgttgtgagtgaaacagaagcccctggcatagggccagaccctaggcctgaaaaggatgcaaagcctgctgttttcaggctgttgggaagaatcgtgcgtaccgagtgattatgatgaaacgtatcccagagaggaaatgaatgggacctgaaaagtgggtctgccacatccctggtagcccgcctccaagagcactacactccccccagccccaccggccacactacatgacgtgggaaggctgtccgttcatccttaccctggggactcaagtgtgctctgcggagtgagtcacagccctgatgtgcaccctgcactactctttccccaggtgcgccggagacgcaggcttgctcatttccgtcctgacacagctcgctgttcctgcggtggtcagagtccccctgtgctgtgtcagctcctggacactactagtctttcacatgataaagcgcgagcactttttcgcttttgcagtatttggggaaattctaacacatttcccggggatttgcccaggtccctccacctcccacggtgggtaactgtgtggattctgcacctggcaatcggcgctcccctttggaaacacctgggggccctgtttcttccagcctggtccttggtttctaccccagccgctttcagccggcacctgcatgggactgcctggagggccacggtccagggaaggacaggtgggaccctgaccatgacagatctttctaaaacaataaagtcccattgatgacaactgcagtgggatgaatgccattgcagcggtcatgctgggagctgccgagagcttacaacaaaagcagttcctctcaagacactgcttgcatcttccctccacgcctctcggtgcatttggaacttgtttatgcgctggtataactcgagtcagctgcttatttctgtgcccttgcactcacaggttccttcattaacattttaaataagtggctaaaaaaactcctctggaggttgtttttgaaagagacaggaaaaagaaacacacagtacctggattgttttgacttattttcaagcgactcagctgaaagccggtgttgcatacacaatttcctcacgctgacccagcctgactaagacttgataaaaggcacagcccttggcagcaggcagtgccaatgtggacagtgtacactaagctgtgagtgtgtgcacgggcgagcacatgtatgtgtactcatacatccagatgaactaaagggacactgggctttgtgctggcaaaggttacgatgctgctgtagcttggctgtgggccccaggcagtgtcagatggaacctgctttgatggcgtgttgttcagtgtactcagtggggtctcacatggcccgaggacccactgtgagcactccgcccgctgtggcacagaacacggctggggtcatcacagcccaggtctttattgaaaggcggctcatatagaacccatttggccaggtctgggccatctctctgcctctgccctatcttggctgcctggaggggcccaggcccaagaggattctttacccctggaagagctccccaggcattcagcctatggcccttgacatttggctgcaggttaccgtcagaatcaacaccatatcctgaggaagccctggtatttccccaagtctgcctatgtattagacactctaatcaatgctaacacagttcagtttttgagggaactagttttgtcataatactacacccctctattgtttttaaataagaaaaaaaaaaaccccacgaaactttccatcaaagcaatggtccgtgttggcctgatgctttaagaagtttgaggacggtaggtatggaggcaccttaacaccagtttttgagcagaagtctagaagctgatttagaactacacagctatggatacacctgatgaaaaccgcaaaaggcgatgacaggcc

SEQ ID NO: 37370 - DNA, 1580 bp, Homo sapiens
tttcacatccatcagagagtccacactggagagaaaccctacaagtgtgatgtgtgtggtaagggcttcagcacaattcaccattaatatgccatcggagagtccacacaggagagaagccatacaagtgtgaggcgtgtgggaaaggctttacccgtaatacagatctgcatattcatttcagagttcacacgggagagaaaccctataaatgtaaggagtgtggtaagggcttcagtcaggcttcaaatcttcaagtccatcagaatgtccacactggggagaaacgattcaagtgtgaaacgtgtgggaagggcttcagtcagtcctcaaagcttcaaacccatcagcgagtccacactggagagaaaccatatagatgtgatgtgtgtggtaaggacttcagttatagttcaaatcttaaactacaccaagtaattcacactggagaaaaaccatataaatgtgaggaatgtgggaagggcttcagttggagatcaaatcttcatgcacatcaaagagttcactcaggagaaaaaccctataaatgtgagcagtgtgataagagcttcagtcaggccatagattttcgggtacatcagagagtccatactggagagaagccatacaaatgtggtgtctgtggtaagggcttcagtcagtcctctggtcttcaatcccatcagagagtccacacgggggaaaagccatacaaatgtgatgtgtgtggaaagggctttagatacagttcgcagtttatataccatcagagaggccacactggagaaaaaccttacaaatgtgaagagtgtgggaaaggctttggtaggagcttgaatcttcgccatcatcagagggtccacacgggagagaaaccccatatatgtgaggagtgtggtaaggccttcagtctcccctcaaatcttcgagtccacctgggtgttcacaccagggaaaaactctttaaatgtgaagagtgtggtaaaggcttcagtcagagtgcacgtcttgaagcccatcagagagtccacactggagaaaaaccatacaaatgtgacatatgtgataaggacttccgtcaccgttcacgtcttacatatcatcagaaagtccatactggtaaaaagctttagaaatgagaaatgtgttaccaacttttgtctgaatgcacatcttcaagtttttggctagtccatgctggtggtaaaccctgtaaaactactgagagtggaagggggtttgttcacacttggaatctttctaacaaatccatcaagatgataacacagaaccatgaacaggaatagaactcgtatttaggggagaaatagggctggtggctctcttggtaagatctagttaatataaatgatcacctttcattgtgaatatatgcctgaagataatgtgtggaaggatatttgccatatgctaactggttttttggccagggagagttttgggttattatcccttttctttaattttcattttatacttacagtgatcattattttcataaaagctgtaaagctatgaaaaatgaataaaattactaaaaattttctgtaaaaaaaaaa

SEQ ID NO: 37371 - DNA, 1454 bp, Homo sapiens
tttgtccagagtgtgggaagggcttcagtcaggcttcaaatcttcaagtccatcagaatgtccacaccggcgaaaaaccatatcagtgccccgagtgtggtaagggcttcagtcaggcttcaaatcttcaagtccatcagaatgtccacactggggagaaacgattcaagtgtgaaacgtgtgggaagggcttcagtcagtcctcaaagcttcaaacccatcagcgagtccacactggagagaaaccatatagatgtgatgtgtgtggtaaggacttcagttatagttcaaatcttaaactacaccaagtaattcacactggagaaaaaccatataaatgtgaggaatgtgggaagggcttcagttggagatcaaatcttcatgcacatcaaagagttcactcaggagaaaaaccctataaatgtgagcagtgtgataagagcttcagtcaggccatagattttcgggtacatcagagagtccatactggagagaagccatacaaatgtggtgtctgtggtaagggcttcagtcagtcctctggtcttcaatcccatcagagagtccacacgggggaaaagccatacaaatgtgatgtgtgtggaaagggctttagatacagttcgcagtttatataccatcagagaggccacactggagaaaaaccttacaaatgtgaagagtgtgggaaaggctttggtaggagcttgaatcttcgccatcatcagagggtccacacgggagagaaaccccatatatgtgaggagtgtggtaaggccttcagtctcccctcaaatcttcgagtccacctgggtgttcacaccagggaaaaactctttaaatgtgaagagtgtggtaaaggcttcagtcagagtgcacgtcttgaagcccatcagagagtccacactggagaaaaaccatacaaatgtgacatatgtgataaggacttccgtcaccgttcacgtcttacatatcatcagaaagtccatactggtaaaaagctttagaaatgagaaatgtgttaccaacttttgtctgaatgcacatcttcaagtttttggctagtccatgctggtggtaaaccctgtaaaactactgagagtggaagggggtttgttcacacttggaatctttctaacaaatccatcaagatgataacacagaaccatgaacaggaatagaactcgtatttaggggagaaatagggctggtggctctcttggtaagatctagttaatataaatgatcacctttcattgtgaatatatgcctgaagataatgtgtggaaggatatttgccatatgctaactggttttttggccagggagagttttgggttattatcccttttctttaattttcattttatacttacagtgatcattattttcataaaagctgtaaagctatgaaaaatgaataaaattactaaaaattttctgtaaaaaaaaaa

SEQ ID NO: 37372 - DNA, 1197 bp, Homo sapiens
tgccccgagtgtggcaagaccttcaatcagcagttaacccttaacatttgtagacttcatactggagaaaaaccatataaatgtgaggaatgtgggaagggcttcagttggagatcaaatcttcatgcacatcaaagagttcactcaggagaaaaaccctataaatgtgagcagtgtgataagagcttcagtcaggccatagattttcgggtacatcagagagtccatactggagagaagccatacaaatgtggtgtctgtggtaagggcttcagtcagtcctctggtcttcaatcccatcagagagtccacacgggggaaaagccatacaaatgtgatgtgtgtggaaagggctttagatacagttcgcagtttatataccatcagagaggccacactggagaaaaaccttacaaatgtgaagagtgtgggaaaggctttggtaggagcttgaatcttcgccatcatcagagggtccacacgggagagaaaccccatatatgtgaggagtgtggtaaggccttcagtctcccctcaaatcttcgagtccacctgggtgttcacaccagggaaaaactctttaaatgtgaagagtgtggtaaaggcttcagtcagagtgcacgtcttgaagcccatcagagagtccacactggagaaaaaccatacaaatgtgacatatgtgataaggacttccgtcaccgttcacgtcttacatatcatcagaaagtccatactggtaaaaagctttagaaatgagaaatgtgttaccaacttttgtctgaatgcacatcttcaagtttttggctagtccatgctggtggtaaaccctgtaaaactactgagagtggaagggggtttgttcacacttggaatctttctaacaaatccatcaagatgataacacagaaccatgaacaggaatagaactcgtatttaggggagaaatagggctggtggctctcttggtaagatctagttaatataaatgatcacctttcattgtgaatatatgcctgaagataatgtgtggaaggatatttgccatatgctaactggttttttggccagggagagttttgggttattatcccttttctttaattttcattttatacttacagtgatcattattttcataaaagctgtaaagctatgaaaaatgaataaaattactaaaaattttctgtaaaaaaaaaa

SEQ ID NO: 37373 - DNA, 177 bp, Homo sapiens
caattgaaaatcaaaccatgcataagacatgatccctgtccaccaggaagatcacagtctagcagagataagaggaagaaggcaaactgaactgtactccactgtagagagtgcagtaatagagcatggatctgaagaggtgtgattcattttccttaggtgtctgcctctgctttt

SEQ ID NO: 37374 - DNA, 241 bp, Homo sapiens
ctcagcctccaagtagcctgggctgcaggtgtgtgccaccatgattggctaattttttttttaattttgtgtagaaatgggttctatgttgccttgcctaggctagtctcaaactccaggcctcaagccatcttcctgcatctgcccccgaaagtgttgtgattacaggcgtgagccactgtgcctggccccaaaacagtgtttttaaaacttttatctttgctactttcttagtaagtaa

SEQ ID NO: 37375 - DNA, 425 bp, Homo sapiens
ttttacaatgctgtgaacaacattcactcctggaaaacactccaatgtcttacatcttgaggctgtggggatttttttttcttttggtttaaatgttgcctttcctatctttctgcatatcaatttttcccctgcccaagtcacaggcttggtagtaaccatcatgtttactgctgttccttcacatgtggttctctgaggcttctgagcaccagaattttattaaacagagctactcacaccataaagatggaattctgccagatctgaatcatagaataacaccagaattgacttcagaaatcatcttctctaaagatttgcaagatttttaaacagcacatgcctttgtaaaatgaaatcatcagtggaacaccgtatataaaataaaattaataaaaactactatggctggagaggtgaaa

SEQ ID NO: 37376 - DNA, 501 bp, Homo sapiens
gccctaatttagccaatttagcacactggccctaatttagccaatgtgcccactgtatcaagagagttgatgagaaagacacgagacagagccctgatgcattgtgtgatcgcctgcatccagccatgcctgaagtccaccttgatgtccttgttccatgcgccacatttccattttcacttatgctgcctgagttttgtttctgtcacttacaacccagagtcctgggtaactggagtctggagaacagcatgggtcagaggtcaggtttggctggaatgaagtgaaatggagccacatgtcttaagaagagacacaatgatcttccagtgtgaaagagccaagaccagttttgccaggagctggggccgacagtggcccccgtcacttgctgatgtctgtggtcaaggaaagcttgagggagagcaagtggaacgcagggcttctacactttcacaccccctgatttgtggttgctttatttagctagttagttttgaa

SEQ ID NO: 37377 - DNA, 1208 bp, Homo sapiens
gcacagctgtaatcccagctacttgggaggctgaagcgggagaatcgcttgaacccgagtggtggcggttgcagtgagctgagattgcaccattgcactccagcctggatgagagagtgagatcccatctccaaaaaaaaaaaaaaagaattaaaaaaataaagatttaaggaagtataatttcaaacatgagaatattctgctagcaccagcaagagaaagacctgcaaggcagaaacgaagcatgatctgactttgttttagtaaagatttaagattagcagtgagaaagccatgcaaccacaggctttgcaagttgttagagttagttccccggaatgtgtatgaagcagaaaagaacctgtttggcactgataccttcagtcacctccattcgcacaatcactgtcagaaacatcatctcatctgaccacctgtctctgtctccaccaccattcttgtcttttgcttgggctacttcagttgccgcctaactacgtgattcatctcatcaatcactcttaactaagagcctttgcaccactattgatttccctggagctctcttccttctccttcacctagttaccttgtttttatcgctcagagctcacttaaacctcactcatatcttttcctgcttcaccacctctccaccccaaattagatcacatttttgttacacatttccaaaggactctgtacttttttttcaaatcacttaattacatagtcatttcattgtttgttaaatacctgtctctctgcaaacactccctgagaactttcacgagagtgttgggcccgccattatttccttagtgcttcccagagacagaacacaaaccagattttcaggaaatagtgttgaattagtaaatatcagatgtggacgaaagcctggcaaagtacacatacatgttgatgcccactccctctccagctctctgtggcacctatggtctagtatattaggcacattctggggtatcagccccgctttcaacaattctgtcttctccaggattttgcccactccacttcccaaacatatgtgggaactcctaaaagccatgtttgtaaatgtgaagttcgatctagagatagaccaatatacttaagcatgaaacattcctcattagctgttttaaaaatgaaaaagtaccacaaaattgagaagtatcgtttatgtttcttaagttgctttt

SEQ ID NO: 37378 - DNA, 475 bp, Homo sapiens
ccaggtcactctgactggaggccccagctcttaacctctcagaagtacactgccttttctagagtgtagagttggaaggaactccagagatcgcttgattcagtccttatttttagatgtggaaatggaaaattaaatggcttgcccaaggtcacagagccactagctgagaagctaacttggcctcctgatgcttccttcgtgcccccactgcagacccacgcctgctccatgagcatccaataactcttccataaagatttatcaaaaattcgaggatggagcatcagtctcgacagaatttattttcaggtgctgcaaggcaagactctacatgggcttgggattgttcctacacaaagacaagctggccaagttgaatgattcaggagttgctttaaatcaccagatacatgaagcaagtaggtggcggcatttttctaaacagggacaagttacacatttcaactacggc

SEQ ID NO: 37379 - DNA, 686 bp, Homo sapiens
cttctatctgtatttgatcatggagtgtatactcagaagccaacagatgattcagaatgtgcaggattgtgcaggatcccacagagaaaatgcaaagacaccacaagaatatgtcagtgttacatctgagaccctttacagcagcatctgttgggttttatgtgttaagtgtacaaatttaaccttcttttgcaagcacttcttatagtttaaaaaaatttagaaaatagataagacagaacaatttgtaaatgttacatgtgggttaacagaaatgttattttcacatttgatttcatttctgaaaatttaaagggagaagacagctaattttaagaagtatttgttcaggaaataccctatataatagtcaaataatgaaaacattcttgtttataatatttttgcaataaaaagcaatgtaactatattaccaataaaaagtaaaatgactaccatttatctagcatttaccatgtactaagtataatccagcccttcggttagatctctcattgtatccttacagcagcctgtataattgtaattgaagaaattatgattcagaaagattccttgttcttagtggcctgttttgggggcctggaaccagtatttgattctcttgtcactctgaccccaaaactgaacaaccacccttagccctttgatgtaattttcccact

SEQ ID NO: 37380 - DNA, 1000 bp, Homo sapiens
ctggtgcgttagtggctcctgttgtcaggtcttaatttcacacctttaacacccgcagtggccatgtgctgagtgacagttgcagttgtaagagccagtgatgtaaatggcagtggggtgttgagttcacttggcttcagcgctagggaggagcagggccgtgcgactcacaggacgctatgggaactgctgaattcatgtgaaatgccgtttgcaaacccagtaagaacatttcactgattcagagccttcttacactttcagttgggatgacctggggggaagtcagtttttatgatttaattcaataccttttctccatctatttagtatgagatcatcacaacaaacagctttcagcacaataaaaagttcagtttcaaactggagtcgatggaagttgatctctctccttctccgattagaaaatctgagatagcagccggccctgcgagaatctccatgattagtccacctcaagatggacgaatgggcagcgtctcctcccggggccccgagcatcccggcctgacaacgagtcagaggagcgtgggaaagcctctcaggattccacctctgcaaattccctacaagggacccccactaacgccaacaccacagttaccagggagagcaggaagaggggactctccaagcttcgggggctcccaggccaggctgcccccccggccgcccatcagcatctccagcctgctgcagaggcagtgtttagtgtgaagttttgaagtcatttcaaagacaaagttgtgtttttaccgcgacttccatgcctcctgcgggacctgctcaccttggggcagtgacacctgaaagatgagcacccagccacccgctctgcccccttccagtcctccagccttcgtgcccaccagcatgtgtacgttagacagccagtgcgactgtactttccctcttgttgaaataattaagtaatgtagtggaataaagtatttttctgattatcaggacgagcataaaa

SEQ ID NO: 37381 - DNA, 561 bp, Homo sapiens
tcctaaccctcgtaactctcgcatgttaaaaaacaaaacaaaaaaacttgagcggcagcgtctcctcccggggccccgagcatcccggcctgacaacgagtcagaggagcgtgggaaagcctctcaggattccacctctgcaaattccctacaagggacccccactaacgccaacaccacagttaccagggagagcaggaagaggggactctccaagcttcgggggctcccaggccaggctgcccccccggccgcccatcagcatctccagcctgctgcagaggcagtgtttagtgtgaagttttgaagtcatttcaaagacaaagttgtgtttttaccgcgacttccatgcctcctgcgggacctgctcaccttggggcagtgacacctgaaagatgagcacccagccacccgctctgcccccttccagtcctccagccttcgtgcccaccagcatgtgtacgttagacagccagtgcgactgtactttccctcttgttgaaataattaagtaatgtagtggaataaagtatttttctgattatcaggacgagcataaaa

SEQ ID NO: 37382 - DNA, 839 bp, Homo sapiens
cgcagagctgcccgccttcgggccctgcgcggggaggctggtcccaaccttgcgtgggcttcgcgtgggcccggcctcgccgctgcggtcgcccgcctggcatggccaactgggtgttctgtaatcgctgcttccagccgccccacaggacgtcgtgcttcagcctcaccaactgcgggcacgtgtactgcgacgcctgcctcggcaaagaccgacgcagatatccaggcattcttcatgagcatagacagtctgtgtaagaagtactccagggaaacctcccagattttagaatttcaagaaaaacacaggaagagattgttagccttctatagagaaaagatttctaggttggaagaatcccttaggaagtcagtgctgcagatagaacaactacaaagtatgagatcatcacaacaaacagctttcagcacaataaaaagttcagtttcaacaaaaccacacggatgcctgctgccacctcactcatcagcccccgacagactggagtcgatggaagttgatctctctccttctccgattagaaaatctgagatagcagccggccctgcgagaatctccatgattagtccacctcaagatggacgaatgggcagcgtctcctcccggggccccgagcatcccggcctgacaacgagtcagaggagcgtgggaaagcctctcaggattccacctctgcaaattccctacaagggacccccactaacgccaacaccacagttaccagggagagcaggaagaggggactctccaagcttcgggggctcccaggccaggctgcccccggcgccataatttcagctgtgaaagcgtagtaa

SEQ ID NO: 37383 - DNA, 776 bp, Homo sapiens
cgcagagctgcccgccttcgggccctgcgcggggaggctggtcccaaccttgcgtgggcttcgcgtgggcccggcctcgccgctgcggtcgcccgcctggcatggccaactgggtgttctgtaatcgctgcttccagccgccccacaggacgtcgtgcttcagcctcaccaactgcgggcacgtgtactgcgacgcctgcctcggcaaaggtaaaaagaatgaatgcttgatttgtaaagctccttgtcgtacagttttgctttcaaagcataccgacgcagatatccaggcattcttcatgagcatagacagtctgtgtaagaagtactccagggaaacctcccagattttagaatttcaagaaaaacacaggaagagattgttagccttctatagagaaaagatttctaggttggaagaatcccttaggaagtcagtgctgcagatagaacaactacaaagtatgagatcatcacaacaaacagctttcagcacaataaaaagttcagtttcaacaaaaccacacggatgcctgctgccacctcactcatcagcccccgacagactggagtcgatggaagttgatctctctccttctccgattagaaaatctgagatagcagccggccctgcgagaatctccatgattagtccacctcaagatggacgaatggggttgaccttgtctaagccccctgtgcccggagagtgtgtcatttccagaggttcaccatgtttctgcatagacgtctgtcctcactggctgctcctccta

SEQ ID NO: 37384 - DNA, 751 bp, Homo sapiens
cgcagagctgcccgccttcgggccctgcgcggggaggctggtcccaaccttgcgtgggcttcgcgtgggcccggcctcgccgctgcggtcgcccgcctggcatggccaactgggtgttctgtaatcgctgcttccagccgccccacaggacgtcgtgcttcagcctcaccaactgcgggcacgtgtactgcgacgcctgcctcggcaaaggtaaaaagaatgaatgcttgatttgtaaagctccttgtcgtacagttttgctttcaaagcataccgacgcagatatccaggcattcttcatgagcatagacagtctgtgtaagaagtactccagggaaacctcccagtatctcaggctttcccgaggctgttgccgtctcaagttatgcccagccacatcctccaaggaggtgcccagaggctcgacccatggaagccaagcagcagccagagatccccaagaacactgggtcagcacaacacgggcacccagaccaggatgccggcggtcccagagccagccagaggcccatggaaacaccatccaggacgcacctcaccccctcaccctgctccatcccagcaggaccctcattcacaccaagtccccttggggccggaagttgcttgagttcataaaacatgtctgttatcacagacatcagagccacaggccgtgcgctccagggtggttttgccaagtgctgcagaggccaggtgctgtctcaggagagaagacccagcagacccg

SEQ ID NO: 37385 - DNA, 522 bp, Homo sapiens
cgtggatcccgcacaggggtacccgtgtccgcttgcgccgtcggaccttgtggactcgattgctctgcaccagggttgatttcctccattccttacgccctctgccatgatgacgtcagacgcagcaaaggccttcagtcacgctaccgacgcagatatccaggcattcttcatgagcatagacagtctgtgtaagaagtactccagggaaacctcccagattttagaatttcaagaaaaacacaggaagagattgttagccttctatagagaaaagatttctaggttggaagaatcccttaggaagtcagtgctgcagatagaacaactacaaaggtaaggcgccccaccccccgtgagtgcgcagtcgaggcacccactgccatgtgcattggtcgtctggctctccaagatcaagaatgaaagatgactgcagatgcagagggaagagctcgttcatttaccagaaactttcatcagagcaaaaatgctgtgggaaaaccgaagggaagaagggagaca

SEQ ID NO: 37386 - DNA, 663 bp, Homo sapiens
tgggaaatgtgttcctaacagacagtgggagtccgaatctcgtaagccgcaatattggaattttacccattgttttcttgttgcattcttagtctgagatagcagccggccctgcgagaatctccatgattagtccacctcaagatggacgaatgggcagcgtctcctcccggggccccgagcatcccggcctgacaacgagtcagaggagcgtgggaaagcctctcaggattccacctctgcaaattccctacaagggacccccactaacgccaacaccacagttaccagggagagcaggaagaggggactctccaagcttcgggggctcccaggccaggctgcccccccggccgcccatcagcatctccagcctgctgcagaggcagtgtttagtgtgaagttttgaagtcatttcaaagacaaagttgtgtttttaccgcgacttccatgcctcctgcgggacctgctcaccttggggcagtgacacctgaaagatgagcacccagccacccgctctgcccccttccagtcctccagccttcgtgcccaccagcatgtgtacgttagacagccagtgcgactgtactttccctcttgttgaaataattaagtaatgtagtggaataaagtatttttctgattatcaggacgagcataaaa

SEQ ID NO: 37387 - DNA, 953 bp, Homo sapiens
cgcagagctgcccgccttcgggccctgcgcggggaggctggtcccaaccttgcgtgggcttcgcgtgggcccggcctcgccgctgcggtcgcccgcctggcatggccaactgggtgttctgtaatcgctgcttccagccgccccacaggacgtcgtgcttcagcctcaccaactgcgggcacgtgtactgcgacgcctgcctcggcaaagaccgacgcagatatccaggcattcttcatgagcatagacagtctgtgtaagaagtactccagggaaacctcccagattttagaatttcaagaaaaacacaggaagagattgttagccttctatagagaaaagatttctaggttggaagaatcccttaggaagtcagtgctgcagatagaacaactacaaagtatgagatcatcacaacaaacagctttcagcacaataaaaagttcagtttcaacaaaaccacacggatgcctgctgccacctcactcatcagcccccgacagactggagtcgatggaagttgatctctctccttctccgattagaaaatctgagatagcagccggccctgcgagaatctccatgattagtccacctcaagatggacgaatgggcagcgtctcctcccggggccccgagcatcccggcctgacaacgagtcagaggagcgtgggaaagcctctcagtgtgaagttttgaagtcatttcaaagacaaagttgtgtttttaccgcgacttccatgcctcctgcgggacctgctcaccttggggcagtgacacctgaaagatgagcacccagccacccgctctgcccccttccagtcctccagccttcgtgcccaccagcatgtgtacgttagacagccagtgcgactgtactttccctcttgttgaaataattaagtaatgtagtggaataaagtatttttctgattatcaggacgagcataaaa

SEQ ID NO: 37388 - DNA, 315 bp, Homo sapiens
tttttttttttcaagacaggctccagctctgtcacccaggctggagtgcagtggcacaatctcagctctgcaacctccacttcctgattcaagccatcctcccaccaaatatgagtacttttactaactcccttcaaatacaaaatgagaacttagctacagtcagattttaaaatatattaaaaatgattataacaagaaaaccaataaatttcaaagtctgacatggtttaatccctgcttaaaacatttaaaatcaattattttgcttttccattcagtaagactaatacaggacattcagatagtgataca

SEQ ID NO: 37389 - DNA, 481 bp, Homo sapiens
caggtttccaaagggcattaaatctttgctaaatgaatgactgccaccaagttccactttgaaaagccctgcccaggaaccccatttgtataaggcaaaatacaaagacaccaagaattcctcaataccctaagattaattggggatcggtaaagactagaagatgaagaggcgccaaggccagccatgtactcatttctgctcatcaagccttagcctgggtttatcgctaggtgatgggtctgaaccctaggtgcggcccggggctggaggccatccaggagacaatgagcccctttcccagagaagccgagtgcccaaggcactgggctgtcgccgtcagaagactgccgagcggaagccctgcccaccgaggtggcggagacaggcaggcctgggcagccgctggggcggagggacggctcttggaaacggaatccgtactttaattaaagtttatgcagttttccaaaaaaaaaaa

SEQ ID NO: 37390 - DNA, 332 bp, Homo sapiens
tccatggtaaactctgaacacagagcagccaaggttcccctctgccctgcgtctgcacccatgctgcagcgttccagagcactcctcaacatcaatcagttcaggtgcggcccggggctggaggccatccaggagacaatgagcccctttcccagagaagccgagtgcccaaggcactgggctgtcgccgtcagaagactgccgagcggaagccctgcccaccgaggtggcggagacaggcaggcctgggcagccgctggggcggagggacggctcttggaaacggaatccgtactttaattaaagtttatgcagttttccaaaaaaaaaaa

SEQ ID NO: 37391 - DNA, 401 bp, Homo sapiens
agaggtaatttatgatagacgtattaataattgtgtttcagtaaagagaatccaggcttaacagtttcctttccctctgctcctgtccataaccagcattcccttccctctcactgtgaccagatctcttttaagttacatgcctagagaggagatggacatttgagcataaatccctcattactagttaaataagtattattgtgtttcctaccaatactaaactagtagtatctttgtaaacaaagaagagcatacggtaacatttccagtcttatatgtatagacttatcaaacagcatgatttttaactctttgatattagaagaatcttctggttaaacacagcatgttgaccacatacagaagcattctatttactctccctcccaagacccaac

SEQ ID NO: 37392 - DNA, 408 bp, Homo sapiens
gtccaaatggctgatgattcatgccatagacatcccaaaccagctggtaggcagagctcttggcattccaaatggaaacgtggaacagacacagatcacctggccacacagacctcagctctaaagacagatgactacttacctgttaaagttccctgtgcactattttttaaaatctagagatagataataaataggttaagttacattttaaattagcccaagagcatttgagaacagaatcatttttagaatcttaattctgagattcactgttgggcttaagtcactgcttctgtgatggttagttttgggtgtgaacttgactgtattaagggatacttacctgggaaagcattatttactctccatgcttcagtagatactgagcccttcccttttctgctg

SEQ ID NO: 37393 - DNA, 392 bp, Homo sapiens
atcagccccatgaggataccaataaaaagaaaattatcaaaatcctcaaccaccagctgcaacaaacagaagcccccaaacaaaatcctcctggcccctaccattattataaaaaactggacactggaagagaggttgctataagttaaagagagttaaatgacccctccctcaaaaccctcaaggtgtatattcctttattaagccattcttgaattgctataaatacccaagactgggtaatttgtaagaaaaaaaagaattaattggctcacagttctgcaggctgtgcaagaaacatgcagcatctgcttctggagaggactcaggaagcttccaatcatggcaaaaggtgaagcaggagcaagagagaatgggggaggtgccacaca

SEQ ID NO: 37394 - DNA, 566 bp, Homo sapiens
gcagatatacagaatgcagagcttgtctcctgtctgttcagggttggaaaatgaacagttcaaatccccgggaaacagagtttctagattgtctcatttacgccaccactactcaaagaagtggcacagattcaggtttaatccaaagttttattcatttctctctgctcaagagccttcccacaaaataggcactagcctgtcctcacttactggaagtgggaagagaaataggataagaagttctctgccatggaggcaaaatagttggaaagggtacagtgaaaacatgaggaagctcagaaagactcatgatattccatgcccagatcttccttggagctataaaatagaataatttttctttcaagtaggttagctagctctcccccaataaaaataccactatcagagtagaaacaaggtagacatttctaaaacatatgtgcttcattatgaatccatggatggctcaattcttaaatgtaaatagatctctaggaaactcaaagtacagtgttttcaatctaaaaagaagtattggcagtttcacttgcaaaattaaa

SEQ ID NO: 37395 - DNA, 367 bp, Homo sapiens
gggtcatttgagtaattcccctttcagaaaatttgttgaactgttaattaatctcactttgtaagctaacataaaatctttgtgaaattttaaccaaatctggttctttactgataaccatatgcatgctagtccatgcatgatcctatttattaatttatcaagataataaactcacatcattactctgctcagtcaagaaccagatattgtggtgggagatgcatatggaggattttaataccttaaagcaagaagactaaacaggagaatcgcttgaacctgggaggcagaggttgccatgagccgagatcacggccattgcactccagcctgggcaaaagagtgaaactccatctcgaaaaaa

SEQ ID NO: 37396 - DNA, 380 bp, Homo sapiens
ttacctcaggtgggtttggagaagactctgcatgtccctccgaaacagagcaagacataagattatccaccagcctgctttcgtctgctgactggcccactgtagctgaagagagtgagcatgccccggggccagcctttccaggtggaaatgaacaactgcccccaaagcctgcgccggaggctggagttgccattgctgcttgtgtggagatggagcagctgtatgacccacttgactcagacatgccagccatggacacagctggcctgttcaaagaaagtcatgaagatatgaagaagtcagatgaagaggaagagaaacagaagatggaagattctctgtgggcaggtgtggaggcgtgtcaaaaggtagacact

SEQ ID NO: 37397 - DNA, 368 bp, Homo sapiens
tgtctctacacaaaatacagagtatatttttctaagcctgtgatccaaaattatttgcctaatttgacctctagaaagtccgactactataacttagctttctgtttaaagtttcaggggtaaagtggaagaaaatatgcaagtcaacatggtgtattattacaggtcagattttcttctcctgttaaatactatcaatacatttgttgaacctttagtctctatttttgcctctctgtctcaaacagtttgtaaaggtctcttgcatttcttcagtaaaacaggagctctatttaatggcagaaatgtcatactgcatcttggaattcttaaagcaaaacattttactacattcagaaaaaaaatta

SEQ ID NO: 37398 - DNA, 424 bp, Homo sapiens
atggagaggacactactgtatttcagacttgtggctcctgccaaaaattgacattgttgtgttgcgatgatctaggtcacgttgcatgggttcctgtctgctgctggcatcttgactacattggacctttgactccttgggtctattgatactaccttactgctgttgataccttttcatatcatagtgttgatgtaccagtctgataagccaacttctccacacttgtgaactttgaaactaatttgtgttatgtgttcactcagcttgtgggaccatttgcaccctgatgatggtatgccttctatcccaaaagccactctacagtgggctgttagtcaggatatttagtgggccttcctcattccctaccatcagtggaaatccaatattgttgagtgttggagtggtcacaaaattgact

SEQ ID NO: 37399 - DNA, 437 bp, Homo sapiens
gcatagtgttgattctaacactgtttaaaatttttgagttaattaccaaatttaagtatttgtgaacttcacctaaaattctagacatacaacttctcttaaaattcagaaggtctggtaacactgattccactttgctgcatgacagcagacagtgggacctgagtgggggcttttcctactgtgatagggcaggtgtttctctgtttacacattgtctacctggtatggtttatctttttgcaagtctcatcaacacagatcttcaacttagtttatttaaccaaaagtattgatgctagagctacccatatttcacattagccttttccagctagagaaactttttttaccctggaaacctaaaggctagccttgtgaaatttacttttgaaactattactccatcttattttagtaaatctaggaaaaaaaat

SEQ ID NO: 37400 - DNA, 1327 bp, Homo sapiens
gtattcattaaaagaaaactaactggaaaacaggttagattaattcagtactattaaaaaagaattcagagctgttaatattttatcacaggataggatacttaaaatatagcattctgtgctgagatctaaggtgaagtctataaagattaaagttcccttttttctgatgttcaagttgattgttgttcagtatggcatatatgacaaaagtatatttgagtcaaatgtggctttctaaaatggatgcaacatgtagatccatacaagttggggtaggatatacccaagcgtgtatatatttgctcagcatgtgaaataataaaaataatacaaaactactcattcttcaaggtagttacagtttcaatgccactcttcctgtccccatattcattaagacagaagcttgatgcttaaacacacactggtatgaaaatgttttgtgttttctgttatattgtcagaagtgacattgatttgaaaggatgagagccttattttcttgcaacccttactgaaaggcatgatttcaggtgaaaatcttcagtgatttttaacatatgtcacatgtttgcagtaaggtcagtctttccaatcacagatagagttatgcatctatattctaccaaatattagcaaaaccaatgcaatacgtgtctgtctttgcaatataaagtaagcttggtgattatatttagtggagttacttgaaataggtcatttagtttacatacagtttaattctcatgccacaattaataaggtatcacatgactgcaaaatacactgcagcaaactttctagcatctgatattggataaggatagcttgtgctagaagttggagattaatctggtctgctgactggcagcattagagactgtatctgatggttggtgtgaggatgttgttgacagttctgaaagttagccatcaattcctgtgcagggtggagtcagacccagtgacttccttttcaatgtcagcaagagttttctcatgcctgctttggtcactttctcttggaaacttcacgcatttgacttgcagcttcttgacccgaggaatcaactgagctcccagtgctggctaccttgggcaaataaaatctgtggttgagagagttctctttgctgtgccacagtccctgtgatgtgccaaatggcaccagcatttgcagcaaagctcgttaaatctttttggaatgggcaaatattttttcaacttgagccctgctgagccaaaccaaatacttgctggcagaataaagttcaaactggcaactgttttggagaccaaagtaatgccatatatctttttttaa

SEQ ID NO: 37401 - DNA, 342 bp, Homo sapiens
atcacaaatagttttaagaaacatgagaaaaagagtctgcaggcaatttgaaatagactcttaagtacctgacaaacctgagaaaaataggtagggaagaaatcagtgcattgaaacccaacaaaacttcaatgtaccatcccttttcaatcacttggaaggaaaatgatgtgtttagtacatcctccttcttcatgtttggatctttaaatagggtatttggattcacagactgtagcctcctcagattgtctctcctcccagcacactgccgtgctttttaaatgacaccagacttccaagcaagattgattgtaaatttgaaaaggttatatgtgatgt

SEQ ID NO: 37402 - DNA, 611 bp, Homo sapiens
tggaaaaccctgaatacagtgggaaagaggtaaacctttgtggttgtaagctactgagactttggggttatttgttactgtagcatgatctggcctattctaatttatacagtgggatttttttttcccccacaaacactaaggaagtagcatgtggaaggccagaccttctgttgccatcagtaggggggtttctgtagtctgaggacctatgagccttttgggttacctttgacttgcacttgggcttttatgttgatgccaagcagtatgtttatacttctctaaaatgtatttttctctatataaatagtgtttttgttaactctcaccggctccagtctcaacttttgcctctaatttttcccataatattcactaactctagtgatagctgtctatgcgcattgtactgagactaattcagagagtgggttggatgaactttggtttgatttgtacgtaattgttaaaaactgtgtttaagaaaacagttgtacccttggcaaaacctggaagtctctatgttaacaattttcccaatttttgttttaggaagccattctgcatattatgtttttaaataaaaggatttgactttgggctgacaa

SEQ ID NO: 37403 - DNA, 943 bp, Homo sapiens
  misc_feature (136)..(136): n is a, c, g, or t
atggagtcctagttgcaagggaagccacgctgtgaggatgcttaagcagctcagtagagaggccacatgacctcctgccaataacagcaccaggtgtataaggggccaccttggaagcagagcctctaggctcagngtggctaatggctaccgtattgatcagtgcagaggaagaacacttccatcactgcagaaagttctgttggacggtgctgctctagaaaatgaggtatagctgggctattcctccaccttgtctttcctttttcttccaaaatctaggaatcacaccatgcaccatgtgctgggcacacagtagctgtacaagacccacgaagaagcaatgatggggtcattcttctgccttaagcccaaagggtccttggtttgaccattgctcccaggtggacatatgcaaggcagcagaatacagccccatcacaagaaagggtctttatggaattccctgaaccccagcgctggctgagtctgaaagcaggctgatgaagcaaagcagaagtctcagaatctgaaatctttgaagacctggagctcagtagctatttggcgaatgatcggggaacttggaccattcttctgtcttctcatcctcttccttttcctgtccactgaatgtcacctcctacggcttctgtatcctccgaggatccttcctgtgtccccagtcttgctttctgcctgttcactgagtctctagaatttctcatcacacagtgatgaaaactctgaccattcctgaaaagtactgcactttgctatcattgcaaaagcaaggagaccaaaagtgtgtgtgtgtgcatgtgtgcgtgtgtgtgtgtgcatgcatgtgtgcacacgtgtatgtgtgtatgtgcaggcatgtgtgtgcctgtgtgtaaggcacagaattatctcctgtggaaacacttccttacccattcga

SEQ ID NO: 37404 - DNA, 964 bp, Homo sapiens
ggctggtacggcccgggattttgggccggaacctgcgagctggggcgcggcctcggggaggggcgggcgggacagacccagccgccccggctcccccgccgtccgcgtctgcgccggccccggggcctggtcggcggcggcggggccggtcgatggcccgggcggcggcggcggcatgcggctcctgttcctggcggtgctgcggccacacaccggcaacgcggtcacggcccagcgcgttcgggcccatctagaggctgcagggcacgtgtgcgttttgaaggatgcctttgactttgaaagccgatctgagattgcaaacctcatcttggctgagaactgcgaggctgccctggctcttcatctctataggggaggcaggcttttgcaaggccaccgaatcccttttggagtcatctttggtggaactgatgtaaatgaagatgccaaccaggcggaaaaaaacacagtcatgggcagagttcttgaggaagccagccgcatgctaagggtaaggtctatgtccagagtcaaggaattgcaacaacaccaaacgccgcttttaactggaatacctttcttcaacgctctgagattaaccaaagtgctgataatttgcacatatttcttctgatatgtggacttcgacaagttaaggatcctctctatctggtggacgcattttcagcctggcatcaggaggagcccaatgtgcacctggtgattgtgggtcctgaaaacattgaaagaaaaacttctagtttgatgctaaaattctggctaatcaagagagaaggcctcagactgggagccatgagcaggcaacaacagtatctagaaggcatttaataatgtggttttctttttcattgttttcattctgatgatcacatctcaggtacagtgcttgataccagctttccaattatgaaaattgcctttcaaaataaattgacttcacaaa

SEQ ID NO: 37405 - DNA, 819 bp, Homo sapiens
ggctggtacggcccgggattttgggccggaacctgcgagctggggcgcggcctcggggaggggcgggcgggacagacccagccgccccggctcccccgccgtccgcgtctgcgccggccccggggcctggtcggcggcggcggggccggtcgatggcccgggcggcggcggcggcatgcggctcctgttcctggcggtgctgcggccacacaccggcaacgcggtcacggcccagcgcgttcgggcccatctagaggctgcagggcacgtgtgcgttttgaaggatgcctttgactttgaaagccgatctgagattgcaaacctcatcttggctgagaactgcgaggctgccctggctcttcatctctataggggaggcaggcttttgcaaggccaccgaatcccttttggagtcatctttggtggaactgatgtaaatgaagatgccaaccaggcggaaaaaaacacagtcatgggcagagttcttgaggaagccagatttgctgtcgctttcacagagtcaatgaaggaaatggcacaagcgcagtggccgcatgctaagggtaaggtctatgtccagagtcaaggaattgcaacaacaccaaacgccgcttttaactggaatacctttcttcaacgctctgagattaaccaaagtgctgataatttgcacatatttcttctgatatgtggacttcgacaagttaaggatcctctctatctggtggacgcattttcagcctggcatcaggaggagcccaatgtgcacctggtgattgtgggtcctgaagtcgatccagtgtttacaagggaagtgaa

SEQ ID NO: 37406 - DNA, 1080 bp, Homo sapiens
  misc_feature (55)..(55): n is a, c, g, or t
catggctactgagatggtagaaggagagcctccatacctcaatgaaaatcccttngagggccttgtgcctaatagcaactaatggaaccccagaacttcagaatccagagaaactttccccaatatttcgggatttcttaaatcgatgtttggaaatggatgtggaaaaaaggggttcagccaaagaattattacagcatcctttcctgaaactggccaaaccgttatctagcttgacaccactgatcatggcagctaaagaagcaatgaagagtaaccgttaacatcactgctgtggcctcatactcttttttccattttctacaagaagccttttagtatatgaaaattattactctttttggggtttaaagaaatggtctgcataacctgaatgaaagaagcaaatgactattctctgaagacaaccaagagaaaattgcaaaaagacaagtatgacttttatatgaaccccttctttagggtccagaaggaattgtggactgaatcactagccttaggtctttcagcaaacagcctatcagggccatttatcatgtgtgagatttgcattttactttgctgactttgttgtaatagatcccattcattgtcccctttggggtatttccaatacttgaatggcagattggagtttttcagagtatgtgtttcatctgctagtctttctctccttcatagcttttcttttcctggacttgctccttttgagttgcttttgcgtttctcatgcctaggcaagtgtaatagaaattatgtagctccttatgttggcaaaggagctctatatagtttcactttgtataaaagttaggaccagctgttgttacatgtaatattttagttcagaacttgacctgaaggaagggaagaaaagtatgtgatttttaccttttttaacaaatgtgaaaaaagtcagttttagaaattttgtggtagtaagtttggcatttgttacatgtatagagagaagactaataatctctattgataactaaatcattgagatagaaaaagattcccattgaccgtgtatttcttcccatttcgtcttccctt

SEQ ID NO: 37407 - DNA, 957 bp, Homo sapiens
  misc_feature (55)..(55): n is a, c, g, or t
  misc_feature (895)..(895): n is a, c, g, or t
  misc_feature (929)..(929): n is a, c, g, or t
catggctactgagatggtagaaggagagcctccatacctcaatgaaaatcccttngagggccttgtgcctaatagcaactaatggaaccccagaacttcagaatccagagaaactttccccaatatttcgggatttcttaaatcgatgtttggaaatggatgtggaaaaaaggggttcagccaaagaattattacagcatcctttcctgaaactggccaaaccgttatctagcttgacaccactgatcatggcagctaaagaagcaatgaagagtaaccgttaacatcactgctgtggcctcatactcttttttccattttctacaagaagccttttagtatatgaaaattattactctttttggggtttaaagaaatggtctgcataacctgaatgaaagaagcaaatgactattctctgaagacaaccaagagaaaattgcaaaaagacaagtatgacttttatatgaaccccttctttagggtccagaaggaattgtggactgaatcactagccttaggtctttcagcaaacagcctatcagggccatttatcatgtgtgagatttgcattttactttgctgactttgttgtaatagatcccattcattgtcccctttggggtatttccaatacttgaatggcagattggagtttttcagagtatgtgtttcatctgctagtctttctctccttcatagcttttcttttcctggacttgctccttttgagttgcttttgcgtttctcatgcctaggcaagtgtaatagaaattatgtagctccttatgttggcaaaggagctctatatagtttcactttgtataaaagttaggaccagctgttgtaactggagctgttgtaactggagctgttgtagctggagctgttgtanctggagctgttgtaactggagctgttgtaactgnagctgttgtaactggagctgttgtaact

SEQ ID NO: 37408 - DNA, 934 bp, Homo sapiens
  misc_feature (55)..(55): n is a, c, g, or t
  misc_feature (931)..(931): n is a, c, g, or t
catggctactgagatggtagaaggagagcctccatacctcaatgaaaatcccttngagggccttgtgcctaatagcaactaatggaaccccagaacttcagaatccagagaaactttccccaatatttcgggatttcttaaatcgatgtttggaaatggatgtggaaaaaaggggttcagccaaagaattattacagcatcctttcctgaaactggccaaaccgttatctagcttgacaccactgatcatggcagctaaagaagcaatgaagagtaaccgttaacatcactgctgtggcctcatactcttttttccattttctacaagaagccttttagtatatgaaaattattactctttttggggtttaaagaaatggtctgcataacctgaatgaaagaagcaaatgactattctctgaagacaaccaagagaaaattgcaaaaagacaagtatgacttttatatgaaccccttctttagggtccagaaggaattgtggactgaatcactagccttaggtctttcagcaaacagcctatcagggccatttatcatgtgtgagatttgcattttactttgctgactttgttgtaatagatcccattcattgtcccctttggggtatttccaatacttgaatggcagattggagtttttcagagtatgtgtttcatctgctagtctttctctccttcatagcttttcttttcctggacttgctccttttgagttgcttttgcgtttctcatgcctaggcaagtgtaatagaaattatgtagctccttatgttggcaaaggagctctatatagtttcactttgggtataaaaagtttagggacccacgctggttgggtaccatgggaaataatttttaaggttcaagaaaacttggaccctttaagggaagagggggaaaaaaaaaagttnttg

SEQ ID NO: 37409 - DNA, 493 bp, Homo sapiens
  misc_feature (55)..(55): n is a, c, g, or t
catggctactgagatggtagaaggagagcctccatacctcaatgaaaatcccttngagggccttgtgcctaatagcaactaatggaaccccagaacttcagaatccagagaaactttccccaatatttcgggatttcttaaatcgatgtttggaaatggatgtggaaaaaaggggttcagccaaagaattattacagcatcctttcctgaaactggccaaaccgttatctagcttgacaccactgatcatggcagctaaagaagcaatgaagagtaaccgttaacatcactgctgtggcctcatactcttttttccattttctacaagaagccttttagtatatgaaaattattactctttttggggtttaaagaaatggtctgcataacctgaatgaaagaagcaaatgactattctctgaagacaaccaagagaaaattgcaaaaagacaagtatgacttttatatgagaccgcaagggggatctcaggca

SEQ ID NO: 37410 - DNA, 853 bp, Homo sapiens
agggaaatagaatcctagaatcacaagccttggatagcaggggctgagaagatcactaggccactctcatgcacccataacaaactgcagctgctcctaaaccaaccccccagcaaaaggctatctgcttttcagggaaaaaatattagagttatcctgatggcctcttatggtgtctaacagcctttctaaaccaggagactctcacctgtgactaatgaaaatctctcctgagcttgggtcaaaggtgttttggagcatcattactgagacaactgcagcacatggaatctgcacagttacaggactgtgggactcaaatctcaactcctccacttacaagtgacttgggcaagtgacttaacctttcttggctctagtatcctgatctggaaaacacagttataacccatactgtggttgtggggtgtaagagtcattacttgcaaagcagttcagaagcattcaataaatagtagctgccgctggacttattctgatgttgttggtagtgatggtattctttacctcttgtatccagaaaaaagctagggtagccaccaatttgtaaaacctcatccagttggtatttgactgacttcagcaatctctggagataaagagctgggaggattgctccccttctttgtccagctcactgaagtgcatgctgattgtgcagcagaggacctgctattcacagagtagggagaagttgatcgaggtcaggaacgcaggcacaaagggacactgtcagagctgacctcacgaatgctaatctcctttatcccttccaagaatggactgtaatcgtctccagattaaaatgtgcagtagaggtgaccaaaacaaa

SEQ ID NO: 37411 - DNA, 455 bp, Homo sapiens
tgggtgtcagaggtcctgttacttaccagggttgggggtgtagagtcatgtgaagattcagaagcattcaataaatagtagctgccgctggacttattctgatgttgttggtagtgatggtattctttacctcttgtatccagaaaaaagctagggtagccaccaatttgtaaaacctcatccagttggtatttgactgacttcagcaatctctggagataaagagctgggaggattgctccccttctttgtccagctcactgaagtgcatgctgattgtgcagcagaggacctgctattcacagagtagggagaagttgatcgaggtcaggaacgcaggcacaaagggacactgtcagagctgacctcacgaatgctaatctcctttatcccttccaagaatggactgtaatcgtctccagattaaaatgtgcagtagaggtgaccaaaacaaa

SEQ ID NO: 37412 - DNA, 565 bp, Homo sapiens
caccaaaagatcccctggaaattaggtgggaaaaccttaccttttgtggggccttgtgtttgtcttaaaagttcatgcacatggccaggtgtggtggctcacacctgttatcctgtcctggatcccttgagtcaaagagtttgagaccaacctggacaatacagtgagaccccgtctctacaaaagataaaatattagccaggggtggctgtgcgcatctgtagtcccagctagtactgtggctgaggcgggaggagcacttgagcctgcactgagctgtgatctcaccagtgtactccagcctgggccacagagcaagaccttgactcaaaaacaacaacaacaacaaaaattcttgaagattttgcattctgtcccactatccattggttttcatgtcaagataatgtgagaaattctttacaattgcttccagaaggaatagccttttgatttagtgcacaggtgtccagtcttttggcttctcaggcccacattggaagaagaatgctcctgagccacacataaaatacactaatgctaacaacagctgatgagcttaaaa

SEQ ID NO: 37413 - DNA, 272 bp, Homo sapiens
ttatgattttttttttttaaaaaaaacagagagtaacccaaagcttaccaggtgatccttcttagtaaaagggatttgtgggctgtggatcagcttcccactgattcatctgagatgaagacaggaccctccatcctgcaaaaatgggtttgaaaaaagaaaggaactctccatttacacgtgagaatggctcagcctaagaatgctgcttgcaggttcactgttctgcatttagaatccaggcctagagaagcagcacggcttgcctctgc

SEQ ID NO: 37414 - DNA, 580 bp, Homo sapiens
ctgtaagaatcataatcacaccctcacagtctatttctgttctccttcttctatttctaaaagggaacgtattccactattacacttagtcttttgttactttaaaactagaacaaaaaattcttggatccaccttctgaagttagatttagagaagatttaagctctaacaagagaagccaaggttcattctttccaaattttctctccacagtgtttctgtgattttttttttaagatctagatgctatttcctcaagtgatgtataaagatgcctcaacggatgagcagagctaaatttacttagactctgcctttttttctttaagtagagtagggggttattaattgtctggttctgtaatatctattccctgttccttcacccacccatgcctaaaaatctttggaggcattaagtaaagaaagtcacattctagagaaagagtactcacagctgccttttgttttgttttgctttactctctccatttaatgtggtagtatcccacactaccttttaaaaaaaataacttttttgatccttcaagtaatacatacttattgtagaaaaaaaaa

SEQ ID NO: 37415 - DNA, 288 bp, Homo sapiens
ataatattatgcagcgattaagtgtaacattttcaaagaatatttaatgatgtggtaaaatgctcacgatataatgttaagtggaaaaatcaatatctaaaactgcatctgcagcatgatcccaattttgtaaatttttatatacagaaaaaaacagtggcagaaaattatccaaaatgttaacagagtttgtgagattgtggacaagttttggtttattccttaagctgatctgtattttcccacattttctaaataaataattctttcttctatttgaatgccaat

SEQ ID NO: 37416 - DNA, 765 bp, Homo sapiens
gattccatctgcacagggcggagcttgggcctctggctgtcacagttgccctgacagacactgaggtgaccttggccaagtcacgcattcatttccatctgagtttctagtttaagataagaggaagaggacctggagctcctctggggctgcttcggcccagggtcctcctgctttctgagggtaacagtgtctgtgcccatgaaaacatgtgatgttagtcacagacctgccgtggcagaaatcccccatgcttccctctgctgggggcaggtgttatcattcacagccctgcggtggttgtctgtctgcttgtcaacaagcagtgaaataagagtaaagttgcctaatactgactcagatgcacaatccagttaacccagatgtgtgagatcttccggtttgaaagaactgtattggcaaggcaaaatcaacctattgtagaatatatttattgtatatcagcatggggattattaatattgctaataaaaccattatttgtaaaaattaagattaatagaagaatcgttctattttctcatagttttaaataggataaaaatatattctattcaaaatcctatttaaaatatatcctattcaaaattaaaagaaaatgtaagaatggtttccttttttttgagactctgctctgccacccaggctggagtgcagtggcgcaatcttggctcactgcagcctctgcctcccaggctcaagcaattctcctgcctcatcctcccgagtagctgggattacagg

SEQ ID NO: 37417 - DNA, 738 bp, Homo sapiens
acagtaattcccctgcctctcccataagcctgcgacttcttggagggtagaaatcaggcatgggggtcactttccattttgcggtgccagtgcagtaggtagaaagcaagtgcttgtgcagtgagtgaactgatggcacattagtcaacccacagagtaggagtaactggcaaaagattcatttgatcaggtaatcagatagtcgttttcaagtaaattgggacagcaactagagtaggaacaatcaccgcctactgactctcataaacgcctaagtctttgggagaaggcttgggcatctgctaaagacttcccccaagcctaggagtcaggccgctttttggatggaaacatctggaacgtaggttcctggaagcgcattgctgagccgtggcactggggcggggcctgcttctgtgcgccctcacaggcgcctcctgagataaggtgcactttggccaggttccaaaaggtggtgtgcggtcactgatctcttgaacgacctcatgatctttaggaaagggctttgctggaaaacactgcagaggcgtatttacagaagccagcacaacagagctggaaccgacttcactcacatctgtgcggggtgctgtggagattgtctaaacagagacctctcaccctgcatttcagcttccctgtcacgtgcttcaacttcagcagcaccaactgctgcagattccctgaagacccttccaatgaactcagaatggttta

SEQ ID NO: 37418 - DNA, 626 bp, Homo sapiens
tgaagtccagatgctgagctgggccatcctgtccttacctgtatgggatctttgttgtcagtactcaggccttcatgtgtacaacatgtgacgcttgccctagataagcccagtggtcaatttcccagggcctggatgttgtacacagcggagaagatgaagttgcttggggatttgatgaggaagaagagtaagaaaacaaattggggatggtagtagtggtaatggtgggggttaaaagtgaaaccacttgcagcagtgtggacacctcaccagccccagaaagcaggaggctgaggtgcacgcagttccctactggccactgcacagcagcacacactgtgtccagcaagttgggtggggtcttcaggaaaaaaagaattgcctcttccctcagtcatttaaataacatgttcagttagacaattacagaaattcagaaaacacagaagaggataaaaaagaacagacactatcactgttaatatttgaggtatttcttttcactattttttcatacacacacacacactctctctctcaataccttttttccactcaatgttactttgtgagcactccctcatcattaaatgtttctcagtgtttgaaaatgggacactgta

SEQ ID NO: 37419 - DNA, 452 bp, Homo sapiens
gaccagaggatgggacaatctgggttgtttttctttttttaatcaccatatgcccagctcccaagccccatgcctggcaccttcaggggtctcagaactataggtcttgccaccccctgtgacctgtgggcaggaacttcatctccgtgcaaacactcaaggccctcctcggcttgctcctcccttgtcgtccagccaggaaagcatcagagaaggcttcctggaggtgtctgagataaggctgaaagaacgaggcaagtagccaggtgcagaaaggtcaaaagaacattccagattgaggaaagagccagatatgcagatgaatgtgtcaggttccagccccaactgaggcccaaggagggtggatggatggacaggtagctgaaaaaacagacggggggccgtaagcaggtgaatatggttttactcagcagctctctcatcagcagctc

SEQ ID NO: 37420 - DNA, 247 bp, Homo sapiens
actcatgcctgtcgaccatagctctttgggagacaagacaagaggattgcttgaggccgggagttcaagaccagcgacacagcaggaccctgtctctacaagaaataaaaaaaattagccaagcatggtggcacatgcctaaaagtcctagctactggggaggctgaggtgggaggatcacttgagtgatcattgatgatgccactgcactccagattgggtgacagagcaagaccctatctcttta

SEQ ID NO: 37421 - DNA, 409 bp, Homo sapiens
atctttagattagagatgctcaacctacagaaaactctggaatcagggatttggaattcattcttaatttttgaggtcacagtcccttactttctgatatggccgtagcttcacccttgccagcgtcaaaagtgggatgagtaaccctttcgcactggagattttcagaacctactaggttacagagagatgctaaaaacctaggaagctgagagaaatttctgttgtgctggatgtggggggtagatgtcacttgaggagggggtaaacattgaatctttttgataatttggtagtgttcaaggggaatgctgaatgggcatgctaactggaaagactgcagtgggagtagggtagtgttggggtcctgtggacccagggacagatcaggcaggcagacaccccatta

SEQ ID NO: 37422 - DNA, 709 bp, Homo sapiens
ccagctccgttctggaaaagaaattgcgacgaaaagagacggcagccgtgacctctgctctgtatttccttcctcttcggagaggaagatggaatttagtagtttattgaggggcgggagatcctggctagcgcagagtgtagccatcgttttcggctctggcacactcgagggctgtcattcacatgtgtaatagatacgaattcggaaagatccagtggaaagaatactgcaacaacttctcgcaattacttcgataattcgcaattgctctattaacatcgtatcaggaatggtgggtcactttggactcttgtgtagataagatagactaagggttaaaggacgttcagcctcccacccaccaagaaacacacaggagaaagagtgagaggaagagctggaagtgattttaaatacactgtgattgctaaagcaagtcaatcatctccaaactgtggtctgcttcaattactagttagaaatgatttgtgaaagacctcacagaagactgcccacaccacgatgcattgagaaattgttttctagtacagtggtctttgaaagcaattgctaccgtcctcagaaactgtgcaggatcatgtatagggatgaagaaaaacacaaattggagtgctttatttgtacttcttttccagcttacaaaaaataaagatattatgcttcattaacatttaatgactagatt

SEQ ID NO: 37423 - DNA, 228 bp, Homo sapiens
catggaacaaaaggaaggtcaaggtggccagagcatcaagagcacaacagagtttgagaagatgaggcgggaggaaggcaaggacctcatcagccatgtaagacgcctgctcccactttgccttccaccatgagtcaaagtttcctaagtcttccccagaagccgccatgcttcctgtacagcctgaagaaccattagccaattaaatctcttttctttataaattac

SEQ ID NO: 37424 - DNA, 811 bp, Homo sapiens
catggctcttcctgaaatcctgagagcttattcctgcccttgaacttctattggttttataggaaaggctcttggaaccccagcacctgagcacaatcccattctaagatttcctgagtggtatcatttaaatttacagaaagagaactcccaacttttaacctggcacatattacccaaaatgaagactccatatatcagccatggccaagtttctgaccaatgagataaataaaacagacacgactggatgtgaaacagtcatttggaccatgaagtgaccttggaaaaggaagccaggactggtgtccatataagaagatagccctgtgaagacacagactcagagagaattctaatatggagatggaaacaaaatctgtagtcatgctgctccaagctaaggaatacctggggctaccagaagctcgaagaagcaggagaagttcctccctagaggcttcagagaacatgacatctgacacattgatttcagttggctgaccttcaaagcgatgaggtgaatttctgttgttttaagccacccagagacagccctaagaaattaatgcacatgctaatactagttttctctaagtttcattgagaatattgaaaaatatatatttaaatatctggatcttattgagaatacaaagaagactttcatacgttggtatttctgaatcttcatttataaagtgttaaataacttatgcccaaaagaaaaaatcggtcagaaattacctcatatcagtaagttctatagtaaaggaataaatgcatctaagaatgaaaaaaagaaatattt

SEQ ID NO: 37425 - DNA, 650 bp, Homo sapiens
catggctcttcctgaaatcctgagagcttattcctgcccttgaacttctattggttttataggaaaggctcttggaaccccagcacctgagcacaatcccattctaagatttcctgagtggtatcatttaaatttacagaaagagaactcccaacttttaacctggcacatattacccaaaatgaagactccatatatcagccatggccaagtttctgaccaatgagataaataaaacagacacgactggatgtgaaacagtcatttggaccatgaagtgaccttggaaaaggaagccagaagagttcttcttagctataactacctggaagaaaaagttgctgatcacattgagaactgaaattaatagcagaagaaagtgaagagtgaagaatatagctgctctattttgtttactacagggccttgtaaagaattaactaggtttaaatgaaatgccttttgatgtattttacttgaaatagcattcttgcttcaattaagcagtccccagaaaagcaataacacggtaggatcaaataagccagaatttgcttatcctccaagttctctggcgtgctaaaaagtcaaactcaggatgcaatatctgtgcttttgttgatgagtgcccaataaacaaggaactctga

SEQ ID NO: 37426 - DNA, 1617 bp, Homo sapiens
ggcggcggcggcgggcgcggcgcgatgtgcgagcgggcggcgcgcctgtgcagggccggcgcgcacaggctgctccgggagccgccgcagcagggccgggcgctgggcgggctgctgcgctgggtgggcgccaggatgggcgagccccgggagtcgctggcccccgccgcccccgcggaccccggcccagcctcgccgcgcgggggcaccgccgtcatcctggacattttccgccgtgcggacaaaaatgatgatgggaagctgtccttggaggaattccagctcttctttgcagatggcgtccttaatgagaaagaactggaggatctctttcacacgattgactctgacaacaccaaccatgtggacaccaaggagctgtgtgattactttgtggaccacatgggtgactatgaggatgtcctggcctccctggagaccttgaatcactctgtcctgaaggccatgggttataccaagaaggtatatgagggtgggagcaacgtggaccagtttgtgacccgcttcctcctgaaggagacggccaatcagatccagtcgctgctgagctcagtggagagtgcggtggaggccatcgaggaacagaccagccagctccgacagaaccacatcaaacccagccacagcgcggcacagacctggtgtggaagccccactcccgcctctgcccccaaccacaagctcatggctatggaacaaggcaagacccttccatctgccacggaggatgcaaaggaagagggtctggaagcccagatcagccgcttggcagagctgattgggaggctggagagcaaagcactgtggttcgacctgcagcagcgcctgtcagatgaagatggcaccaacatgcacctgcagctggtccggcaggagatggccgtgtgccccgagcaactgagcgagtttctggactctctgcgccagtatctgcgggggaccactggcgtgaggaactgcttccacatcactgccgtgaggctctcagatggcttcacctttgtcatctatgagttctgggagacagaggaggcgtggaagaggcacctgcagagccccctgtgtaaggcgttccggcacgtcaaggtggacacactgagccagcctgaggccctctccaggatcttggtgccagctgcttggtgcacggtgggacgggactgacagcctcccagaggcccgtggaggagcccaccagccccttcttcttgtgaaggaaatcccgtttttttctagacagacactttggtgcagaagcttcttttcaatccatcctccacaagaaggtgtttccctgttgttaagtgaaggaggccgcccctgcccccacctgagaaggcagagcagtgtctgtgctgccaggtcctggtgaagcccaaggttgaagggggcggcttcctggagccagcacccctgcctcctggtcctggcctctcccctacccctcacatggccacgcatgacccacactgaccacaccctgccctcttcggtgacattcttctacctagtaggagtcatgcccctgtagtgcccaacctagccaggtagccaccactgtgcccaggcgccaaataaaccctggttgggaagaaa

SEQ ID NO: 37427 - DNA, 2066 bp, Homo sapiens
ggaaaggggagcagctctgtcccacggattcagatgtcactggaaaggcagaacgaggaggcacctggtcttgtaggttcaggccagccttggagctgccctccacccatccctgcctaatgcagccggaacttcgtctgcggctgcttttctgaactcttggcgtcctgtttctcctcctgcaccccaaaattaacgcagtcctgcccgtggctggcattgtcaccaggccttgcaaacacctctgtcggactttgcccaacctccctggaaacacaccaggggttttggaaggactgcagtggtaaaggttgtggcgctccctgggacactgattcggagtgtggttgtgtgcagctgagcgtttggcggtgggtgaagccacgtggactgatgactgtggacctacacctgcagggatggccgtgggcctgcgtgtgtgtgtcagcgtggctgggagcaggctggtggtactggcagccgcttccacgtgggtgaggggagggcctctgtctgcaacatccctcatcagttccccctggatcccagcccggggagggggagagggaaggggggctcagcttcccaggaccctaagctgctcctgggagaagagaaggatcccagtatccggtcagaggctgcaggaagcgcttgcctctccctggcccagggctgactccgcctctcttttctgcagattttccgccgtgcggacaaaaatgatgatgggaagctgtccttggaggaattccagctcttctttgcagatggcgtccttaatgagaaagaactggaggatctctttcacacgattgactctgacaacaccaaattactttgtggaccacatgggtgactatgaggatgtcctggcctccctggagaccttgaatcactctgtcctgaaggccatgggttataccaagaaggtatatgagggtgggagcaacgtggaccagtttgtgacccgcttcctcctgaaggagacggccaatcagatccagtcgctgctgagctcagtggagagtgcggtggaggccatcgaggaacagaccagccagctccgacagaaccacatcaaacccagccacagcgcggcacagacctggtgtggaagccccactcccgcctctgcccccaaccacaagctcatggctatggaacaaggcaagacccttccatctgccacggaggatgcaaaggaagagggtctggaagcccagatcagccgcttggcagagctgattgggaggctggagagcaaagcactgtggttcgacctgcagcagcgcctgtcagatgaagatggcaccaacatgcacctgcagctggtccggcaggagatggccgtgtgccccgagcaactgagcgagtttctggactctctgcgccagtatctgcgggggaccactggcgtgaggaactgcttccacatcactgccgtgaggctctcagatggcttcacctttgtcatctatgagttctgggagacagaggaggcgtggaagaggcacctgcagagccccctgtgtaaggcgttccggcacgtcaaggtggacacactgagccagcctgaggccctctccaggatcttggtgccagctgcttggtgcacggtgggacgggactgacagcctcccagaggcccgtggaggagcccaccagccccttcttcttgtgaaggaaatcccgtttttttctagacagacactttggtgcagaagcttcttttcaatccatcctccacaagaaggtgtttccctgttgttaagtgaaggaggccgcccctgcccccacctgagaaggcagagcagtgtctgtgctgccaggtcctggtgaagcccaaggttgaagggggcggcttcctggagccagcacccctgcctcctggtcctggcctctcccctacccctcacatggccacgcatgacccacactgaccacaccctgccctcttcggtgacattcttctacctagtaggagtcatgcccctgtagtgcccaacctagccaggtagccaccactgtgcccaggcgccaaataaaccctggttgggaagaaa

SEQ ID NO: 37428 - DNA, 423 bp, Homo sapiens
tttttttggagacagggtcttcttgctccatcacccaggctagagtgcagtgacatgatcataggttactgcagcctccaattcctgtgatcaagtgatcttcccacctcagtcttcctagtagtagggattatagccactaggtacaacacctgactggcatttaattttaaatcttgtgtttccactttaaaatatacagccatttgcctcccctggaaagactgctgacacaagtgttctattatagaccccaactggcttcaaaccactctgtcatttccgtaaactggttgtatagtattatattatatttacttagtactataggctgctggcttacttaaaagatatatgtaatatgtgtgtatcttacttgttagaccaagtcatactataattaatcaggcagaagtataaatt

SEQ ID NO: 37429 - DNA, 322 bp, Homo sapiens
ggtagtaaatctaatctgtcaataattgttaagtactattttgacagcatcaaaaggtaagtgatcatttttcttttatactgaaatgatgaagtgatgctacttgcaagaaatgagaatgtattaacactttttccttttaggcatgggtccgcaaaaccgaatgctgaactatgagccagaaaaaaacagtctgtaaatatggcctgagaaagagtaattgatttttaatttatagggctgctatctttttttttttttcgagatagagactcactctgtttcccaggctggagtgcaagggtgtgatctcagctcattg

SEQ ID NO: 37430 - DNA, 592 bp, Homo sapiens
ggtctgtctgaccccagcccccccacagtgtgaccgtccgtggtacctgccgggttccaaccttggtctctctgaccccagcccccccacagtgtgacctgaattttctgcaacctcctgtggccttgtcctggcaggaggtgggtaactgtcatgagtttctcagaccacaaaaaccacaaccaccaccgccccccacaaaaacggaaacgccccttctttcagcgctggccatgagggagcggtggtgatggatggctgaccgtggagaattctgcattccaggggactgaggtcagggcaggcgggagctgcgtggccctggtttccaggactcaggctctggtgcattctcggggaggctgagctccccttcccgggtgccctccgtctactgagtgtgccgagctcattgctttcctgcctcccgtcctctctgcccctgtggctctcccagggaaatacccacgggaccccaggtgaaggttcctgctgcccgcccctctggggctggccctgctgggaggaatgccggcccccacccccaccttctccttgagtttctgtgaattaaaatatttgcaaatccaaa

SEQ ID NO: 37431 - DNA, 529 bp, Homo sapiens
  misc_feature (208)..(208): n is a, c, g, or t
tggttgtgaggtactcatcttcctttagttacccttagttatgtggcacacatgtccttattgcctagttcgtcatccacactttggatcttgtgaaaatgctgttagtatccaaccttaaaatatattagtatatgggtttttattaaaagaattactttgaattttctatttaattcatatgtaaataaaggaacatttcatttcncttaaaaaaattatatcagcctattatttcataattttaaattaaaaagtttagacaatatgtaatctaatagttttgaagatagttgcccagaaaggcttcgtgagttccacaagagtttggattgaattgctagtagttggcagcagctaagggatatggatggttgattgctctgtaggaggtttagtaagaaagaagccaagttctgggcaaggccttttgagctctgcttcccttttgcccccaaggtggctgaccaagcccagtgccctggattctaaataagatgtctttgaaaaagatgttgcattgtttaaa

SEQ ID NO: 37432 - DNA, 140 bp, Homo sapiens
gacaggccaaccaggatcttcttccttaattttctaagctggaaatggcaaagaaagctcttttggccctatatctggttgcctacctgtaccaataaatcccttcagccataagtatttaacaataacattataaagca

SEQ ID NO: 37433 - DNA, 372 bp, Homo sapiens
gaacctttttttttttttttttttgagacagggtctcactctgtcacccaggctggagtgcagtggcacgatctgggttcattgcaacctccacctcccaggctcaagcgatcctcccacctcagcctcccaagtagctgggtctataggcacatgccatgacacctggctaatttttttgtattttttatagacaggttttcacagtgttgctcaggctggtctcaaactcctaggctcaagcgatccgctggccttggccttccaaagtgctgggactacaggcatgagccaccatgcccagctagaaacttcttaaaaatgaagtcatgtttgtgaaatccagatcctcttttctatttgcgtttaaga

SEQ ID NO: 37434 - DNA, 701 bp, Homo sapiens
ctgattgcagagcttagagctactggtactggtcgaggaagagttgcaggaaggagacaggcagttcaggaggtggcactgctgtgtgtgagctgtctgtgttttccttctcagagtgcagagaagtgctgctgccactgctgacggaccagctcagcggccagttagatgacaactccaacaagcctgaccacgaggcaagctcgcagcttctgagcaacatcctggaggtgctggacaggaaggatgtgggtgccactgcggtgcacattcagcttataatggaacggctgctgagaaggatcaaccggacagtgattgggatgaaccggcagtctccccacatcgtgagtatctctttgttggatcccacggccgctgctgtttctctgtcccctttgcctatcgggaggccttcggggccagtggcttgagactattcttcacatgggcctctcacatcatgggtcattggttataaccttagcagatcttgattctgacatggattttctgttgagagaaaataatccagcctaggcaatatagtgagaccccatccctacaaaaaatttaaaaaattagctgggtgtggtggtggcacgtgcctgtggttgcagctactcaggaggctaaggtgggaggatcacttaaacgtgagatgtcgaggctgcagtgagctgtgattgcaccattgcatc

SEQ ID NO: 37435 - DNA, 403 bp, Homo sapiens
ctgattgcagagcttagagctactggtactggtcgaggaagagttgcaggaaggagacaggcagttcaggaggtggcactgctgtgtgtgagctgtctgtgttttccttctcagagtgcagagaagtgctgctgccactgctgacggaccagctcagcggccagttagatgacaactccaacaagcctgaccacgaggcaagctcgcagcttctgagcaacatcctggaggtgctggacaggaaggatgtggtgagttgagtcatcactgatgctgcacagagttcacactgtcccctttgcaccagacaggagtgactccgtggccttcctattctcaggtagtttccagctccggtattagggcaggctgtgcccattttagagataattagggaggccag

SEQ ID NO: 37436 - DNA, 419 bp, Homo sapiens
tcctaaaaatgtttagctgcttttcctgcttaaatgctcagatgacccataggacaaaggcacagttcaactccttcaattacagatgagctaactgaagctgagagaagagatgtgactggttcaaggtcgtagagatagttattgagagaatgggattaatacccactcttgcaagcttcagtccaactgttttttctgctaccagataattaataggtgccaccctcagagtctcagacctttcatatgggctctggaaaaagagaatgtgtatctgacttattgaggaggatgccaggagtttgtttgcctgagtcctgctgacagttttctcttggtccactgtgttctagaataactcagtttcacttcagtgaggtagaataaaaagggatcatctgaacaggaaaatggcc

SEQ ID NO: 37437 - DNA, 935 bp, Homo sapiens
ataggaacagcaaattgtatgaaggtaaatagatgaggataattaatggcagataatggctggttgtagtaaagtttcttatgcggattcctctggtgcagtctccaggctcaggctctaggttgtcactaacttctgccttccctggagagagggcaggagagaaaactctacaaatttatgtcatgcttttaggcagacagagggaaagcaaagagctttatctgtatctgcttcttcacaattgccttcagcaaaaaataatttttacaagtggcatactttggagtgacatattttgttacccttcattaatgacatttatttcaggaactgtatgtcagagaaaatccgtattatgtgtttgttgagtgaatacttgttcaagagaccaaaaaaaaaattagtaattacagtacaatacaacgtttgccacgatattgttctgtgtagacagcttcaagcaaaaatggacttagtttagagatagcttagcccagttagaagtcactgaagtaaggtgttgggagaaataaaaaaaaaaagaactaaaatagtgtaatccctttgaaaatactttatagaacatagctgagtctacaaattttgtttcaagatcatcatttgtatttaagaaggaggctgggcacagtggtccacacctctaatcacaagtgctttgggaggctgagacaggagatcgcttaagcccaggagttcgagaccagcctgggcaacatagcaagactctttgtctacaaaaaagttttaaaaatcagtctgtggtgatggcacttgcatgtagtcctagctgctagggtggctgaggcggaaaatcacttgagcccagaagttccaggctgcagtgagctgtgatcacgccactgcactctaggtgacagagcaagaacctgacttaaaaaatgaaaaaaaaa

SEQ ID NO: 37438 - DNA, 323 bp, Homo sapiens
agtgccaataactaggagctaatagagaaaagctaactaatggtgaaggtttgggcatagaaaagaggacactgttaagagtgaaacttgggaaatgagtagatgttatcagaaggagccagagcaccacaacggaggaatacatgtgtccatgtataatagcataaactaaggtggattcagtgaactgaaacaatgatctcctagaattgtgtatataaaatttgtgctttccaagtaatgtaaattgtagatcaattgttttcaattgaagggaaatttgggggagtaataaaagaattctatgccatgattgaactgta

SEQ ID NO: 37439 - DNA, 1025 bp, Homo sapiens
tgagacagggtcttgctgtgttgcccaggctggtcttgaactcatggcctcaagtgatcttcctgcctcatgctcccaaagtgttgggattataggcatgagccactgtgcccagctctagtgtaccattttaattctctcttttttttttaaacatactaacaccaaccggaatctcttgtttcttttgctttattcttttgagttattttctggattgttacctttctcccacctagttcaacccctcagaatcaccaagctaaaggatattaatgctggatctttttgtaaagacaagaaccttttcatagtgtgaataaccgccccctgctatatttgtcatagtctgaaatcagattgtcacatgttgtgttttctaggaatgtggttcctgttttaacgtagtacatgtcaggtaaaaggtaagccagagatagccattcaggagagaactgccagaaatgaaacgcttcctggtgaagggcagtgggtttgggtatgtacagtgccatgatgtttctttttcagctcattcttggaatcccagaacaggccttaagtcttctccacatggccatcgagcccatcttggctgacggggctatcctggacaaaggtcgtgccatgttcttagtggccaagtgccaggtggcttcagcagcttcctacgatcagccgaagaaagcagaagctctggaggctgccatcgagaacctcaatgaagccaagaactattttgcaaaggttgactgcaaagagcgcatcagggacgtcgtttacttccaggccagactctaccataccctggggaagacccaggagaggaaccggtgtgcgatgctcttccggcagctgcatcaggagctgccctctcatggggtacccttgataaaccatctctagagaggacatccctgctgggctgctgtgcagagtataagattttggacttgttcatgtcccctctctccctataaatgatgtatttgtgacaccctatcttgtcaataaacagcattctg

SEQ ID NO: 37440 - DNA, 448 bp, Homo sapiens
ctagaggtcccctgatgcaagagaaccccatgggtcgtgggtatatctgtccccttagtacctcgcctccctgggaatacagtcccttgttcaacagagagcttttgctgggaagacggcaaacaagctgatggatgccctaaaggactccgacctcctgcactggaaacacagcctgtcagagctcatcgatatcagcatcgcacagaaaacggccatctggaggctgtatggccgcaggtaggtctcccaaggccctgggggtgtgaattcttcagagagaagcaggagctagcaagctggttctgtgaaaggccatacatacaagatttacctgccttggatagatgttgttcctgcaggggactatgttttagactatacaacattcttgtattttgcacagactgaaaacttttttcccatgcatgttccttcttactcctcc

SEQ ID NO: 37441 - DNA, 438 bp, Homo sapiens
  misc_feature (23)..(23): n is a, c, g, or t
ctcggctctacctggtcttcagnccaagtgcaggggccagaagacaaagtcaattccatgtgagtagtaaaattaataacatgtacatgaaatttatgaggctgctgttttttagtttttcaagactccgtctcaaaaacaaccctaaaaccaaaaaacaaatctgtagcttgtccattgattcacacctgggaaagaaactcatacgtacagaattgattataatgacaaaagtggctccttgaagtaagcgcaggcttaactacaatttttgccatgaatttaagctggcattttttagttgagctttcatccttgaagatgacaccaaaagctaatgacaagataattttgttgctcatgataggcatccttttttgatctcctattacatatgtgcgcagcactgtttgacatctattatttcattgtaatcct

SEQ ID NO: 37442 - DNA, 414 bp, Homo sapiens
attttacagatgaggaagctgaggcttagctaagaagctaagtgactggccctaagtcacacaagagcttttgctgggaagacggcaaacaagctgatggatgccctaaaggactccgacctcctgcactggaaacacagcctgtcagagctcatcgatatcagcatcgcacagaaaacggccatctggaggctgtatggccgcaggtaggtctcccaaggccctgggggtgtgaattcttcagagagaagcaggagctagcaagctggttctgtgaaaggccatacatacaagatttacctgccttggatagatgttgttcctgcaggggactatgttttagactatacaacattcttgtattttgcacagactgaaaacttttttcccatgcatgttccttcttactcctcc

SEQ ID NO: 37443 - DNA, 2248 bp, Homo sapiens
caagaccagccgggccaacatggtgaaaccccatctctacaaacaatacaaaaattagccgggcgtggtggtgcgtgcctgtagttccagctactcgggaggctgagggcccagatattacactgtcaaaactttacaagttaattgaagagtcttgtccacagctggcaaattcagtgcagatcagaatcaaactgatggctgaaggcgagttgaaggatatggaacagttttttgatgacctttcagattctttctctggaactgaaccagaggttcacaaaacaagtgtagtaggtttgtttctgcgtcacatgatcttggcctacagtaagctttctttcagccaagtgtttaaactgtacactgcccttcagcagtacttccagaatggtgagaaaaagacagtggaggatgctgatatggaactgaccagtagagatgagggtgaaagaaaaatggaaaaagaagaacttgatgtatctgtaagagaagaggaggtatcttgcagtgggcctctgtcccaaaaacaagcagaattttttctttctcaacaggcttctttgctaaagaatgatgagactaaggccctcactccagcttccttgcagaaggaattaaacaatttgttgaaatttaatcctgattttgctgaagcgcattatctcagctacttaaacaacctccgtgtccaagatgttttcagttcaacacacagtctcctccattattttgatcgtctgattcttaccggagccgaaagcaaaagtaatggggaagagggctatggccggagcttgagatacgccgctctgaatcttgccgccctgcactgccgcttcggtcactatcaacaggcagagctcgccctgcaggaggcaattaggattgcccaggagtccaacgatcacgtgtgtctccagcactgtttgagctggctttatgtgctggggcagaagagatccgatagctatgttctgctggagcattctgtgaagaaggcagtacattttgggttaccgagagcttttgctgggaagacggcaaacaagctgatggatgccctaaaggactccgacctcctgcactggaaacacagcctgtcagagctcatcgatatcagcatcgcacagaaaacggccatctggaggctgtatggccgcagcaccatggcactgcaacaggcccagatgttgctgagcatgaacagcctggaggcggtgaatgcgggcgtgcagcagaacaacacagagtcctttgctgtcgcactctgccacctcgcagagctacacgcggagcagggctgttttgctgcagcttctgaagtgttaaagcacttgaaggaacgatttccgcctaatagtcagcacgcccagttatggatgctatgtgatcaaaaaatacagtttgacagagcaatgaatgatggcaaatatcatttggctgattcacttgttacaggaatcacagctctcaatagcatagagggtgtttataggaaagcggttgtattacaagctcagaaccaaatgtcagaggcacataagcttttacaaaaattgttggttcattgtcagaaactgaagaacacagaaatggtgatcagtgtcctactgtccgtggcagagctgtactggcgatcttcctcccctaccatcgcgctgcccatgctcctgcaggctctggccctctccaaggagtaccggttacagtacttggcctctgaaacagtgctgaacttggcttttgcgcagctcattcttggaatcccagaacaggccttaagtcttctccacatggccatcgagcccatcttggctgacggggctatcctggacaaaggtcgtgccatgttcttagtggccaagtgccaggtggcttcagcagcttcctacgatcagccgaagaaagcagaagctctggaggctgccatcgagaacctcaatgaagccaagaactattttgcaaaggttgactgcaaagagcgcatcagggacgtcgtttacttccaggccagactctaccataccctggggaagacccaggagaggaaccggtgtgcgatgctcttccggcagctgcatcaggagctgccctctcatggggtacccttgataaaccatctctagagaggacatccctgctgggctgctgtgcagagtataagattttggacttgttcatgtcccctctctccctataaatgatgtatttgtgacaccctatcttgtcaataaacagcattctg

SEQ ID NO: 37444 - DNA, 1077 bp, Homo sapiens
gttgaattggccttcacaaggccccgttgaattgggttgttttgcagttggagcagagatcttcagcagcaaaaggaaacaagttaggtggtcatgggaattcagaaagggcaacttatctttacttacctttcttaattcatgacatctgttttgcttttggcatatatctgctctacaaagtttaatgcaacttgccatgaaagaagagaaacctttatcacatttagcactggcattaacaaaagatgtatactacacttagtaactgggtgagatgttgtcctgtaatagcaaaatcaccagggcagtggaacacagaagctacttgacaagcacctgagaatcttatttctcaattgaaggccatatgggagcttcatgctttttttctgaaacacctgccactcagtggctgtcaggtgaagcagaacaatgactcatttatttcagcctggttttaatgatgttgatatgtttgacaggtctcattgagattcttgatatttcttgaaagagtatttgagaggattcattttgtcccttttaaattctttcttatgaccacattgatatttcactagaacatcagccattgccactgttatgatatattttgatgatttctcttgccagagctggctttatgtgctggggcagaagagatccgatagctatgttctgctggagcattctgtgaagaaggcagtacattttgggttaccgagagcttttgctgggaagacggcaaacaagctgatggatgccctaaaggactccgacctcctgcactggaaacacagcctgtcagagctcatcgatatcagcatcgcacagaaaacggccatctggaggctgtatggccgcaggtaggtctcccaaggccctgggggtgtgaattcttcagagagaagcaggagctagcaagctggttctgtgaaaggccatacatacaagatttacctgccttggatagatgttgttcctgcaggggactatgttttagactatacaacattcttgtattttgcacagactgaaaacttttttcccatgcatgttccttcttactcctcc

SEQ ID NO: 37445 - DNA, 2606 bp, Homo sapiens
tttagcaggtagcgaggcctgggtcccgagacccggtagtgttgtgccttgtggtgacaactggcggcagcgcgccgcgggcccgagacttagtctcgggccgccatggccagcgtccacgagagcctctacttcaatcccatgatgaccaatggggttgtgcacgccaatgtgttcggcatcaaggactgggtgacgccgtacaagatcgcggtgctggtgctgctgaacgagatgagccgcacaggcgagggcgccgtcagcctcatggagcggcggaggctcaaccagctgctcctgcccctgctgcagggcccagatattacactgtcaaaactttacaagttaattgaagagtcttgtccacagctggcaaattcagtgcagatcagaatcaaactgatggctgaaggcgagttgaaggatatggaacagttttttgatgacctttcagattctttctctggaactgaaccagaggttcacaaaacaagtgtagtaggtttgtttctgcgtcacatgatcttggcctacagtaagctttctttcagccaagtgtttaaactgtacactgcccttcagcagtacttccagaatggtgagaaaaagacagtggaggatgctgatatggaactgaccagtagagatgagggtgaaagaaaaatggaaaaagaagaacttgatgtatctgtaagagaagaggaggtatcttgcagtgggcctctgtcccaaaaacaagcagaattttttctttctcaacaggcttctttgctaaagaatgatgagactaaggccctcactccagcttccttgcagaaggaattaaacaatttgttgaaatttaatcctgattttgctgaagcgcattatctcagctacttaaacaacctccgtgtccaagatgttttcagttcaacacacagtctcctccattattttgatcgtctgattcttaccggagccgaaagcaaaagtaatggggaagagggctatggccggagcttgagatacgccgctctgaatcttgccgccctgcactgccgcttcggtcactatcaacaggcagagctcgccctgcaggaggcaattaggattgcccaggagtccaacgatcacgtgtgtctccagcactgtttgagctggctttatgtgctggggcagaagagatccgatagctatgttctgctggagcattctgtgaagaaggcagtacattttgggttaccgtacctcgcctccctgggaatacagtcccttgttcaacagagagcttttgctgggaagacggcaaacaagctgatggatgccctaaaggactccgacctcctgcactggaaacacagcctgtcagagctcatcgatatcagcatcgcacagaaaacggccatctggaggctgtatggccgcagcaccatggcactgcaacaggcccagatgttgctgagcatgaacagcctggaggcggtgaatgcgggcgtgcagcagaacaacacagagtcctttgctgtcgcactctgccacctcgcagagctacacgcggagcagggctgttttgctgcagcttctgaagtgttaaagcacttgaaggaacgatttccgcctaatagtcagcacgcccagttatggatgctatgtgatcaaaaaatacagtttgacagagcaatgaatgatggcaaatatcatttggctgattcacttgttacaggaatcacagctctcaatagcatagagggtgtttataggaaagcggttgtattacaagctcagaaccaaatgtcagaggcacataagcttttacaaaaattgttggttcattgtcagaaactgaagaacacagaaatggtgatcagtgtcctactgtccgtggcagagctgtactggcgatcttcctcccctaccatcgcgctgcccatgctcctgcaggctctggccctctccaaggagtaccggttacagtacttggcctctgaaacagtgctgaacttggcttttgcgcagctcattcttggaatcccagaacaggccttaagtcttctccacatggccatcgagcccatcttggctgacggggctatcctggacaaaggtcgtgccatgttcttagtggccaagtgccaggtggcttcagcagcttcctacgatcagccgaagaaagcagaagctctggaggctgccatcgagaacctcaatgaagccaagaactattttgcaaaggttgactgcaaagagcgcatcagggacgtcgtttacttccaggccagactctaccataccctggggaagacccaggagaggaaccggtgtgcgatgctcttccggcagctgcatcaggagctgccctctcatggggtacccttgataaaccatctctagagaggacatccctgctgggctgctgtgcagagtataagattttggacttgttcatgtcccctctctccctataaatgatgtatttgtgacaccctatcttgtcaataaacagcattctgattagtttgtcttattttgttgctagtaactacgtatttgttttattccccttttcttcccttttggtagcaaaggacaccaactttttcttaataaatgggtattttgctaac

SEQ ID NO: 37446 - DNA, 3138 bp, Homo sapiens
tttagcaggtagcgaggcctgggtcccgagacccggtagtgttgtgccttgtggtgacaactggcggcagcgcgccgcgggcccgagacttagtctcgggccgccatggccagcgtccacgagagcctctacttcaatcccatgatgaccaatggggttgtgcacgccaatgtgttcggcatcaaggactgggtgacgccgtacaagatcgcggtgctggtgctgctgaacgagatgagccgcacaggcgagggcgccgtcagcctcatggagcggcggaggctcaaccagctgctcctgcccctgctgcagggcccagatattacactgtcaaaactttacaagttaattgaagagtcttgtccacagctggcaaattcagtgcagatcagaatcaaactgatggctgaaggcgagttgaaggatatggaacagttttttgatgacctttcagattctttctctggaactgaaccagaggttcacaaaacaagtgtagtaggtttgtttctgcgtcacatgatcttggcctacagtaagctttctttcagccaagtgtttaaactgtacactgcccttcagcagtacttccagaatggtgagaaaaagacagtggaggatgctgatatggaactgaccagtagagatgagggtgaaagaaaaatggaaaaagaagaacttgatgtatctgtaagagaagaggaggtatcttgcagtgggcctctgtcccaaaaacaagcagaattttttctttctcaacaggcttctttgctaaagaatgatgagactaaggccctcactccagcttccttgcagaaggaattaaacaatttgttgaaatttaatcctgattttgctgaagcgcattatctcagctacttaaacaacctccgtgtccaagatgttttcagttcaacacacagtctcctccattattttgatcgtctgattcttaccggagccgaaagcaaaagtaatggggaagagggctatggccggagcttgagatacgccgctctgaatcttgccgccctgcactgccgcttcggtcactatcaacaggcagagctcgccctgcaggaggcaattaggattgcccaggagtccaacgatcacgtgtgtctccagcactgtttgagctggctttatgtgctggggcagaagagatccgatagctatgttctgctggagcattctgtgaagaaggcagtacattttgggttaccgtacctcgcctccctgggaatacagtcccttgttcaacagagagcttttgctgggaagacggcaaacaagctgatggatgccctaaaggactccgacctcctgcactggaaacacagcctgtcagagctcatcgatatcagcatcgcacagaaaacggccatctggaggctgtatggccgcagcaccatggcactgcaacaggcccagatgttgctgagcatgaacagcctggaggcggtgaatgcgggcgtgcagcagaacaacacagagtcctttgctgtcgcactctgccacctcgcagagctacacgcggagcagggctgttttgctgcagcttctgaagtgttaaagcacttgaaggaacgatttccgcctaatagtcagcacgcccagttatggatgctatgtgatcaaaaaatacagtttgacagagcaatgaatgatggcaaatatcatttggctgattcacttgttacaggaatcacagctctcaatagcatagagggtgtttataggaaagcggttgtattacaagctcagaaccaaatgtcagaggcacataagcttttacaaaaattgttggttcattgtcagaaactgaagaacacagaaatggtgatcagtgtcctactgtccgtggcagagctgtactggcgatcttcctcccctaccatcgcgctgcccatgctcctgcaggctctggccctctccaaggagtaccggttacagtacttggcctctgaaacagtgctgaacttggcttttgcgcagctcattcttggaatcccagaacaggccttaagtcttctccacatggccatcgagcccatcttggctgacggggctatcctggacaaaggtcgtgccatgttcttagtggccaagtgccaggtggcttcagcagcttcctacgatcagccgaagaaagcagaagctctggaggctgccatcgagaacctcaatgaagccaagaactattttgcaaaggttgactgcaaagagcgcatcagggacgtcgtttacttccaggccagactctaccataccctggggaagacccaggagaggaaccggtgtgcgatgctcttccggcagctgcatcaggagctgccctctcatggggtacccttgataaaccatctctagagaggacatccctgctgggctgctgtgcagagtataagattttggacttgttcatgtcccctctctccctataaatgatgtatttgtgacaccctatcttgtcaataaacagcattctgaaaaaaacacacaaaaaaacacaaacacacacccaaacaaaccaaaacacaaaaacccgcgaaggccgagaggcgcgggacgaaccagaaaccgaagcggcgcacccgcaccgcaggacgcgcacgcggacgagccggcaaccccgcgacgcggcccacccgaccacacgggcacgacgaagtcgcacctggcgccgcggggagaaccggccgaggcccgcagcgggagcggccgaaccaaggcgcgggacgcggggaggggcacacggagcaggggcgcagccgcgaggggaaagaagcgaacacgaccgccgcgcgccacaacgagagaaccgacaccggcagggagaaagcgaggggccagtaccacaaacgcagccgaacgcagcaacaggggagagccacggccgggcgaaacccacggcaaacgactgggcccgcgacccgggcggcacggaacacagcgccgcgaggagaaaaacaagagcaagcggcgacccgcggcacggggaccacggtgcgtggagcagaggcccccgccccagcgcaacaaggcgcggcgagaagcacgcccggggcgtacccgcggcggccgagcccaccagcaagaggacaagacaccagggacgcggtcgccaggcagggc

SEQ ID NO: 37447 - DNA, 2567 bp, Homo sapiens
tttagcaggtagcgaggcctgggtcccgagacccggtagtgttgtgccttgtggtgacaactggcggcagcgcgccgcgggcccgagacttagtctcgggccgccatggccagcgtccacgagagcctctacttcaatcccatgatgaccaatggggttgtgcacgccaatgtgttcggcatcaaggactgggtgacgccgtacaagatcgcggtgctggtgctgctgaacgagatgagccgcacaggcgagggcgccgtcagcctcatggagcggcggaggctcaaccagctgctcctgcccctgctgcagggcccagatattacactgtcaaaactttacaagttaattgaagagtcttgtccacagctggcaaattcagtgcagatcagaatcaaactgatggctgaaggcgagttgaaggatatggaacagttttttgatgacctttcagattctttctctggaactgaaccagaggttcacaaaacaagtgtagtaggtttgtttctgcgtcacatgatcttggcctacagtaagctttctttcagccaagtgtttaaactgtacactgcccttcagcagtacttccagaatggtgagaaaaagacagtggaggatgctgatatggaactgaccagtagagatgagggtgaaagaaaaatggaaaaagaagaacttgatgtatctgtaagagaagaggaggtatcttgcagtgggcctctgtcccaaaaacaagcagaattttttctttctcaacaggcttctttgctaaagaatgatgagactaaggccctcactccagcttccttgcagaaggaattaaacaatttgttgaaatttaatcctgattttgctgaagcgcattatctcagctacttaaacaacctccgtgtccaagatgttttcagttcaacacacagtctcctccattattttgatcgtctgattcttaccggagccgaaagcaaaagtaatggggaagagggctatggccggagcttgagatacgccgctctgaatcttgccgccctgcactgccgcttcggtcactatcaacaggcagagctcgccctgcaggaggcaattaggattgcccaggagtccaacgatcacgtgtgtctccagcactgtttgagctggctttatgtgctggggcagaagagatccgatagctatgttctgctggagcattctgtgaagaaggcagtacattttgggttaccgagagcttttgctgggaagacggcaaacaagctgatggatgccctaaaggactccgacctcctgcactggaaacacagcctgtcagagctcatcgatatcagcatcgcacagaaaacggccatctggaggctgtatggccgcagcaccatggcactgcaacaggcccagatgttgctgagcatgaacagcctggaggcggtgaatgcgggcgtgcagcagaacaacacagagtcctttgctgtcgcactctgccacctcgcagagctacacgcggagcagggctgttttgctgcagcttctgaagtgttaaagcacttgaaggaacgatttccgcctaatagtcagcacgcccagttatggatgctatgtgatcaaaaaatacagtttgacagagcaatgaatgatggcaaatatcatttggctgattcacttgttacaggaatcacagctctcaatagcatagagggtgtttataggaaagcggttgtattacaagctcagaaccaaatgtcagaggcacataagcttttacaaaaattgttggttcattgtcagaaactgaagaacacagaaatggtgatcagtgtcctactgtccgtggcagagctgtactggcgatcttcctcccctaccatcgcgctgcccatgctcctgcaggctctggccctctccaaggagtaccggttacagtacttggcctctgaaacagtgctgaacttggcttttgcgcagctcattcttggaatcccagaacaggccttaagtcttctccacatggccatcgagcccatcttggctgacggggctatcctggacaaaggtcgtgccatgttcttagtggccaagtgccaggtggcttcagcagcttcctacgatcagccgaagaaagcagaagctctggaggctgccatcgagaacctcaatgaagccaagaactattttgcaaaggttgactgcaaagagcgcatcagggacgtcgtttacttccaggccagactctaccataccctggggaagacccaggagaggaaccggtgtgcgatgctcttccggcagctgcatcaggagctgccctctcatggggtacccttgataaaccatctctagagaggacatccctgctgggctgctgtgcagagtataagattttggacttgttcatgtcccctctctccctataaatgatgtatttgtgacaccctatcttgtcaataaacagcattctgattagtttgtcttattttgttgctagtaactacgtatttgttttattccccttttcttcccttttggtagcaaaggacaccaactttttcttaataaatgggtattttgctaac

SEQ ID NO: 37448 - DNA, 2745 bp, Homo sapiens
tttagcaggtagcgaggcctgggtcccgagacccggtagtgttgtgccttgtggtgacaactggcggcagcgcgccgcgggcccgagacttagtctcgggccgccatggccagcgtccacgagagcctctacttcaatcccatgatgaccaatggggttgtgcacgccaatgtgttcggcatcaaggactgggtgacgccgtacaagatcgcggtgctggtgctgctgaacgagatgagccgcacaggcgagggcgccgtcagcctcatggagcggcggaggctcaaccagctgctcctgcccctgctgcagggcccagatattacactgtcaaaactttacaagttaattgaagagtcttgtccacagctggcaaattcagtgcagatcagaatcaaactgatggctgaaggcgagttgaaggatatggaacagttttttgatgacctttcagattctttctctggaactgaaccagaggttcacaaaacaagtgtagtaggtttgtttctgcgtcacatgatcttggcctacagtaagctttctttcagccaagtgtttaaactgtacactgcccttcagcagtacttccagaatggtgagaaaaagacagtggaggatgctgatatggaactgaccagtagagatgagggtgaaagaaaaatggaaaaagaagaacttgatgtatctgtaagagaagaggaggtatcttgcagtgggcctctgtcccaaaaacaagcagaattttttctttctcaacaggcttctttgctaaagaatgatgagactaaggccctcactccagcttccttgcagaaggaattaaacaatttgttgaaatttaatcctgattttgctgaagcgcattatctcagctacttaaacaacctccgtgtccaagatgttttcagttcaacacacagtctcctccattattttgatcgtctgattcttaccggagccgaaagcaaaagtaatggggaagagggctatggccggagcttgagatacgccgctctgaatcttgccgccctgcactgccgcttcggtcactatcaacaggcagagctcgccctgcaggaggcaattaggattgcccaggagtccaacgatcacgtgtgtctccagcactgtttgagctggctttatgtgctggggcagaagagatccgatagctatgttctgctggagcattctgtgaagaaggcagtacattttgggttaccgtacctcgcctccctgggaatacagtcccttgttcaacagagagcttttgctgggaagacggcaaacaagctgatggatgccctaaaggactccgacctcctgcactggaaacacagcctgtcagagctcatcgatatcagcatcgcacagaaaacggccatctggaggctgtatggccgcagcaccatggcactgcaacaggcccagatgttgctgagcatgaacagcctggaggcggtgaatgcgggcgtgcagcagaacaacacagagtcctttgctgtcgcactctgccacctcgcagagctacacgcggagcagaactaaagactgaggtcctgggagctaaatcctgtatccaacacctgtaaatgtcagaggcaggtctccaaccgaaacctggttgactccaaagaagagcagtgggaatgggacataatcttgatgacttacagctcaaggctgttttgctgcagcttctgaagtgttaaagcacttgaaggaacgatttccgcctaatagtcagcacgcccagttatggatgctatgtgatcaaaaaatacagtttgacagagcaatgaatgatggcaaatatcatttggctgattcacttgttacaggaatcacagctctcaatagcatagagggtgtttataggaaagcggttgtattacaagctcagaaccaaatgtcagaggcacataagcttttacaaaaattgttggttcattgtcagaaactgaagaacacagaaatggtgatcagtgtcctactgtccgtggcagagctgtactggcgatcttcctcccctaccatcgcgctgcccatgctcctgcaggctctggccctctccaaggagtaccggttacagtacttggcctctgaaacagtgctgaacttggcttttgcgcagctcattcttggaatcccagaacaggccttaagtcttctccacatggccatcgagcccatcttggctgacggggctatcctggacaaaggtcgtgccatgttcttagtggccaagtgccaggtggcttcagcagcttcctacgatcagccgaagaaagcagaagctctggaggctgccatcgagaacctcaatgaagccaagaactattttgcaaaggttgactgcaaagagcgcatcagggacgtcgtttacttccaggccagactctaccataccctggggaagacccaggagaggaaccggtgtgcgatgctcttccggcagctgcatcaggagctgccctctcatggggtacccttgataaaccatctctagagaggacatccctgctgggctgctgtgcagagtataagattttggacttgttcatgtcccctctctccctataaatgatgtatttgtgacaccctatcttgtcaataaacagcattctgattagtttgtcttattttgttgctagtaactacgtatttgttttattccccttttcttcccttttggtagcaaaggacaccaactttttcttaataaatgggtattttgctaac

SEQ ID NO: 37449 - DNA, 2528 bp, Homo sapiens
tttagcaggtagcgaggcctgggtcccgagacccggtagtgttgtgccttgtggtgacaactggcggcagcgcgccgcgggcccgagacttagtctcgggccgccatggccagcgtccacgagagcctctacttcaatcccatgatgaccaatggggttgtgcacgccaatgtgttcggcatcaaggactgggtgacgccgtacaagatcgcggtgctggtgctgctgaacgagatgagccgcacaggcgagggcgccgtcagcctcatggagcggcggaggctcaaccagctgctcctgcccctgctgcagggcccagatattacactgtcaaaactttacaagttaattgaagagtcttgtccacagctggcaaattcagtgcagatcagaatcaaactgatggctgaaggcgagttgaaggatatggaacagttttttgatgacctttcagattctttctctggaactgaaccagaggttcacaaaacaagtgtagtaggtttgtttctgcgtcacatgatcttggcctacagtaagctttctttcagccaagtgtttaaactgtacactgcccttcagcagtacttccagaatggtgagaaaaagacagtggaggatgctgatatggaactgaccagtagagatgagggtgaaagaaaaatggaaaaagaagaacttgatgtatctgtaagagaagaggaggtatcttgcagtgggcctctgtcccaaaaacaagcagaattttttctttctcaacaggcttctttgctaaagaatgatgagactaaggccctcactccagcttccttgcagaaggaattaaacaatttgttgaaatttaatcctgattttgctgaagcgcattatctcagctacttaaacaacctccgtgtccaagatgttttcagttcaacacacagtctcctccattattttgatcgtctgattcttaccggagccgaaagcaaaagtaatggggaagagggctatggccggagcttgagatacgccgctctgaatcttgccgccctgcactgccgcttcggtcactatcaacaggcagagctcgccctgcaggaggcaattaggattgcccaggagtccaacgatcacgtgtgtctccagcactgtttgagctggctttatgtgctggggcagaagagatccgatagctatgttctgctggagcattctgtgaagaaggcagtacattttgggttaccgagagcttttgctgggaagacggcaaacaagctgatggatgccctaaaggactccgacctcctgcactggaaacacagcctgtcagagctcatcgatatcagcatcaccatggcactgcaacaggcccagatgttgctgagcatgaacagcctggaggcggtgaatgcgggcgtgcagcagaacaacacagagtcctttgctgtcgcactctgccacctcgcagagctacacgcggagcagggctgttttgctgcagcttctgaagtgttaaagcacttgaaggaacgatttccgcctaatagtcagcacgcccagttatggatgctatgtgatcaaaaaatacagtttgacagagcaatgaatgatggcaaatatcatttggctgattcacttgttacaggaatcacagctctcaatagcatagagggtgtttataggaaagcggttgtattacaagctcagaaccaaatgtcagaggcacataagcttttacaaaaattgttggttcattgtcagaaactgaagaacacagaaatggtgatcagtgtcctactgtccgtggcagagctgtactggcgatcttcctcccctaccatcgcgctgcccatgctcctgcaggctctggccctctccaaggagtaccggttacagtacttggcctctgaaacagtgctgaacttggcttttgcgcagctcattcttggaatcccagaacaggccttaagtcttctccacatggccatcgagcccatcttggctgacggggctatcctggacaaaggtcgtgccatgttcttagtggccaagtgccaggtggcttcagcagcttcctacgatcagccgaagaaagcagaagctctggaggctgccatcgagaacctcaatgaagccaagaactattttgcaaaggttgactgcaaagagcgcatcagggacgtcgtttacttccaggccagactctaccataccctggggaagacccaggagaggaaccggtgtgcgatgctcttccggcagctgcatcaggagctgccctctcatggggtacccttgataaaccatctctagagaggacatccctgctgggctgctgtgcagagtataagattttggacttgttcatgtcccctctctccctataaatgatgtatttgtgacaccctatcttgtcaataaacagcattctgattagtttgtcttattttgttgctagtaactacgtatttgttttattccccttttcttcccttttggtagcaaaggacaccaactttttcttaataaatgggtattttgctaac

SEQ ID NO: 37450 - DNA, 2683 bp, Homo sapiens
tttagcaggtagcgaggcctgggtcccgagacccggtagtgttgtgccttgtggtgacaactggcggcagcgcgccgcgggcccgagacttagtctcgggccgccatggccagcgtccacgagagcctctacttcaatcccatgatgaccaatggggttgtgcacgccaatgtgttcggcatcaaggactgggtgacgccgtacaagatcgcggtgctggtgctgctgaacgagatgagccgcacaggcgagggcgccgtcagcctcatggagcggcggaggctcaaccagctgctcctgcccctgctgcagggcccagatattacactgtcaaaactttacaagttaattgaagagtcttgtccacagctggcaaattcagtgcagatcagaatcaaactgatggctgaaggcgagttgaaggatatggaacagttttttgatgacctttcagattctttctctggaactgaaccagaggttcacaaaacaagtgtagtaggtttgtttctgcgtcacatgatcttggcctacagtaagctttctttcagccaagtgtttaaactgtacactgcccttcagcagtacttccagaatggtgagaaaaagacagtggaggatgctgatatggaactgaccagtagagatgagggtgaaagaaaaatggaaaaagaagaacttgatgtatctgtaagagaagaggaggtatcttgcagtgggcctctgtcccaaaaacaagcagaattttttctttctcaacaggcttctttgctaaagaatgatgagactaaggccctcactccagcttccttgcagaaggaattaaacaatttgttgaaatttaatcctgattttgctgaagcgcattatctcagctacttaaacaacctccgtgtccaagatgttttcagttcaacacacagtctcctccattattttgatcgtctgattcttaccggagccgaaagcaaaagtaatggggaagagggctatggccggagcttgagatacgccgctctgaatcttgccgccctgcactgccgcttcggtcactatcaacaggcagagctcgccctgcaggaggcaattaggattgcccaggagtccaacgatcacgtgtgtctccagcactgtttgagctggctttatgtgctggggcagaagagatccgatagctatgttctgctggagcattctgtgaagaaggcagtacattttgggttaccgtacctcgcctccctgggaatacagtcccttgttcaacagagagcttttgctgggaagacggcaaacaagctgatggatgccctaaaggactccgacctcctgcactggaaacacagcctgtcagagctcatcgatatcagcatcgcacagaaaacggccatctggaggctgtatggccgcagcaccatggcactgcaacaggcccagatgttgctgagcatgaacagcctggaggcggtgaatgcgggcgtgcagcagaacaacacagagtcctttgctgtcgcactctgccacctcgcagagctacacgcggagcagggctgttttgctgcagcttctgaagtgttaaagcacttgaaggaacgatttccgcctaatagtcagcacgcccagttatggatgctatgtgatcaaaaaatacagtttgacagagcaatgaatgatggcaaatatcatttggctgattcacttgttacaggaatcacagctctcaatagcatagagggtgtttataggaaagcggttgtattacaagctcagaaccaaatgtcagaggcacataagcttttacaaaaattgttggttcattgtcagaaactgaagaacacagaaatggtgatcaggtaaggggtctcttgtacatctcacggagatgtggtggtggatcttctcatcctgtgttttcctctttacggtcagttgtcctactgtccgtggcagagctgtactggcgatcttcctcccctaccatcgcgctgcccatgctcctgcaggctctggccctctccaaggagtaccggttacagtacttggcctctgaaacagtgctgaacttggcttttgcgcagctcattcttggaatcccagaacaggccttaagtcttctccacatggccatcgagcccatcttggctgacggggctatcctggacaaaggtcgtgccatgttcttagtggccaagtgccaggtggcttcagcagcttcctacgatcagccgaagaaagcagaagctctggaggctgccatcgagaacctcaatgaagccaagaactattttgcaaaggttgactgcaaagagcgcatcagggacgtcgtttacttccaggccagactctaccataccctggggaagacccaggagaggaaccggtgtgcgatgctcttccggcagctgcatcaggagctgccctctcatggggtacccttgataaaccatctctagagaggacatccctgctgggctgctgtgcagagtataagattttggacttgttcatgtcccctctctccctataaatgatgtatttgtgacaccctatcttgtcaataaacagcattctgattagtttgtcttattttgttgctagtaactacgtatttgttttattccccttttcttcccttttggtagcaaaggacaccaactttttcttaataaatgggtattttgctaac

SEQ ID NO: 37451 - DNA, 2633 bp, Homo sapiens
tttagcaggtagcgaggcctgggtcccgagacccggtagtgttgtgccttgtggtgacaactggcggcagcgcgccgcgggcccgagacttagtctcgggccgccatggccagcgtccacgagagcctctacttcaatcccatgatgaccaatggggttgtgcacgccaatgtgttcggcatcaaggactgggtgacgccgtacaagatcgcggtgctggtgctgctgaacgagatgagccgcacaggcgagggcgccgtcagcctcatggagcggcggaggctcaaccagctgctcctgcccctgctgcagggcccagatattacactgtcaaaactttacaagttaattgaagagtcttgtccacagctggcaaattcagtgcagatcagaatcaaactgatggctgaaggcgagttgaaggatatggaacagttttttgatgacctttcagattctttctctggaactgaaccagaggttcacaaaacaagtgtagtaggtttgtttctgcgtcacatgatcttggcctacagtaagctttctttcagccaagtgtttaaactgtacactgcccttcagcagtacttccagaatggtgagaaaaagacagtggaggatgctgatatggaactgaccagtagagatgagggtgaaagaaaaatggaaaaagaagaacttgatgtatctgtaagagaagaggaggtatcttgcagtgggcctctgtcccaaaaacaagcagaattttttctttctcaacaggcttctttgctaaagaatgatgagactaaggccctcactccagcttccttgcagaaggaattaaacaatttgttgaaatttaatcctgattttgctgaagcgcattatctcagctacttaaacaacctccgtgtccaagatgttttcagttcaacacacagtctcctccattattttgatcgtctgattcttaccggagccgaaagcaaaagtaatggggaagagggctatggccggagcttgagatacgccgctctgaatcttgccgccctgcactgccgcttcggtcactatcaacaggcagagctcgccctgcaggaggcaattaggattgcccaggagtccaacgatcacgtgtgtctccagcactgtttgagctggctttatgtgctggggcagaagagatccgatagctatgttctgctggagcattctgtgaagaaggcagtacattttgggttaccgtacctcgcctccctgggaatacagtcccttgttcaacagagagcttttgctgggaagacggcaaacaagctgatggatgccctaaaggactccgacctcctgcactggaaacacagcctgtcagagctcatcgatatcagcatcgcacagaaaacggccatctggaggctgtatggccgcagcaccatggcactgcaacaggcccagatgttgctgagcatgaacagcctggaggcggtgaatgcgggcgtgcagcagaacaacacagagtcctttgctgtcgcactctgccacctcgcagagctacacgcggagcagggctgttttgctgcagcttctgaagtgttaaagcacttgaaggaacgatttccgcctaatagtcagcacgcccagttatggatgctatgtgatcaaaaaatacagtttgacagagcaatgaatgatggcaaatatcatttggctgattcacttgttacaggaatcacagctctcaatagcatagagggtgtttataggaaagcggttgtattacaagctcagaaccaaatgtcagaggcacataagcttttacaagtaaggggtctcttgtacatctcacggagatgtggtggtggatcttctcatcctgtgttttcctctttacggtcagttgtcctactgtccgtggcagagctgtactggcgatcttcctcccctaccatcgcgctgcccatgctcctgcaggctctggccctctccaaggagtaccggttacagtacttggcctctgaaacagtgctgaacttggcttttgcgcagctcattcttggaatcccagaacaggccttaagtcttctccacatggccatcgagcccatcttggctgacggggctatcctggacaaaggtcgtgccatgttcttagtggccaagtgccaggtggcttcagcagcttcctacgatcagccgaagaaagcagaagctctggaggctgccatcgagaacctcaatgaagccaagaactattttgcaaaggttgactgcaaagagcgcatcagggacgtcgtttacttccaggccagactctaccataccctggggaagacccaggagaggaaccggtgtgcgatgctcttccggcagctgcatcaggagctgccctctcatggggtacccttgataaaccatctctagagaggacatccctgctgggctgctgtgcagagtataagattttggacttgttcatgtcccctctctccctataaatgatgtatttgtgacaccctatcttgtcaataaacagcattctgattagtttgtcttattttgttgctagtaactacgtatttgttttattccccttttcttcccttttggtagcaaaggacaccaactttttcttaataaatgggtattttgctaac

SEQ ID NO: 37452 - DNA, 2505 bp, Homo sapiens
tttagcaggtagcgaggcctgggtcccgagacccggtagtgttgtgccttgtggtgacaactggcggcagcgcgccgcgggcccgagacttagtctcgggccgccatggccagcgtccacgagagcctctacttcaatcccatgatgaccaatggggttgtgcacgccaatgtgttcggcatcaaggactgggtgacgccgtacaagatcgcggtgctggtgctgctgaacgagatgagccgcacaggcgagggcgccgtcagcctcatggagcggcggaggctcaaccagctgctcctgcccctgctgcagggcccagatattacactgtcaaaactttacaagttaattgaagagtcttgtccacagctggcaaattcagtgcagatcagaatcaaactgatggctgaaggcgagttgaaggatatggaacagttttttgatgacctttcagattctttctctggaactgaaccagaggttcacaaaacaagtgtagtaggtttgtttctgcgtcacatgatcttggcctacagtaagctttctttcagccaagtgtttaaactgtacactgcccttcagcagtacttccagaatggtgagaaaaagacagtggaggatgctgatatggaactgaccagtagagatgagggtgacccgaccccatgcgccccccagcaagcaacctctgcatgctatctgctaaccagaagaggaggtatcttgcagtgggcctctgtcccaaaaacaagcagaattttttctttctcaacaggcttctttgctaaagaatgatgagactaaggccctcactccagcttccttgcagaaggaattaaacaatttgttgaaatttaatcctgattttgctgaagcgcattatctcagctacttaaacaacctccgtgtccaagatgttttcagttcaacacacagtctcctccattattttgatcgtctgattcttaccggagccgaaagcaaaagtaatggggaagagggctatggccggagcttgagatacgccgctctgaatcttgccgccctgcactgccgcttcggtcactatcaacaggcagagctcgccctgcaggaggcaattaggattgcccaggagtccaacgatcacgtgtgtctccagcactgtttgagctggctttatgtgctggggcagaagagatccgatagctatgttctgctggagcattctgtgaagaaggcagtacattttgggttaccgtacctcgcctccctgggaatacagtcccttgttcaacagagagcttttgctgggaagacggcaaacaagctgatggatgccctaaaggactccgacctcctgcactggaaacacagcctgtcagagctcatcgatatcagcatcgcacagaaaacggccatctggaggctgtatggccgcagcaccatggcactgcaacaggcccagatgttgctgagcatgaacagcctggaggcggtgaatgcgggcgtgcagcagaacaacacagagtcctttgctgtcgcactctgccacctcgcagagctacacgcggagcagggctgttttgctgcagcttctgaagtgttaaagcacttgaaggaacgatttccgcctaatagtcagcacgcccagttatggatgctatgtgatcaaaaaatacagtttgacagagcaatgaatgatggcaaatatcatttggctgattcacttgttacaggaatcacagctctcaatagcatagagggtgtttataggaaagcggttgtattacaagctcagaaccaaatgtcagaggcacataagcttttacaaaaattgttggttcattgtcagaaactgaagaacacagaaatggtgatcagtgtcctactgtccgtggcagagctgtactggcgatcttcctcccctaccatcgcgctgcccatgctcctgcaggctctggccctctccaaggagtaccggttacagtacttggcctctgaaacagtgctgaacttggcttttgcgcagctcattcttggaatcccagaacaggccttaagtcttctccacatggccatcgagcccatcttggctgacggggctatcctggacaaaggtcgtgccatgttcttagtggccaagtgccaggtggcttcagcagcttcctacgatcagccgaagaaagcagaagctctggaggctgccatcgagaacctcaatgaagccaagaactattttgcaaaggttgactgcaaagagcgcatcagggacgtcgtttacttccaggccagactctaccataccctggggaagacccaggagaggaaccggtgtgcgatgctcttccggcagctgcatcaggagctgccctctcatggggtacccttgataaaccatctctagagaggacatccctgctgggctgctgtgcagagtataagattttggacttgttcatgtcccctctctccctataaatgatgtatttgtgacaccctatcttgtcaataaacagcattctg

SEQ ID NO: 37453 - DNA, 2374 bp, Homo sapiens
  misc_feature (2338)..(2338): n is a, c, g, or t
  misc_feature (2345)..(2345): n is a, c, g, or t
  misc_feature (2349)..(2349): n is a, c, g, or t
  misc_feature (2369)..(2369): n is a, c, g, or t
  misc_feature (2373)..(2373): n is a, c, g, or t
tttagcaggtagcgaggcctgggtcccgagacccggtagtgttgtgccttgtggtgacaactggcggcagcgcgccgcgggcccgagacttagtctcgggccgccatggccagcgtccacgagagcctctacttcaatcccatgatgaccaatggggttgtgcacgccaatgtgttcggcatcaaggactgggtgacgccgtacaagatcgcggtgctggtgctgctgaacgagatgagccgcacaggcgagggcgccgtcagcctcatggagcggcggaggctcaaccagctgctcctgcccctgctgcagggcccagatattacactgtcaaaactttacaagttaattgaagagtcttgtccacagctggcaaattcagtgcagatcagaatcaaactgatggctgaaggcgagttgaaggatatggaacagttttttgatgacctttcagattctttctctggaactgaaccagaggttcacaaaacaagtgtagtaggtttgtttctgcgtcacatgatcttggcctacagtaagctttctttcagccaagtgtttaaactgtacactgcccttcagcagtacttccagaatggtgagaaaaagacagtggaggatgctgatatggaactgaccagtagagatgagggtgaaagaaaaatggaaaaagaagaacttgatgtatctgtaagagaagaggaggtatcttgcagtgggcctctgtcccaaaaacaagcagaattttttctttctcaacaggcttctttgctaaagaatgatgagactaaggccctcactccagcttccttgcagaaggaattaaacaatttgttgaaatttaatcctgattttgctgaagcgcattatctcagctacttaaacaacctccgtgtccaagatgttttcagttcaacacacagtctcctccattattttgatcgtctgattcttaccggagccgaaagcaaaagtaatggggaagagggctatggccggagcttgagatacgccgctctgaatcttgccgccctgcactgccgcttcggtcactatcaacaggcagagctcgccctgcaggaggcaattaggattgcccaggagtccaacgatcacgtgtgtctccagcactgtttgagctggctttatgtgctggggcagaagagatccgatagctatgttctgctggagcattctgtgaagaaggcagtacattttgggttaccgtacctcgcctccctgggaatacagtcccttgttcaacagagagcttttgctgggaagacggcaaacaagctgatggatgccctaaaggactccgacctcctgcactggaaacacagcctgtcagagctcatcgatatcagcatcgcacagaaaacggccatctggaggctgtatggccgcagcaccatggcactgcaacaggcccagatgttgctgagcatgaacagcctggaggcggtgaatgcgggcgtgcagcagaacaacacagagtcctttgctgtcgcactctgccacctcgcagagctacacgcggagcagggctgttttgctgcagcttctgaagtgttaaagcacttgaaggaacgatttccgcctaatagtcagcacgcccagttatggatgctatgtgatcaaaaaatacagtttgacagagcaatgaatgatggcaaatatcatttggctgattcacttgttacaggaatcacagctctcaatagcatagagggtgtttataggaaagcggttgtattacaagctcagaaccaaatgtcagaggcacataagcttttacaaaaattgttggttcattgtcagaaactgaagaacacagaaatggtgatcagtgtcctactgtccgtggcagagctgtactggcgatcttcctcccctaccatcgcgctgcccatgctcctgcaggctctggccctctccaaggagtaccggttacagtacttggcctctgaaacagtgctgaacttggcttttgcgcagctcattcttggaatcccagaacaggccttaagtcttctccacatggccatcgagcccatcttggctgacggggctatcctggacaaaggtcgtgccatgttcttagtggccaagtgccaggtggcttcagcagcttcctacgatcagccgaagaaagcagaagctctggaggctgccatcgagaacctcaatgaagccaagaactattttgcaaaggttgactgcaaagagcgcatcagggacgtcgtttacttccaggccagactctaccataccctggggaagacccaggagaggaacagaacgctggtcacctgagctcggaatttcttcacatccnatgtcantagnctgttttcccttggtgctgnacana

SEQ ID NO: 37454 - DNA, 2636 bp, Homo sapiens
tttagcaggtagcgaggcctgggtcccgagacccggtagtgttgtgccttgtggtgacaactggcggcagcgcgccgcgggcccgagacttagtctcgggccgccatggccagcgtccacgagagcctctacttcaatcccatgatgaccaatggggttgtgcacgccaatgtgttcggcatcaaggactgggtgacgccgtacaagatcgcggtgctggtgctgctgaacgagatgagccgcacaggcgagggcgccgtcagcctcatggagcggcggaggctcaaccagctgctcctgcccctgctgcagagacgggattttgccatgttacccaggctggccgggaactcctggactcaagcaatcctcccgtctggtctcccagagtattgggattacaggagtgagccactgcgcccggccgtcatgtgttatttcattttgcagacacagggcccagatattacactgtcaaaactttacaagttaattgaagagtcttgtccacagctggcaaattcagtgcagatcagaatcaaactgatggctgaaggcgagttgaaggatatggaacagttttttgatgacctttcagattctttctctggaactgaaccagaggttcacaaaacaagtgtagtaggtttgtttctgcgtcacatgatcttggcctacagtaagctttctttcagccaagtgtttaaactgtacactgcccttcagcagtacttccagaatggtgagaaaaagacagtggaggatgctgatatggaactgaccagtagagatgagggtgaaagaaaaatggaaaaagaagaacttgatgtatctgtaagagaagaggaggtatcttgcagtgggcctctgtcccaaaaacaagcagaattttttctttctcaacaggcttctttgctaaagaatgatgagactaaggccctcactccagcttccttgcagaaggaattaaacaatttgttgaaatttaatcctgattttgctgaagcgcattatctcagctacttaaacaacctccgtgtccaagatgttttcagttcaacacacagtctcctccattattttgatcgtctgattcttaccggagccgaaagcaaaagtaatggggaagagggctatggccggagcttgagatacgccgctctgaatcttgccgccctgcactgccgcttcggtcactatcaacaggcagagctcgccctgcaggaggcaattaggattgcccaggagtccaacgatcacgtgtgtctccagcactgtttgagctggctttatgtgctggggcagaagagatccgatagctatgttctgctggagcattctgtgaagaaggcagtacattttgggttaccgtacctcgcctccctgggaatacagtcccttgttcaacagagagcttttgctgggaagacggcaaacaagctgatggatgccctaaaggactccgacctcctgcactggaaacacagcctgtcagagctcatcgatatcagcatcgcacagaaaacggccatctggaggctgtatggccgcagcaccatggcactgcaacaggcccagatgttgctgagcatgaacagcctggaggcggtgaatgcgggcgtgcagcagaacaacacagagtcctttgctgtcgcactctgccacctcgcagagctacacgcggagcagggctgttttgctgcagcttctgaagtgttaaagcacttgaaggaacgatttccgcctaatagtcagcacgcccagttatggatgctatgtgatcaaaaaatacagtttgacagagcaatgaatgatggcaaatatcatttggctgattcacttgttacaggaatcacagctctcaatagcatagagggtgtttataggaaagcggttgtattacaagctcagaaccaaatgtcagaggcacataagcttttacaaaaattgttggttcattgtcagaaactgaagaacacagaaatggtgatcagtgtcctactgtccgtggcagagctgtactggcgatcttcctcccctaccatcgcgctgcccatgctcctgcaggctctggccctctccaaggagtaccggttacagtacttggcctctgaaacagtgctgaacttggcttttgcgcagctcattcttggaatcccagaacaggccttaagtcttctccacatggccatcgagcccatcttggctgacggggctatcctggacaaaggtcgtgccatgttcttagtggccaagtgccaggtggcttcagcagcttcctacgatcagccgaagaaagcagaagctctggaggctgccatcgagaacctcaatgaagccaagaactattttgcaaaggttgactgcaaagagcgcatcagggacgtcgtttacttccaggccagactctaccataccctggggaagacccaggagaggaaccggtgtgcgatgctcttccggcagctgcatcaggagctgccctctcatggggtacccttgataaaccatctctagagaggacatccctgctgggctgctgtgcagagtataagattttggacttgttcatgtcccctctctccctataaatgatgtatttgtgacaccctatcttgtcaataaacagcattctg

SEQ ID NO: 37455 - DNA, 2503 bp, Homo sapiens
tttagcaggtagcgaggcctgggtcccgagacccggtagtgttgtgccttgtggtgacaactggcggcagcgcgccgcgggcccgagacttagtctcgggccgccatggccagcgtccacgagagcctctacttcaatcccatgatgaccaatggggttgtgcacgccaatgtgttcggcatcaaggactgggtgacgccgtacaagatcgcggtgctggtgctgctgaacgagatgagccgcacaggcgagggcgccgtcagcctcatggagcggcggaggctcaaccagctgctcctgcccctgctgcagggcccagatattacactgtcaaaactttacaagttaattgaagagtcttgtccacagctggcaaattcagtgcagatcagaatcaaactgatggctgaaggcgagttgaaggatatggaacagttttttgatgacctttcagattctttctctggaactgaaccagaggttcacaaaacaagtgtagtagaattccagcagacagtcattgccattgtggagttgccattgcgtagcctggatgtcagttaatgctttccccttgtctctcgtcttattttcagtacttccagaatggtgagaaaaagacagtggaggatgctgatatggaactgaccagtagagatgagggtgaaagaaaaatggaaaaagaagaacttgatgtatctgtaagagaagaggaggtatcttgcagtgggcctctgtcccaaaaacaagcagaattttttctttctcaacaggcttctttgctaaagaatgatgagactaaggccctcactccagcttccttgcagaaggaattaaacaatttgttgaaatttaatcctgattttgctgaagcgcattatctcagctacttaaacaacctccgtgtccaagatgttttcagttcaacacacagtctcctccattattttgatcgtctgattcttaccggagccgaaagcaaaagtaatggggaagagggctatggccggagcttgagatacgccgctctgaatcttgccgccctgcactgccgcttcggtcactatcaacaggcagagctcgccctgcaggaggcaattaggattgcccaggagtccaacgatcacgtgtgtctccagcactgtttgagctggctttatgtgctggggcagaagagatccgatagctatgttctgctggagcattctgtgaagaaggcagtacattttgggttaccgtacctcgcctccctgggaatacagtcccttgttcaacagagagcttttgctgggaagacggcaaacaagctgatggatgccctaaaggactccgacctcctgcactggaaacacagcctgtcagagctcatcgatatcagcatcgcacagaaaacggccatctggaggctgtatggccgcagcaccatggcactgcaacaggcccagatgttgctgagcatgaacagcctggaggcggtgaatgcgggcgtgcagcagaacaacacagagtcctttgctgtcgcactctgccacctcgcagagctacacgcggagcagggctgttttgctgcagcttctgaagtgttaaagcacttgaaggaacgatttccgcctaatagtcagcacgcccagttatggatgctatgtgatcaaaaaatacagtttgacagagcaatgaatgatggcaaatatcatttggctgattcacttgttacaggaatcacagctctcaatagcatagagggtgtttataggaaagcggttgtattacaagctcagaaccaaatgtcagaggcacataagcttttacaaaaattgttggttcattgtcagaaactgaagaacacagaaatggtgatcagtgtcctactgtccgtggcagagctgtactggcgatcttcctcccctaccatcgcgctgcccatgctcctgcaggctctggccctctccaaggagtaccggttacagtacttggcctctgaaacagtgctgaacttggcttttgcgcagctcattcttggaatcccagaacaggccttaagtcttctccacatggccatcgagcccatcttggctgacggggctatcctggacaaaggtcgtgccatgttcttagtggccaagtgccaggtggcttcagcagcttcctacgatcagccgaagaaagcagaagctctggaggctgccatcgagaacctcaatgaagccaagaactattttgcaaaggttgactgcaaagagcgcatcagggacgtcgtttacttccaggccagactctaccataccctggggaagacccaggagaggaaccggtgtgcgatgctcttccggcagctgcatcaggagctgccctctcatggggtacccttgataaaccatctctagagaggacatccctgctgggctgctgtgcagagtataagattttggacttgttcatgtcccctctctccctataaatgatgtatttgtgacaccctatcttgtcaataaacagcattctg

SEQ ID NO: 37456 - DNA, 2302 bp, Homo sapiens
tttagcaggtagcgaggcctgggtcccgagacccggtagtgttgtgccttgtggtgacaactggcggcagcgcgccgcgggcccgagacttagtctcgggccgccatggccagcgtccacgagagcctctacttcaatcccatgatgaccaatggggttgtgcacgccaatgtgttcggcatcaaggactgggtgacgccgtacaagatcgcggtgctggtgctgctgaacgagatgagccgcacaggcgagggcgccgtcagcctcatggagcggcggaggctcaaccagctgctcctgcccctgctgcaggtttgtttctgcgtcacatgatcttggcctacagtaagctttctttcagccaagtgtttaaactgtacactgcccttcagcagtacttccagaatggtgagaaaaagacagtggaggatgctgatatggaactgaccagtagagatgagggtgaaagaaaaatggaaaaagaagaacttgatgtatctgtaagagaagaggaggtatcttgcagtgggcctctgtcccaaaaacaagcagaattttttctttctcaacaggcttctttgctaaagaatgatgagactaaggccctcactccagcttccttgcagaaggaattaaacaatttgttgaaatttaatcctgattttgctgaagcgcattatctcagctacttaaacaacctccgtgtccaagatgttttcagttcaacacacagtctcctccattattttgatcgtctgattcttaccggagccgaaagcaaaagtaatggggaagagggctatggccggagcttgagatacgccgctctgaatcttgccgccctgcactgccgcttcggtcactatcaacaggcagagctcgccctgcaggaggcaattaggattgcccaggagtccaacgatcacgtgtgtctccagcactgtttgagctggctttatgtgctggggcagaagagatccgatagctatgttctgctggagcattctgtgaagaaggcagtacattttgggttaccgtacctcgcctccctgggaatacagtcccttgttcaacagagagcttttgctgggaagacggcaaacaagctgatggatgccctaaaggactccgacctcctgcactggaaacacagcctgtcagagctcatcgatatcagcatcgcacagaaaacggccatctggaggctgtatggccgcagcaccatggcactgcaacaggcccagatgttgctgagcatgaacagcctggaggcggtgaatgcgggcgtgcagcagaacaacacagagtcctttgctgtcgcactctgccacctcgcagagctacacgcggagcagggctgttttgctgcagcttctgaagtgttaaagcacttgaaggaacgatttccgcctaatagtcagcacgcccagttatggatgctatgtgatcaaaaaatacagtttgacagagcaatgaatgatggcaaatatcatttggctgattcacttgttacaggaatcacagctctcaatagcatagagggtgtttataggaaagcggttgtattacaagctcagaaccaaatgtcagaggcacataagcttttacaaaaattgttggttcattgtcagaaactgaagaacacagaaatggtgatcagtgtcctactgtccgtggcagagctgtactggcgatcttcctcccctaccatcgcgctgcccatgctcctgcaggctctggccctctccaaggagtaccggttacagtacttggcctctgaaacagtgctgaacttggcttttgcgcagctcattcttggaatcccagaacaggccttaagtcttctccacatggccatcgagcccatcttggctgacggggctatcctggacaaaggtcgtgccatgttcttagtggccaagtgccaggtggcttcagcagcttcctacgatcagccgaagaaagcagaagctctggaggctgccatcgagaacctcaatgaagccaagaactattttgcaaaggttgactgcaaagagcgcatcagggacgtcgtttacttccaggccagactctaccataccctggggaagacccaggagaggaaccggtgtgcgatgctcttccggcagctgcatcaggagctgccctctcatggggtacccttgataaaccatctctagagaggacatccctgctgggctgctgtgcagagtataagattttggacttgttcatgtcccctctctccctataaatgatgtatttgtgacaccctatcttgtcaataaacagcattctg

SEQ ID NO: 37457 - DNA, 2170 bp, Homo sapiens
tttagcaggtagcgaggcctgggtcccgagacccggtagtgttgtgccttgtggtgacaactggcggcagcgcgccgcgggcccgagacttagtctcgggccgccatggccagcgtccacgagagcctctacttcaatcccatgatgaccaatggggttgtgcacgccaatgtgttcggcatcaaggactgggtgacgccgtacaagatcgcggtgctggtgctgctgaacgagatgagccgcacaggcgagggcgccgtcagcctcatggagcggcggaggctcaaccagctgctcctgcccctgctgcagggcccagatattacactgtcaaaactttacaagttaattgaagagtcttgtccacagctggcaaattcagtgcagatcagaatcaaactgatggctgaaggcgagttgaaggatatggaacagttttttgatgacctttcagattctttctctggaactgaaccagaggttcacaaaacaagtgtagtaggtttgtttctgcgtcacatgatcttggcctacagtaagctttctttcagccaagtgtttaaactgtacactgcccttcagcagtacttccagaatggtgagaaaaagacagtggaggatgctgatatggaactgaccagtagagatgagggtgaaagaaaaatggaaaaagaagaacttgatgtatctgtaagagaagaggaggtatcttgcagtgggcctctgtcccaaaaacaagcagaattttttctttctcaacaggcttctttgctaaagaatgatgagactaaggccctcactccagcttccttgcagaaggaattaaacaatttgttgaaatttaatcctgattttgctgaagcgcattatctcagctacttaaacaacctccgtgtccaagatgttttcagttcaacacacagtctcctccattattttgatcgtctgattcttaccggagccgaaagcaaaagtaatggggaagagggctatggccggagcttgagatacgccgctctgaatcttgccgccctgcactgccgcttcggtcactatcaacaggcagagctcgccctgcaggaggcaattaggattgcccaggagtccaacgatcacgtgtgtctccagcactgtttgagctggctttatgtgctggggcagaagagatccgatagctatgttctgctggagcattctgtgaagaaggcagtacattttgggttaccgtacctcgcctccctgggaatacagtcccttgttcaacagagagcttttgctgggaagacggcaaacaagctgatggatgccctaaaggactccgacctcctgcactggaaacacagcctgtcagagctcatcgatatcagcatcgcacagaaaacggccatctggaggctgtatggccgcagcaccatggcactgcaacaggcccagatgttgctgagcatgaacagcctggaggcggtgaatgcgggcgtgcagcagaacaacacagagtcctttgctgtcgcactctgccacctcgcagagctacacgcggagcagggctgttttgctgcagcttctgaagtgttaaagcacttgaaggaacgatttccgcctaatagtcagcacgcccagttatggatgctatgtgatcaaaaaatacagtttgacagagcaatgaatgatggcaaatatcatttggctgattcacttgttacaggaatcacagctctcaatagcatagagggtgtttataggaaagcggttgtattacaagctcagaaccaaatgtcagaggcacataagcttttacaaaaattgttggttcattgtcagaaactgaagaacacagaaatggtgatcaggctctggccctctccaaggagtaccggttacagtacttggcctctgaaacagtgctgaacttggcttttgcgcaggtagtcttcctgtgcaagccctccaaggaggcctgtggaggtgtgaacctggtgacaaactgacactttccagtggcactggctttcctgagctgtgtattcagtaaggaggactcgcctcttcagtgagaacacctgcatcatattaatgattagctgacacagagtgatgcttgatttagcaacaaggggatgtgaataaagaaatgaggaacacagatgttcattgaaagcttttggaaatc

SEQ ID NO: 37458 - DNA, 1834 bp, Homo sapiens
  misc_feature (1724)..(1725): n is a, c, g, or t
  misc_feature (1741)..(1741): n is a, c, g, or t
  misc_feature (1825)..(1825): n is a, c, g, or t
tttagcaggtagcgaggcctgggtcccgagacccggtagtgttgtgccttgtggtgacaactggcggcagcgcgccgcgggcccgagacttagtctcgggccgccatggccagcgtccacgagagcctctacttcaatcccatgatgaccaatggggttgtgcacgccaatgtgttcggcatcaaggactgggtgacgccgtacaagatcgcggtgctggtgctgctgaacgagatgagccgcacaggcgagggcgccgtcagcctcatggagcggcggaggctcaaccagctgctcctgcccctgctgcagggcccagatattacactgtcaaaactttacaagttaattgaagagtcttgtccacagctggcaaattcagtgcagatcagaatcaaactgatggctgaaggcgagttgaaggatatggaacagttttttgatgacctttcagattctttctctggaactgaaccagaggttcacaaaacaagtgtagtaggtttgtttctgcgtcacatgatcttggcctacagtaagctttctttcagccaagtgtttaaactgtacactgcccttcagcagtacttccagaatggtgagaaaaagacagtggaggatgctgatatggaactgaccagtagagatgagggtgaaagaaaaatggaaaaagaagaacttgatgtatctgtaagagaagaggaggtatcttgcagtgggcctctgtcccaaaaacaagcagaattttttctttctcaacaggcttctttgctaaagaatgatgagactaaggccctcactccagcttccttgcagaaggaattaaacaatttgttgaaatttaatcctgattttgctgaagcgcattatctcagctacttaaacaacctccgtgtccaagatgttttcagttcaacacacagtctcctccattattttgatcgtctgattcttaccggagccgaaagcaaaagtaatggggaagagggctatggccggagcttgagatacgccgctctgaatcttgccgccctgcactgccgcttcggtcactatcaacaggcagagctcgccctgcaggaggcaattaggattgcccaggagtccaacgatcacgtgtgtctccagcactgtttgagctggctttatgtgctggggcagaagagatccgatagctatgttctgctggagcattctgtgaagaaggcagtacattttgggttaccgtacctcgcctccctgggaatacagtcccttgttcaacagagagcttttgctgggaagacggcaaacaagctgatggatgccctaaaggactccgacctcctgcactggaaacacagcctgtcagagctcatcgatatcagcatcgcacagaaaacggccatctggaggctgtatggccgcagcaccatggcactgcaacaggcccagatgttgctgagcatgaacagcctggaggcggtgaatgcgggcgtgcagcagaacaacacagagtcctttgctgtcgcactctgccacctcgcagagctacacgcggagcagaactaaagactgaggtcctgggagctaaatcctgtatccaacacctgtaaatgtcagaggcaggtctccaaccgaaacctggttgactccaaagaagagcagtgggaatgggacacaaccccgacgcaccacagcccaagcaacccgacgagaccccccccacaagggaccaaccaaannaccccccccgccaccncaggcccaccccccccccacccaaaacacccccccccaccgcggaaagagcccgggaaaactacccagctaaagccccccaacncagaaacac

SEQ ID NO: 37459 - DNA, 1617 bp, Homo sapiens
tttagcaggtagcgaggcctgggtcccgagacccggtagtgttgtgccttgtggtgacaactggcggcagcgcgccgcgggcccgagacttagtctcgggccgccatggccagcgtccacgagagcctctacttcaatcccatgatgaccaatggggttgtgcacgccaatgtgttcggcatcaaggactgggtgacgccgtacaagatcgcggtgctggtgctgctgaacgagatgagccgcacaggcgagggcgccgtcagcctcatggagcggcggaggctcaaccagctgctcctgcccctgctgcagggcccagatattacactgtcaaaactttacaagttaattgaagagtcttgtccacagctggcaaattcagtgcagatcagaatcaaactgatggctgaaggcgagttgaaggatatggaacagttttttgatgacctttcagattctttctctggaactgaaccagaggttcacaaaacaagtgtagtaggtttgtttctgcgtcacatgatcttggcctacagtaagctttctttcagccaagtgtttaaactgtacactgcccttcagcagtacttccagaatggtgagaaaaagacagtggaggatgctgatatggaactgaccagtagagatgagggtgaaagaaaaatggaaaaagaagaacttgatgtatctgtaagagaagaggaggtatcttgcagtgggcctctgtcccaaaaacaagcagaattttttctttctcaacaggcttctttgctaaagaatgatgagactaaggccctcactccagcttccttgcagaaggaattaaacaatttgttgaaatttaatcctgattttgctgaagcgcattatctcagctacttaaacaacctccgtgtccaagatgttttcagttcaacacacagtctcctccattattttgatcgtctgattcttaccggagccgaaagcaaaagtaatggggaagagggctatggccggagcttgagatacgccgctctgaatcttgccgccctgcactgccgcttcggtcactatcaacaggcagagctcgccctgcaggaggcaattaggattgcccaggagtccaacgatcacgtgtgtctccagcactgtttgagctggctttatgtgctggggcagaagagatccgatagctatgttctgctggagcattctgtgaagaaggcagtacattttgggttaccgtacctcgcctccctgggaatacagtcccttgttcaacagagagcttttgctgggaagacggcaaacaagctgatggatgccctaaaggactccgacctcctgcactggaaacacagcctgtcagagctcatcgatatcagcatcgcacagaaaacggccatctggaggctgtatggccgcaggtaggtctcccaaggccctgggggtgtgaattcttcagagagaagcaggagctagcaagctggttctgtgaaaggccatacatacaagatttacctgccttggatagatgttgttcctgcaggggactatgttttagactatacaacattcttgtattttgcacagactgaaaacttttttcccatgcatgttccttcttactcctcc

SEQ ID NO: 37460 - DNA, 1684 bp, Homo sapiens
tttagcaggtagcgaggcctgggtcccgagacccggtagtgttgtgccttgtggtgacaactggcggcagcgcgccgcgggcccgagacttagtctcgggccgccatggccagcgtccacgagagcctctacttcaatcccatgatgaccaatggggttgtgcacgccaatgtgttcggcatcaaggactgggtgacgccgtacaagatcgcggtgctggtgctgctgaacgagatgagccgcacaggcgagggcgccgtcagcctcatggagcggcggaggctcaaccagctgctcctgcccctgctgcagggcccagatattacactgtcaaaactttacaagttaattgaagagtcttgtccacagctggcaaattcagtgcagatcagaatcaaactgatggctgaaggcgagttgaaggatatggaacagttttttgatgacctttcagattctttctctggaactgaaccagaggttcacaaaacaagtgtagtaggtttgtttctgcgtcacatgatcttggcctacagtaagctttctttcagccaagtgtttaaactgtacactgcccttcagcagtacttccagaatggtgagaaaaagacagtggaggatgctgatatggaactgaccagtagagatgagggtgaaagaaaaatggaaaaagaagaacttgatgtatctgtaagagaagaggaggtatcttgcagtgggcctctgtcccaaaaacaagcagaattttttctttctcaacaggcttctttgctaaagaatgatgagactaaggccctcactccagcttccttgcagaaggaattaaacaatttgttgaaatttaatcctgattttgctgaagcgcattatctcagctacttaaacaacctccgtgtccaagatgttttcagttcaacacacagtctcctccattattttgatcgtctgattcttaccggagccgaaagcaaaagtaatggggaagagggctatggccggagcttgagatacgccgctctgaatcttgccgccctgcactgccgcttcggtcactatcaacaggcagagctcgccctgcaggaggcaattaggattgcccaggagtccaacgatcacgtgtgtctccagcactgtttgagctggctttatgtgctggggcagaagagatccgatagctatgttctgctggagcattctgtgaagaaggcagtacattttgggttaccgagagcttttgctgggaagacggcaaacaagctgatggatgccctaaaggactccgacctcctgcactggaaacacagcctgtcagagctcatcgatatcagcatcgcacagaaaacggccatctggaggctgtatggccgcagcaccatggcactgcaacaggcccagatgttgctgagcatgaacagcctggaggcggtgaatgcgggcgtgcagcagaacaacacagagtcctttgctgtcgcactctgccacctcgcagagctacacgcggagcagggctgttttgctgcagcttctgaagtgttaaagcacttgaaggaacgatttccgcctaatagtcagcacgcccattttgggcccctttggtctcaaaaaaccttttgcccaaccttttttgataggcaaatatatttggttgtttcaactgttttcaggaataaccatttttttattc

SEQ ID NO: 37461 - DNA, 1675 bp, Homo sapiens
tttagcaggtagcgaggcctgggtcccgagacccggtagtgttgtgccttgtggtgacaactggcggcagcgcgccgcgggcccgagacttagtctcgggccgccatggccagcgtccacgagagcctctacttcaatcccatgatgaccaatggggttgtgcacgccaatgtgttcggcatcaaggactgggtgacgccgtacaagatcgcggtgctggtgctgctgaacgagatgagccgcacaggcgagggcgccgtcagcctcatggagcggcggaggctcaaccagctgctcctgcccctgctgcagggcccagatattacactgtcaaaactttacaagttaattgaagagtcttgtccacagctggcaaattcagtgcagatcagaatcaaactgatggctgaaggcgagttgaaggatatggaacagttttttgatgacctttcagattctttctctggaactgaaccagaggttcacaaaacaagtgtagtaggtttgtttctgcgtcacatgatcttggcctacagtaagctttctttcagccaagtgtttaaactgtacactgcccttcagcagtacttccagaatggtgagaaaaagacagtggaggatgctgatatggaactgaccagtagagatgagggtgaaagaaaaatggaaaaagaagaacttgatgtatctgtaagagaagaggaggtatcttgcagtgggcctctgtcccaaaaacaagcagaattttttctttctcaacaggcttctttgctaaagaatgatgagactaaggccctcactccagcttccttgcagaaggaattaaacaatttgttgaaatttaatcctgattttgctgaagcgcattatctcagctacttaaacaacctccgtgtccaagatgttttcagttcaacacacagtctcctccattattttgatcgtctgattcttaccggagccgaaagcaaaagtaatggggaagagggctatggccggagcttgagatacgccgctctgaatcttgccgccctgcactgccgcttcggtcactatcaacaggcagagctcgccctgcaggaggcaattaggattgcccaggagtccaacgatcacgtgtgtctccagcactgtttgagctggctttatgtgctggggcagaagagatccgatagctatgttctgctggagcattctgtgaagaaggcagtacattttgggttaccgagagcttttgctgggaagacggcaaacaagctgatggatgccctaaaggactccgacctcctgcactggaaacacagcctgtcagagctcatcgatatcagcatcgcacagaaaacggccatctggaggctgtatggccgcagcaccatggcactgcaacaggcccagatgttgctgagcatgaacagcctggaggcggtgaatgcgggcgtgcagcagaacaacacagagtcctttgctgtcgcactctgccacctcgcagagctacacgcggagcagggctgttttgctgcagcttctgaagtgttaaagcacttgaaggaacgatttccgcctaatagtcagcacgccccccttttgggggccattggtgcacaaaatacatcttgtcagaaccaataaatgatgggcgaaataaattggggtggttaccctgtttccggaataa

SEQ ID NO: 37462 - DNA, 1660 bp, Homo sapiens
tttagcaggtagcgaggcctgggtcccgagacccggtagtgttgtgccttgtggtgacaactggcggcagcgcgccgcgggcccgagacttagtctcgggccgccatggccagcgtccacgagagcctctacttcaatcccatgatgaccaatggggttgtgcacgccaatgtgttcggcatcaaggactgggtgacgccgtacaagatcgcggtgctggtgctgctgaacgagatgagccgcacaggcgagggcgccgtcagcctcatggagcggcggaggctcaaccagctgctcctgcccctgctgcagggcccagatattacactgtcaaaactttacaagttaattgaagagtcttgtccacagctggcaaattcagtgcagatcagaatcaaactgatggctgaaggcgagttgaaggatatggaacagttttttgatgacctttcagattctttctctggaactgaaccagaggttcacaaaacaagtgtagtaggtttgtttctgcgtcacatgatcttggcctacagtaagctttctttcagccaagtgtttaaactgtacactgcccttcagcagtacttccagaatggtgagaaaaagacagtggaggatgctgatatggaactgaccagtagagatgagggtgaaagaaaaatggaaaaagaagaacttgatgtatctgtaagagaagaggaggtatcttgcagtgggcctctgtcccaaaaacaagcagaattttttctttctcaacaggcttctttgctaaagaatgatgagactaaggccctcactccagcttccttgcagaaggaattaaacaatttgttgaaatttaatcctgattttgctgaagcgcattatctcagctacttaaacaacctccgtgtccaagatgttttcagttcaacacacagtctcctccattattttgatcgtctgattcttaccggagccgaaagcaaaagtaatggggaagagggctatggccggagcttgagatacgccgctctgaatcttgccgccctgcactgccgcttcggtcactatcaacaggcagagctcgccctgcaggaggcaattaggattgcccaggagtccaacgatcacgtgtgtctccagcactgtttgagctggctttatgtgctggggcagaagagatccgatagctatgttctgctggagcattctgtgaagaaggcagtacattttgggttaccggtaaggctcatctttctgtgagattgtttccataaatggtcgagcctttgtctctttttctgcccacctctgtcattaaccagcgatagatttagaatgggtttcaaagtgtggttttattcttggcagtttcatataactttaattattaatcagaccactaaattctgtgtggtaggtttctctctgttccctgtatcctaataacatctgtggaaattccctttaccaatttgataagagatcattgtttagtttattgagcaacattaatttagcacatagtcacttagaaaaattttagcaaaggcttatttttaaaccagggattggtgaactttcccgcccttgggccaaatctggctttctgcctacttaggggcttcaggctgagtggattttacatttttaagtgattgcagaaaaaaaaaat

SEQ ID NO: 37463 - DNA, 1152 bp, Homo sapiens
tttagcaggtagcgaggcctgggtcccgagacccggtagtgttgtgccttgtggtgacaactggcggcagcgcgccgcgggcccgagacttagtctcgggccgccatggccagcgtccacgagagcctctacttcaatcccatgatgaccaatggggttgtgcacgccaatgtgttcggcatcaaggactgggtgacgccgtacaagatcgcggtgctggtgctgctgaacgagatgagccgcacaggcgagggcgccgtcagcctcatggagcggcggaggctcaaccagctgctcctgcccctgctgcagggcccagatattacactgtcaaaactttacaagttaattgaagagtcttgtccacagctggcaaattcagtgcagatcagaatcaaactgatggctgaaggcgagttgaaggatatggaacagttttttgatgacctttcagattctttctctggaactgaaccagaggttcacaaaacaagtgtagtaggtttgtttctgcgtcacatgatcttggcctacagtaagctttctttcagccaagtgtttaaactgtacactgcccttcagcagtacttccagaatggtgagaaaaagacagtggaggatgctgatatggaactgaccagtagagatgagggtgaaagaaaaatggaaaaagaagaacttgatgtatctgtaagagaagaggaggtatcttgcagtgggcctctgtcccaaaaacaagcagaattttttctttctcaacaggcttctttgctaaagaatgatgagactaaggccctcactccagcttccttgcagaaggaattaaacaatttgttgaaatttaatcctgattttgctgaagcgcattatctcagctacttaaacaacctccgtgtccaagatgttttcagttcaacacacagtctcctccattattttgatcgtctgattcttaccggagccgaaagcaaaagtaatggggaagagggctatggccggagcttgagatacgccgctctgaatcttgccgccctgcactgccgcttcggtcactagtaagtttatagacctttgtccttgcgcaaattgaaggaaccgatgacaataaaaagtctgctgtttggcctggtgcggtggctcacgcctatagtc

SEQ ID NO: 37464 - DNA, 1182 bp, Homo sapiens
tttagcaggtagcgaggcctgggtcccgagacccggtagtgttgtgccttgtggtgacaactggcggcagcgcgccgcgggcccgagacttagtctcgggccgccatggccagcgtccacgagagcctctacttcaatcccatgatgaccaatggggttgtgcacgccaatgtgttcggcatcaaggactgggtgacgccgtacaagatcgcggtgctggtgctgctgaacgagatgagccgcacaggcgagggcgccgtcagcctcatggagcggcggaggctcaaccagctgctcctgcccctgctgcagggcccagatattacactgtcaaaactttacaagttaattgaagagtcttgtccacagctggcaaattcagtgcagatcagaatcaaactgatggctgaaggcgagttgaaggatatggaacagttttttgatgacctttcagattctttctctggaactgaaccagaggttcacaaaacaagtgtagtaggtttgtttctgcgtcacatgatcttggcctacagtaagctttctttcagccaagtgtttaaactgtacactgcccttcagcagtacttccagaatggtgagaaaaagacagtggaggatgctgatatggaactgaccagtagagatgagggtgaaagaaaaatggaaaaagaagaacttgatgtatctgtaagagaagaggaggtatcttgcagtgggcctctgtcccaaaaacaagcagaattttttctttctcaacaggcttctttgctaaagaatgatgagactaaggccctcactccagcttccttgcagaaggaattaaacaatttgttgaaatttaatcctgattttgctgaagcgcaagactccgtctcaaaaacaaccctaaaaccaaaaaacaaatctgtagcttgtccattgattcacacctgggaaagaaactcatacgtacagaattgattataatgacaaaagtggctccttgaagtaagcgcaggcttaactacaatttttgccatgaatttaagctggcattttttagttgagctttcatccttgaagatgacaccaaaagctaatgacaagataattttgttgctcatgataggcatccttttttgatctcctattacatatgtgcgcagcactgtttgacatctattatttcattgtaatcct

SEQ ID NO: 37465 - DNA, 921 bp, Homo sapiens
tttagcaggtagcgaggcctgggtcccgagacccggtagtgttgtgccttgtggtgacaactggcggcagcgcgccgcgggcccgagacttagtctcgggccgccatggccagcgtccacgagagcctctacttcaatcccatgatgaccaatggggttgtgcacgccaatgtgttcggcatcaaggactgggtgacgccgtacaagatcgcggtgctggtgctgctgaacgagatgagccgcacaggcgagggcgccgtcagcctcatggagcggcggaggctcaaccagctgctcctgcccctgctgcagggcccagatattacactgtcaaaactttacaagttaattgaagagtcttgtccacagctggcaaattcagtgcagatcagaatcaaactgatggctgaaggcgagttgaaggatatggaacagttttttgatgacctttcagattctttctctggaactgaaccagaggttcacaaaacaagtgtagtaggtttgtttctgcgtcacatgatcttggcctacagtaagctttctttcagccaagtgtttaaactgtacactgcccttcagcagtacttccagaatggtgagaaaaagacagtggaggatgctgatatggaactgaccagtagagatgagggtgaaagaaaaatggaaaaagaagaacttgatgtatctgtaagagaagaggaggtatcttgcagtgggcctctgtcccaaaaacaagcagaattttttctttctcaacaggtatgtgaattctgtaatttatcatgaacttctgttctagtcctgtgatgtgtctagtcctgtgatgtgtgttgtggcataggcccgttatgtgcataggtttgttggtcagtctgtgtcagcctttactcttggtcccctctgcctcactaacgaagc

SEQ ID NO: 37466 - DNA, 705 bp, Homo sapiens
  misc_feature (18)..(18): n is a, c, g, or t
  misc_feature (32)..(32): n is a, c, g, or t
  misc_feature (40)..(40): n is a, c, g, or t
  misc_feature (46)..(46): n is a, c, g, or t
  misc_feature (55)..(55): n is a, c, g, or t
tagaggatcccccgcgtnctgagttccctcanctatgatntacggnctttaggtncttggtcgtcgtgaaaaagtgctgaacttggcttttgcgcagctcattcttggaatcccagaacaggccttaagtcttctccacatggccatcgagcccatcttggctgacggggctatcctggacaaaggtcgtgccatgttcttagtggccaagtgccaggtggcttcagcagcttcctacgatcagccgaagaaagcagaagctctggaggctgccatcgagaacctcaatgaagccaagaactattttgcaaaggttgactgcaaagagcgcatcagggacgtcgtttacttccaggccagactctaccataccctggggaagacccaggagaggaaccggtgtgcgatgctcttccggcagctgcatcaggagctgccctctcatggggtacccttgataaaccatctctagagaggacatccctgctgggctgctgtgcagagtataagattttggacttgttcatgtcccctctctccctataaatgatgtatttgtgacaccctatcttgtcaataaacagcattctgattagtttgtcttattttgttgctagtaactacgtatttgttttattccccttttcttcccttttggtagcaaaggacaccaactttttcttaataaatgggtattttgctaac

SEQ ID NO: 37467 - DNA, 762 bp, Homo sapiens
tttagcaggtagcgaggcctgggtcccgagacccggtagtgttgtgccttgtggtgacaactggcggcagcgcgccgcgggcccgagacttagtctcgggccgccatggccagcgtccacgagagcctctacttcaatcccatgatgaccaatggggttgtgcacgccaatgtgttcggcatcaaggactgggtgacgccgtacaagatcgcggtgctggtgctgctgaacgagatgagccgcacaggcgagggcgccgtcagcctcatggagcggcggaggctcaaccagctgctcctgcccctgctgcagggcccagatattacactgtcaaaactttacaagttaattgaagagtcttgtccacagctggcaaattcagtgcagatcagaatcaaactgatggctgaaggcgagttgaaggatatggaacagttttttgatgacctttcagattctttctctggaactgaaccagaggttcacaaaacaagtgtagtaggtatgaaactcttctaagaagagcagagagtattttcattgaagtgagcagctttctaagtcatgtctatcattgttctgctatatctgtgaacagacacagtggggatgttggaggtgttgcagtttgtatttattgccttactgttttgatctatatttaaatcattaactgtggaaaagcaccttctgttttgtctacaatagtaagagtcagagcctggtcctggggtttttaggggttcccagctctttctcaca

SEQ ID NO: 37468 - DNA, 2492 bp, Homo sapiens
tttagcaggtagcgaggcctgggtcccgagacccggtagtgttgtgccttgtggtgacaactggcggcagcgcgccgcgggcccgagacttagtctcgggccgccatggccagcgtccacgagagcctctacttcaatcccatgatgaccaatggggttgtgcacgccaatgtgttcggcatcaaggactgggtgacgccgtacaagatcgcggtgctggtgctgctgaacgagatgagccgcacaggcgagggcgccgtcagcctcatggagcggcggaggctcaaccagctgctcctgcccctgctgcagggcccagatattacactgtcaaaactttacaagttaattgaagagtcttgtccacagctggcaaattcagtgcagatcagaatcaaactgatggctgaaggcgagttgaaggatatggaacagttttttgatgacctttcagattctttctctggaactgaaccagaggttcacaaaacaagtgtagtaggtttgtttctgcgtcacatgatcttggcctacagtaagctttctttcagccaagtgtttaaactgtacactgcccttcagcagtacttccagaatggtgagaaaaagacagtggaggatgctgatatggaactgaccagtagagatgagggtgaaagaaaaatggaaaaagaagaacttgatgtatctgtaagagaagaggaggtatcttgcagtgggcctctgtcccaaaaacaagcagaattttttctttctcaacaggcttctttgctaaagaatgatgagactaaggccctcactccagcttccttgcagaaggaattaaacaatttgttgaaatttaatcctgattttgctgaagcgcattatctcagctacttaaacaacctccgtgtccaagatgttttcagttcaacacacagtctcctccattattttgatcgtctgattcttaccggagccgaaagcaaaagtaatggggaagagggctatggccggagcttgagatacgccgctctgaatcttgccgccctgcactgccgcttcggtcactatcaacaggcagagctcgccctgcaggaggcaattaggattgcccaggagtccaacgatcacgtgtgtctccagcactgtttgagctggctttatgtgctggggcagaagagatccgatagctatgttctgctggagcattctgtgaagaaggcagtacattttgggttaccgtacctcgcctccctgggaatacagtcccttgttcaacagagagcttttgctgggaagacggcaaacaagctgatggatgccctaaaggactccgacctcctgcactggaaacacagcctgtcagagctcatcgatatcagcatcgcacagaaaacggccatctggaggctgtatggccgcagcaccatggcactgcaacaggcccagatgttgctgagcatgaacagcctggaggcggtgaatgcgggcgtgcagcagaacaacacagagtcctttgctgtcgcactctgccacctcgcagagctacacgcggagcagggctgttttgctgcagcttctgaagtgttaaagcacttgaaggaacgatttccgcctaatagtcagcacgcccagttatggatgctatgtgatcaaaaaatacagtttgacagagcaatgaatgatggcaaatatcatttggctgattcacttgttacaggaatcacagctctcaatagcatagagggtgtttataggaaagcggttgtattacaagctcagaaccaaatgtcagaggcacataagcttttacaaaaattgttggttcattgtcagaaactgaagaacacagaaatggtgatcagtgtcctactgtccgtggcagagctgtactggcgatcttcctcccctaccatcgcgctgcccatgctcctgcaggctctggccctctccaaggagtaccggttacagtacttggcctctgaaacagtgctgaacttggcttttgcgcagctcattcttggaatcccagaacaggccttaagtcttctccacatggccatcgagcccatcttggctgacggggctatcctggacaaaggtcgtgccatgttcttagtggccaagtgccaggtggcttcagcagcttcctacgatcagccgaagaaagcagaagctctggaggctgccatcgagaacctcaatgaagccaagaactattttgcaaaggttgactgcaaagagcgcatcagggacgtcgtttacttccaggccagactctaccataccctggggaagacccaggagaggaaccggtgtgcgatgctcttccggcagctgcatcaggagctgccctctcatggggtacccttgataaaccatctctagagaggacatccctgctgggctgctgtgcagagtataagattttggacttgttcatgtcccctctctccctataaatgatgtatttgtgacaccctatcttgtcaataaacagcattctg

SEQ ID NO: 37469 - DNA, 2568 bp, Homo sapiens
tttagcaggtagcgaggcctgggtcccgagacccggtagtgttgtgccttgtggtgacaactggcggcagcgcgccgcgggcccgagacttagtctcgggccgccatggccagcgtccacgagagcctctacttcaatcccatgatgaccaatggggttgtgcacgccaatgtgttcggcatcaaggactgggtgacgccgtacaagatcgcggtgctggtgctgctgaacgagatgagccgcacaggcgagggcgccgtcagcctcatggagcggcggaggctcaaccagctgctcctgcccctgctgcagggcccagatattacactgtcaaaactttacaagttaattgaagagtcttgtccacagctggcaaattcagtgcagatcagaatcaaactgatggctgaaggcgagttgaaggatatggaacagttttttgatgacctttcagattctttctctggaactgaaccagaggttcacaaaacaagtgtagtaggtttgtttctgcgtcacatgatcttggcctacagtaagctttctttcagccaagtgtttaaactgtacactgcccttcagcagtacttccagaatggtgagaaaaagacagtggaggatgctgatatggaactgaccagtagagatgagggtgaaagaaaaatggaaaaagaagaacttgatgtatctgtaagagaagaggaggtatcttgcagtgggcctctgtcccaaaaacaagcagaattttttctttctcaacaggcttctttgctaaagaatgatgagactaaggccctcactccagcttccttgcagaaggaattaaacaatttgttgaaatttaatcctgattttgctgaagcgcattatctcagctacttaaacaacctccgtgtccaagatgttttcagttcaacacacagtctcctccattattttgatcgtctgattcttaccggagccgaaagcaaaagtaatggggaagagggctatggccggagcttgagatacgccgctctgaatcttgccgccctgcactgccgcttcggtcactatcaacaggcagagctcgccctgcaggaggcaattaggattgcccaggagtccaacgatcacgtgtgtctccagcactgtttgagctggctttatgtgctggggcagaagagatccgatagctatgttctgctggagcattctgtgaagaaggcagtacattttgggttaccgtacctcgcctccctgggaatacagtcccttgttcaacagagagcttttgctgggaagacggcaaacaagctgatggatgccctaaaggactccgacctcctgcactggaaacacagcctgtcagagctcatcgatatcagcatcgcacagaaaacggccatctggaggctgtatggccgcagcaccatggcactgcaacaggcccagatgttgctgagcatgaacagcctggaggcggtgaatgcgggcgtgcagcagaacaacacagagtcctttgctgtcgcactctgccacctcgcagagctacacgcggagcagggctgttttgctgcagcttctgaagtgttaaagcacttgaaggaacgatttccgcctaatagtcagcacgcccagttatggatgctatgtgatcaaaaaatacagtttgacagagcaatgaatgatggcaaatatcatttggctgattcacttgttacaggaatcacagctctcaatagcatagagggtgtttataggaaagcggttgtattacaagctcagaaccaaatgtcagaggcacataagcttttacaaaaattgttggttcattgtcagaaactgaagaacacagaaatggtgatcagtgtcctactgtccgtggcagagctgtactggcgatcttcctcccctaccatcgcgctgcccatgctcctgcaggctctggccctctccaaggagtaccggttacagtacttggcctctgaaacagtgctgaacttggcttttgcgcagctcattcttggaatcccagaacaggccttaagtcttctccacatggccatcgagcccatcttggctgacggggctatcctggacaaaggtcgtgccatgttcttagtggccaagtgccaggtggcttcagcagcttcctacgatcagccgaagaaagcagaagctctggaggctgccatcgagaacctcaatgaagccaagaactattttgcaaaggttgactgcaaagagcgcatcagggacgtcgtttacttccaggccagactctaccataccctggggaagacccaggagaggaaccggtgtgcgatgctcttccggcagctgcatcaggagctgccctctcatggggtacccttgataaaccatctctagagaggacatccctgctgggctgctgtgcagagtataagattttggacttgttcatgtcccctctctccctataaatgatgtatttgtgacaccctatcttgtcaataaacagcattctgcatctgttacacaacaacacaaacaaaaaaacttgggggcctcggctcaaaaatttaacaattcgttggggggcaa

SEQ ID NO: 37470 - DNA, 2545 bp, Homo sapiens
tttagcaggtagcgaggcctgggtcccgagacccggtagtgttgtgccttgtggtgacaactggcggcagcgcgccgcgggcccgagacttagtctcgggccgccatggccagcgtccacgagagcctctacttcaatcccatgatgaccaatggggttgtgcacgccaatgtgttcggcatcaaggactgggtgacgccgtacaagatcgcggtgctggtgctgctgaacgagatgagccgcacaggcgagggcgccgtcagcctcatggagcggcggaggctcaaccagctgctcctgcccctgctgcagggcccagatattacactgtcaaaactttacaagttaattgaagagtcttgtccacagctggcaaattcagtgcagatcagaatcaaactgatggctgaaggcgagttgaaggatatggaacagttttttgatgacctttcagattctttctctggaactgaaccagaggttcacaaaacaagtgtagtaggtttgtttctgcgtcacatgatcttggcctacagtaagctttctttcagccaagtgtttaaactgtacactgcccttcagcagtacttccagaatggtgagaaaaagacagtggaggatgctgatatggaactgaccagtagagatgagggtgaaagaaaaatggaaaaagaagaacttgatgtatctgtaagagaagaggaggtatcttgcagtgggcctctgtcccaaaaacaagcagaattttttctttctcaacaggcttctttgctaaagaatgatgagactaaggccctcactccagcttccttgcagaaggaattaaacaatttgttgaaatttaatcctgattttgctgaagcgcattatctcagctacttaaacaacctccgtgtccaagatgttttcagttcaacacacagtctcctccattattttgatcgtctgattcttaccggagccgaaagcaaaagtaatggggaagagggctatggccggagcttgagatacgccgctctgaatcttgccgccctgcactgccgcttcggtcactatcaacaggcagagctcgccctgcaggaggcaattaggattgcccaggagtccaacgatcacgtgtgtctccagcactgtttgagctggctttatgtgctggggcagaagagatccgatagctatgttctgctggagcattctgtgaagaaggcagtacattttgggttaccgtacctcgcctccctgggaatacagtcccttgttcaacagagagcttttgctgggaagacggcaaacaagctgatggatgccctaaaggactccgacctcctgcactggaaacacagcctgtcagagctcatcgatatcagcatcagatgttgctgagcatgaacagcctggaggcggtgaatgcgggcgtgcagcagaacaacacagagtcctttgctgtcgcactctgccacctcgcagagctacacgcggagcagggctgttttgctgcagcttctgaagtgttaaagcacttgaaggaacgatttccgcctaatagtcagcacgcccagttatggatgctatgtgatcaaaaaatacagtttgacagagcaatgaatgatggcaaatatcatttggctgattcacttgttacaggaatcacagctctcaatagcatagagggtgtttataggaaagcggttgtattacaagctcagaaccaaatgtcagaggcacataagcttttacaaaaattgttggttcattgtcagaaactgaagaacacagaaatggtgatcagtgtcctactgtccgtggcagagctgtactggcgatcttcctcccctaccatcgcgctgcccatgctcctgcaggctctggccctctccaaggagtaccggttacagtacttggcctctgaaacagtgctgaacttggcttttgcgcagctcattcttggaatcccagaacaggccttaagtcttctccacatggccatcgagcccatcttggctgacggggctatcctggacaaaggtcgtgccatgttcttagtggccaagtgccaggtggcttcagcagcttcctacgatcagccgaagaaagcagaagctctggaggctgccatcgagaacctcaatgaagccaagaactattttgcaaaggttgactgcaaagagcgcatcagggacgtcgtttacttccaggccagactctaccataccctggggaagacccaggagaggaaccggtgtgcgatgctcttccggcagctgcatcaggagctgccctctcatggggtacccttgataaaccatctctagagaggacatccctgctgggctgctgtgcagagtataagattttggacttgttcatgtcccctctctccctataaatgatgtatttgtgacaccctatcttgtcaataaacagcattctgattagtttgtcttattttgttgctagtaactacgtatttgttttattccccttttcttcccttttggtagcaaaggacaccaactttttcttaataaatgggtattttgctaac

SEQ ID NO: 37471 - DNA, 2524 bp, Homo sapiens
tttagcaggtagcgaggcctgggtcccgagacccggtagtgttgtgccttgtggtgacaactggcggcagcgcgccgcgggcccgagacttagtctcgggccgccatggccagcgtccacgagagcctctacttcaatcccatgatgaccaatggggttgtgcacgccaatgtgttcggcatcaaggactgggtgacgccgtacaagatcgcggtgctggtgctgctgaacgagatgagccgcacaggcgagggcgccgtcagcctcatggagcggcggaggctcaaccagctgctcctgcccctgctgcagggcccagatattacactgtcaaaactttacaagttaattgaagagtcttgtccacagctggcaaattcagtgcagatcagaatcaaactgatggctgaaggcgagttgaaggatatggaacagttttttgatgacctttcagattctttctctggaactgaaccagaggttcacaaaacaagtgtagtaggtttgtttctgcgtcacatgatcttggcctacagtaagctttctttcagccaagtgtttaaactgtacactgcccttcagcagtacttccagaatggtgagaaaaagacagtggaggatgctgatatggaactgaccagtagagatgagggtgaaagaaaaatggaaaaagaagaacttgatgtatctgtaagagaagaggaggtatcttgcagtgggcctctgtcccaaaaacaagcagaattttttctttctcaacaggcttctttgctaaagaatgatgagactaaggccctcactccagcttccttgcagaaggaattaaacaatttgttgaaatttaatcctgattttgctgaagcgcattatctcagctacttaaacaacctccgtgtccaagatgttttcagttcaacacacagtctcctccattattttgatcgtctgattcttaccggagccgaaagcaaaagtaatggggaagagggctatggccggagcttgagatacgccgctctgaatcttgccgccctgcactgccgcttcggtcactaagctggctttatgtgctggggcagaagagatccgatagctatgttctgctggagcattctgtgaagaaggcagtacattttgggttaccgtacctcgcctccctgggaatacagtcccttgttcaacagagagcttttgctgggaagacggcaaacaagctgatggatgccctaaaggactccgacctcctgcactggaaacacagcctgtcagagctcatcgatatcagcatcgcacagaaaacggccatctggaggctgtatggccgcagcaccatggcactgcaacaggcccagatgttgctgagcatgaacagcctggaggcggtgaatgcgggcgtgcagcagaacaacacagagtcctttgctgtcgcactctgccacctcgcagagctacacgcggagcagggctgttttgctgcagcttctgaagtgttaaagcacttgaaggaacgatttccgcctaatagtcagcacgcccagttatggatgctatgtgatcaaaaaatacagtttgacagagcaatgaatgatggcaaatatcatttggctgattcacttgttacaggaatcacagctctcaatagcatagagggtgtttataggaaagcggttgtattacaagctcagaaccaaatgtcagaggcacataagcttttacaaaaattgttggttcattgtcagaaactgaagaacacagaaatggtgatcagtgtcctactgtccgtggcagagctgtactggcgatcttcctcccctaccatcgcgctgcccatgctcctgcaggctctggccctctccaaggagtaccggttacagtacttggcctctgaaacagtgctgaacttggcttttgcgcagctcattcttggaatcccagaacaggccttaagtcttctccacatggccatcgagcccatcttggctgacggggctatcctggacaaaggtcgtgccatgttcttagtggccaagtgccaggtggcttcagcagcttcctacgatcagccgaagaaagcagaagctctggaggctgccatcgagaacctcaatgaagccaagaactattttgcaaaggttgactgcaaagagcgcatcagggacgtcgtttacttccaggccagactctaccataccctggggaagacccaggagaggaaccggtgtgcgatgctcttccggcagctgcatcaggagctgccctctcatggggtacccttgataaaccatctctagagaggacatccctgctgggctgctgtgcagagtataagattttggacttgttcatgtcccctctctccctataaatgatgtatttgtgacaccctatcttgtcaataaacagcattctgattagtttgtcttattttgttgctagtaactacgtatttgttttattccccttttcttcccttttggtagcaaaggacaccaactttttcttaataaatgggtattttgctaac

SEQ ID NO: 37472 - DNA, 2556 bp, Homo sapiens
tttagcaggtagcgaggcctgggtcccgagacccggtagtgttgtgccttgtggtgacaactggcggcagcgcgccgcgggcccgagacttagtctcgggccgccatggccagcgtccacgagagcctctacttcaatcccatgatgaccaatggggttgtgcacgccaatgtgttcggcatcaaggactgggtgacgccgtacaagatcgcggtgctggtgctgctgaacgagatgagccgcacaggcgagggcgccgtcagcctcatggagcggcggaggctcaaccagctgctcctgcccctgctgcagggcccagatattacactgtcaaaactttacaagttaattgaagagtcttgtccacagctggcaaattcagtgcagatcagaatcaaactgatggctgaaggcgagttgaaggatatggaacagttttttgatgacctttcagattctttctctggaactgaaccagaggttcacaaaacaagtgtagtaggtttgtttctgcgtcacatgatcttggcctacagtaagctttctttcagccaagtgtttaaactgtacactgcccttcagcagtacttccagaatggtgagaaaaagacagtggaggatgctgatatggaactgaccagtagagatgagggtgaaagaaaaatggaaaaagaagaacttgatgtatctgtaagagaagaggaggtatcttgcagtgggcctctgtcccaaaaacaagcagaattttttctttctcaacaggcttctttgctaaagaatgatgagactaaggccctcactccagcttccttgcagaaggaattaaacaatttgttgaaatttaatcctgattttgctgaagcgcattatctcagctacttaaacaacctccgtgtccaagatgttttcagttcaacacacagtctcctccattattttgatcgtctgattcttaccggagccgaaagcaaaagtaatggggaagagggctatggccggagcttgagatacgccgctctgaatcttgccgccctgcactgccgcttcggtcactatcaacaggcagagctcgccctgcaggaggcaattaggattgcccaggagtccaacgatcacgtgtgtctccagcactgtttgagctggctttatgtgctggggcagaagagatccgatagctatgttctgctggagcattctgtgaagaaggcagtacattttgggttaccgtacctcgcctccctgggaatacagtcccttgttcaacagagagcttttgctgggaagacggcaaacaagctgatggatgccctaaaggactccgacctcctgcactggaaacacagcctgtcagagctcatcgatatcagcatcgcacagaaaacggccatctggaggctgtatggccgcagcaccatggcactgcaacaggcccagatgttgctgagcatgaacagcctggaggcggtgaatgcgggcgtgcagcagaacaacacagagtcctttgctgtcgcactctgccacctcgcagagctacacgcggagcagggctgttttgctgcagcttctgaagtgttaaagcacttgaaggaacgatttccgcctaatagtcagcacgcccagttatggatgctatgtgatcaaaaaatacagtttgacagagcaatgaatgatggcaaatatcatttggctgattcacttgttacaggaatcacagctctcaatagcatagagggtgtttataggaaagcggttgtattacaagctcagaaccaaatgtcagaggcacataagcttttacaatgtcctactgtccgtggcagagctgtactggcgatcttcctcccctaccatcgcgctgcccatgctcctgcaggctctggccctctccaaggagtaccggttacagtacttggcctctgaaacagtgctgaacttggcttttgcgcagctcattcttggaatcccagaacaggccttaagtcttctccacatggccatcgagcccatcttggctgacggggctatcctggacaaaggtcgtgccatgttcttagtggccaagtgccaggtggcttcagcagcttcctacgatcagccgaagaaagcagaagctctggaggctgccatcgagaacctcaatgaagccaagaactattttgcaaaggttgactgcaaagagcgcatcagggacgtcgtttacttccaggccagactctaccataccctggggaagacccaggagaggaaccggtgtgcgatgctcttccggcagctgcatcaggagctgccctctcatggggtacccttgataaaccatctctagagaggacatccctgctgggctgctgtgcagagtataagattttggacttgttcatgtcccctctctccctataaatgatgtatttgtgacaccctatcttgtcaataaacagcattctgattagtttgtcttattttgttgctagtaactacgtatttgttttattccccttttcttcccttttggtagcaaaggacaccaactttttcttaataaatgggtattttgctaac

SEQ ID NO: 37473 - DNA, 4243 bp, Homo sapiens
ttcggcgccctgctctttcctcatgttggcaatccccggccacggagaccaccgtcctcatgtcccagactgaggccgacctggccctgcggcccccgcctcctcttggcaccgcggggcagccccgcctcgggccccctcctcgccgagcgcgccgcttctccgggaaggctgagccccggccgcgctcttctcgtctcagccgccgtagctcagtcgacttggggctgctgagctcttggtccctgccagcctcacccgctccggacccccccgatcctccggactccgctggtcctggccccgcgaggagcccaccgcctagctccaaagaaccccccgagggcacgtggaccgagggagcccctgtgaaggctgcggaagactccgcgcgtcccgagctcccggactctgcagtgggcccggggtccagggagccgctaagggtccctgaagctgtggccctagagcggcggcgggagcaggaagaaaaggaggacatggagacccaggctgtggcaacgtcccccgatggccgatacctcaagtttgacatcgagattggacgtggctccttcaagacggtgtatcgagggctagacaccgacaccacagtggaggtggcctggtgtgagctgcagactcggaaactgtctagagctgagcggcagcgcttctcagaggaggtggagatgctcaaggggctgcagcaccccaacatcgtccgcttctatgattcgtggaagtcggtgctgaggggccaggtttgcatcgtgctggtcaccgaactcatgacctcgggcacgctcaagacgtacctgaggcggttccgggagatgaagccgcgggtccttcagcgctggagccgccaaatcctgcggggacttcatttcctacactcccgggttcctcccatcctgcaccgggatctcaagtgcgacaatgtctttatcacgggacctactggctctgtcaaaatcggggacctgggcctggccacgctcaagcgcgcctcctttgccaagagtgtcatcgggaccccggaattcatggcccccgagatgtacgaggaaaagtacgatgaggccgtggacgtgtacgcgttcggcatgtgcatgctggagatggccacctctgagtacccgtactccgagtgccagaatgccgcgcaaatctaccgcaaggtcacttcgggcagaaagccgaacagcttccacaaggtgaagatacccgaggtgaaggagatcattgaaggctgcatccgcacggataagaacgagaggttcaccatccaggacctcctggcccacgccttcttccgcgaggagcgcggtgtgcacgtggaactagcggaggaggacgacggcgagaagccgggcctcaagctctggctgcgcatggaggacgcgcggcgcggggggcgcccacgggacaaccaggccatcgagttcctgttccagctgggccgggacgcggccgaggaggtggcacaggagatggtggctctgggcttggtctgtgaagccgattaccagccagtggcccgtgcagtacgtgaacgggttgctgccatccagcgaaagcgtgagaagctgcgtaaagcaagggaattggaggcactcccaccagagccaggacctccaccagcaactgtgcccatggcccccggtccccccagtgtcttcccccctgagcctgaggagccagaggcagaccagcaccagcccttccttttccgccacgccagctactcatctaccacttcggattgcgagactgatggctacctcagctcctccggcttcctggatgcctcagaccctgcccttcagccccctgggggggtgccatccagcctggctgagtcccatctctgcctgccctcggcttttgccctatccattccacgttctggccctggaagtgacttttcccccggggacagctatgcctcagatgcagcttcaggccttagcgatgtgggagaagggatgggacaaatgaggagacccccagggaggaatctccggcgcagaccccgatcccggctgcgggtcactagtgtctcagaccagaatgacagagtggttgagtgccagctacagacccataacagcaagatggtgaccttccgatttgatctggatggggacagcccggaagagattgcagctgccatggtatataacgagttcattctgccttcggagcgagatggatttctcagacggattcgggagattatccagcgagtggagaccctgttgaagagagacactggccccatggaggctgctgaagacaccctaagcccccaggaggagccagcaccattacctgccctgcccgtccccctcccagacccatccaatgaagagctccagagcagcacctccctggagcacaggagctggacagccttctccacctcctcatcttctcctggaactcctttgtctcctggaaacccattttcccctggaacccccatttccccaggtcccatcttccccatcacttctcccccatgtcatcccagcccctccccattctcccccatttcttcccaggtctcctcaaatccctctccacaccccaccagctctccacttccattctcctccagcacacccgagtttccggtcccactctctcagtgtccctggagttctctccccacgacttctccacctacgttctctcccacttgttctcaggtcactcttagttcccctttctttcctccgtgcccctccacttcttccttcccctccaccacagcagcccctctcctttctctggctagtgccttctcactggctgtgatgactgtggcccagtccctgctgtccccctcacctgggctcctttcccagtctcctccagcccctcctagtcccctccctagcctgccccttccccctcccgttgctcctggtggccaggaaagcccttcaccccacacagctgaggtggagagtgaggcctcaccacctcctgctcggcccctcccaggggaagccaggctggcgcccatctctgaagagggaaagccgcagcttgttgggcgtttccaagtgacttcatccaaggaaccggctgagcctcttcccttgcagccaacatcccccactctctctggttctccaaaaccttcaacccctcagctcacttcagagagctcagatacagaggacagtgctggaggcgggccagagaccagggaagctctggctgagagcgaccgtgcagctgagggtctgggggctggagttgaggaggaaggagatgatgggaaggaaccccaagttgggggcagcccccaacccctgagccatcccagcccagtgtggatgaactactcctacagcagcctgtgtttgagcagcgaggagtcagaaagcagtggggaagatgaggagttctgggctgagctgcagagtcttcggcagaagcacttgtcagaggtggaaacactacagacactacagaaaaaagaaattgaagatttgtacagccggctggggaagcagcccccaccgggtattgtggccccagctgctatgctgtccagccgccagcgccgcctctccaagggcagcttccccacctcccgccgcaacagcctacagcgctctgagcccccaggccctggcatcatgcgaaggaactctctgagtggcagcagcaccggctcccaggagcagcgggcaagcaagggggtgacattcgccggggatgttggcaggatggtgagggcgggcccaagggagggagagcccagggaatggtacctggctgcagcttcgccttcctcccaccttggaggtttcttcatcactttttcttttccctccagtgaattcagaacagaagccatgtatctcccccacaccagggcccaccatggagcttgtgttctcagaatctgatgctttctgatcaacaaaactgagcaaggaagatcccaacactgaaggggtagaaggccaggggggcatggagagtgcagctccattatagtgaagagccaaacatatgtgaactgtttgctgtgtggaggtgttagttctgctgcctaccatcttcatctctagcacctcccctgccaagagtcaaccactaagcaatcccacccaagcctggatgcttctagaggggcccactcccagctgggagagtgtaggggatatgctcacaccacattagcagcaaccaataaaaatgctggaaacaagaaaac

SEQ ID NO: 37474 - DNA, 3863 bp, Homo sapiens
ttcggcgccctgctctttcctcatgttggcaatccccggccacggagaccaccgtcctcatgtcccagactgaggccgacctggccctgcggcccccgcctcctcttggcaccgcggggcagccccgcctcgggccccctcctcgccgagcgcgccgcttctccgggaaggctgagccccggccgcgctcttctcgtctcagccgccgtagctcagtcgacttggggctgctgagctcttggtccctgccagcctcacccgctccggacccccccgatcctccggactccgctggtcctggccccgcgaggagcccaccgcctagctccaaagaaccccccgagggcacgtggaccgagggagcccctgtgaaggctgcggaagactccgcgcgtcccgagctcccggactctgcagtgggcccggggtccagggagccgctaagggtccctgaagctgtggccctagagcggcggcgggagcaggaagaaaaggaggacatggagacccaggctgtggcaacgtcccccgatggccgatacctcaagtttgacatcgagattggacgtggctccttcaagacggtgtatcgagggctagacaccgacaccacagtggaggtggcctggtgtgagctgcagactcggaaactgtctagagctgagcggcagcgcttctcagaggaggtggagatgctcaaggggctgcagcaccccaacatcgtccgcttctatgattcgtggaagtcggtgctgaggggccaggtttgcatcgtgctggtcaccgaactcatgacctcgggcacgctcaagacgtacctgaggcggttccgggagatgaagccgcgggtccttcagcgctggagccgccaaatcctgcggggacttcatttcctacactcccgggttcctcccatcctgcaccgggatctcaagtgcgacaatgtctttatcacgggacctactggctctgtcaaaatcggggacctgggcctggccacgctcaagcgcgcctcctttgccaagagtgtcatcgggaccccggaattcatggcccccgagatgtacgaggaaaagtacgatgaggccgtggacgtgtacgcgttcggcatgtgcatgctggagatggccacctctgagtacccgtactccgagtgccagaatgccgcgcaaatctaccgcaaggtcacttcgggcagaaagccgaacagcttccacaaggtgaagatacccgaggtgaaggagatcattgaaggctgcatccgcacggataagaacgagaggttcaccatccaggacctcctggcccacgccttcttccgcgaggagcgcggtgtgcacgtggaactagcggaggaggacgacggcgagaagccgggcctcaagctctggctgcgcatggaggacgcgcggcgcggggggcgcccacgggacaaccaggccatcgagttcctgttccagctgggccgggacgcggccgaggaggtggcacaggagatggtggctctgggcttggtctgtgaagccgattaccagccagtggcccgtgcagtacgtgaacgggttgctgccatccagcgaaagcgtgagaagctgcgtaaagcaagggaattggaggcactcccaccagagccaggacctccaccagcaactgtgcccatggcccccggtccccccagtgtcttcccccctgagcctgaggagccagaggcagaccagcaccagcccttccttttccgccacgccagctactcatctaccacttcggattgcgagactgatggctacctcagctcctccggcttcctggatgcctcagaccctgcccttcagccccctgggggggtgccatccagcctggctgagtcccatctctgcctgccctcggcttttgccctatccattccacgttctggccctggaagtgacttttcccccggggacagctatgcctcagatgcagcttcaggccttagcgatgtgggagaagggatgggacaaatgaggagacccccagggaggaatctccggcgcagaccccgatcccggctgcgggtcactagtgtctcagaccagaatgacagagtggttgagtgccagctacagacccataacagcaagatggtgaccttccgatttgatctggatggggacagcccggaagagattgcagctgccatggtatataacgagttcattctgccttcggagcgagatggatttctcagacggattcgggagattatccagcgagtggagaccctgttgaagagagacactggccccatggaggctgctgaagacaccctaagcccccaggaggagccagcaccattacctgccctgcccgtccccctcccagacccatccaatgaagagctccagagcagcacctccctggagcacaggagctggacagccttctccacctcctcatcttctcctggaactcctttgtctcctggaaacccattttcccctggaacccccatttccccaggtcccatcttccccatcacttctcccccatgtcatcccagcccctccccattctcccccatttcttcccaggtctcctcaaatccctctccacaccccaccagctctccacttccattctcctccagcacacccgagtttccggtcccactctctcagtgtccctggagttctctccccacgacttctccacctacgttctctcccacttgttctcaggtcactcttagttcccctttctttcctccgtgcccctccacttcttccttcccctccaccacagcagcccctctcctttctctggctagtgccttctcactggctgtgatgactgtggcccagtccctgctgtccccctcacctgggctcctttcccagtctcctccagcccctcctagtcccctccctagcctgccccttccccctcccgttgctcctggtggccaggaaagcccttcaccccacacagctgaggtggagagtgaggcctcaccacctcctgctcggcccctcccaggggaagccaggctggcgcccatctctgaagagggaaagccgcagcttgttgggcgtttccaagtgacttcatccaaggaaccggctgagcctcttcccttgcagccaacatcccccactctctctggttctccaaaaccttcaacccctcagctcacttcagagagctcagatacagaggacagtgctggaggcgggccagagaccagggaagctctggctgagagcgaccgtgcagctgagggtctgggggctggagttgaggaggaaggagatgatgggaaggaaccccaagttgggggcagcccccaacccctgagccatcccagcccagtgtggatgaactactcctacagcagcctgtgtttgagcagcgaggagtcagaaagcagtggggaagatgaggagttctgggctgagctgcagagtcttcggcagaagcacttgtcagaggtggaaacactacagacactacagaaaaaagaaattgaagatttgtacagccggctggggaagcagcccccaccgggtattgtggccccagctgctatgctgtccagccgccagcgccgcctctccaagggcagcttccccacctcccgccgcaacagcctacagcgctctgagcccccaggccctggcatcatgcgaaggaactctctgagtggcagcagcaccggctcccaggagcagcgggcaagcaagggggtgacattcgccggggatgttggcaggatgtgaattcagaacagaagccatgtatctcccccactcccagctgggagagtgtaggggatatgctcacaccacattagcagcaaccaataaaaatgctggaaacaagaaaac

SEQ ID NO: 37475 - DNA, 2727 bp, Homo sapiens
ttcggcgccctgctctttcctcatgttggcaatccccggccacggagaccaccgtcctcatgtcccagactgaggccgacctggccctgcggcccccgcctcctcttggcaccgcggggcagccccgcctcgggccccctcctcgccgagcgcgccgcttctccgggaaggctgagccccggccgcgctcttctcgtctcagccgccgtagctcagtcgacttggggctgctgagctcttggtccctgccagcctcacccgctccggacccccccgatcctccggactccgctggtcctggccccgcgaggagcccaccgcctagctccaaagaaccccccgagggcacgtggaccgagggagcccctgtgaaggctgcggaagactccgcgcgtcccgagctcccggactctgcagtgggcccggggtccagggagccgctaagggtccctgaagctgtggccctagagcggcggcgggagcaggaagaaaaggaggacatggagacccaggctgtggcaacgtcccccgatggccgatacctcaagtttgacatcgagattggacgtggctccttcaagacggtgtatcgagggctagacaccgacaccacagtggaggtggcctggtgtgagctgcagactcggaaactgtctagagctgagcggcagcgcttctcagaggaggtggagatgctcaaggggctgcagcaccccaacatcgtccgcttctatgattcgtggaagtcggtgctgaggggccaggtttgcatcgtgctggtcaccgaactcatgacctcgggcacgctcaagacgtacctgaggcggttccgggagatgaagccgcgggtccttcagcgctggagccgccaaatcctgcggggacttcatttcctacactcccgggttcctcccatcctgcaccgggatctcaagtgcgacaatgtctttatcacgggacctactggctctgtcaaaatcggggacctgggcctggccacgctcaagcgcgcctcctttgccaagagtgtcatcgggaccccggaattcatggcccccgagatgtacgaggaaaagtacgatgaggccgtggacgtgtacgcgttcggcatgtgcatgctggagatggccacctctgagtacccgtactccgagtgccagaatgccgcgcaaatctaccgcaaggtcacttcgggcagaaagccgaacagcttccacaaggtgaagatacccgaggtgaaggagatcattgaaggctgcatccgcacggataagaacgagaggttcaccatccaggacctcctggcccacgccttcttccgcgaggagcgcggtgtgcacgtggaactagcggaggaggacgacggcgagaagccgggcctcaagctctggctgcgcatggaggacgcgcggcgcggggggcgcccacgggacaaccaggccatcgagttcctgttccagctgggccgggacgcggccgaggaggtggcacaggagatggtggctctgggcttggtctgtgaagccgattaccagccagtggcccgtgcagtacgtgaacgggttgctgccatccagcgaaagcgtgagaagctgcgtaaagcaagggaattggaggcactcccaccagagccaggacctccaccagcaactgtgcccatggcccccggtccccccagtgtcttcccccctgagcctgaggagccagaggcagaccagcaccagcccttccttttccgccacgccagctactcatctaccacttcggattgcgagactgatggctacctcagctcctccggcttcctggatgcctcagaccctgcccttcagccccctgggggggtgccatccagcctggctgagtcccatctctgcctgccctcggcttttgccctatccattccacgttctggccctggaagtgacttttcccccggggacagctatgcctcagatgcagcttcaggccttagcgatgtgggagaagggatgggacaaatgaggagacccccagggaggaatctccggcgcagaccccgatcccggctgcgggtcactagtgtctcagaccagaatgacagagtggttgagtgccagctacagacccataacagcaagatggtgaccttccgatttgatctggatggggacagcccggaagagattgcagctgccatggtgagggggagagagatgaggacagagtgtttggatctggaacaagagtctccttcctgatgtccgctggggctgaaacccactgatccgacagcaagcatttttaaatctctggttgacacttagcacagtaacgctgaagatgtctcagcccttgtttgggggagatttctgtttatccagtgaggtttggcttctcagctggagcaatttgagactcacattgaccgggtacacacaagtgctacgtataagtgcctggtagatgtgcaatactgtggctgtaggtgaaggatggactgggcagcaggggcaatgagcttacccaggatcttggcaaatgggcgagaaaggctgtgaagggtggaaaggccatgaagggtgtccctgtgcagggacagcataagcaaaggcattccaagtagagagtgtcttggaatatggggctgggagggcttcatgaggaaaccactatcactggaagtaaagattcctataggagagttgtggggagtgaagccgggtaggtagagtgggcccagattgt

SEQ ID NO: 37476 - DNA, 242 bp, Homo sapiens
ctggagttcccaagaaggcgtcctgatggatctttgatagggggtcccaagctgtgttcctcatcccccaccccaattccaggtggctctgggcttggtctgtgaagccgattaccagccagtggcccgtgcagtacgtgaacgggttgctgccatccagcgaaagcgtgagaagctgcgtaaagcaagggaattggaggcactcccaccagagccaggacctccaccagcaactgtgccca

SEQ ID NO: 37477 - DNA, 4136 bp, Homo sapiens
ttcggcgccctgctctttcctcatgttggcaatccccggccacggagaccaccgtcctcatgtcccagactgaggccgacctggccctgcggcccccgcctcctcttggcaccgcggggcagccccgcctcgggccccctcctcgccgagcgcgccgcttctccgggaaggctgagccccggccgcgctcttctcgtctcagccgccgtagctcagtcgacttggggctgctgagctcttggtccctgccagcctcacccgctccggacccccccgatcctccggactccgctggtcctggccccgcgaggagcccaccgcctagctccaaagaaccccccgagggcacgtggaccgagggagcccctgtgaaggctgcggaagactccgcgcgtcccgagctcccggactctgcagtgggcccggggtccagggagccgctaagggtccctgaagctgtggccctagagcggcggcgggagcaggaagaaaaggaggacatggagacccaggctgtggcaacgtcccccgatggccgatacctcaagtttgacatcgagattggacgtggctccttcaagacggtgtatcgagggctagacaccgacaccacagtggaggtggcctggtgtgagctgcagactcggaaactgtctagagctgagcggcagcgcttctcagaggaggtggagatgctcaaggggctgcagcaccccaacatcgtccgcttctatgattcgtggaagtcggtgctgaggggccaggtttgcatcgtgctggtcaccgaactcatgacctcgggcacgctcaagacgtacctgaggcggttccgggagatgaagccgcgggtccttcagcgctggagccgccaaatcctgcggggacttcatttcctacactcccgggttcctcccatcctgcaccgggatctcaagtgcgacaatgtctttatcacgggacctactggctctgtcaaaatcggggacctgggcctggccacgctcaagcgcgcctcctttgccaagagtgtcatcgggaccccggaattcatggcccccgagatgtacgaggaaaagtacgatgaggccgtggacgtgtacgcgttcggcatgtgcatgctggagatggccacctctgagtacccgtactccgagtgccagaatgccgcgcaaatctaccgcaaggtcacttcgggcagaaagccgaacagcttccacaaggtgaagatacccgaggtgaaggagatcattgaaggctgcatccgcacggataagaacgagaggttcaccatccaggacctcctggcccacgccttcttccgcgaggagcgcggtgtgcacgtggaactagcggaggaggacgacggcgagaagccgggcctcaagctctggctgcgcatggaggacgcgcggcgcggggggcgcccacgggacaaccaggccatcgagttcctgttccagctgggccgggacgcggccgaggaggtggcacaggagatggtggctctgggcttggtctgtgaagccgattaccagccagtggcccgtgcagtacgtgaacgggttgctgccatccagcgaaagcgtgagaagctgcgtaaagcaagggaattggaggcactcccaccagagccaggacctccaccagcaactgtgcccatggcccccggtccccccagtgtcttcccccctgagcctgaggagccagaggcagaccagcaccagcccttccttttccgccacgccagctactcatctaccacttcggattgcgagactgatggctacctcagctcctccggcttcctggatgcctcagaccctgcccttcagccccctgggggggtgccatccagcctggctgagtcccatctctgcctgccctcggcttttgccctatccattccacgttctggccctggaagtgacttttcccccggggacagctatgcctcagatgcagcttcaggccttagcgatgtgggagaagggatgggacaaatgaggagacccccagggaggaatctccggcgcagaccccgatcccggctgcgggtcactagtgtctcagaccagaatgacagagtggttgagtgccagctacagacccataacagcaagatggtgaccttccgatttgatctggatggggacagcccggaagagattgcagctgccatggtatataacgagttcattctgccttcggagcgagatggatttctcagacggattcgggagattatccagcgagtggagaccctgttgaagagagacactggccccatggaggctgctgaagacaccctaagcccccaggaggagccagcaccattacctgccctgcccgtccccctcccagacccatccaatgaagagctccagagcagcacctccctggagcacaggagctggacagccttctccacctcctcatcttctcctggaactcctttgtctcctggaaacccattttcccctggaacccccatttccccaggtcccatcttccccatcacttctcccccatgtcatcccagcccctccccattctcccccatttcttcccaggtctcctcaaatccctctccacaccccaccagctctccacttccattctcctccagcacacccgagtttccggtcccactctctcagtgtccctggagttctctccccacgacttctccacctacgttctctcccacttgttctcaggtcactcttagttcccctttctttcctccgtgcccctccacttcttccttcccctccaccacagcagcccctctcctttctctggctagtgccttctcactggctgtgatgactgtggcccagtccctgctgtccccctcacctgggctcctttcccagtctcctccagcccctcctagtcccctccctagcctgccccttccccctcccgttgctcctggtggccaggaaagcccttcaccccacacagctgaggtggagagtgaggcctcaccacctcctgctcggcccctcccaggggaagccaggctggcgcccatctctgaagagggaaagccgcagcttgttgggcgtttccaagtgacttcatccaaggaaccggctgagcctcttcccttgcagccaacatcccccactctctctggttctccaaaaccttcaacccctcagctcacttcagagagctcagatacagaggacagtgctggaggcgggccagagaccagggaagctctggctgagagcgaccgtgcagctgagggtctgggggctggagttgaggaggaaggagatgatgggaaggaaccccaagttgggggcagcccccaacccctgagccatcccagcccagtgtggatgaactactcctacagcagcctgtgtttgagcagcgaggagtcagaaagcagtggggaagatgaggagttctgggctgagctgcagagtcttcggcagaagcacttgtcagaggtggaaacactacagacactacagaaaaaagaaattgaagatttgtacagccggctggggaagcagcccccaccgggtattgtggccccagctgctatgctgtccagccgccagcgccgcctctccaagggcagcttccccacctcccgccgcaacagcctacagcgctctgagcccccaggccctggcatcatgcgaaggaactctctgagtggcagcagcaccggctcccaggagcagcgggcaagcaagggggtgacattcgccggggatgttggcaggatgtgaattcagaacagaagccatgtatctcccccacaccagggcccaccatggagcttgtgttctcagaatctgatgctttctgatcaacaaaactgagcaaggaagatcccaacactgaaggggtagaaggccaggggggcatggagagtgcagctccattatagtgaagagccaaacatatgtgaactgtttgctgtgtggaggtgttagttctgctgcctaccatcttcatctctagcacctcccctgccaagagtcaaccactaagcaatcccacccaagcctggatgcttctagaggggcccactcccagctgggagagtgtaggggatatgctcacaccacattagcagcaaccaataaaaatgctggaaacaagaaaac

SEQ ID NO: 37478 - DNA, 4038 bp, Homo sapiens
ttcggcgccctgctctttcctcatgttggcaatccccggccacggagaccaccgtcctcatgtcccagactgaggccgacctggccctgcggcccccgcctcctcttggcaccgcggggcagccccgcctcgggccccctcctcgccgagcgcgccgcttctccgggaaggctgagccccggccgcgctcttctcgtctcagccgccgtagctcagtcgacttggggctgctgagctcttggtccctgccagcctcacccgctccggacccccccgatcctccggactccgctggtcctggccccgcgaggagcccaccgcctagctccaaagaaccccccgagggcacgtggaccgagggagcccctgtgaaggctgcggaagactccgcgcgtcccgagctcccggactctgcagtgggcccggggtccagggagccgctaagggtccctgaagctgtggccctagagcggcggcgggagcaggaagaaaaggaggacatggagacccaggctgtggcaacgtcccccgatggccgatacctcaagtttgacatcgagattggacgtggctccttcaagacggtgtatcgagggctagacaccgacaccacagtggaggtggcctggtgtgagctgcagactcggaaactgtctagagctgagcggcagcgcttctcagaggaggtggagatgctcaaggggctgcagcaccccaacatcgtccgcttctatgattcgtggaagtcggtgctgaggggccaggtttgcatcgtgctggtcaccgaactcatgacctcgggcacgctcaagacgtacctgaggcggttccgggagatgaagccgcgggtccttcagcgctggagccgccaaatcctgcggggacttcatttcctacactcccgggttcctcccatcctgcaccgggatctcaagtgcgacaatgtctttatcacgggacctactggctctgtcaaaatcggggacctgggcctggccacgctcaagcgcgcctcctttgccaagagtgtcatcgggaccccggaattcatggcccccgagatgtacgaggaaaagtacgatgaggccgtggacgtgtacgcgttcggcatgtgcatgctggagatggccacctctgagtacccgtactccgagtgccagaatgccgcgcaaatctaccgcaaggtcacttcgggcagaaagccgaacagcttccacaaggtgaagatacccgaggtgaaggagatcattgaaggctgcatccgcacggataagaacgagaggttcaccatccaggacctcctggcccacgccttcttccgcgaggagcgcggtgtgcacgtggaactagcggaggaggacgacggcgagaagccgggcctcaagctctggctgcgcatggaggacgcgcggcgcggggggcgcccacgggacaaccaggccatcgagttcctgttccagctgggccgggacgcggccgaggaggtggcacaggagatggtggctctgggcttggtctgtgaagccgattaccagccagtggcccgtgcagtacgtgaacgggttgctgccatccagcgaaagcgtgagaagctgcgtaaagcaagggaattggaggcactcccaccagagccaggacctccaccagcaactgtgcccatggcccccggtccccccagtgtcttcccccctgagcctgaggagccagaggcagaccagcaccagcccttccttttccgccacgccagctactcatctaccacttcggattgcgagactgatggctacctcagctcctccggcttcctggatgcctcagaccctgcccttcagccccctgggggggtgccatccagcctggctgagtcccatctctgcctgccctcggcttttgccctatccattccacgttctggccctggaagtgacttttcccccggggacagctatgcctcagatgcagcttcaggccttagcgatgtgggagaagggatgggacaaatgaggagacccccagggaggaatctccggcgcagaccccgatcccggctgcgggtcactagtgtctcagaccagaatgacagagtggttgagtgccagctacagacccataacagcaagatggtgaccttccgatttgatctggatggggacagcccggaagagattgcagctgccatggtatataacgagttcattctgccttcggagcgagatggatttctcagacggattcgggagattatccagcgagtggagaccctgttgaagagagacactggccccatggaggctgctgaagacaccctaagcccccaggaggagccagcaccattacctgccctgcccgtccccctcccagacccatccaatgaagagctccagagcagcacctccctggagcacaggagctggacagccttctccacctcctcatcttctcctggaactcctttgtctcctggaaacccattttcccctggaacccccatttccccaggtcccatcttccccatcacttctcccccatgtcatcccagcccctccccattctcccccatttcttcccaggtctcctcaaatccctctccacaccccaccagctctccacttccattctcctccagcacacccgagtttccggtcccactctctcagtgtccctggagttctctccccacgacttctccacctacgttctctcccacttgttctcaggtcactcttagttcccctttctttcctccgtgcccctccacttcttccttcccctccaccacagcagcccctctcctttctctggctagtgccttctcactggctgtgatgactgtggcccagtccctgctgtccccctcacctgggctcctttcccagtctcctccagcccctcctagtcccctccctagcctgccccttccccctcccgttgctcctggtggccaggaaagcccttcaccccacacagctgaggtggagagtgaggcctcaccacctcctgctcggcccctcccaggggaagccaggctggcgcccatctctgaagagggaaagccgcagcttgttgggcgtttccaagtgacttcatccaaggaaccggctgagcctcttcccttgcagccaacatcccccactctctctggttctccaaaaccttcaacccctcagctcacttcagagagctcagatacagaggacagtgctggaggcgggccagagaccagggaagctctggctgagagcgaccgtgcagctgagggtctgggggctggagttgaggaggaaggagatgatgggaaggaaccccaagttgggggcagcccccaacccctgagccatcccagcccagtgtggatgaactactcctacagcagcctgtgtttgagcagcgaggagtcagaaagcagtggggaagatgaggagttctgggctgagctgcagagtcttcggcagaagcacttgtcagaggtggaaacactacagacactacagaaaaaagaaattgaagatttgtacagccggctggggaagcagcccccaccgggtattgtggccccagctgctatgctgtccagccgccagcgccgcctctccaagggcagcttccccacctcccgccgcaacagcctacagcgctctgagcccccaggccctgtgaattcagaacagaagccatgtatctcccccacaccagggcccaccatggagcttgtgttctcagaatctgatgctttctgatcaacaaaactgagcaaggaagatcccaacactgaaggggtagaaggccaggggggcatggagagtgcagctccattatagtgaagagccaaacatatgtgaactgtttgctgtgtggaggtgttagttctgctgcctaccatcttcatctctagcacctcccctgccaagagtcaaccactaagcaatcccacccaagcctggatgcttctagaggggcccactcccagctgggagagtgtaggggatatgctcacaccacattagcagcaaccaataaaaatgctggaaacaagaaaac

SEQ ID NO: 37479 - DNA, 422 bp, Homo sapiens
aacccctcagctcacttcagagagctcagatacagaggacagtgctggaggcgggccagagaccagggaagctctggctgagagcgaccgtgcagctgagggtctgggggctggagttgaggaggaaggagatgatgggaaggaaccccaagttgggggcagcccccaacccctgagccatcccagcccagtgtggatgaactactcctacagcagcctgtgtttgagcagcgaggagtcagaaagcagtggggaagatgaggagttctgggctgagctgcagagtcttcggcagaagtgagtctcgggaggatggaggagtgagaggagaacctgggagagcaaggtgtgtggctagccctttcatgccctccgtgcatcctcaggcacttgtcagaggtggaaacactacagacactaca

SEQ ID NO: 37480 - DNA, 931 bp, Homo sapiens
gggcctggtgggaggcccacaaggctcctctcaccttcctcctcctccccgcccttcaccgcagagaaccggaagaaaaccatggataagatcatcaggggcaagctggcactgcccccctacctcaccccagatgcccgggaccttgtcaaaaagtttctgaaacggaatcccagccagcggattgggggtggcccaggggatgctgctgatgtgcagagacatccctttttccggcacatgaattgggacgaccttctggcctggcgtgtggacccccctttcaggccctgtctgcagtcagaggaggacgtgagccagtttgatacccgcttcacacggcagacgccggtggacagtcctgatgacacagccctcagcgagagtgccaaccaggccttcctgggcttcacatacgtggcgccgtctgtcctggacagcatcaaggagggcttctccttccagcccaagctgcgctcacccaggcgcctcaacagtagcccccgggtccccgtcagccccctcaagttctccccttttgaggggtttcggcccagccccagcctgccggagcccacggagctacctctacctccactcctgccaccgccgccgccctcgaccaccgcccctctccccatccgtcccccctcagggaccaagaagtccaagaggggccgtgggcgtccagggcgctaggaagccgggtgggggtgagggtagcccttgagccctgtccctgcggctgtgagagcagcaggaccctgggccagttccagagacctgggggtgtgtctgggggtggggtgtgagtgcgtatgaaagtgtgtgtctgctggggcagctgtgcccctgaatcatgggcacggagggccgcccgccacgccccgcgctcaactgctcccgtggaagattaaagggctgaatcatg

SEQ ID NO: 37481 - DNA, 1767 bp, Homo sapiens
gctagtcgggctgggtgttaatcggccgagtgtcagtcagtgcgcggccaggtacgggccgacgggcccgcggggccggcgccgccatggcggccgtgtttgatttggatttggagacggaggaaggcagcgagggcgagggcgagccagagctcagccccgcggacgcatgtccccttgccgagttgagggcagctggcctagagcctgtgggacactatgaagaggtggagctgactgagaccagcgtgaacgttggcccagagcgcatcgggccccactgctttgagctgctgcgtgtgctgggcaaggggggctatggcaaggtgttccaggtgcgaaaggtgcaaggcaccaacttgggcaaaatatatgccatgaaagtcctaaggaaggccaaaattgtgcgcaatgccaaggacacagcacacacacgggctgagcggaacattctagagtcagtgaagcacccctttattgtggaactggcctatgccttccagactggtggcaaactctacctcatccttgagtgcctcagtggtggcgagctcttcacgcatctggagcgagagggcatcttcctggaagatacggcctgcttctacctggctgagatcacgctggccctgggccatctccactcccagggcatcatctaccgggacctcaagcccgagaacatcatgctcagcagccagggccacatcaaactgaccgactttggactctgcaaggagtctatccatgagggcgccgtcactcacaccttctgcggcaccattgagtacatggcccctgagattctggtgcgcagtggccacaaccgggctgtggactggtggagcctgggggccctgatgtacgacatgctcactggatcgccgcccttcaccgcagagaaccggaagaaaaccatggataagatcatcaggggcaagctggcactgcccccctacctcaccccagatgcccgggaccttgtcaaaaagtttctgaaacggaatcccagccagcggattgggggtggcccaggggatgctgctgatgtgcagagacatccctttttccggcacatgaattgggacgaccttctggcctggcgtgtggacccccctttcaggccctgtctgcagtcagaggaggacgtgagccagtttgatacccgcttcacacggcagacgccggtggacagtcctgatgacacagccctcagcgagagtgccaaccaggccttcctgggcttcacatacgtggcgccgtctgtcctggacagcatcaaggagggcttctccttccagcccaagctgcgctcacccaggcgcctcaacagtagcccccgggtccccgtcagccccctcaagttctccccttttgaggggtttcggcccagccccagcctgccggagcccacggagctacctctacctccactcctgccaccgccgccgccctcgaccaccgcccctctccccatccgtcccccctcagggaccaagaagtccaagaggggccgtgggcgtccagggcgctaggaagccgggtgggggtgagggtagcccttgagccctgtccctgcggctgtgagagcagcaggaccctgggccagttccagagacctgggggtgtgtctgggggtggggtgtgagtgcgtatgaaagtgtgtgtctgctggggcagctgtgcccctgaatcatgggcacggagggccgcccgccacgccccgcgctcaactgctcccgtggaagattaaagggctgaatcatg

SEQ ID NO: 37482 - DNA, 1701 bp, Homo sapiens
ggagagatgatgtttaggtccgggactgtcagtcagtgcgcggccaggtacgggccgacgggcccgcggggccggcgccgccatggcggccgtgtttgatttggatttggagacggaggaaggcagcgagggcgagggcgagccagagctcagccccgcggacgcatgtccccttgccgagttgagggcagctggcctagagcctgtgggacactatgaagaggtggagctgactgagaccagcgtgaacgttggcccagagcgcatcgggccccactgctttgagctgctgcgtgtgctgggcaaggggggctatggcaaggtgttccaggtgcgaaaggtgcaaggcaccaacttgggcaaaatatatgccatgaaagtcctaaggaaggccaaaattgtgcgcaatgccaaggacacagcacacacacgggctgagcggaacattctagagtcagtgaagcacccctttattgtggaactggcctatgccttccagactggtggcaaactctacctcatccttgagtgcctcagtggtggcgagctcttcacgcatctggagcgagagggcatcttcctggaagatacggcctgcttctacctggctgagatcacgctggccctgggccatctccactcccagggcatcatctaccgggacctcaagcccgagaacatcatgctcagcagccagggccacatcaaactgaccgactttggactctgcaaggagtctatccatgagggcgccgtcactcacaccttctgcggcaccattgagtacatggcccctgagattctggtgcgcagtggccacaaccgggctgtggactggtggagcctgggggccctgatgtacgacatgctcactggatcgccgcccttcaccgcagagaaccggaagaaaaccatggataagatcatcaggggcaagctggcactgcccccctacctcaccccagatgcccgggaccttgtcaaaaagtttctgaaacggaatcccagccagcggattgggggtggcccaggggatgctgctgatgtgcagagacatccctttttccggcacatgaattgggacgaccttctggcctggcgtgtggacccccctttcaggccctgtctgcagtcagaggaggacgtgagccagtttgatacccgcttcacacggcagacgccggtggacagtcctgatgacacagccctcagcgagagtgccaaccaggccttcctggtgagtgcgggggcctgaggcctgtgggaccagggcacggatcgtgactaaggatggcaggcactgagtgtcgcatggccctgcctccgccccccagggcttcacatacgtggcgccgtctgtcctggacagcatcaaggagggcttctccttccagcccaagctgcgctcacccaggcgcctcaacagtagcccccgggtccccgtcaggtactgagggacgtgggggtgtgtggctgggttagggacgctggcaggcaggatgccagctccagccttgggtgccttggccacgtctgtcggccagtgttggcttcggttgctgtgtctgggggtggggtgtgagtgcgtatgaaagtgtgtgtctgctggggcagctgtgcccctgaatcatgggcacggagggccgcccgccacgccccgcgctcaactgctcccgtggaagattaaagggctgaatcatg

SEQ ID NO: 37483 - DNA, 1726 bp, Homo sapiens
gctagtcgggctgggtgttaatcggccgagtgtcagtcagtgcgcggccaggtacgggccgacgggcccgcggggccggcgccgccatggcggccgtgtttgatttggatttggagacggaggaaggcagcgagggcgagggcgagccagagctcagccccgcggcctgtgggacactatgaagaggtggagctgactgagaccagcgtgaacgttggcccagagcgcatcgggccccactgctttgagctgctgcgtgtgctgggcaaggggggctatggcaaggtgttccaggtgcgaaaggtgcaaggcaccaacttgggcaaaatatatgccatgaaagtcctaaggaaggccaaaattgtgcgcaatgccaaggacacagcacacacacgggctgagcggaacattctagagtcagtgaagcacccctttattgtggaactggcctatgccttccagactggtggcaaactctacctcatccttgagtgcctcagtggtggcgagctcttcacgcatctggagcgagagggcatcttcctggaagatacggcctgcttctacctggctgagatcacgctggccctgggccatctccactcccagggcatcatctaccgggacctcaagcccgagaacatcatgctcagcagccagggccacatcaaactgaccgactttggactctgcaaggagtctatccatgagggcgccgtcactcacaccttctgcggcaccattgagtacatggcccctgagattctggtgcgcagtggccacaaccgggctgtggactggtggagcctgggggccctgatgtacgacatgctcactggatcgccgcccttcaccgcagagaaccggaagaaaaccatggataagatcatcaggggcaagctggcactgcccccctacctcaccccagatgcccgggaccttgtcaaaaagtttctgaaacggaatcccagccagcggattgggggtggcccaggggatgctgctgatgtgcagagacatccctttttccggcacatgaattgggacgaccttctggcctggcgtgtggacccccctttcaggccctgtctgcagtcagaggaggacgtgagccagtttgatacccgcttcacacggcagacgccggtggacagtcctgatgacacagccctcagcgagagtgccaaccaggccttcctgggcttcacatacgtggcgccgtctgtcctggacagcatcaaggagggcttctccttccagcccaagctgcgctcacccaggcgcctcaacagtagcccccgggtccccgtcagccccctcaagttctccccttttgaggggtttcggcccagccccagcctgccggagcccacggagctacctctacctccactcctgccaccgccgccgccctcgaccaccgcccctctccccatccgtcccccctcagggaccaagaagtccaagaggggccgtgggcgtccagggcgctaggaagccgggtgggggtgagggtagcccttgagccctgtccctgcggctgtgagagcagcaggaccctgggccagttccagagacctgggggtgtgtctgggggtggggtgtgagtgcgtatgaaagtgtgtgtctgctggggcagctgtgcccctgaatcatgggcacggagggccgcccgccacgccccgcgctcaactgctcccgtggaagattaaagggctgaatcatg

SEQ ID NO: 37484 - DNA, 1743 bp, Homo sapiens
gtgtctcctctgccgactgctgaggtcatagagcctggggctgctcccagcccttctattcagagtcctgcggctggctgcccacatcaagccttgcccctaggccggctgtcccctgcaggctgtgagcagtcttgacctgcctttccctcgtttgggccagatgaaccctgcgagcttctgcctccatgctctgcattcgctccgtccatctcagcatccccttaaagtcccagcaaaccgcgctttctctgttctgttctgttgggattcactctgtcttccctgtcttctctgcgagatcttttgggctaagctcttggagctgtggcctgggcctggcgtattagagccgttgtgtacatgtctgtctccccagtagactgagcgtcctgagggcagtggctgggtctcttcatcctgtccccagcttcacccagcacagggccaggcaccgagtaggcgtcggtagatgtttgctgaattgaattgaatccccacggcagctctgtgaggcaggtggcgagctcttcacgcatctggagcgagagggcatcttcctggaagatacggcctgcttctacctggctgagatcacgctggccctgggccatctccactcccagggcatcatctaccgggacctcaagcccgagaacatcatgctcagcagccagggccacatcaaactgaccgactttggactctgcaaggagtctatccatgagggcgccgtcactcacaccttctgcggcaccattgagtacatggcccctgagattctggtgcgcagtggccacaaccgggctgtggactggtggagcctgggggccctgatgtacgacatgctcactggatcgccgcccttcaccgcagagaaccggaagaaaaccatggataagatcatcaggggcaagctggcactgcccccctacctcaccccagatgcccgggaccttgtcaaaaagtttctgaaacggaatcccagccagcggattgggggtggcccaggggatgctgctgatgtgcagagacatccctttttccggcacatgaattgggacgaccttctggcctggcgtgtggacccccctttcaggccctgtctgcagtcagaggaggacgtgagccagtttgatacccgcttcacacggcagacgccggtggacagtcctgatgacacagccctcagcgagagtgccaaccaggccttcctgggcttcacatacgtggcgccgtctgtcctggacagcatcaaggagggcttctccttccagcccaagctgcgctcacccaggcgcctcaacagtagcccccgggtccccgtcagccccctcaagttctccccttttgaggggtttcggcccagccccagcctgccggagcccacggagctacctctacctccactcctgccaccgccgccgccctcgaccaccgcccctctccccatccgtcccccctcagggaccaagaagtccaagaggggccgtgggcgtccagggcgctaggaagccgggtgggggtgagggtagcccttgagccctgtccctgcggctgtgagagcagcaggaccctgggccagttccagagacctgggggtgtgtctgggggtggggtgtgagtgcgtatgaaagtgtgtgtctgctggggcagctgtgcccctgaatcatgggcacggagggccgcccgccacgccccgcgctcaactgctcccgtggaagattaaagggctgaatcatg

SEQ ID NO: 37485 - DNA, 1383 bp, Homo sapiens
ggctgtgtcatcaggactgaccaccggcgtctgccgtttgaagcgggaatcaaactggctcacgtcctcctctgactgcacacagggccaggcaccgagtaggcgtcggtagatgtttgctgaattgaattgaatccccacggcagctctgtgaggcaggtggcgagctcttcacgcatctggagcgagagggcatcttcctggaagatacggcctgcttctacctggctgagatcacgctggccctgggccatctccactcccagggcatcatctaccgggacctcaagcccgagaacatcatgctcagcagccagggccacatcaaactgaccgactttggactctgcaaggagtctatccatgagggcgccgtcactcacaccttctgcggcaccattgagtacatggcccctgagattctggtgcgcagtggccacaaccgggctgtggactggtggagcctgggggccctgatgtacgacatgctcactggatcgccgcccttcaccgcagagaaccggaagaaaaccatggataagatcatcaggggcaagctggcactgcccccctacctcaccccagatgcccgggaccttgtcaaaaagtttctgaaacggaatcccagccagcggattgggggtggcccaggggatgctgctgatgtgcagagacatccctttttccggcacatgaattgggacgaccttctggcctggcgtgtggacccccctttcaggccctgtctgcagtcagaggaggacgtgagccagtttgatacccgcttcacacggcagacgccggtggacagtcctgatgacacagccctcagcgagagtgccaaccaggccttcctgggcttcacatacgtggcgccgtctgtcctggacagcatcaaggagggcttctccttccagcccaagctgcgctcacccaggcgcctcaacagtagcccccgggtccccgtcagccccctcaagttctccccttttgaggggtttcggcccagccccagcctgccggagcccacggagctacctctacctccactcctgccaccgccgccgccctcgaccaccgcccctctccccatccgtcccccctcagggaccaagaagtccaagaggggccgtgggcgtccagggcgctaggaagccgggtgggggtgagggtagcccttgagccctgtccctgcggctgtgagagcagcaggaccctgggccagttccagagacctgggggtgtgtctgggggtggggtgtgagtgcgtatgaaagtgtgtgtctgctggggcagctgtgcccctgaatcatgggcacggagggccgcccgccacgccccgcgctcaactgctcccgtggaagattaaagggctgaatcatg

SEQ ID NO: 37486 - DNA, 1077 bp, Homo sapiens
  misc_feature (2)..(2): n is a, c, g, or t
angtgatcctcgaaatctcatttgctcatgagaggtttttttctttcagcccattctttcaaccaagaaagtgtacttggggcactgttcatgtaaggtgctttcggatcccagatacttgcagtataaggaccaactttcacgggtggtccctgaaaactgaagccccttgtttctgagattagaaaccgtccccgcccttcaccgcagagaaccggaagaaaaccatggataagatcatcaggggcaagctggcactgcccccctacctcaccccagatgcccgggaccttgtcaaaaagtttctgaaacggaatcccagccagcggattgggggtggcccaggggatgctgctgatgtgcagagacatccctttttccggcacatgaattgggacgaccttctggcctggcgtgtggacccccctttcaggccctgtctgcagtcagaggaggacgtgagccagtttgatacccgcttcacacggcagacgccggtggacagtcctgatgacacagccctcagcgagagtgccaaccaggccttcctgggcttcacatacgtggcgccgtctgtcctggacagcatcaaggagggcttctccttccagcccaagctgcgctcacccaggcgcctcaacagtagcccccgggtccccgtcagccccctcaagttctccccttttgaggggtttcggcccagccccagcctgccggagcccacggagctacctctacctccactcctgccaccgccgccgccctcgaccaccgcccctctccccatccgtcccccctcagggaccaagaagtccaagaggggccgtgggcgtccagggcgctaggaagccgggtgggggtgagggtagcccttgagccctgtccctgcggctgtgagagcagcaggaccctgggccagttccagagacctgggggtgtgtctgggggtggggtgtgagtgcgtatgaaagtgtgtgtctgctggggcagctgtgcccctgaatcatgggcacggagggccgcccgccacgccccgcgctcaactgctcccgtggaagattaaagggctgaatcatg

SEQ ID NO: 37487 - DNA, 1926 bp, Homo sapiens
gctagtcgggctgggtgttaatcggccgagtgtcagtcagtgcgcggccaggtacgggccgacgggcccgcggggccggcgccgccatggcggccgtgtttgatttggatttggagacggaggaaggcagcgagggcgagggcgagccagagctcagccccgcggacgcatgtccccttgccgagttgagggcagctggcctagagcctgtgggacactatgaagaggtggagctgactgagaccagcgtgaacgttggcccagagcgcatcgggccccactgctttgagctgctgcgtgtgctgggcaaggggggctatggcaaggtgttccaggtgcgaaaggtgcaaggcaccaacttgggcaaaatatatgccatgaaagtcctaaggaaggccaaaattgtgcgcaatgccaaggacacagcacacacacgggctgagcggaacattctagagtcagtgaagcacccctttattgtggaactggcctatgccttccagactggtggcaaactctacctcatccttgagtgcctcagtgactgagcgtcctgagggcagtggctgggtctcttcatcctgtccccagcttcacccagcacagggccaggcaccgagtaggcgtcggtagatgtttgctgaattgaattgaatccccacggcagctctgtgaggcaggtagggcgggaattatgagcccctctttccccaagaagaaataaagactcagaaagcacaaaggggcttggacccagcacgtggctgctgacgtgtttgtgtggcaggtggcgagctcttcacgcatctggagcgagagggcatcttcctggaagatacggcctgcttctacctggctgagatcacgctggccctgggccatctccactcccagggcatcatctaccgggacctcaagcccgagaacatcatgctcagcagccagggccacatcaaactgaccgactttggactctgcaaggagtctatccatgagggcgccgtcactcacaccttctgcggcaccattgagtacatggcccctgagattctggtgcgcagtggccacaaccgggctgtggactggtggagcctgggggccctgatccgcccttcaccgcagagaaccggaagaaaaccatggataagatcatcaggggcaagctggcactgcccccctacctcaccccagatgcccgggaccttgtcaaaaagagacatccctttttccggcacatgaattgggacgaccttctggcctggcgtgtggacccccctttcaggccctgtctgcagtcagaggaggacgtgagccagtttgatacccgcttcacacggcagacgccggtggacagtcctgatgacacagccctcagcgagagtgccaaccaggccttcctgggcttcacatacgtggcgccgtctgtcctggacagcatcaaggagggcttctccttccagcccaagctgcgctcacccaggcgcctcaacagtagcccccgggtccccgtcagccccctcaagttctccccttttgaggggtttcggcccagccccagcctgccggagcccacggagctacctctacctccactcctgccaccgccgccgccctcgaccaccgcccctctccccatccgtcccccctcagggaccaagaagtccaagaggggccgtgggcgtccagggcgctaggaagccgggtgggggtgagggtagcccttgagccctgtccctgcggctgtgagagcagcaggaccctgggccagttccagagacctgggggtgtgtctgggggtggggtgtgagtgcgtatgaaagtgtgtgtctgctggggcagctgtgcccctgaatcatgggcacggagggccgcccgccacgccccgcgctcaactgctcccgtggaagattaaagggctgaatcatg

SEQ ID NO: 37488 - DNA, 919 bp, Homo sapiens
gctagtcgggctgggtgttaatcggccgagtgtcagtcagtgcgcggccaggtacgggccgacgggcccgcggggccggcgccgccatggcggccgtgtttgatttggatttggagacggaggaaggcagcgagggcgagggcgagccagagctcagccccgcggcctgtgggacactatgaagaggtggagctgactgagaccagcgtgaacgttggcccagagcgcatcgggccccactgctttgagctgctgcgtgtgctgggcaaggggggctatggcaaggtgttccaggtgcgaaaggtgcaaggcaccaacttgggcaaaatatatgccatgaaagtcctaaggaaggccaaaattgtgcgcaatgccaaggacacagcacacacacgggctgagcggaacattctagagtcagtgaagcacccctttattgtggaactggcctatgccttccagactggtggcaaactctacctcatccttgagtgcctcagtgactgagcgtcctgagggcagtggctgggtctcttcatcctgtccccagcttcacccagcacagggccaggcaccgagtaggcgtcggtagatgtttgctgaattgaattgaatccccacggcagctctgtgaggcaggtggcgagctcttcacgcatctggagcgagagggcatcttcctggaagatacggcctgcttctacctggctgagatcacgctggccctgggccatctccactcccagggcatcatctaccgggacctcaagcccgagaacatcatgctcagcagccagggccacatcaaactgaccgactttggactctgcaaggagtctatccatgagggcgccgtcactcacaccttctgcggcaccattgagtacatgtaagtggcacctggctggcccaggggtcg

SEQ ID NO: 37489 - DNA, 182 bp, Homo sapiens
gccaggtacgggccgacgggcccgcggggccggcgccgccatggcggccgtgtttgatttggatttggagacggaggaaggcagcgagggcgagggcgagccagagctcagccccgcggtgagtgccctgccctggcgcgactggatcctggagccgatcctgtcacccagccgaggccgga

SEQ ID NO: 37490 - DNA, 515 bp, Homo sapiens
tggcgtattagagccgttgtgtacatgtctgtctccccagtagactgagcgtcctgagggcagtggctgggtctcttcatcctgtccccagcttcacccagcacagggccaggcaccgagtaggcgtcggtagatgtttgctgaattgaattgaatccccacggcagctctgtgaggcaggtagggcgggaattatgagcccctctttccccaagaagaaataaagactcagaaagcacaaaggggcttggacccagcacgtggctgctgacgtgtttgtgtggcaggtggcgagctcttcacgcatctggagcgagagggcatcttcctggaagatacggcctggtgggtgttaatcctccgctttcctgaggctgccaggtccctgctctactcccgccttcaccctgtcttgtttctgcagcttctacctggctgagatcacgctggccctgggccatctccactcccagggcatcatctaccgggacctcaagcccgagaacatcatgctc

SEQ ID NO: 37491 - DNA, 1763 bp, Homo sapiens
ggagagatgatgtttaggtccgggactgtcagtcagtgcgcggccaggtacgggccgacgggcccgcggggccggcgccgccatggcggccgtgtttgatttggatttggagacggaggaaggcagcgagggcgagggcgagccagagctcagccccgcggacgcatgtccccttgccgagttgagggcagctggcctagagcctgtgggacactatgaagaggtggagctgactgagaccagcgtgaacgttggcccagagcgcatcgggccccactgctttgagctgctgcgtgtgctgggcaaggggggctatggcaaggtgttccaggtgcgaaaggtgcaaggcaccaacttgggcaaaatatatgccatgaaagtcctaaggaaggccaaaattgtgcgcaatgccaaggacacagcacacacacgggctgagcggaacattctagagtcagtgaagcacccctttattgtggaactggcctatgccttccagactggtggcaaactctacctcatccttgagtgcctcagtggtggcgagctcttcacgcatctggagcgagagggcatcttcctggaagatacggcctgcttctacctggctgagatcacgctggccctgggccatctccactcccagggcatcatctaccgggacctcaagcccgagaacatcatgctcagcagccagggccacatcaaactgaccgactttggactctgcaaggagtctatccatgagggcgccgtcactcacaccttctgcggcaccattgagtacatggcccctgagattctggtgcgcagtggccacaaccgggctgtggactggtggagcctgggggccctgatgtacgacatgctcactggatcgccgcccttcaccgcagagaaccggaagaaaaccatggataagatcatcaggggcaagctggcactgcccccctacctcaccccagatgcccgggaccttgtcaaaaagtttctgaaacggaatcccagccagcggattgggggtggcccaggggatgctgctgatgtgcagagacatccctttttccggcacatgaattgggacgaccttctggcctggcgtgtggacccccctttcaggccctgtctgcagtcagaggaggacgtgagccagtttgatacccgcttcacacggcagacgccggtggacagtcctgatgacacagccctcagcgagagtgccaaccaggccttcctgggcttcacatacgtggcgccgtctgtcctggacagcatcaaggagggcttctccttccagcccaagctgcgctcacccaggcgcctcaacagtagcccccgggtccccgtcagccccctcaagttctccccttttgaggggtttcggcccagccccagcctgccggagcccacggagctacctctacctccactcctgccaccgccgccgccctcgaccaccgcccctctccccatccgtcccccctcagggaccaagaagtccaagaggggccgtgggcgtccagggcgctaggaagccgggtgggggtgagggtagcccttgagccctgtccctgcggctgtgagagcagcaggaccctgggccagttccagagacctgggggtgtgtctgggggtggggtgtgagtgcgtatgaaagtgtgtgtctgctggggcagctgtgcccctgaatcatgggcacggagggccgcccgccacgccccgcgctcaactgctcccgtggaagattaaagggctgaatcatg

SEQ ID NO: 37492 - DNA, 2033 bp, Homo sapiens
ggagagatgatgtttaggtccgggactgtcagtcagtgcgcggccaggtacgggccgacgggcccgcggggccggcgccgccatggcggccgtgtttgatttggatttggagacggaggaaggcagcgagggcgagggcgagccagagctcagccccgcggacgcatgtccccttgccgagttgagggcagctggcctagagcctgtgggacactatgaagaggtggagctgactgagaccagcgtgaacgttggcccagagcgcatcgggccccactgctttgagctgctgcgtgtgctgggcaaggggggctatggcaaggtgttccaggtgcgaaaggtgcaaggcaccaacttgggcaaaatatatgccatgaaagtcctaaggaaggccaaaattgtgcgcaatgccaaggacacagcacacacacgggctgagcggaacattctagagtcagtgaagcacccctttattgtggaactggcctatgccttccagactggtggcaaactctacctcatccttgagtgcctcagtggtggcgagctcttcacgcatctggagcgagagggcatcttcctggaagatacggcctgcttctacctggctgagatcacgctggccctgggccatctccactcccagggcatcatctaccgggacctcaagcccgagaacatcatgctcagcagccagggccacatcaaactgaccgactttggactctgcaaggagtctatccatgagggcgccgtcactcacaccttctgcggcaccattgagtacatggcccctgagattctggtgcgcagtggccacaaccgggctgtggactggtggagcctgggggccctgatgtacgacatgctcactggatcgccgcccttcaccgcagagaaccggaagaaaaccatggataagatcatcaggggcaagctggcactgcccccctacctcaccccagatgcccgggaccttgtcaaaaagtttctgaaacggaatcccagccagcggattgggggtggcccaggggatgctgctgatgtgcagagacatccctttttccggcacatgaattgggacgaccttctggcctggcgtgtggacccccctttcaggccctgtctgcagtcagaggaggacgtgagccagtttgatacccgcttcacacggcagacgccggtggacagtcctgatgacacagccctcagcgagagtgccaaccaggccttcctgggcttcacatacgtggcgccgtctgtcctggacagcatcaaggagggcttctccttccagcccaagctgcgctcacccaggcgcctcaacagtagcccccgggtccccgtcagccccctcaagttctccccttttgaggggtttcggcccagccccagcctgccggagcccacggagctacctctacctccactcctgccaccgccgccgccctcgaccaccgcccctctccccatccgtcccccctcagggaccaagaagtccaagaggggccgtgggcgtccagggcgctaggaagccgggtgggggtgagggtagcccttgagccctgtccctgcggctgtgagagcagcaggaccctgggccagttccagagacctgggggtgtgtctgggggtggggtgtgagtgcgtatgaaagtgtgtgtctgctggggcagctgtgcccctgaatcatgggcacggagggccgcccgccacgccccgcgctcaactgctcccgtggaagattaaagggctgaatcatgaaaaaaaaacaaacaaaaaactccgagggccatcaagggcccggcgtgcggcgcccacgacggtcaccgcacggcgcccatgcgcacacgcggtccgtgacccaaggttcactggttaccacagcgggcgcaacatcggcggggtcccccaaatggcgaaagccgcataaacctgcagaacagcccgcgtaaccccggcataaatgaccgcgaaacagcccccgcacagcgcccgccacgcgagcgccccacgccccccacgcccaccca

SEQ ID NO: 37493 - DNA, 1904 bp, Homo sapiens
gctagtcgggctgggtgttaatcggccgagtgtcagtcagtgcgcggccaggtacgggccgacgggcccgcggggccggcgccgccatggcggccgtgtttgatttggatttggagacggaggaaggcagcgagggcgagggcgagccagagctcagccccgcggacgcatgtccccttgccgagttgagggcagctggcctagagcctgtgggacactatgaagaggtggagctgactgagaccagcgtgaacgttggcccagagcgcatcgggccccactgctttgagctgctgcgtgtgctgggcaaggggggctatggcaaggtgttccaggtgcgaaaggtgcaaggcaccaacttgggcaaaatatatgccatgaaagtcctaaggaaggccaaaattgtgcgcaatgccaaggacacagcacacacacgggctgagcggaacattctagagtcagtgaagcacccctttattgtggaactggcctatgccttccagactggtggcaaactctacctcatccttgagtgcctcagtgactgagcgtcctgagggcagtggctgggtctcttcatcctgtccccagcttcacccagcacagggccaggcaccgagtaggcgtcggtagatgtttgctgaattgaattgaatccccacggcagctctgtgaggcaggtggcgagctcttcacgcatctggagcgagagggcatcttcctggaagatacggcctgcttctacctggctgagatcacgctggccctgggccatctccactcccagggcatcatctaccgggacctcaagcccgagaacatcatgctcagcagccagggccacatcaaactgaccgactttggactctgcaaggagtctatccatgagggcgccgtcactcacaccttctgcggcaccattgagtacatggcccctgagattctggtgcgcagtggccacaaccgggctgtggactggtggagcctgggggccctgatgtacgacatgctcactggatcgccgcccttcaccgcagagaaccggaagaaaaccatggataagatcatcaggggcaagctggcactgcccccctacctcaccccagatgcccgggaccttgtcaaaaagtttctgaaacggaatcccagccagcggattgggggtggcccaggggatgctgctgatgtgcagagacatccctttttccggcacatgaattgggacgaccttctggcctggcgtgtggacccccctttcaggccctgtctgcagtcagaggaggacgtgagccagtttgatacccgcttcacacggcagacgccggtggacagtcctgatgacacagccctcagcgagagtgccaaccaggccttcctgggcttcacatacgtggcgccgtctgtcctggacagcatcaaggagggcttctccttccagcccaagctgcgctcacccaggcgcctcaacagtagcccccgggtccccgtcagccccctcaagttctccccttttgaggggtttcggcccagccccagcctgccggagcccacggagctacctctacctccactcctgccaccgccgccgccctcgaccaccgcccctctccccatccgtcccccctcagggaccaagaagtccaagaggggccgtgggcgtccagggcgctaggaagccgggtgggggtgagggtagcccttgagccctgtccctgcggctgtgagagcagcaggaccctgggccagttccagagacctgggggtgtgtctgggggtggggtgtgagtgcgtatgaaagtgtgtgtctgctggggcagctgtgcccctgaatcatgggcacggagggccgcccgccacgccccgcgctcaactgctcccgtggaagattaaagggctgaatcatg

SEQ ID NO: 37494 - DNA, 1850 bp, Homo sapiens
gtgtctcctctgccgactgctgaggtcatagagcctggggctgctcccagcccttctattcagagtcctgcggctggctgcccacatcaagccttgcccctaggccggctgtcccctgcaggctgtgagcagtcttgacctgcctttccctcgtttgggccagatgaaccctgcgagcttctgcctccatgctctgcattcgctccgtccatctcagcatccccttaaagtcccagcaaaccgcgctttctctgttctgttctgttgggattcactctgtcttccctgtcttctctgcgagatcttttgggctaagctcttggagctgtggcctgggcctggcgtattagagccgttgtgtacatgtctgtctccccagtagactgagcgtcctgagggcagtggctgggtctcttcatcctgtccccagcttcacccagcacagggccaggcaccgagtaggcgtcggtagatgtttgctgaattgaattgaatccccacggcagctctgtgaggcaggtagggcgggaattatgagcccctctttccccaagaagaaataaagactcagaaagcacaaaggggcttggacccagcacgtggctgctgacgtgtttgtgtggcaggtggcgagctcttcacgcatctggagcgagagggcatcttcctggaagatacggcctgcttctacctggctgagatcacgctggccctgggccatctccactcccagggcatcatctaccgggacctcaagcccgagaacatcatgctcagcagccagggccacatcaaactgaccgactttggactctgcaaggagtctatccatgagggcgccgtcactcacaccttctgcggcaccattgagtacatggcccctgagattctggtgcgcagtggccacaaccgggctgtggactggtggagcctgggggccctgatgtacgacatgctcactggatcgccgcccttcaccgcagagaaccggaagaaaaccatggataagatcatcaggggcaagctggcactgcccccctacctcaccccagatgcccgggaccttgtcaaaaagtttctgaaacggaatcccagccagcggattgggggtggcccaggggatgctgctgatgtgcagagacatccctttttccggcacatgaattgggacgaccttctggcctggcgtgtggacccccctttcaggccctgtctgcagtcagaggaggacgtgagccagtttgatacccgcttcacacggcagacgccggtggacagtcctgatgacacagccctcagcgagagtgccaaccaggccttcctgggcttcacatacgtggcgccgtctgtcctggacagcatcaaggagggcttctccttccagcccaagctgcgctcacccaggcgcctcaacagtagcccccgggtccccgtcagccccctcaagttctccccttttgaggggtttcggcccagccccagcctgccggagcccacggagctacctctacctccactcctgccaccgccgccgccctcgaccaccgcccctctccccatccgtcccccctcagggaccaagaagtccaagaggggccgtgggcgtccagggcgctaggaagccgggtgggggtgagggtagcccttgagccctgtccctgcggctgtgagagcagcaggaccctgggccagttccagagacctgggggtgtgtctgggggtggggtgtgagtgcgtatgaaagtgtgtgtctgctggggcagctgtgcccctgaatcatgggcacggagggccgcccgccacgccccgcgctcaactgctcccgtggaagattaaagggctgaatcatg

SEQ ID NO: 37495 - DNA, 1066 bp, Homo sapiens
taggctgtggaagacgggtaggctgtggaagacgggtaggctgtggaagacggctaggctgtggaagacgggtaggctgtggaagacgggtaggctgtggaagacgggtaggctgtggaagacggtcgggctgtggactggtggagcctgggggccctgatgtacgacatgctcactggatcgccgcccttcaccgcagagaaccggaagaaaaccatggataagatcatcaggggcaagctggcactgcccccctacctcaccccagatgcccgggaccttgtcaaaaagtttctgaaacggaatcccagccagcggattgggggtggcccaggggatgctgctgatgtgcagagacatccctttttccggcacatgaattgggacgaccttctggcctggcgtgtggacccccctttcaggccctgtctgcagtcagaggaggacgtgagccagtttgatacccgcttcacacggcagacgccggtggacagtcctgatgacacagccctcagcgagagtgccaaccaggccttcctgggcttcacatacgtggcgccgtctgtcctggacagcatcaaggagggcttctccttccagcccaagctgcgctcacccaggcgcctcaacagtagcccccgggtccccgtcagccccctcaagttctccccttttgaggggtttcggcccagccccagcctgccggagcccacggagctacctctacctccactcctgccaccgccgccgccctcgaccaccgcccctctccccatccgtcccccctcagggaccaagaagtccaagaggggccgtgggcgtccagggcgctaggaagccgggtgggggtgagggtagcccttgagccctgtccctgcggctgtgagagcagcaggaccctgggccagttccagagacctgggggtgtgtctgggggtggggtgtgagtgcgtatgaaagtgtgtgtctgctggggcagctgtgcccctgaatcatgggcacggagggccgcccgccacgccccgcgctcaactgctcccgtggaagattaaagggctgaatcatg

SEQ ID NO: 37496 - DNA, 2023 bp, Homo sapiens
gctagtcgggctgggtgttaatcggccgagtgtcagtcagtgcgcggccaggtacgggccgacgggcccgcggggccggcgccgccatggcggccgtgtttgatttggatttggagacggaggaaggcagcgagggcgagggcgagccagagctcagccccgcggacgcatgtccccttgccgagttgagggcagctggcctagagcctgtgggacactatgaagaggtggagctgactgagaccagcgtgaacgttggcccagagcgcatcgggccccactgctttgagctgctgcgtgtgctgggcaaggggggctatggcaaggtgttccaggtgcgaaaggtgcaaggcaccaacttgggcaaaatatatgccatgaaagtcctaaggaaggccaaaattgtgcgcaatgccaaggacacagcacacacacgggctgagcggaacattctagagtcagtgaagcacccctttattgtggaactggcctatgccttccagactggtggcaaactctacctcatccttgagtgcctcagtgactgagcgtcctgagggcagtggctgggtctcttcatcctgtccccagcttcacccagcacagggccaggcaccgagtaggcgtcggtagatgtttgctgaattgaattgaatccccacggcagctctgtgaggcaggtagggcgggaattatgagcccctctttccccaagaagaaataaagactcagaaagcacaaaggggcttggacccagcacgtggctgctgacgtgtttgtgtggcaggtggcgagctcttcacgcatctggagcgagagggcatcttcctggaagatacggcctgcttctacctggctgagatcacgctggccctgggccatctccactcccagggcatcatctaccgggacctcaagcccgagaacatcatgctcagcagccagggccacatcaaactgaccgactttggactctgcaaggagtctatccatgagggcgccgtcactcacaccttctgcggcaccattgagtacatggcccctgagattctggtgcgcagtggccacaaccgggctgtggactggtggagcctgggggccctgatccgcccttcaccgcagagaaccggaagaaaaccatggataagatcatcaggggcaagctggcactgcccccctacctcaccccagatgcccgggaccttgtcaaaaagagacatccctttttccggcacatgaattgggacgaccttctggcctggcgtgtggacccccctttcaggccctgtctgcagtcagaggaggacgtgagccagtttgatacccgcttcacacggcagacgccggtggacagtcctgatgacacagccctcagcgagagtgccaaccaggccttcctggtgagtgcgggggcctgaggcctgtgggaccagggcacggatcgtgactaaggatggcaggcactgagtgtcgcatggccctgcctccgccccccagggcttcacatacgtggcgccgtctgtcctggacagcatcaaggagggcttctccttccagcccaagctgcgctcacccaggcgcctcaacagtagcccccgggtccccgtcagccccctcaagttctccccttttgaggggtttcggcccagccccagcctgccggagcccacggagctacctctacctccactcctgccaccgccgccgccctcgaccaccgcccctctccccatccgtcccccctcagggaccaagaagtccaagaggggccgtgggcgtccagggcgctaggaagccgggtgggggtgagggtagcccttgagccctgtccctgcggctgtgagagcagcaggaccctgggccagttccagagacctgggggtgtgtctgggggtggggtgtgagtgcgtatgaaagtgtgtgtctgctggggcagctgtgcccctgaatcatgggcacggagggccgcccgccacgccccgcgctcaactgctcccgtggaagattaaagggctgaatcatg

SEQ ID NO: 37497 - DNA, 914 bp, Homo sapiens
gctagtcgggctgggtgttaatcggccgagtgtcagtcagtgcgcggccaggtacgggccgacgggcccgcggggccggcgccgccatggcggccgtgtttgatttggatttggagacggaggaaggcagcgagggcgagggcgagccagagctcagccccgcggacgcatgtccccttgccgagttgagggcagctggcctagagcctgtgggacactatgaagaggtggagctgactgagaccagcgtgaacgttggcccagagcgcatcgggccccactgctttgagctgctgcgtgtgctgggcaaggggggctatggcaaggtgttccaggtgcgaaaggtgcaaggcaccaacttgggcaaaatatatgccatgaaagtcctaaggaaggccaaaattgtgcgcaatgccaaggacacagcacacacacgggctgagcggaacattctagagtcagtgaagcacccctttattgtggaactggcctatgccttccagactggtggcaaactctacctcatccttgagtgcctcagtggtatgagtgcgggcccaggcaggggtgctgggggtcgcgggggggcagcgagccagcaaaggaagctctggggggaagctcttgagagatgagtctgtgggggttggctagggggcccacatctgtcctacccatccatccatccatccgtgcatccgtcccatcattcattcattcagcaaacgtctgtccagcacctactgtgtccctcacgtgtgttgggggtggatgggcatggtgcgaatttggatagaagtccagaggatggttgagtctcttcctactcccctccctgtcttgttcttctctcccgtgtgccctgcatcctgtcaggtccccagcccaactggttcattctctgtagtgtcctc

SEQ ID NO: 37498 - DNA, 367 bp, Homo sapiens
gccttgggtgccttggccacgtctgtcggccagtgttggcttcggttgctgtgtctatcatggggacctcagttcctacaccccttgtggccaggctgcctggatgggagtttgtggagcccgcggcctgtgtgcctgggcaggtgggaaaggctgccttccctgactgagtgctgggagcctctggcagggcctaggaggctcttattctgccttggtttcccctgcagccccctcaagttctccccttttgaggggtttcggcccagccccagcctgccggagcccacggagctacctctacctccactcctgccaccgccgccgccctcgaccaccgcccctctccccatccgtcccccctcag

SEQ ID NO: 37499 - DNA, 247 bp, Homo sapiens
tgacttaaggtagtagaatcaggacattttagataaatcttaaagtaggtagtactccacctgagagaagaagggcttgtaaaccttgttgaaagggagagaagaaaaacaatatgagcaagtggggataatatggaatactttcgcaggaaaaatgaattgttccatttgattgatttatagggtgcatatatacaaagtaaacaggaaaagtagagctatattgcaggatgtcttcaactgtagg

SEQ ID NO: 37500 - DNA, 375 bp, Homo sapiens
gtcagatgaaagacagtcaacgagtatgtgctcaaaaataacacagggcaagtgagtttcctagtggaggtgtccgtttattaatcaaaatattgtgattttatttctgcattttgtggtatttgtcagctttttaaaagtgtgtgaggtgctcgcttcggcagcacatgtactaaaattagaacgatacagagaagattagcatggcccctgcgcaaggatgacacgcaaattcgtgaagcattccatattttttttggctgggcgcggtggctcacacctgtaatcccagcactttgggaggcccaggcgggcggatcacaaggttaggagatcgagaccgtcctggctaacacggtgaaatcctgtctctac

SEQ ID NO: 37501 - DNA, 590 bp, Homo sapiens
cacagagagcccagaaatgagccatgtgcccattgccggggaagagaaggtaggctgaggaggtggcctttcctaacacaaaaattaactaagtggggaaaaccagagaactaggtgttggcatcccaggaaaaaaataaagtctccacattttggcctatagggatcctgccccataatggctggttacctcctgcctcaagctgcagggaagccagggggtggcatggccatggcttctccctcagagaggcctctgtgcacgacttcagtcacccaacactgacagaacttggaacccaaaagcccatttctctccttccgtccagaccctgtctgctgttatctgtaggaagaccacagccaactgctatcatgaccaaagctaaaatccaatgaggcagagaacaatagttgtacccatctcctccttagtctccaaggccagcggtgcatgcatttgtgcattcaacaacatttgccaagcacttactgtatatcaagcacagcagtgggtgctgaggacggatgggtagaaaaaacagtcctggcccaggtggagtgacaggtaagaaacaagtaagtagcta

SEQ ID NO: 37502 - DNA, 467 bp, Homo sapiens
acaagcctgtaggtgcttatctgagttacactgtgtataaactgatgaatgacctacagggacaggaaacagaatgtggcagatactataatttgtctgctcaagggccattttcttctctttttatggtggcaagacttcagtggtagtcccattctcattaacagatggagttagttagaagaggacacataatttgactctggccagagtcacaagagacattttccaatctgctttggcaatgtttttatttatgttcataaaaagaatttcaaatgttctttatttctgttgtacattttctgctgcacatttgattatttgagatatgtcattcattttctggctagaaggcagctagtctgagtttaacatactaaggacaacacaggaaaatgatcaaagaggctggatgcggtggctcatgcctcttatcccagcactttgggaggctaaggcgggtg

SEQ ID NO: 37503 - DNA, 442 bp, Homo sapiens
ctgcactccagcctgggcaacagagtaagactctgtctcaaaaaaaaaaaaatgaaatgaaatgaaaaatgttatttatccactgtcacagtcattccatttgtcttccctatcccatgttttgcctcagctgactttaccaaaaattccctttcccttccctgctttaagtcatttcatgtaggttagtcttcatttattcttttgcctctctacagtagttattgctttgtgctgtacatttgggttaaaggagttgtatatgtgtatggtgacagcataatgcctctgaagcccaggacctagctacttcttagctcctaacgtaatttcatccatgtaactcacagaaatagaatctgaagattgaggaatagatgattctgttattccaaattatttcaatttattccacttaaacttgccattaactatcaaaatg

SEQ ID NO: 37504 - DNA, 334 bp, Homo sapiens
  misc_feature (237)..(237): n is a, c, g, or t
  misc_feature (297)..(297): n is a, c, g, or t
gctggtctcgaactcccaacctcaggtgatccacctgctgcggcctcccaaagtgttgggattacaggcatgagccaccgtgcccagcaggctcattttttaactttgcaatattttaacttgacagaccatcgtttgatgtccattttaccaccgtctacattagttgaggtcctcaatatatcttctttatgaacctaagtctctttgatgtcaaagtattaaatatcattggtnatgcctgccagctacttggaaggctgaggtgggaggatcacttgagcccaggatttgaangccagactgggcaatgtagcaagtccccatgtcttaa

SEQ ID NO: 37505 - DNA, 479 bp, Homo sapiens
gaattcagcaagagatgagaagtgtcttcaagttctctcattagaaaccctaaaccgtctcttccagcaataataaacttgatgacaacaagcctcaggaaggccgggagggaagggcttcgagccagcagcagcaatgaaccttaggtactcataatctgatctgcaacaatctctgccagctacaaagttacattctttctttcttcttagagtagtaatgatgacgacaataacacaacaaagcaaataatgtttattgctgcttacttcaagccaggtacagtttaccaaagcagaactgtgaatgagaggtgagaaacgcttatccttttaagaaatctgtagagtcagaagtttcagtcctcgccctgagctgtccttctcactcaagggatttaaatgcctagatgaccagcgctcagtgtcctggacttaccgaaccacgggaaaactccaattcccatcccacagaataa

SEQ ID NO: 37506 - DNA, 202 bp, Homo sapiens
aaggagaagctggaagaggcaaggaacagattctcccagagggcacgcagccctgctgaccccttgattttggcccaataataccgatttcattcttctgacctctcaagctgtgtgaaaacaactttctgttgtttgaagccaccaattttgtgacaatttattacacactagccccaggtgccaccaataaaaatcctac

SEQ ID NO: 37507 - DNA, 470 bp, Homo sapiens
gccaagtgtggacatgaataatgctagaaaagtttgcagaggccaagccatggaggatcttacatgaagagcaattgaacaccacagaaggtttcaaacttgttatggggttcagaaagatggtgaaataatctcaattatgatgtgaaaatgtcaacataagtcagctgtgtcaatccttggctcagaactctacaaagtctccttgtcccaaacaaagtaaaagctaaagtacttctagttccctacaaaacattctatgatctaggcccccatttatcagattttaattcccactaatcttttttacacaacaaacatttcatggtatcacaagagaaaaatattttaagagcaaacaacaatcatttggccaccaagatagtttgcttgaagcaattacactcatactgctctcaggcagcaagtactaaagcagtcccatatcatccctttttgagaagacaact

SEQ ID NO: 37508 - DNA, 256 bp, Homo sapiens
tcagctttcaataaaagcatatgtgtcatctcatagaatacttaatatgtcaaacccaggaaaatcagtaactaagtaacaaaaggaacacttattaagaaaatttgatgataaaaatgttaggctaaaatattaagaactttagcaactggactgaggaaccagaaagtatatgcacactgggaattttaagaaaagatccccatattctcctgcacaatgaggaccacattccaaaaacataattctgggttgt

SEQ ID NO: 37509 - DNA, 456 bp, Homo sapiens
ctcccaaaatgctgggattacaggcatgaggcaccgcatcaggccactgctaggctctttctatttggtgattaatgaaacagatcccctgccatcttagcataaagtctgatgtgttttgatgtgtgcatgcaaacagttccagaagacaactgactgaagactttataaaggatggcaggtgactatacttcacgccaaacaaaccaaagggaacttcctaagtttaatgagactatcactttctgaacttttggtactagatgactcttcagagacctggattttcagcttttaaaatctaaacaggctctgtgggatatttattaattaaatattcattttataatcaaatgtgttctgactttgccatatataagcctccatggacattgatcaagaagatatggagtgagcagagtgataaaactaagattcctggttatataaaaattt

SEQ ID NO: 37510 - DNA, 673 bp, Homo sapiens
tataagaaaaaaagtggagcctataagggaaataattattcttgctgacttgattcaaattctctggctaagtataataagactaaaacttattttacaagtgagttcgtcctatgatttgtctttagtgaaaatgggactaaagagagaaaaattctgtgtcagaataaactctagtacacctgtagttagtttctggtcttaactgattttttttgcaatttttattactttttacagtttggactaaattctacaatgtccctggctacaagtctcaaacatttttttcctttttttatttcttttttcattttttttttctgatttcaaataactaaaacctaagttgtgctttcttaaagccctgcaaactgaagccagacaaacttaaacttcgaaaaaaagaaaacaacttatttaaatacataaactacctttatacctgcctattgatgtaaagacttcagagtaatatgacctatattgattttccaaaattattcttgctttttttgtttttattgtttttctttcttcctttccctgcttctctttgaaggatgtgagacttcacaacctgctaaaaatgatctttcctaataatgtgggacctacccttctcggaataaactgttctagccgtaagagatcaggcaaaatctgaaaccaa

SEQ ID NO: 37511 - DNA, 172 bp, Homo sapiens
gtatagatcaacagatcaatgcaacagaaagaaaatccatacattaatattcaattgattttttgcaaagttaccaagaaaattcattgagaaatgtcaagtcttttggtgctgcaacaactggataaatttatggttaaaaatgaaccttgatccatactgcataccacac

SEQ ID NO: 37512 - DNA, 485 bp, Homo sapiens
ataaaaggccttgagatggaatgtagtgcccccttgccctcttgcgttctcccatgtgaggacacagcaacaaggcaccatcttggaaggagagagaagccctcaccagacaacagtgcacatgccttgatcttagacttcccagcctccagagctataataaatacatttctgttctttataaattacttggtctctggtattttgttacagaagcactaatggactaagacaaaaagattccattatgaaagtgaaaaggcaaccgcagagtggcagaagcttttggagatgatgaatatgtttacttcctggattgcggtgatgataccatgagtgtatacatatgtgtgtatacataatgtatacaaattgtgttcattgattatgtacagtttctttgtataccaattataccttaataaagctaaggaaaaaaaaaagaaaatccagaataaatatgcatggtatgacccatttattta

SEQ ID NO: 37513 - DNA, 503 bp, Homo sapiens
ataaaaggccttgagatggaatgtagtgcccccttgccctcttgcgttctcccatgtgaggacacagcaacaaggcaccatcttggaaggagagagaagccctcaccagacaacagtgcacatgccttgatcttagacttcccagcctccagagctataataaatacatttctgttctttataaattacttggtctctggtattttgttacagaagcactaatggactaagacaaaaagattccattatgaaagtgaaaaggcaaccgcagagtggcagaagcttttggagatgatgaatatgtttacttcctggattgcggtgatgataccatgagtgtatacatatgtgtgtatacataatgtatacaaattgtgttcattgattatgtacagtttctttgtataccaattataccttaataaagctaaggaaaaaaaaaaagtcgacgcggtcgcgaatttaatagtagtagtccaccccggaaattccggaccggtacc

SEQ ID NO: 37514 - DNA, 421 bp, Homo sapiens
atttctaagaaaccctggaacttggacaaagccaaggtaaaagatgacaacaccaatccttgcaaatcagacagcaaaattaacccgaattgaatacactgaggaaggccctgctatgaaggctctaagccctttaggccaatggacattcaattgcacttgttttaaggatacacagagtgtatctgtccctgcggatacccacggcctgcgaggtacgttcatccctcagtaaacagattttaaatataaacatggaagccagttagcatggtcttggccctgcataaggctagatgctccggttcccatctccaggaaaaggcctggctctgggatcacggaagccacgtcctctcggcgtcaaaggcccacccgccggctccagggccagttaccaggacaggaaaagagggtcctg

SEQ ID NO: 37515 - DNA, 666 bp, Homo sapiens
  misc_feature (2)..(2): n is a, c, g, or t
  misc_feature (25)..(26): n is a, c, g, or t
tncggcacagataaagatctttttnnttctttggagacagagtctcactttgtcgcccaggctggagtgcaatgatgcaatctccactcactgcaacctctgtctcccaggctcaagcaattatcgtggttcagcctctcgagtagctgggattacaggcctgaaccaccacacccagccactatgaacattctttactaataaataaacactatcttgcattacagctacaaaaattattttttgttcttgtttttgagacggggtctccagccactccaggctggagtgcagtggcaaaatcatggatcactgcagctttgaactcctgggggtcagcttcctgagtagctggggaccacccaaacccagcttaatttttttattatttttttttttggagagacggggttctcactttgttgccccaggcaggtcttgaactccctgggctcaagcaatacacctgcctcggcctttccaaagtgctggtattgtaggcatgagccactgttcctggccttacaaaaattattttgtaggttgtattttagctagcctatcacaattcttccaagtttttaaatggtttctgttgcttataaaatattatttattgatagccaacaaattctaatttgggtattgctaggctatcagtgcaaa

SEQ ID NO: 37516 - DNA, 358 bp, Homo sapiens
aacactgcagctttgtcctcttttaaatgatctacccgtgcttttaaactgcaaatgtctacttctgcaaaaggctttggctggttatttcaagtctgatttcttttgatccgaacattttcaagctcaaacaatagagtatgtttctacccagatactgaaaacagttatcaggtaggcaattctgtctcagcagattcagctctttattaatctgttagcctgtcaggattacttttttcatgtctgatgtccttggaaaaactcattagatcccttagtactttcttaaattacagggatgggtgtagctgtactaatctgaacttctggatgtatgaaacattgcaactgtata

SEQ ID NO: 37517 - DNA, 1621 bp, Homo sapiens
ggaggggtctgtgcacacagcatcgagggcggagagctcttcgagaggattgtggatgaggactaccatctgaccgaggtggacaccatggtgtttgtcaggcagatctgtgacgggatcctcttcatgcacaagatgagggttttgcacctggacctcaagccagagaacatcctgtgtgtcaacaccaccgggcatttggtgaagatcattgactttggcctggcacggaggtataaccccaacgagaagctgaaggtgaactttgggaccccagagttcctgtcacctgaggtggtgaattatgaccaaatctccgataagacagacatgtggagtatgggggtgatcacctacatgctgctgagcggcctctcccccttcctgggagatgatgacacagagaccctaaacaacgttctatctggcaactggtactttgatgaagagacctttgaggccgtatcagacgaggccaaagactttgtctccaacctcatcgtcaaggaccagagggcccggatgaacgctgcccagtgtctcgcccatccctggctcaacaacctggcggagaaagccaaacgctgtaaccgacgccttaagtcccagatcttgcttaagaaatacctcatgaagaggcgctggaagaaaaacttcattgctgtcagcgctgccaaccgcttcaagaagatcagcagctcgggggcactgatggctctgggggtctgagccctgggcgcagctgaagcctggacgcagccacacagtggccggggctgaagccacacagcccagaaggccagaaaaggcagccagatccccagggcagcctcgttaggacaaggctgtgccaggctgggaggctcggggctccccacgcccccatgcagtgaccgcttccccgatgtgagccgcctcggagtgtggcctggatccatcctgctagcacctccccagacagggctccagcctgtcggccacaccccagactccaggcccccgttgaagccgctcccggttccctccccagctcctcgtctttgaactgccgccgccgtggtgacccctgctttgccccactgggagagtccttagcctgggcctcctcctagctggagtgccatggctggggggtctcagcatgtagggcttctgtggttgtggatgggaggctcctggtggggcagaaaggctgcaacgctgattcctaaggcccagctgccagggaagacagagcaggctttgtgagagaggacctccatgcccccgccacctccccactccagcagataaggccgagcccacaccatctggcccaggctggcccccacccaccttccttgcgaccaccaacacacaggaactctgtgtgagagagagggcgcccagcccaggcctggtggagggggaggggagaagccaagggacacaggagaccacccccgagcttgcctcagggccaagccggcccaacccaaccactcggggcccccatcttgggggtcacccatggcctcagatgatggggtcagcaggcccaggagaattaggaaggccatggggcagcctccagtctgctctcagcttgtgccttgtaaataaatgtacaggttggatgtgg

SEQ ID NO: 37518 - DNA, 2747 bp, Homo sapiens
atggcgacagaaaatggagcagttgagctgggaattcagaacccatcaacagacaaggcacctaaaggtcccacaggtgaaagacccctggctgcagggaaagaccctggccccccagacccaaagaaagctccggatccacccaccctgaagaaagatgccaaagcccctgcctcagagaaaggggatggtaccctggcccaaccctcaactagcagccaaggccccaaaggagagggtgacaggggcggggggcccgcggagggcagtgctgggcccccggcagccctgccccagcagactgcgacacctgagaccagcgtcaagaagcccaaggctgagcagggagcctcaggcagccaggatcctggaaagcccagggtgggcaagaaggcagcagagggccaagcagcagccaggaggggctcacctgcctttctgcatagccccagctgtcctgccatcatctccagttctgagaagctgctggccaagaagcccccaagcgaggcatcagagctcacctttgaaggggtgcccatgacccacagccccacggatcccaggccagccaaggcagaagaaggaaagaacatcctggcagagagccagaaggaagtgggagagaaaaccccaggccaggctggccaggctaagatgcaaggggacacctcgagggggattgagttccaggctgttccctcagagaaatccgaggtggggcaggccctctgtctcacagccagggaggaggactgcttccagattttggatgattgcccgccacctccggcccccttccctcaccgcatggtggagctgaggaccgggaatgtcagcagtgaattcagtatgaactccaaggaggcgctcggaggtggcaagtttggggcagtctgtacctgcatggagaaagccacaggcctcaagctggcagccaaggtcatcaagaaacagactcccaaagacaaggaaatggtgttgctggagattgaggtcatgaaccagctgaaccaccgcaatctgatccagctgtatgcagccatcgagactccgcatgagatcgtcctgttcatggagtacatcgagggcggagagctcttcgagaggattgtggatgaggactaccatctgaccgaggtggacaccatggtgtttgtcaggcagatctgtgacgggatcctcttcatgcacaagatgagggttttgcacctggacctcaagccagagaacatcctgtgtgtcaacaccaccgggcatttggtgaagatcattgactttggcctggcacggaggtataaccccaacgagaagctgaaggtgaactttgggaccccagagttcctgtcacctgaggtggtgaattatgaccaaatctccgataagacagacatgtggagtatgggggtgatcacctacatgctgctgagcggcctctcccccttcctgggagatgatgacacagagaccctaaacaacgttctatctggcaactggtactttgatgaagagacctttgaggccgtatcagacgaggccaaagactttgtctccaacctcatcgtcaaggaccagagggcccggatgaacgctgcccagtgtctcgcccatccctggctcaacaacctggcggagaaagccaaacgctgtaaccgacgccttaagtcccagatcttgcttaagaaatacctcatgaagaggcgctggaagaaaaacttcattgctgtcagcgctgccaaccgcttcaagaagatcagcagctcgggggcactgatggctctgggggtctgagccctgggcgcagctgaagcctggacgcagccacacagtggccggggctgaagccacacagcccagaaggccagaaaaggcagccagatccccagggcagcctcgttaggacaaggctgtgccaggctgggaggctcggggctccccacgcccccatgcagtgaccgcttccccgatgtgagccgcctcggagtgtggcctggatccatcctgctagcacctccccagacagggctccagcctgtcggccacaccccagactccaggcccccgttgaagccgctcccggttccctccccagctcctcgtctttgaactgccgccgccgtggtgacccctgctttgccccactgggagagtccttagcctgggcctcctcctagctggagtgccatggctggggggtctcagcatgtagggcttctgtggttgtggatgggaggctcctggtggggcagaaaggctgcaacgctgattcctaaggcccagctgccagggaagacagagcaggctttgtgagagaggacctccatgcccccgccacctccccactccagcagataaggccgagcccacaccatctggcccaggctggcccccacccaccttccttgcgaccaccaacacacaggaactctgtgtgagagagagggcgcccagcccaggcctggtggagggggaggggagaagccaagggacacaggagaccacccccgagcttgcctcagggccaagccggcccaacccaaccactcggggcccccatcttgggggtcacccatggcctcagatgatggggtcagcaggcccaggagaattaggaaggccatggggcagcctccagtctgctctcagcttgtgccttgtaaataaatgtacaggttggatgtggcctccttccctctgtgtgtgcctgcactggtgtgaggtcgctgatgaccacagttcactgagca

SEQ ID NO: 37519 - DNA, 2683 bp, Homo sapiens
atggcgacagaaaatggagcagttgagctgggaattcagaacccatcaacagacaaggcacctaaaggtcccacaggtgaaagacccctggctgcagggaaagaccctggccccccagacccaaagaaagctccggatccacccaccctgaagaaagatgccaaagcccctgcctcagagaaaggggatggtaccctggcccaaccctcaactagcagccaaggccccaaaggagagggtgacaggggcggggggcccgcggagggcagtgctgggcccccggcagccctgccccagcagactgcgacacctgagaccagcgtcaagaagcccaaggctgagcagggagcctcaggcagccaggatcctggaaagcccagggtgggcaagaaggcagcagagggccaagcagcagccaggaggggctcacctgcctttctgcatagccccagctgtcctgccatcatctccagttctgagaagctgctggccaagaagcccccaagcgaggcatcagagctcacctttgaaggggtgcccatgacccacagccccacggatcccaggccagccaaggcagaagaaggaaagaacatcctggcagagagccagaaggaagtgggagagaaaaccccaggccaggctggccaggctaagatgcaaggggacacctcgagggggattgagttccaggctgttccctcagagaaatccgaggtggggcaggccctctgtctcacagccagggaggaggactgcttccagattttggatgattgcccgccacctccggcccccttccctcaccgcatggtggagctgaggaccgggaatgtcagcagtgaattcagtatgaactccaaggaggcgctcggaggtggcaagtttggggcagtctgtacctgcatggagaaagccacaggcctcaagctggcagccaaggtcatcaagaaacagactcccaaagacaaggaaatggtgttgctggagattgaggtcatgaaccagctgaaccaccgcaatctgatccagctgtatgcagccatcgagactccgcatgagatcgtcctgttcatggagtacatcgagggcggagagctcttcgagaggattgtggatgaggactaccatctgaccgaggtggacaccatggtgtttgtcaggcagatctgtgacgggatcctcttcatgcacaagatgagggttttgcacctggacctcaagccagagaacatcctgtgtgtcaacaccaccgggcatttggtgaagatcattgactttggcctggcacggaggtataaccccaacgagaagctgaaggtgaactttgggaccccagagttcctgtcacctgaggtggtgaattatgaccaaatctccgataagacagacatgtggagtatgggggtgatcacctacatgctgctgagcggcctctcccccttcctgggagatgatgacacagagaccctaaacaacgttctatctggcaactggtactttgatgaagagacctttgaggccgtatcagacgaggccaaagactttgtctccaacctcatcgtcaaggaccagagggcccggatgaacgctgcccagtgtctcgcccatccctggctcaacaacctggcggagaaagccaaacgctgtaaccgacgccttaagtcccagatcttgcttaagaaatacctcatgaagaggcgctggaagaaaaacttcattgctgtcagcgctgccaaccgcttcaagaagatcagcagctcgggggcactgatggctctgggggtctgagccctgggcgcagctgaagcctggacgcagccacacagtggccggggctgaagccacacagcccagaaggccagaaaaggcagccagatccccagggcagcctcgttaggacaaggctgtgccaggctgggaggctcggggctccccacgcccccatgcagtgaccgcttccccgatgtgagccgcctcggagtgtggcctggatccatcctgctagcacctccccagacagggctccagcctgtcggccacaccccagactccaggcccccgttgaagccgctcccggttccctccccagctcctcgtctttgaactgccgccgccgtggtgacccctgctttgccccactgggagagtccttagcctgggcctcctcctagctggagtgccatggctggggggtctcagcatgtagggcttctgtggttgtggatgggaggctcctggtggggcagaaaggctgcaacgctgattcctaaggcccagctgccagggaagacagagcaggctttgtgagagaggacctccatgcccccgccacctccccactccagcagataaggccgagcccacaccatctggcccaggctggcccccacccaccttccttgcgaccaccaacacacaggaactctgtgtgagagagagggcgcccagcccaggcctggtggagggggaggggagaagccaagggacacaggagaccacccccgagcttgcctcagggccaagccggcccaacccaaccactcggggcccccatcttgggggtcacccatggcctcagatgatggggtcagcaggcccaggagaattaggaaggccatggggcagcctccagtctgctctcagcttgtgccttgtaaataaatgtacaggttggatgtgg

SEQ ID NO: 37520 - DNA, 326 bp, Homo sapiens
tgccattggtgtggaatcaattgaagattaacgtttgaggcctgaaccctcagtttctcttcagatctgtactttggtacagtattactcaggggtttgaaatgatagaatgtagacgatatttgtatttaaaaaaagaagtagctttgtctttctctgtgcagtgttagtttaagatttataatcttctatgtattgaaacttttggcaaaatttccacaggagttagaagtttactatttaaactgaacaaacaaatcagtaaatgcagagcaggcattgtgtgcatttatgcatcttctcctagcctaattcctttgctttac

SEQ ID NO: 37521 - DNA, 476 bp, Homo sapiens
agtatcttgtgacccagccacattacatgagtcagtagaatgtgctaagtttttgctttctctgcttgctgggctaatgctctagcagctacccttccatactgtcccttgatagacagtcatcctctcttctgcagattcccatgatttgtatcttttttatagtatttatgtcttttaaaaaaaaaatttctagcttaaatgtctgtccacctgtctggactgtgaactactccaaggtgtaagattttgttttattcatctttggtctagaacttggtagacgaaggtagtcaataaaactttgttgaccaaatgaagtaagaagtgatttttaaaaaatgtctaaaacaagctctctgccctgaaggagtatacagtttgatatgttatatgtccagtgtaacacaaagtagaatgacatagaggtataggcaaaattccaattggatcgacaaaagcttcttagcttaaaa

SEQ ID NO: 37522 - DNA, 1812 bp, Homo sapiens
ggcggcgcgcggaggggcgggccctggccgggtggtcccgggcggatcccgggaaggcggaaggcttcggcagagctgcgccgccgaggctgagcggtcccttctcgctgcggccgcccaggtgcccgcgcccgtggcgctatggaggcggcgctgctggggctgtgtaactggagcacgctgggcgtgtgcgccgcgctgaagctgccgcagatctccgctgtgctagcggcgcgcagcgcgcggggcctcagccttccgagtttacttctggagctggcaggattcctggtgtttctgcggtaccagtgttactatgggtatccgccgctgacctacctggagtaccccatcctcatcgcgcaagatgtcatcctcctgctctgtatctttcattttaacgggaacgtgaagcaggccactccttacatcgctgtattggtgtcttcttggttcatccttgccctgcagaagtggatcatagacctggccatgaatctatgtactttcatcagcgcggccagtaagtttgcacagctccagtgtctgtggaagacgagagactcaggaactgtgagtgcgctgacttggagcctctcttcctatacctgtgcaacaagaataatcacaaccttaatgaccaccaatgattttacaattcttctacgttttgtgatcatgctggctttaaatatatgggtaacagtgacagtacttcgctaccggaagaccgctataaaggctgaatgatggatacattattccttcacacagtggattttgagtaactgaaccaaaggaaaaagaagctctttgctaaattaaggtcttttataaatttagtaaatcagtttataatctttaaagccaaaggtttttttagacttgaaagaaagagccacttaaattcttgtttaaaaataccaatttgcctcctccttcctcacttcgttaggttatggtagtgctcagacatctgcagtgttggaggccagtcactgttggaagtcatccaagaagcccattttgaggccattttgagccttactcttaagttctctatgaagaactacattgatttgttggctttcagaatcttttaggaaataaatcctctccaggacaaaaatgaacatgaatggagtggcattttgttccaagtcagaggtgggcacctataataaatgactagggttcactttctgggactgatgtttaattgtaacacagatacaacagggtggccttgttgtgtataatacggtattatacctgcatgtgctctagcaaggataccaaggcaagcatacatgtagctggcttgagtttgtaccaaaacagtccttcaactttgcactgtgccttaagtaattactaacaaaaggtactaggattagctgcaatctctactttcgatgaggaaatcccagtaagctttctgattcaagtacaatgctgccattttttaaagggccacaactatagaattaccactgttggaatttggtacaaaatatgttttgtctattgaaaacatacacggtaaatggtgttgttaggtaggttctgtccagttcttagggacttttttcacattatagcatttttaccctaaacatgatgttgagattattatatactgtattttcttctaaattaaccctaatgtttaaaaactcactttccccctttaattgaaggcattgttttgttagatgcagtaatgatgtttaccagagattattgtttcctatgcaaaataaattttcatattttgaattctgctgagtcttaaaactgtcaatcattaat

SEQ ID NO: 37523 - DNA, 4646 bp, Homo sapiens
  misc_feature (686)..(686): n is a, c, g, or t
  misc_feature (1311)..(1312): n is a, c, g, or t
  misc_feature (1364)..(1364): n is a, c, g, or t
  misc_feature (1676)..(1676): n is a, c, g, or t
  misc_feature (1981)..(1981): n is a, c, g, or t
  misc_feature (2003)..(2003): n is a, c, g, or t
  misc_feature (2420)..(2420): n is a, c, g, or t
  misc_feature (2657)..(2657): n is a, c, g, or t
  misc_feature (2789)..(2789): n is a, c, g, or t
  misc_feature (3571)..(3571): n is a, c, g, or t
  misc_feature (3835)..(3835): n is a, c, g, or t
  misc_feature (4447)..(4447): n is a, c, g, or t
  misc_feature (4646)..(4646): n is a, c, g, or t
ggggaatctttcctggttatttaatgagattccttgggagagggtcttaagacaattgcatttcttgtagaaagaagtttccttagtcatctgtaaggaagttggagagtctctgcagttgggaaggggtgacggaaaggtcgttaaatccttgattctgaggcagcttctaaggctttcctattcaaagtattcatcatgccagagcgccaaacttttggggtatcatttttgagccccaacaataggaaaacacatacctcaacctagtggtctcgccccttccccctggccaggccaggccttcccctttgccccccgccatcacccagtggggtctgaagcctggtcctccacacaagccttcctggtgggcggggtggggggtgcggcatacaggatgggaagaagccaaggggtgcgggggagaaagaggagacctcaggtgtgggagggtgaggggtcccactcaggctttggaccccgcgccggccctatggagcccggccctgggcacagtcatccaatagggggctttgaggggaaatttttgggaaaggcttgcagtgggagggactgtgacctcttccaggcttgtgagtgactctaccctgcggggtggggaggggggggtcccaggctggatggcagggttgagaggcacccaggggaggtgggcagcatgngtttcaggttggtgccaccaccaggctgggagcagagaggctggagcgatgaggttgtggcaaaggacacaggctggaagtggctgtggtgactgttcaggtgggagaggggacaagggcatgaaagccaggagtgggatttggcctcggccccttgctaggtccctgagctggggaagctgaagctggacccatgaaggaaaagaagccaggctgtctgtagagtctatagattccctcctgccgccagcccctaggcctgcatttccaccacttttgcagcattgcttgaaaaatgcaaaccctcagagatacgcaggtgagggctcctattagatctgccagctgtcacctctcccagctcaccttagtgaaagctagacctctggcagtggaaggatcttcctgggcatgggagctcaagggttgggtggggcagcagcttgctgccatccctgctggcctgtctaagggtcttgcagttgatcacgtgcaggtaaagggggctctgtcggggctggtgcaccagctctgcagcctccaagccagggccagggccaggcacacagacttctgtaaaatgggcttggctgtgtcaggacccatcctcctggccctcctgtcnncctgcctgcctccctcatgcccttcccagccttgcctgggaggcccacctgnggctggccatgcttgccagctgggccccgggcccctgaccagatcaggcagcagccggagttagagcagaaggaaccccagggctgtcgcagtcagccacctggagggcacgggccctctttgggtctccatttgagcaaactaagagcctggttttgagagcactgagtcaattggagcatgaagtgtgtcttaataatgccagaaaagcctttttagtgtggcttggtgtgaagggcaggagcctctgcccagggacctgcctctgccacccaggggcattccttgtagctggagccttccccctcgcangttcccaaccttgctgcttctcctgcctccagggctctgctgggctctgcctccctgctctctgcagccaggagcctcctggagcacaagattcatccaacctgccctgcctgcagccttccatggactgcggccctcccacggtggacccttaggctgtagagccttggcctctgggtaggatgcctttggagcccaccccttgctccaggtcacttgtcccccagcctgggtgggggtacgttttgtttaaccctctagtaggtgttgagggagaaaactccaatggctgcatggagcagatnggaatggaaacaaatggggctntgtcagatgcccggctggcatgattttattatgataagcactatagcgattacttattaaaagaaactttaaagggacaggcatggtggctcatgcctgtaatcccagccctttgggaggccgaggcgggcagataacctgaggtcaggagttcaagaccagccttgccaacatggtgaaaccccatctctactaaaaacacaaaaattaaccagtgtaggctgggtgcagtggctcacacctgtaatcccagcactttgggaggcccaggccggcggatcacgaggtcaggagatcaagaccatcctggctaacacggtgaaaccctgtctctactaaagatacaaaaaattagctgggcgtggtggctggcgcctgtagtcccagctacttgggagtctgaggcaggagaatggngtgaacccgggaggcggagcttgcagtgagccgagatcgtgccactgcactccagcctgggtgacagagcaagactccgcctcaaaaaaaagaaattagccaggtgtagtggcacacatgtagtctcagctactcgggaggctgagcaggagaaccgctggaacccgggaggtggaggttgcagtgactgagatcgcgccactgcactccagcctgggcgacagagcaagactccanctcaaaaaaaagaaacattaaaaactaaaggaaagacactgtccccaccccacctccccaggctgcagggatggggggagtttgaatcccagggaaagcagggagtagacggcaaaacctgcaggggcagcnacggctgcatccagatcagcctcgggaaatccaggctcttcatcttgtatgttcttggtgtctatgggcctccatttccccaagtggtctgtaagttgtggaggccagcatggatgacccctgaaggtgagaacgggctctgacatccccaggttctcaggcctggcctgtggactgtggctgcgtcccaggggtcagcacacacttacttcgatggtgaagacccccatagcttttgttcttcagcactcagtggctggctgtggccccacagaggggctggggtgcagcctccccctctgccagcccccctgggctcaatctcccaggggaacagagggggctgctcaggaggctggcaggaggagagtccctgcggcagggcagggcagaggcaccgcttgtccctgaagctgggaggtggctcagctgcacagcacccggagggcctgcaggcagctgggggtggggaccctgctgggcacggtgggggcccgcactcggggaccaggcctgtgggaggccctcgtgctcagggcaacactgtgacctcctctgactccgcccccagctaagttgtgcactgtcagaaacaggccagggaggcacagcctgtttgtgaatcggacttttccaggattccttcccagcttaggagattggagaccctggggggcccctcctgtgtgttgaagtcccatggttccggctcccctttcttcctgacctgagtggtctgaacacacaggtgagagggagggagccaaaaagctgggtgatgngacaaacaggtagccccaggagaccacagggattccggtcctgaagggagatggctgggtgtgagggggaggcaggaagctctgccttttcttctgagaatgtgggaccctgtggccttcgcagcatcctcacagccggagtcttcttagcgaaattgagggtggttcttcacgctttcccccactgccctctcaaccgggcagctcttctggaaggcaactggaccatccaggtgctgttctaactctaaaaacacggccacngacccccgcatccagggatggttgcggctcctcggatccttgcgcctctgcagcttctcagagtggagggcagatgtgtgcagcagctgaggggcagctgccggggtcagtgggagcccaacatggcaggcaggccagaagcgtgggcccagaaggcccagtctcatattcttgctcagggatttgccttctgtaaaaatcctttgtaagcgaccatctcaaggcactctatagagatcgtgggtattgcactgtggcccggtgcccagtaagttctggatgctccaaaaattgtacagatgattcaactgaattccatctattttgttctaaaccttcctctttgacactggcgtgtccacacccccactgcaaggattcggcaaactgacctcagtgttctggtgcctgccaggccccgacagctgcgttttggggcagccgtgtggacatgtgcccttctctctccagattcctggtgtttctgcggtaccagtgttactatgggtatccgccgctgacctacctggagtaccccatcctcatcgcgcaaggtaacagccccttccctgtccagcggactgccacgggtctccccttcccccctcactnggagcctctctctttcagatgtcatcctcctgctctgtatctttcattttaacgggaacgtgaagcaggccactccttacatcgctgtgtatcctttctgaatctgagccagaagtgggaacggggatgttatttgcgaatggtatgcattgtgaagcaggctcctttaccagatgtgtattttttggttaaactaaan

SEQ ID NO: 37524 - DNA, 827 bp, Homo sapiens
ggcggcgcgcggaggggcgggccctggccgggtggtcccgggcggatcccgggaaggcggaaggcttcggcagagctgcgccgccgaggctgagcggtcccttctcgctgcggccgcccaggtgcccgcgcccgtggcgctatggaggcggcgctgctggggctgtgtaactggagcacgctgggcgtgtgcgccgcgctgaagctgccgcagatctccgctgtgctagcggcgcgcagcgcgcggggcctcagccttccgagtttacttctggagctggcaggattcctggtgtttctgcggtaccagtgttactatgggtatccgccgctgacctacctggagtaccccatcctcatcgcgcaagatgtcatcctcctgctctgtatctttcattttaacgggaacgtgaagcaggccactccttacatcgctgtattggtgtcttcttggttcatccttgccctgcagaagtggatcatagacctggccatgaatctatgtactttcatcagcgcggccagtaagtttgcacagctccagtgtctgtggaagacgagagactcaggaactgtgagtgcgctgacttggagcctctcttcctatacctgtgcaagtaagaaccggactcacatggtggggaggcctttggtagcaccaagtgtctacgtagtagggtgttaagttggtgttgaagtaacatggtccctggcgctttactactttacaaatggctactcagctagaacctcctaagtgtatccatgtttacaaagatgatttaatgcaaactgctctccattttctgtaaaatccaagttgccaag

SEQ ID NO: 37525 - DNA, 548 bp, Homo sapiens
  misc_feature (548)..(548): n is a, c, g, or t
ggcggcgcgcggaggggcgggccctggccgggtggtcccgggcggatcccgggaaggcggaaggcttcggcagagctgcgccgccgaggctgagcggtcccttctcgctgcggccgcccaggtgcccgcgcccgtggcgctatggaggcggcgctgctggggctgtgtaactggagcacgctgggcgtgtgcgccgcgctgaagctgccgcagatctccgctgtgctagcggcgcgcagcgcgcggggcctcagccttccgagtttacttctggagctggcaggattcctggtgtttctgcggtaccagtgttactatgggtatccgccgctgacctacctggagtaccccatcctcatcgcgcaagatgtcatcctcctgctctgtatctttcattttaacgggaacgtgaagcaggccactccttacatcgctgtgtatcctttctgaatctgagccagaagtgggaacggggatgttatttgcgaatggtatgcattgtgaagcaggctcctttaccagatgtgtattttttggttaaactaaan

SEQ ID NO: 37526 - DNA, 582 bp, Homo sapiens
  misc_feature (569)..(569): n is a, c, g, or t
  misc_feature (576)..(576): n is a, c, g, or t
tcatgcatgtaatcccagctgggatgccaaggcgagtggatcacttgaggtcaggagttccggcatggctagtttttatgtaattatgaaatacagcactatttggttttctgtactaccaaactctgtcaagaatagttaatatatgttgttaaaaaaagaataaaaataatttaaaaataatggttaatatatattgggatattaaaagggaaagacattattagctaagccccaaaatgtccgagaggcaagttacttattgctgcaagttttcttttacagcaagaataatcacaaccttaatgaccaccaatgattttacaagtaagcaaaatatcttctcacttcctttttgagttttgtgctatttgtgtctccttcatttgtaaactgtcttagggtttaatggatggacttggctctgttggattatagatttagaagatggcaacaatgtattcctagtcttattggtcaccatttttattgttaagcctctccttcttatagtacagggaaaagactatgcacaagacaatagattcctatctccatgagcgatcagngaaaggngtccta

SEQ ID NO: 37527 - DNA, 754 bp, Homo sapiens
ggcggcgcgcggaggggcgggccctggccgggtggtcccgggcggatcccgggaaggcggaaggcttcggcagagctgcgccgccgaggctgagcggtcccttctcgctgcggccgcccaggtgcccgcgcccgtggcgctatggaggcggcgctgctggggctgtgtaactggagcacgctgggcgtgtgcgccgcgctgaagctgccgcagatctccgctgtgctagcggcgcgcagcgcgcggggcctcagccttccgagtttacttctggagctggcaggattcctggtgtttctgcggtaccagtgttactatgggtatccgccgctgacctacctggagtaccccatcctcatcgcgcaagaagcgattctcctgcctcagcttcctgagtagctgggattacaggcacacgccaccatgcctggctaatttttgtatttttagtagagacgagttttcaccatgttggccaggctggttttgaactcctgacctcaagtgatccacccgccttggcctcccaaagtgctaggattacaggcatgagccaccgcgcccagccaattttttgtagagaggggtctcactatgttgccaaggctggtctcaaactactgggctcaagtgttcatctcacctcagcctcccaaagtattgggattacaggtgtgagccactgcacctggccctgtatgttttctttggagaaatgtctgttcacatggtttgcccattttttaattgggtc

SEQ ID NO: 37528 - DNA, 1886 bp, Homo sapiens
ggcggcgcgcggaggggcgggccctggccgggtggtcccgggcggatcccgggaaggcggaaggcttcggcagagctgcgccgccgaggctgagcggtcccttctcgctgcggccgcccaggtgcccgcgcccgtggcgctatggaggcggcgctgctggggctgtgtaactggagcacgctgggcgtgtgcgccgcgctgaagctgccgcagatctccgctgtgctagcggcgcgcagcgcgcggggcctcagccttccgagtttacttctggagctggcaggattcctggtgtttctgcggtaccagtgttactatgggtatccgccgctgacctacctggagtaccccatcctcatcgcgcaagatgtcatcctcctgctctgtatctttcattttaacgggaacgtgaagcaggccactccttacatcgctgtattggtgtcttcttggttcatccttgccctgcagaagtggatcatagacctggccatgaatctatgtactttcatcagcgcggccagtaagtttgcacagctccagtgtctgtggaagacgagagactcaggaactgtgagtgcgctgacttggagcctctcttcctatacctgtgcaaggtctcgctctctctcacaggctggagtgcagtgatacgatcttcactcactgcgggtttccaagtagctgggacaagaataatcacaaccttaatgaccaccaatgattttacaattcttctacgttttgtgatcatgctggctttaaatatatgggtaacagtgacagtacttcgctaccggaagaccgctataaaggctgaatgatggatacattattccttcacacagtggattttgagtaactgaaccaaaggaaaaagaagctctttgctaaattaaggtcttttataaatttagtaaatcagtttataatctttaaagccaaaggtttttttagacttgaaagaaagagccacttaaattcttgtttaaaaataccaatttgcctcctccttcctcacttcgttaggttatggtagtgctcagacatctgcagtgttggaggccagtcactgttggaagtcatccaagaagcccattttgaggccattttgagccttactcttaagttctctatgaagaactacattgatttgttggctttcagaatcttttaggaaataaatcctctccaggacaaaaatgaacatgaatggagtggcattttgttccaagtcagaggtgggcacctataataaatgactagggttcactttctgggactgatgtttaattgtaacacagatacaacagggtggccttgttgtgtataatacggtattatacctgcatgtgctctagcaaggataccaaggcaagcatacatgtagctggcttgagtttgtaccaaaacagtccttcaactttgcactgtgccttaagtaattactaacaaaaggtactaggattagctgcaatctctactttcgatgaggaaatcccagtaagctttctgattcaagtacaatgctgccattttttaaagggccacaactatagaattaccactgttggaatttggtacaaaatatgttttgtctattgaaaacatacacggtaaatggtgttgttaggtaggttctgtccagttcttagggacttttttcacattatagcatttttaccctaaacatgatgttgagattattatatactgtattttcttctaaattaaccctaatgtttaaaaactcactttccccctttaattgaaggcattgttttgttagatgcagtaatgatgtttaccagagattattgtttcctatgcaaaataaattttcatattttgaattctgctgagtcttaaaactgtcaatcattaat

SEQ ID NO: 37529 - DNA, 1770 bp, Homo sapiens
ggcggcgcgcggaggggcgggccctggccgggtggtcccgggcggatcccgggaaggcggaaggcttcggcagagctgcgccgccgaggctgagcggtcccttctcgctgcggccgcccaggtgcccgcgcccgtggcgctatggaggcggcgctgctggggctgtgtaactggagcacgctgggcgtgtgcgccgcgctgaagctgccgcagatctccgctgtgctagcggcgcgcagcgcgcggggcctcagccttccgagtttacttctggagctggcaggattcctggtgtttctgcggtaccagtgttactatgggtatccgccgctgacctacctggagtaccccatcctcatcgcgcaagatgtcatcctcctgctctgtatctttcattttaacgggaacgtgaagcaggccactccttacatcgctgtattggtgtcttcttggttcatccttgccctgcagaagtggatcatagacctggccatgaatctatgtactttcatcagcgcggccagtaagtttgcacagctccagtgtctgtggaagacgagagactcaggaactgtgagtgcgctgacttggagcctctcttcctatacctgtgcaattcttctacgttttgtgatcatgctggctttaaatatatgggtaacagtgacagtacttcgctaccggaagaccgctataaaggctgaatgatggatacattattccttcacacagtggattttgagtaactgaaccaaaggaaaaagaagctctttgctaaattaaggtcttttataaatttagtaaatcagtttataatctttaaagccaaaggtttttttagacttgaaagaaagagccacttaaattcttgtttaaaaataccaatttgcctcctccttcctcacttcgttaggttatggtagtgctcagacatctgcagtgttggaggccagtcactgttggaagtcatccaagaagcccattttgaggccattttgagccttactcttaagttctctatgaagaactacattgatttgttggctttcagaatcttttaggaaataaatcctctccaggacaaaaatgaacatgaatggagtggcattttgttccaagtcagaggtgggcacctataataaatgactagggttcactttctgggactgatgtttaattgtaacacagatacaacagggtggccttgttgtgtataatacggtattatacctgcatgtgctctagcaaggataccaaggcaagcatacatgtagctggcttgagtttgtaccaaaacagtccttcaactttgcactgtgccttaagtaattactaacaaaaggtactaggattagctgcaatctctactttcgatgaggaaatcccagtaagctttctgattcaagtacaatgctgccattttttaaagggccacaactatagaattaccactgttggaatttggtacaaaatatgttttgtctattgaaaacatacacggtaaatggtgttgttaggtaggttctgtccagttcttagggacttttttcacattatagcatttttaccctaaacatgatgttgagattattatatactgtattttcttctaaattaaccctaatgtttaaaaactcactttccccctttaattgaaggcattgttttgttagatgcagtaatgatgtttaccagagattattgtttcctatgcaaaataaattttcatattttgaattctgctgagtcttaaaactgtcaatcattaat

SEQ ID NO: 37530 - DNA, 1691 bp, Homo sapiens
ggcggcgcgcggaggggcgggccctggccgggtggtcccgggcggatcccgggaaggcggaaggcttcggcagagctgcgccgccgaggctgagcggtcccttctcgctgcggccgcccaggtgcccgcgcccgtggcgctatggaggcggcgctgctggggctgtgtaactggagcacgctgggcgtgtgcgccgcgctgaagctgccgcagatctccgctgtgctagcggcgcgcagcgcgcggggcctcagccttccgagtttacttctggagctggcaggattcctggtgtttctgcggtaccagtgttactatgggtatccgccgctgacctacctggagtaccccatcctcatcgcgcaagatgtcatcctcctgctctgtatctttcattttaacgggaacgtgaagcaggccactccttacatcgctgtattggtgtcttcttggttcatccttgccctgcagaagtggatcatagacctggccatgcaagaataatcacaaccttaatgaccaccaatgattttacaattcttctacgttttgtgatcatgctggctttaaatatatgggtaacagtgacagtacttcgctaccggaagaccgctataaaggctgaatgatggatacattattccttcacacagtggattttgagtaactgaaccaaaggaaaaagaagctctttgctaaattaaggtcttttataaatttagtaaatcagtttataatctttaaagccaaaggtttttttagacttgaaagaaagagccacttaaattcttgtttaaaaataccaatttgcctcctccttcctcacttcgttaggttatggtagtgctcagacatctgcagtgttggaggccagtcactgttggaagtcatccaagaagcccattttgaggccattttgagccttactcttaagttctctatgaagaactacattgatttgttggctttcagaatcttttaggaaataaatcctctccaggacaaaaatgaacatgaatggagtggcattttgttccaagtcagaggtgggcacctataataaatgactagggttcactttctgggactgatgtttaattgtaacacagatacaacagggtggccttgttgtgtataatacggtattatacctgcatgtgctctagcaaggataccaaggcaagcatacatgtagctggcttgagtttgtaccaaaacagtccttcaactttgcactgtgccttaagtaattactaacaaaaggtactaggattagctgcaatctctactttcgatgaggaaatcccagtaagctttctgattcaagtacaatgctgccattttttaaagggccacaactatagaattaccactgttggaatttggtacaaaatatgttttgtctattgaaaacatacacggtaaatggtgttgttaggtaggttctgtccagttcttagggacttttttcacattatagcatttttaccctaaacatgatgttgagattattatatactgtattttcttctaaattaaccctaatgtttaaaaactcactttccccctttaattgaaggcattgttttgttagatgcagtaatgatgtttaccagagattattgtttcctatgcaaaataaattttcatattttgaattctgctgagtcttaaaactgtcaatcattaat

SEQ ID NO: 37531 - DNA, 1754 bp, Homo sapiens
ggcggcgcgcggaggggcgggccctggccgggtggtcccgggcggatcccgggaaggcggaaggcttcggcagagctgcgccgccgaggctgagcggtcccttctcgctgcggccgcccaggtgcccgcgcccgtggcgctatggaggcggcgctgctggggctgtgtaactggagcacgctgggcgtgtgcgccgcgctgaagctgccgcagatctccgctgtgctagcggcgcgcagcgcgcggggcctcagccttccgagtttacttctggagctggcaggattcctggtgtttctgcggtaccagtgttactatgggtatccgccgctgacctacctggagtaccccatcctcatcgcgcaagatgtcatcctcctgctctgtatctttcattttaacgggaacgtgaagcaggccactccttacatcgctgtaatctatgtactttcatcagcgcggccagtaagtttgcacagctccagtgtctgtggaagacgagagactcaggaactgtgagtgcgctgacttggagcctctcttcctatacctgtgcaacaagaataatcacaaccttaatgaccaccaatgattttacaattcttctacgttttgtgatcatgctggctttaaatatatgggtaacagtgacagtacttcgctaccggaagaccgctataaaggctgaatgatggatacattattccttcacacagtggattttgagtaactgaaccaaaggaaaaagaagctctttgctaaattaaggtcttttataaatttagtaaatcagtttataatctttaaagccaaaggtttttttagacttgaaagaaagagccacttaaattcttgtttaaaaataccaatttgcctcctccttcctcacttcgttaggttatggtagtgctcagacatctgcagtgttggaggccagtcactgttggaagtcatccaagaagcccattttgaggccattttgagccttactcttaagttctctatgaagaactacattgatttgttggctttcagaatcttttaggaaataaatcctctccaggacaaaaatgaacatgaatggagtggcattttgttccaagtcagaggtgggcacctataataaatgactagggttcactttctgggactgatgtttaattgtaacacagatacaacagggtggccttgttgtgtataatacggtattatacctgcatgtgctctagcaaggataccaaggcaagcatacatgtagctggcttgagtttgtaccaaaacagtccttcaactttgcactgtgccttaagtaattactaacaaaaggtactaggattagctgcaatctctactttcgatgaggaaatcccagtaagctttctgattcaagtacaatgctgccattttttaaagggccacaactatagaattaccactgttggaatttggtacaaaatatgttttgtctattgaaaacatacacggtaaatggtgttgttaggtaggttctgtccagttcttagggacttttttcacattatagcatttttaccctaaacatgatgttgagattattatatactgtattttcttctaaattaaccctaatgtttaaaaactcactttccccctttaattgaaggcattgttttgttagatgcagtaatgatgtttaccagagattattgtttcctatgcaaaataaattttcatattttgaattctgctgagtcttaaaactgtcaatcattaat

SEQ ID NO: 37532 - DNA, 1645 bp, Homo sapiens
ggcggcgcgcggaggggcgggccctggccgggtggtcccgggcggatcccgggaaggcggaaggcttcggcagagctgcgccgccgaggctgagcggtcccttctcgctgcggccgcccaggtgcccgcgcccgtggcgctatggaggcggcgctgctggggctgtgtaactggagcacgctgggcgtgtgcgccgcgctgaagctgccgcagatctccgctgtgctagcggcgcgcagcgcgcggggcctcagccttccgagtttacttctggagctggcaggattcctggtgtttctgcggtaccagtgttactatgggtatccgccgctgacctacctggagtaccccatcctcatcgcgcaagatgtcatcctcctgctctgtatctttcattttaacgggaacgtgaagcaggccactccttacatcgctgtgtatcctttctgaatctgagccagaagtgggaacggggatgttatttgcgaatgttcttctacgttttgtgatcatgctggctttaaatatatgggtaacagtgacagtacttcgctaccggaagaccgctataaaggctgaatgatggatacattattccttcacacagtggattttgagtaactgaaccaaaggaaaaagaagctctttgctaaattaaggtcttttataaatttagtaaatcagtttataatctttaaagccaaaggtttttttagacttgaaagaaagagccacttaaattcttgtttaaaaataccaatttgcctcctccttcctcacttcgttaggttatggtagtgctcagacatctgcagtgttggaggccagtcactgttggaagtcatccaagaagcccattttgaggccattttgagccttactcttaagttctctatgaagaactacattgatttgttggctttcagaatcttttaggaaataaatcctctccaggacaaaaatgaacatgaatggagtggcattttgttccaagtcagaggtgggcacctataataaatgactagggttcactttctgggactgatgtttaattgtaacacagatacaacagggtggccttgttgtgtataatacggtattatacctgcatgtgctctagcaaggataccaaggcaagcatacatgtagctggcttgagtttgtaccaaaacagtccttcaactttgcactgtgccttaagtaattactaacaaaaggtactaggattagctgcaatctctactttcgatgaggaaatcccagtaagctttctgattcaagtacaatgctgccattttttaaagggccacaactatagaattaccactgttggaatttggtacaaaatatgttttgtctattgaaaacatacacggtaaatggtgttgttaggtaggttctgtccagttcttagggacttttttcacattatagcatttttaccctaaacatgatgttgagattattatatactgtattttcttctaaattaaccctaatgtttaaaaactcactttccccctttaattgaaggcattgttttgttagatgcagtaatgatgtttaccagagattattgtttcctatgcaaaataaattttcatattttgaattctgctgagtcttaaaactgtcaatcattaat

SEQ ID NO: 37533 - DNA, 1495 bp, Homo sapiens
agatggagtgaagtggtgtgatctcagttcactgcaacttccaccccctgggttcaagcagttttcctgtctctactaaaaatacaaaattagctgggtgtggtggcggatgcctgtaatcccaaggtgctggaattacaggtgtgagccaccgcacctggcctcttttgcttttttaacaaatcgactcgtgactttctcacattttatctgcaaacagaatctatgtactttcatcagcgcggccagtaagtttgcacagctccagtgtctgtggaagacgagagactcaggaactgtgagtgcgctgacttggagcctctcttcctatacctgtgcaattcttctacgttttgtgatcatgctggctttaaatatatgggtaacagtgacagtacttcgctaccggaagaccgctataaaggctgaatgatggatacattattccttcacacagtggattttgagtaactgaaccaaaggaaaaagaagctctttgctaaattaaggtcttttataaatttagtaaatcagtttataatctttaaagccaaaggtttttttagacttgaaagaaagagccacttaaattcttgtttaaaaataccaatttgcctcctccttcctcacttcgttaggttatggtagtgctcagacatctgcagtgttggaggccagtcactgttggaagtcatccaagaagcccattttgaggccattttgagccttactcttaagttctctatgaagaactacattgatttgttggctttcagaatcttttaggaaataaatcctctccaggacaaaaatgaacatgaatggagtggcattttgttccaagtcagaggtgggcacctataataaatgactagggttcactttctgggactgatgtttaattgtaacacagatacaacagggtggccttgttgtgtataatacggtattatacctgcatgtgctctagcaaggataccaaggcaagcatacatgtagctggcttgagtttgtaccaaaacagtccttcaactttgcactgtgccttaagtaattactaacaaaaggtactaggattagctgcaatctctactttcgatgaggaaatcccagtaagctttctgattcaagtacaatgctgccattttttaaagggccacaactatagaattaccactgttggaatttggtacaaaatatgttttgtctattgaaaacatacacggtaaatggtgttgttaggtaggttctgtccagttcttagggacttttttcacattatagcatttttaccctaaacatgatgttgagattattatatactgtattttcttctaaattaaccctaatgtttaaaaactcactttccccctttaattgaaggcattgttttgttagatgcagtaatgatgtttaccagagattattgtttcctatgcaaaataaattttcatattttgaattctgctgagtcttaaaactgtcaatcattaat

SEQ ID NO: 37534 - DNA, 5667 bp, Homo sapiens
  misc_feature (686)..(686): n is a, c, g, or t
  misc_feature (1311)..(1312): n is a, c, g, or t
  misc_feature (1364)..(1364): n is a, c, g, or t
  misc_feature (1676)..(1676): n is a, c, g, or t
  misc_feature (1981)..(1981): n is a, c, g, or t
  misc_feature (2003)..(2003): n is a, c, g, or t
  misc_feature (2420)..(2420): n is a, c, g, or t
  misc_feature (2657)..(2657): n is a, c, g, or t
  misc_feature (2789)..(2789): n is a, c, g, or t
  misc_feature (3571)..(3571): n is a, c, g, or t
  misc_feature (3835)..(3835): n is a, c, g, or t
ggggaatctttcctggttatttaatgagattccttgggagagggtcttaagacaattgcatttcttgtagaaagaagtttccttagtcatctgtaaggaagttggagagtctctgcagttgggaaggggtgacggaaaggtcgttaaatccttgattctgaggcagcttctaaggctttcctattcaaagtattcatcatgccagagcgccaaacttttggggtatcatttttgagccccaacaataggaaaacacatacctcaacctagtggtctcgccccttccccctggccaggccaggccttcccctttgccccccgccatcacccagtggggtctgaagcctggtcctccacacaagccttcctggtgggcggggtggggggtgcggcatacaggatgggaagaagccaaggggtgcgggggagaaagaggagacctcaggtgtgggagggtgaggggtcccactcaggctttggaccccgcgccggccctatggagcccggccctgggcacagtcatccaatagggggctttgaggggaaatttttgggaaaggcttgcagtgggagggactgtgacctcttccaggcttgtgagtgactctaccctgcggggtggggaggggggggtcccaggctggatggcagggttgagaggcacccaggggaggtgggcagcatgngtttcaggttggtgccaccaccaggctgggagcagagaggctggagcgatgaggttgtggcaaaggacacaggctggaagtggctgtggtgactgttcaggtgggagaggggacaagggcatgaaagccaggagtgggatttggcctcggccccttgctaggtccctgagctggggaagctgaagctggacccatgaaggaaaagaagccaggctgtctgtagagtctatagattccctcctgccgccagcccctaggcctgcatttccaccacttttgcagcattgcttgaaaaatgcaaaccctcagagatacgcaggtgagggctcctattagatctgccagctgtcacctctcccagctcaccttagtgaaagctagacctctggcagtggaaggatcttcctgggcatgggagctcaagggttgggtggggcagcagcttgctgccatccctgctggcctgtctaagggtcttgcagttgatcacgtgcaggtaaagggggctctgtcggggctggtgcaccagctctgcagcctccaagccagggccagggccaggcacacagacttctgtaaaatgggcttggctgtgtcaggacccatcctcctggccctcctgtcnncctgcctgcctccctcatgcccttcccagccttgcctgggaggcccacctgnggctggccatgcttgccagctgggccccgggcccctgaccagatcaggcagcagccggagttagagcagaaggaaccccagggctgtcgcagtcagccacctggagggcacgggccctctttgggtctccatttgagcaaactaagagcctggttttgagagcactgagtcaattggagcatgaagtgtgtcttaataatgccagaaaagcctttttagtgtggcttggtgtgaagggcaggagcctctgcccagggacctgcctctgccacccaggggcattccttgtagctggagccttccccctcgcangttcccaaccttgctgcttctcctgcctccagggctctgctgggctctgcctccctgctctctgcagccaggagcctcctggagcacaagattcatccaacctgccctgcctgcagccttccatggactgcggccctcccacggtggacccttaggctgtagagccttggcctctgggtaggatgcctttggagcccaccccttgctccaggtcacttgtcccccagcctgggtgggggtacgttttgtttaaccctctagtaggtgttgagggagaaaactccaatggctgcatggagcagatnggaatggaaacaaatggggctntgtcagatgcccggctggcatgattttattatgataagcactatagcgattacttattaaaagaaactttaaagggacaggcatggtggctcatgcctgtaatcccagccctttgggaggccgaggcgggcagataacctgaggtcaggagttcaagaccagccttgccaacatggtgaaaccccatctctactaaaaacacaaaaattaaccagtgtaggctgggtgcagtggctcacacctgtaatcccagcactttgggaggcccaggccggcggatcacgaggtcaggagatcaagaccatcctggctaacacggtgaaaccctgtctctactaaagatacaaaaaattagctgggcgtggtggctggcgcctgtagtcccagctacttgggagtctgaggcaggagaatggngtgaacccgggaggcggagcttgcagtgagccgagatcgtgccactgcactccagcctgggtgacagagcaagactccgcctcaaaaaaaagaaattagccaggtgtagtggcacacatgtagtctcagctactcgggaggctgagcaggagaaccgctggaacccgggaggtggaggttgcagtgactgagatcgcgccactgcactccagcctgggcgacagagcaagactccanctcaaaaaaaagaaacattaaaaactaaaggaaagacactgtccccaccccacctccccaggctgcagggatggggggagtttgaatcccagggaaagcagggagtagacggcaaaacctgcaggggcagcnacggctgcatccagatcagcctcgggaaatccaggctcttcatcttgtatgttcttggtgtctatgggcctccatttccccaagtggtctgtaagttgtggaggccagcatggatgacccctgaaggtgagaacgggctctgacatccccaggttctcaggcctggcctgtggactgtggctgcgtcccaggggtcagcacacacttacttcgatggtgaagacccccatagcttttgttcttcagcactcagtggctggctgtggccccacagaggggctggggtgcagcctccccctctgccagcccccctgggctcaatctcccaggggaacagagggggctgctcaggaggctggcaggaggagagtccctgcggcagggcagggcagaggcaccgcttgtccctgaagctgggaggtggctcagctgcacagcacccggagggcctgcaggcagctgggggtggggaccctgctgggcacggtgggggcccgcactcggggaccaggcctgtgggaggccctcgtgctcagggcaacactgtgacctcctctgactccgcccccagctaagttgtgcactgtcagaaacaggccagggaggcacagcctgtttgtgaatcggacttttccaggattccttcccagcttaggagattggagaccctggggggcccctcctgtgtgttgaagtcccatggttccggctcccctttcttcctgacctgagtggtctgaacacacaggtgagagggagggagccaaaaagctgggtgatgngacaaacaggtagccccaggagaccacagggattccggtcctgaagggagatggctgggtgtgagggggaggcaggaagctctgccttttcttctgagaatgtgggaccctgtggccttcgcagcatcctcacagccggagtcttcttagcgaaattgagggtggttcttcacgctttcccccactgccctctcaaccgggcagctcttctggaaggcaactggaccatccaggtgctgttctaactctaaaaacacggccacngacccccgcatccagggatggttgcggctcctcggatccttgcgcctctgcagcttctcagagtggagggcagatgtgtgcagcagctgaggggcagctgccggggtcagtgggagcccaacatggcaggcaggccagaagcgtgggcccagaaggcccagtctcatattcttgctcagggatttgccttctgtaaaaatcctttgtaagcgaccatctcaaggcactctatagagatcgtgggtattgcactgtggcccggtgcccagtaagttctggatgctccaaaaattgtacagatgattcaactgaattccatctattttgttctaaaccttcctctttgacactggcgtgtccacacccccactgcaaggattcggcaaactgacctcagtgttctggtgcctgccaggccccgacagctgcgttttggggcagccgtgtggacatgtgcccttctctctccagattcctggtgtttctgcggtaccagtgttactatgggtatccgccgctgacctacctggagtaccccatcctcatcgcgcaagatgtcatcctcctgctctgtatctttcattttaacgggaacgtgaagcaggccactccttacatcgctgtgtatcctttctgaatctgagccagaagtgggaacggggatgttatttgcgaatgttcttctacgttttgtgatcatgctggctttaaatatatgggtaacagtgacagtacttcgctaccggaagaccgctataaaggctgaatgatggatacattattccttcacacagtggattttgagtaactgaaccaaaggaaaaagaagctctttgctaaattaaggtcttttataaatttagtaaatcagtttataatctttaaagccaaaggtttttttagacttgaaagaaagagccacttaaattcttgtttaaaaataccaatttgcctcctccttcctcacttcgttaggttatggtagtgctcagacatctgcagtgttggaggccagtcactgttggaagtcatccaagaagcccattttgaggccattttgagccttactcttaagttctctatgaagaactacattgatttgttggctttcagaatcttttaggaaataaatcctctccaggacaaaaatgaacatgaatggagtggcattttgttccaagtcagaggtgggcacctataataaatgactagggttcactttctgggactgatgtttaattgtaacacagatacaacagggtggccttgttgtgtataatacggtattatacctgcatgtgctctagcaaggataccaaggcaagcatacatgtagctggcttgagtttgtaccaaaacagtccttcaactttgcactgtgccttaagtaattactaacaaaaggtactaggattagctgcaatctctactttcgatgaggaaatcccagtaagctttctgattcaagtacaatgctgccattttttaaagggccacaactatagaattaccactgttggaatttggtacaaaatatgttttgtctattgaaaacatacacggtaaatggtgttgttaggtaggttctgtccagttcttagggacttttttcacattatagcatttttaccctaaacatgatgttgagattattatatactgtattttcttctaaattaaccctaatgtttaaaaactcactttccccctttaattgaaggcattgttttgttagatgcagtaatgatgtttaccagagattattgtttcctatgcaaaataaattttcatattttgaattctgctgagtcttaaaactgtcaatcattaat

SEQ ID NO: 37535 - DNA, 1796 bp, Homo sapiens
ggcggcgcgcggaggggcgggccctggccgggtggtcccgggcggatcccgggaaggcggaaggcttcggcagagctgcgccgccgaggctgagcggtcccttctcgctgcggccgcccaggtgcccgcgcccgtggcgctatggaggcggcgctgctggggctgtgtaactggagcacgctgggcgtgtgcgccgcgctgaagctgccgcagatctccgctgtgctagcggcgcgcagcgcgcggggcctcagccttccgagtttacttctggagctggcaggattcctggtgtttctgcggtaccagtgttactatgggtatccgccgctgacctacctggagtaccccatcctcatcgcgcaagatgtcatcctcctgctctgtatctttcattttaacgggaacgtgaagcaggccactccttacatcgctgtattggtgtcttcttggttcatccttgccctgcagaagtggatcatagacctggccatgaatctatgtactttcatcagcgcggccagtaagtttgcacagctccagtgtctgtggaagacgagagactcaggaactgtgagtgcgctgacttggagcctctcttcctatacctgtgcaacaagaataatcacaaccttaatgaccaccaatgattttacaattcttctacgttttgtgatcatgctggctttaaatatatgggtaacagtgacagtacttcgctaccggaagaccgctataaaggctgaatgatggatacattattccttcacacagtggattttgagtaactgaaccaaaggaaaaagaagctctttgctaaattaaggtcttttataaatttagtaaatcagtttataatctttaaagccaaaggtttttttagacttgaaagaaagagccacttaaattcttgtttaaaaataccaatttgcctcctccttcctcacttcgttaggttatggtagtgctcagacatctgcagtgttggaggccagtcactgttggaagtcatccaagaagcccattttgaggccattttgagccttactcttaagttctctatgaagaactacattgatttgttggctttcagaatcttttaggaaataaatcctctccaggacaaaaatgaacatgaatggagtggcattttgttccaagtcagaggtgggcacctataataaatgactagggttcactttctgggactgatgtttaattgtaacacagatacaacagggtggccttgttgtgtataatacggtattatacctgcatgtgctctagcaaggataccaaggcaagcatacatgtagctggcttgagtttgtaccaaaacagtccttcaactttgcactgtgccttaagtaattactaacaaaaggtactaggattagctgcaatctctactttcgatgaggaaatcccagtaagctttctgattcaagtacaatgctgccattttttaaagggccacaactatagaattaccactgttggaatttggtacaaaatatgttttgtctattgaaaacatacacggtaaatggtgttgttaggtaggttctgtccagttcttagggacttttttcacattatagcatttttaccctaaacatgatgttgagattattatatactgtattttcttctaaattaaccctaatgtttaaaagaaaatacagtatataataatctcaacatcctctccaggacaaaaatgaacatgaatggagtggcattttgttccaagtcagaggtgggcacctataataaatgactagggttaatttaga

SEQ ID NO: 37536 - DNA, 1010 bp, Homo sapiens
ggcggcgcgcggaggggcgggccctggccgggtggtcccgggcggatcccgggaaggcggaaggcttcggcagagctgcgccgccgaggctgagcggtcccttctcgctgcggccgcccaggtgcccgcgcccgtggcgctatggaggcggcgctgctggggctgtgtaactggagcacgctgggcgtgtgcgccgcgctgaagctgccgcagatctccgctgtgctagcggcgcgcagcgcgcggggcctcagccttccgagtttacttctggagctggcaggattcctggtgtttctgcggtaccagtgttactatgggtatccgccgctgacctacctggagtaccccatcctcatcgcgcaagatgtcatcctcctgctctgtatctttcattttaacgggaacgtgaagcaggccactccttacatcgctgtattggtgtcttcttggttcatccttgccctgcagaagtggatcatagacctggccatgaatctatgtactttcatcagcgcggccagtaagtttgcacagctccagtgtctgtggaagacgagagactcaggaactgtgagtgcgctgacttggagcctctcttcctatacctgtgcaacaagaataatcacaaccttaatgaccaccaatgattttacaattcttctacgttttgtgatcatgctggctttaaatatatgggtaacagtgacagtacttcgctaccggaagaccgctataaaggctgaatgatggatacattattccttcacacagtggattttgagtaactgaaccaaaggaaaaagaagctctttgctaaattaaggtcttttataaatttagtaaatcagtttataatctttaaagccaaaggtttttttagacttgaaagaaagagccacttaaattcttgtttaaacctgccaaatatgatgacatcaagaaggtggtgaagcaggcgtcggagggcccctcaagggcatcctgggctacactgagcaccaggtggt

SEQ ID NO: 37537 - DNA, 1115 bp, Homo sapiens
  misc_feature (1098)..(1098): n is a, c, g, or t
ggcggcgcgcggaggggcgggccctggccgggtggtcccgggcggatcccgggaaggcggaaggcttcggcagagctgcgccgccgaggctgagcggtcccttctcgctgcggccgcccaggtgcccgcgcccgtggcgctatggaggcggcgctgctggggctgtgtaactggagcacgctgggcgtgtgcgccgcgctgaagctgccgcagatctccgctgtgctagcggcgcgcagcgcgcggggcctcagccttccgagtttacttctggagctggcaggattcctggtgtttctgcggtaccagtgttactatgggtatccgccgctgacctacctggagtaccccatcctcatcgcgcaagatgtcatcctcctgctctgtatctttcattttaacgggaacgtgaagcaggccactccttacatcgctgtattggtgtcttcttggttcatccttgccctgcagaagtggatcatagacctggccatgaatctatgtactttcatcagcgcggccagtaagtttgcacagctccagtgtctgtggaagacgagagactcaggaactgtgagtgcgctgacttggagcctctcttcctatacctgtgcaaggtctcgctctctctcacaggctggagtgcagtgatacgatcttcactcactgcgggtttccaagtagctgggacaagaataatcacaaccttaatgaccaccaatgattttacaattcttctacgttttgtgatcatgctggctttaaatatatgggtaacagtgacagtacttcgctaccggaagaccgctataaaggctgaatgatggatacattattccttcacacagtggattttgagtaactgaaccaaaggaaaaagaagctctttgctaaattaaggtcttttataaatttagtaaatcagtttataatctttaaagccaaaggtttttttagacttgaaagaaagagccacttaaattcttgtttaaaaataccaatttgcctcctccttcctcacttcgttaggttatggtagtgctcagacatctgcagtgttggaggccagtcactgttggaagaagtaaacaagaatgncattccaaaaaaaaaaa

SEQ ID NO: 37538 - DNA, 450 bp, Homo sapiens
aaattattatttatgaagttgggccaaggggccaaaaattgtcatgatagggagatcatttccccagaaataactggaaccaaaattgttcatttcggaggttgggggtgaagctttatttaggcttatactttgagcaggaggtggttttggtctgtattgtaaagacagtttttaatacacttttttttttatttcagttcttctacgttttgtgatcatgctggctttaaatatatgggtaacagtgacagtacttcgctaccggaagaccgctataaaggctgaatgatggatacattattccttcacacagtggattttgagtaactgaaccaaaggaaaaagaagctctttgctaaattaaggtcttttataaatttagtaaatcagtttataatctttaaagccaaaggtttttttagacttgaaagaaagagccacttaaat

SEQ ID NO: 37539 - DNA, 479 bp, Homo sapiens
aaacggggtttcaccatgttggtcaggctggtctcgaactcttgaccttgtgatccacccacctcaccctcccaaagtgctgggattacaggcgggagccaccgcgcccagcccctgatagggtatattttacaatataggcttggaccaatcagttctgaagacccaaagaaatcccccacccaattactaataattcctcagttatcccctatagttggagaatgagatagtcctaagtaattatttccttcaccaacaacttgagatggaatataataatgtatcctttaaaagtatctgaattatagaattctaggtccaaaagaaacttcatgagacatctaggataagatagccctaagttagagcataaggagagcaagtctttctttaaaatattcagaaaaggagcttccccagccttcctccctcctttcaattgttttacctggctcatggcaacaacctataaggac

SEQ ID NO: 37540 - DNA, 198 bp, Homo sapiens
cacttcctcagcctcccctgacatgtctacatgttccacccccacccccggagtgtgggctttgcagggcgctggcggacctgaaatactctgcacacctgggaagctgcaggcagacctctgagctccagctcgttcttcagtaaaaggggctgaatggtgctgactttggaggattccaggtttcagaaataatgg

SEQ ID NO: 37541 - DNA, 421 bp, Homo sapiens
  misc_feature (3)..(3): n is a, c, g, or t
  misc_feature (10)..(10): n is a, c, g, or t
  misc_feature (23)..(23): n is a, c, g, or t
gtngccgtanctccagcactttnggcggccaaggcgtgagccaccacacctggcctctatttcgaatattaaactttaatttaccatatcccaaatatttttccttttgttgctattatgggctgaattgtgtccctccaaaatgcatatgttgaagttctagcccccagtacctcagaatgttacctttgaggtgattaagttaaaatgaggttattaaggggggccctaatccaatatgactgatttctttataagaagaggaaatttggatataggcacgcagaaggaagaccatgtgaagacagagaagatggttgtaagagacagaaaaacccaaagtgtgtttctcctactctcatacacaccgctcaccagagagtgcttcacctctggccacaaaaatgggtggagatttctc

SEQ ID NO: 37542 - DNA, 340 bp, Homo sapiens
gctggctgccaccaattattattttggagagagagttaacaactgcctaaccatcacctgatggtcgcctgacattccaggtgtgggagggcggctctcttgccctgctcgtgtctacctacttactgtaacatacatagaaatcttttgatgtatatacagtaaaatattaagtgattatctgtaaggcaaaattgcaggtaacttctttctcctgttgcttttctgcatgttccattttttatattgaatatttattatcattgtaattagaaacaaaacatattggctgggtgcagtggctgacatctgtaatcctagtgctttgggaggcctaggt

SEQ ID NO: 37543 - DNA, 991 bp, Homo sapiens
tagctttatccctgagacttattatttgacgtgatgacatctttaactcaagaggtcaacaattgggataaaatgccatgctgtgggtgatggacgccataaaagtaacctgataatcggtcgggtgcggtggctcacacttgtaatcccagcattttgggaggccgaggcaggcagatcacctgaggtcgggagtttgagaccagcctgaccaacatagagaaaccctgtctctactaaaaatacaaaattagctgggtgtggtggcacatgcctgtaatcccagctactcgggaagctgaagcaggagaattgcttgaacccgggatgcagaggttgcggtaagctgagatcgcaccattgcactctagcctgggcaacaagagcaaaactccatctcagggaaaaaaaaaaaattaacctgataattgagttttagttataaaagtgccaaaatgctaaaagaatttacagtttctgaccactgaaatattttgctctagcctgggtacaagaagaagcgagtttgagactaggaatgaatgagaggaaacttttgattcttactacataggttccttttagaattttgaatgtttagagctagaaattgaatattcattattctagcccagacattttacagaggagaaagtcaaagtttcagagatgaaagttgtacccagggccacacagttaggttgctgcaaatattaagagaacttacttcacttaatttggtgcatttttattcttctatttatagacgagtaaaatgtgctgagaccagtgcattttaagctccaagactgtcacttcttcatttgtcttaggcttttagattcaattaaataagtaatgcacctaaagattcatcagctgggaatactgtctcaccactgaatgacttaagagagataatattgccttgctgaagacatattataaaaatctgagaatgagcatgtgtgaagctctctgatactcttac

SEQ ID NO: 37544 - DNA, 332 bp, Homo sapiens
atttctcctccaaagtgtttaagcttcagatccctcaaaatctggatctgcctctgtagagcacataacatttcatttgttctaatatctgacaatttctgcaaactctgacagtgaaatactctcaaacatttccactgtaaaacagctaataaacaagcatgtttacaattggtttatgttctctaagttcttcctttgaaaaacaaagtggtgtgtctctactttaatctgttaattttatttccctgaatagagttaaacagttgttgtttttgaagtcctatacttttcttgttaaatgtattcctattttatagttttagctactc

SEQ ID NO: 37545 - DNA, 522 bp, Homo sapiens
gatccacagaacgttgtacatttaagaagtgattccttcaagctaatttaaaatttcattgaacacatggtgaccaggaaaactttttttcaagcactgttggaaagcaccacaaagccctttagaattaatctggatttgtttctcaagttctgctgaagtttaaaaaaaaactttattatacaaataactcaaaattttcctgtgtaaaactaaacctgtagttttaaaacataatcctgtttgcattagagctcactgtctttttgtgatggaaactgtgttcgtatggaatgactaaaaatcttttatttggtttgtttcaaattacaattgctgatggacaatttgtattgcagcgagaacaacagaatgaaagaaatgtatctctgtgcggctatacatatacatacataaaattgatttttaaatttaaaacatatggaaaacaaaacattgaacagtttgaattttgccaagttggacattaaagtaaaaatgaagtgaaatcatgcattgaaa

SEQ ID NO: 37546 - DNA, 1266 bp, Homo sapiens
tctgggctcagtgcatgccccagtaaagctagtgaaacccttgaagatggccaggtattttgcaaagtatgtatggataacaggttgtgtgtgtgtatgtgtgaatgtgtgtgtgcgtgtatgtgtgtgtgcgtgtgcgcgctaatgcgcatgtgcgcccgcgccaaggtggctcccttatcctagcatttcctttcattccctactcacataatggatcctctaacagttcagtataggtacactttccactattttattgacatgttctagtcttaatattggataattagacactttccactgggcccatttgaaaagtaattgataattacctttaagacattttaagtgttaatgatatttgtcactactaagtgcttagttttatttataaaactttcaaagttttctgtttaagactgtaaactgttttcctatactacgtgttagatgaaagtgtattttatcacaaattaaccttagaatgcaactctttgaatgtgtgcttgctggaagaattccagatggacacaaatccctctagggcaggtcaccatgcagaacacttaggagaagcacgaactgagccagaggagggttgttgttttccacaaactaagcagtgaagtgggaatttgggaattctgacacacgtcaccatctctgatttccttttgcgtgaccttttcatgcaagagcaaaacacttagctcttcatgaatgtctgctccacaccaatgaaatggaagagtaaaggagcccctcaactatcagggaaagaacaggaggcctcagttgaggaatacaacttttgtcctgcctttgctatagctgaaccactgttgaaaggttgaagaacacagtttgcccagcaaagatccatccactcatgtacaaagcaaagcactaaaggagctattagtttgatggaaaaaactacccctaaagagcttctttctaaaagaccttcctcgaaggtgatttaatggcatgtcatcatttaaaagtcttaggctgaactgtcatttacactgcacaattgaggaatgaaattttctgagtattagaacgttcttcttaacctagcaatataatattcaacaagactatcaccttatgtgaaaatactaaaatgcagttagcaataaaatgcatggtaaataaccattttaaaaatgttattataaaaggttgtaagatactgtggtgttttacagatgtagcctttataattgaattatatacactatccttttttatggg

SEQ ID NO: 37547 - DNA, 388 bp, Homo sapiens
cgcggccgcgtcgacgatctttcctcaaatatttgggacaattgtctactctgtgctcaagcattgtgttaggtcttagagattcagtgaaaagacgagttacggccgggcatggtggctcactcacgcctgtaattccagcactttgggaggctgaggcgggtggatcactaggtcaggagatcgagaccatcctggccaacgtggtgaaaccccgtctctactgaaaacacaaaaaattggctgggcgtggtggcgcatgcctgtggtctcggctactcaggaggctgaggcaggagaagtgcttgaacccgggaggtggaggttgcggtgagcaagatcgattgcgccactgcattccagcctgggtgacagagactccatctca

SEQ ID NO: 37548 - DNA, 393 bp, Homo sapiens
ttttttttttttaagacaaagccttactctgttgcccaggctgagagccctggcacaatcatagctcactgcaagtttgaatttctgggctgaagcaatgctcccacctcagtctccgagtagctgggattaaggttttgtgccactgtgcccagccccttatttttaataataattcccatgattgataagcatgcagtgaaatatacaaattcacatcttgcttgtgggagtggaacttggtttagcctttctgggaatcaatttggaagtcttaagagcattaaaaatgttcatactctttgacccagaaatattccttctgggaatttttcccacaaaattagaaaaattttccctataaaaatagaaaatcagacaaatatgtatgta

SEQ ID NO: 37549 - DNA, 584 bp, Homo sapiens
gattctataaattgctgttgtgttccttagctgcttgtactgcatatataattgttctttgagagttatataaatgtctggatgtgaataagcaaggccgcaaaataatgttttatatcctttaaaataagtgtttgcccactttttctgtaaagggccagctaaatatttttggttttataagccatctgtaggatctcaactactgtgctctggcattctagtacaaaaacagctataagtaatatgtaaatgcgcaagcatggctgtgtccaaaaaactatttacaaaaataggtagtatgccatagtttgccagtcattactttagaacaccagttagataatactaaaacaaattatttcctttgtatggttaagtattttctgtgggttatattcctataactcacatgataaagttaagaactgtgaacagttcttcacataagcacaacataaaatagttagttaaggctgggcgtgttggcttgtgcctgtaatcgcagcactttgggaggctgaggcaggtggatcgcctgagatcaggagtttgagaccagcccgaccaacatggtgaaaccc

SEQ ID NO: 37550 - DNA, 781 bp, Homo sapiens
gtagaaagagaatatgagagatccaagagcaggctctggaagggctagcacaaggaaagttgtacacacacacacacacaaacacacacagcctgtataaggaacgttacacacacacacacacacacacacacacacgcacacacagagtcagtcaagaaaaggaatggtcagagtaaaaagaaaaagaaggtgaagatagtgtccagtaaaaaaagccaaagaagagagtttaatggaggaggaggtatagttaagtatttcaggaagggtttatttatatatccaagtaaaattaaaaggtgcttttagacatataaagcagtacttaaatccaagttcatgttgggcagagtggaggtatatcagccattacagtgtaacaaatgcccatttcaaaattgatagatagtactgcctcgtttttctcaactctaaaataacagtaatagtagtatttcattgggtaattataaggttgaaacaggataacccatgtgaagcacttagctgagggtcacacactagtaaatatttgttaaatgttagcttcatttataacaataaatgttagcttcatttataacaataaatgttatctgactgactgactctggctgttttataatgggggaaaaaacgtttgtttccaggttttttgtttgtttttttgtttctgttttttgaggaggtgggagacctaatgtgggtgttggcaaactatggctggtgggccaaacctagcccattacctgtttttgtatagcaaactggttggaga

SEQ ID NO: 37551 - DNA, 369 bp, Homo sapiens
taactcttatatctctttgctctgaccattcctttttttgactgactctgtgtgcgtgtgtgtgtgtgtgtgtgtgtgtgtgtgtgtgaagcacttagctgagggtcacacactagtaaatatttgttaaatgttagcttcatttataacaataaatgttagcttcatttataacaataaatgttatctgactgactgactctggctgttttataatgggggaaaaaacgtttgtttccaggttttttgtttgtttttttgtttctgttttttgaggaggtgggagacctaatgtgggtgttggcaaactatggctggtgggccaaacctagcccattacctgtttttgtatagcaaactggttggaga

SEQ ID NO: 37552 - DNA, 474 bp, Homo sapiens
ttttctcaagtggtaaaactgttttggcacacgtgacacaccccttgggcacctacccaagagaagctctcaataatgaagagccatctcgattagtcttaatttagtacctgacccagctgccctcatctcctttgtacttaaatagctcctttcatccaacaagttcaaagctgtctaacaaaataaacccacttattcttgcaccatgacggcacaggcaagcattgtccttcccatttaagggagagagagagaaggtgagtcattcagtggttaagggattctgctggtgacataaagtgagtcagtggggccccagggtgattgacctgtgtttcttaagttcacatccagtgctctctcatttctaattaaaagattagctttgatgagacagtacatgtgtgtgtgtgcacgcacatctgtgtcagctggtgtaactggtgctgttgtaggggatctctctagagt

SEQ ID NO: 37553 - DNA, 894 bp, Homo sapiens
agctttgcgcgcctacctggcggtcgtgggtcgaggaggggtcaagaattgttgtctagcagccctctccccgctgccctgtcctggccgaggcaaaggccgcgtgcgctccgcgtctgccaggctttagggctgcgcggacactgggtgggtggtgggccgaggcgaccggaaggtcctggccgcctttccggtctcctcagcaccctggagcgccgccctcgggtttcggtctcctggatctgcgggtcggtctcggcgggcggattactcctcgcccacaacctcgaggccccggggtcaaccgcgccctccgggccggcaacccagggtttagtcagattcctcctgacccaccgcttctgggaaagaggcgcctcccgtcaggaggatgctgagttcctcatgactggaccagtgagtgtccactccctggtccctggcgagagaggcgggacccccacgccctcctggcgctctttgcagagatgttcctcaggcccaatccgggatttgggatgtctgtgcgtgctgtggagcagagagtttgcaacatggtctcactttgtcacccaggctggaatgcattggcatgaacacgtctcactgcagcctcaacctcccaggctgaagtgaccctccaactctgctttcacagtagctgtgatatggtttggctgtgtccccacccacatctcatcttaaaacccagtgggaggagggatgttctcccttggaaccaggccaccattctatgaggaagccaagcagccacatgaaaaggccgtatgtagacattctaactgacaatactagctaaggttccagctactcaccagcatcaactatcagacaaattcctatcattactagaagaaactatatgccaagtgc

SEQ ID NO: 37554 - DNA, 1111 bp, Homo sapiens
agctttgcgcgcctacctggcggtcgtgggtcgaggaggggtcaagaattgttgtctagcagccctctccccgctgccctgtcctggccgaggcaaaggccgcgtgcgctccgcgtctgccaggctttagggctgcgcggacactgggtgggtggtgggccgaggcgaccggaaggtcctggccgcctttccggtctcctcagcaccctggagcgccgccctcgggtttcggtctcctggatctgcgggtcggtctcggcgggcggattactcctcgcccacaacctcgaggccccggggtcaaccgcgccctccgggccggcaacccagggtttagtcagattcctcctgacccaccgcttctgggaaagaggcgcctcccgtcaggaggatgctgagttcctcatgactggaccagtgagtgtccactccctggtccctggcgagagaggcgggacccccacgccctcctggcgctctttgcagagatgttcctcaggcccaatccgggatttgggatgtctgtgcgtgctgtggagcagagagtttgcaacatggtctcactttgtcacccaggctggaatgcattggcatgaacacgtctcactgcagcctcaacctcccaggctgaagtgaccctccaactctgctttcacagtagctgtgatatggtttggctgtgtccccacccacatctcatcttaaaacccagtgggaggtaattgaatcatgggggcaagtctttcctgtgctgttcttgtgatagtgaataagtctcatgagatctgatggtttttaaaagagttctggctgggcatggtggtgggcacctgtaatccaaactactagggaggctgaggcagagtgaattgcttgaacctgggagaaggaggttgcagtgagccgagattgcaccgctgcactccagcctgggcaaaattgaagactctgtctccaaaaaaaaaaaaaaggagttcctctgcataagctctctctctttgcctgctgccatccatgtaagatgtgacttgctcttccttgccctatgattgtgagtctttccccagccacgtggaactgtaagtccaaataaacctctttcttttgtaaa

SEQ ID NO: 37555 - DNA, 465 bp, Homo sapiens
cagtttctgcaaatgattgattgaattttcactttgaaaaaatatactttaaggtaatttttatataatttaagaaaacctacacccaattgtgttatgcatcattatgatcctgcctccagtaactgtgctgacagatggcttctcctctcatctttgtttaattgaggagtattctgagattgcaaagtgagctgttaaaagctgtttcctgctgcaactacttacagatgtttatcaggattttcaatactctgctaccaaaataatatatagaaattgattgggtgctaaaataagattattcctgtctccccttacatccaattttgaatgtttgcattaataatcgtattatccttcttgttttcattgattaactttttaaacaattttatatatttgaccatatgttagatttatatcaataaattacaaattgtgtctatttcatacaaaaaagtt

SEQ ID NO: 37556 - DNA, 160 bp, Homo sapiens
cagttgttttttgaaaagtgaatgagaaacatctcccatagtgagcttgatagcttcccagtatgtagacttttctcatggagtctgatattagagagtgtaattttccaatactggataatgaaatgtgtcaacatttggaatatttgtatacagtggt

SEQ ID NO: 37557 - DNA, 458 bp, Homo sapiens
aaaaaaaaactgtgctagaaccaacttattcatcatcatcttcatcttcctcctcttccttctttttcttgcttttttcagccttgacaactcacttttttgctgcatcaggctttcctttagctcactatgcagcaatatccttttcatatttttccttcagcttcacagccttttcataaggctgcttatcatctgcggcagtgcccttccacatctcttccaatttctttacaactcaccaatggtaggccgggatgttctgctttgatttttgggcgacactcagaatagaacaagaaaaaggccagaggaggcctcttgggtacattgggatcctcgaacttcttttttgtctcccatttaggaaggacataggttttcatttctctttcataatgggtcttgtccatctttgacatgtcttcaaatctcactttctctttagcagacatggt

SEQ ID NO: 37558 - DNA, 390 bp, Homo sapiens
  misc_feature (287)..(287): n is a, c, g, or t
taacttccaggggaaaaatctgtgattgacctggctgagaccttcgccccatacgcttctgggcatcccgagagatccaagactctggggtccatccggggagtggctgtggagcagctaagaggggaagtgggcattagacatgtcctctctggaaagaaaaaggtgaacacccaggagaagagctagcagggagaaggaggagcgggccaatcacgaaggagaaagtccttagatgggagccttctcattccttcagaaaccacactggtttaaattcagtgggntctttaacttttgggcttgcatattcgggcattcaccacagggaagttttcaaaaatttcccagttgccttgagttccccaccacagggtttttttggttggc

SEQ ID NO: 37559 - DNA, 359 bp, Homo sapiens
ccctaaaatgcttcctatatcagattttgtcactttaaatctgatactacttaatgctgtgcttcctaggctcggacagagcacacttctcaatagcattcctctctcggtttacttgctcctcacatcacatcccaggtccgttgactctggactccagggctccaccaaaacctcagtgtttgaatgcttgcactctccagcaaaatccctgatccgattctaccgttcagctatgcccctagccctgatgcctttcttcctacaccatacactcacaccgtggacttcagggccacttccaaactgggtcacattagcaaccctggatctcgaagactctcagcctgtcacttggg

SEQ ID NO: 37560 - DNA, 177 bp, Homo sapiens
acacatcagagattaagacaattactgaaatatttttcaatggtataactgccaatgaaatttagttatactgttgacaacaaaaaacacaagtcagttctttaaaaatgacccatttggagaggacattagagtattaccatgtaacactcattgagtcatttacaatatgaaaga

SEQ ID NO: 37561 - DNA, 650 bp, Homo sapiens
gtctcgaactcctggcctcaagcgatctgcccgcctcagcctcccaaagtgctgggattatagccatgagccactgcacccagcctaaagcacgattcttttttaggccctctcttaattagcccagtcatccctcaaccttagcgaatgggccagtgcagagagaggttgccttcacagattccccctgcctggtacaaagctcagtggacacaaagatgatttgatactgccttgtgccctctctgctgatcttaattaggttgctgcatggttttcaccaggccctaagcatgtgagaggaaagagagtcgtataaaaatgccctgtatttggaactggaaaactagtgagttccagtcctgtgaattttggcaaatcacccagaaccattaggacccttggtttctcatctgtaaaatggggataaagataccttgctctgccagcatcataagattgacatgaaaatcctgtgcagcatgtgctgtgtaagctgaagcttgacctttagtcatgaggagtctcgttttcatgtggcatgacccctgtgggcaccccttccccagggatctgccttattgcctacttatcttggggttatgttgaacccctctgtcctgcccacagttagaagtgaatttgctgtc

SEQ ID NO: 37562 - DNA, 363 bp, Homo sapiens
agtcttttatctcagggcagatcaggtcagcagctaggaatgaagacccttcactgacccgtccccaggcccacctcatccctgctgttgcaacatccctgctgtttcttaatcacagagtcccctaaaagacccagaatcaagaaccacccccccccccgcgtaaatgtcctattgccagaagagcaataggacaggggcatgggagccctctggaacccaagaccgcctagccccaaggtctgccctgggcccatggtgtgctggatgggctggggcaaactcttcagttctcaggaatcttgccagccagctgttaatcacggacattattaaaaattaaactaaacacacttacaatta

SEQ ID NO: 37563 - DNA, 476 bp, Homo sapiens
atggaatcaactgcccatcaatcaatgagtgaataaacatactgtggtatatatactatgaaatacgacgcagccataaaaaggaataaattaacagcatttgcagtgacctggatgtgtttggagactatttaattctaagtgaagtaactctggaatggaaaaacaaacattacaaggcataagaatgatacaatggacttttgggacttgaggggaaaagtgggagaggggcgagggataaaagaccgagtatggtgcagtgtatactccttgggtaatgggtgcaccaaaatcacacaaatcgccactaaagaacttatataaccaaatacctcctgtaccccaataacttatggaaaaataaaagtaataataataaataaagagaattgcaaaggtagtaagtaccaaattttcaagcaaagctataaattttatctaagttcataaacaaatttcttcaaaaaaaaaga

SEQ ID NO: 37564 - DNA, 402 bp, Homo sapiens
ggtgttgtgatccgcctgtctcagcctcccaaagggctgggattacaagtgtgacctaccgtgcccagtctcgctcactataagctctgcctcctgggttcatgccattctcctgcctcagcctcccgagtagctgggactacaggcatgagccactgcgcccggcctgtaaagtattttgttgactgaaaaccagaaaatgaaacctccaaaagcagaaattttgcaggtaataattaggagaatgcaggttgtggcatcagattgtgtaagtttgaattattgttccattattagttgaacattcttgggcagttcttaaactcaggcctgtaatcacaatattgtcacgaggtaattcatgtagacacggtgtctcacacggtgtcttggacattgtaa

SEQ ID NO: 37565 - DNA, 300 bp, Homo sapiens
ttatagaaaggacttccccaatccaaaattattaaagtgatcatctgttttcctttcagtatttcccttgaagtaaaccaatctcccagctgtttgtaagattgtttggcaatttatttagaagaaatctatgtcagaggatccaaatttaatatgcttttgctttgatttcagtaccaaaaagttagataattttgctatgacattatcttctcccttacaagttttgatatctgaatttataatgttcaaacttaagcccacttttcaacagattcagttacctttgaaactgtgtat

SEQ ID NO: 37566 - DNA, 423 bp, Homo sapiens
cgtgaaaaagaccaacataaattaggatgaagtggggtagaaagagcaaaaacagccttggggtaccccaagcacttgctttgtagggggcttacaagtgtgagccccagctttcctgcagccaactcacaaaaacacattggtcactgactccttcaatgtccatatggcacaagcaagctcatggcccagaatgtgcctggccaccacagcatctaccatcgagacagtgaccggacacgtagggcttgatcccgacatgattctcagcatggatggtggtggcccagcatggacagtgcagcaataacagtcctgctcctgggccagtgtggtgaagtccatgcccccagctcttacctgagctggcttgctccaggggagaggggaccaaagactaggcccttggttgcttttagagga

SEQ ID NO: 37567 - DNA, 344 bp, Homo sapiens
tgcctggggctttcctgctcctggtcctcagtgtcagtttcgctgtcactttctccaggaaggctgatgtccttagactaggctatgtgttctattgcattgctcctttaaagtaacattttaaatctttaaaaataacattcatctttaacatagttgctttttaaaaatcatctctcatggctgctcaattataacctcaaactgccatgccagagagcatatctgccttgtttactgatatggtttggctgtgtccccacccaaatctcatctttaattgtagttcccataatccccgtgtgtcatgggaggcacctggtgggaggtaattgaatcatggg

SEQ ID NO: 37568 - DNA, 367 bp, Homo sapiens
tttcctataaaacaaatctttcatttattccaacctgaactaatccaaaaaatgaagaattatgcattggctaaattacttcttcaaaggaatgcctaattttttcttccttagcaagtgacaggattgcatttaagtgatatcaatggtatcatgtccaactcagtcccaaaatgtttttgtatatccctacatacttacgctgtactcctttacatttatggtataatgccatcatttgggagtatgaatgggagaaggtatttgaggaaaaatgagttaggctcgttctctaatctatgggagctctttaatactacctctggcaagggccaagtaaatgactttaaattccactaaatttcat

SEQ ID NO: 37569 - DNA, 208 bp, Homo sapiens
attttgtagggaggcaacaaagttcagctctgaccttgcatttagccacagtctttggagagctgacattacctttactggtgctcctggttaccgtctgattaaatcatcctcctatcacagttattcaagcaaggcacgccaactggacttgttaatatttgaaagttttctttcatgtttcttaagtgttcaagatattacaagg

SEQ ID NO: 37570 - DNA, 389 bp, Homo sapiens
taagacagggtcttgctctgtcacgtaggttggagtgcagaggcacgatcacagctcacagcagccctgaccttctgggctcaagcaatccttctgtctcagcctcctaagcagctgggaccacctcccagggtgtttgccagctcattaaaaatttgtgtgtgtgtggagatggggtcttgctatgttccttaggcttgtctggtctggaactcctgggctcatacactcctctcgccccagcctcccaaaatactgggattacaagtgtgaaccactgcacctggcctacttttttaaaaatcaacttcctgtatgaagtcatttccaacaactttagcctattttaattcctccattctctgaaactccatcccaggttaatgttc

SEQ ID NO: 37571 - DNA, 134 bp, Homo sapiens
aaggccctccctgggcacgtgagccttcagggggctggtgggggagcgtgttgttgagttcctgccatggcaagaagtacccctcagagttcctctttggtcccatccagttgctagctttgccttggacagat

SEQ ID NO: 37572 - DNA, 467 bp, Homo sapiens
gggaaagatctcccacattgataaaagctggtggcttagctatgaagcaaagtcagatctctggaatcttgccaatgcccaaaactcaggccctggtgatatgagagttctgattctacgttccttcaaatatttgaagctagaggcaaactgaatcaaactaaaactgcagtgaagccccagtctagaattcatatacatcagattgagccaccattcaagtggcctgaaaaaaaaacaaagggcatgctctgttttggaagtaaacattttcttcaatttcttttttttttcaacataaaacgtccatcatccaatcaaatatacaagacgtgcaaaagcaagaaaataagattcatggtaagggagaggaagggctcaatagaagcagaactagaaaagacccagatgttgaattatcagtttggatccttaaaataactgattaaaaatgaaagaaaaaacag

SEQ ID NO: 37573 - DNA, 458 bp, Homo sapiens
gaatgaggaaaactaggtcacttgcttgtaccttaagtagcaaaagattctgatgcagtttttgcagcatgctttgatgagacaggactcaaaagatggaaaactacaagacataagagagcattttcaaaagatgttcagcagacacaaataattactgtacccatcgacacatgaatacgcagattgatgcagagagtctagtgcatagtacagtattctccttatttatcacccttacctttcacaccttgagcttgaagagtggaaatcagaaattatttcagtccaggatgctttccattacacctcctctatgtcaaaagttccagaatagagcaaatattcatgggcatatcaaggttttctttctggaatgtcccaatgaacttgtttgttttctggaaatgaccctctattatgtggtcctaaatgtttcctgctgtttttctacttgt

SEQ ID NO: 37574 - DNA, 596 bp, Homo sapiens
aacaaatctactgtcatcttaggaaaattgccagtgagaacctgacacttgaatagcctcaggccctaaagaccttgcaaggcagccactgtggatggcacatctgggttggaacccaccactgacatcagtcaatacagttgctaataacaagtttcaattttttgagtacttcctttaggtcagggcctgtgctacatgcttttcattgtgccatcttatttatcttcaaataatctactgagatagagattgctaaccccattttatagatgaagaaactgaggcaaagggaagctacataactcgctgcaggtcacaaagccagacagtgacaaagcaggggtgccaatgaattctgagtgactccagagctcaagctcctaagcattaggcaaaactgcctctcagttacaaaagagaagctggagtcaacaaacgtaaagacttctacaaggttctggtgagaacctcactgccattcactcaaggaaaaaaatatcacggccctggcatcaaactgtgtccctgtgctaggacactgggacctgtgaactacagaccatatttccattcttttatttatttattttttt

SEQ ID NO: 37575 - DNA, 648 bp, Homo sapiens
tatgtaatataatttaattctacattaagttccttctgggaaatatggattatttctataatagtttcctaattttctaggaagtggacagttcttgtgtaattataatttttatttgggggggttgaaatgtgttttgttatgtttagcagcatatttttgaattttggataggaaaggtaaacatcagaagaaatagaggttagcagataaaataactaaaattaaaattaaccttttcgtttcaactaatgatttgattattaaacttattaatgcacattaaaaactgacaggttttaaggccctacatgacttaacattttgcctaagatgaacaactgccctttaatcaattttcgggacaagggatagggtgttgataacacagcttaggtttttagcagactactcatttgttagtaataactttgggtgtaaacatgaatgtttttctttctaagttcccaaaggtaaacatttccttttttggttagttccatcatgggtcagctaaatagcttactgtggaaaagaaaaatacaagattcacattctcgttataacttaaggtacctttctagttattataaattagcatactgaggataatagattgtaagaagtggcctgttttagtactgaatt

SEQ ID NO: 37576 - DNA, 340 bp, Homo sapiens
ttactggggtaggggcatggacatggctggccatatgccctgaaagaggagcagggttctattgccttgatggcccccacagcgggtttgtatgtgccatgtcaccaggcctgagcatggagtttcaggtagagtcatgtcagaagtgacaatggcaggctgggcgtggtagctcactcctgtaatcccagcactttgggaggccaaggcaggcagatcacctgaggtcaggagttcgagaccagcctgaccaacatggtgaaaccccatctctactaaaaatacaaaattagctgtgtgtggtggtgtgcgcctgtagtcccacctacttgggcggcta

SEQ ID NO: 37577 - DNA, 492 bp, Homo sapiens
taaaaacagaaaaccttctagattacattatttacacaatccctaccaagctgggaaaccacaaagaagaattctgcggggcgatgataaactggagcattgctcttatcatagacttatcctggggtgtgtacctaccattgctcccaactgatcctgtggcttagtaggggctcattgccttctcattcagaaagtccgacatagagactgtcaggagaaaatcaacactgactgagctctggctccaccttgtgtctaaacctggtaaatggccagataaattggtgtattcagagtacctcatgaatcaatgcataaagcctggctggatggtatgtacctatagtcctagctactttggaggctgagggaggaggctcacttgagcccaagaatttggggctatagtgtactatgatcatgcctgtgagtaaccactgtacttcagcctaggcaacatagtgagactccatctcctttaaaaaaaaa

SEQ ID NO: 37578 - DNA, 471 bp, Homo sapiens
tcctgaccttgtgatccgcccacctcaacctcccaaagtgctaggattacaggcgtgagccaccacgcccagcaaaaaaaaaaaaaaaaaacaaaaaactaatggaatcattctcgacatccctttcttgcaacttaaacctacctttggccctatcttcaaaatatttcagaatccaaccacttctcaccattttcacaactaccaccttgacccaagccaccatcttttcccacctggattattgcaacagcctcctaattgggttaccttcatctattttacctaccccaaagtcagttctttacatagcaccaagagtgattcttttaaaacttaagttaaatgacctcattcctattcggataaccctctagcagcttcccatctcattaagagtaaaaataaaaatctttcagtggccttataaggcttcacatgagtggacctcatctcatttacttgcccttt

SEQ ID NO: 37579 - DNA, 415 bp, Homo sapiens
gttgtttgtctcctagtggcagttaatagtatatggttcttcattcctttttcattcaaacagctttcattgagtgcctacaaatgtgtgataagaagagctcagcttagtgtttagagactttctcacgttatgcaggcttcttacaaggtttggtggaccttgaaatccatttgcattttttggaggggtggggatggacagctctggcagaatttttatgccataaaaatggctgaagtaaatgttatctgtaatttttctcaagaaatgattgcttgatcaaacatacaataaatagatttttttacaaagcttaaaagaatctattcccagcccacccctctgtcttagctcgggaaataaacaaaaattaaaattacctgtaaacctcaggtgtgggtttgaagtatta

SEQ ID NO: 37580 - DNA, 449 bp, Homo sapiens
ctctactaaaattagatgggagtgaattgaagagggtaatggcagtccagtgtatatgtgggaactcaactcatagtactacctcaagaagtgggagctctattctcacattgccggtagtggaaactggaagcaagatgaagactcattatgggagctggtacagtgcagacccattctccctgtacccaccctggcctcccatctgtaagtcatgcatctgcaacaactatctccagacaggagcagcgtctcagaggtagagcaatgcctcaagtggctgacaataccagggagaaataaggagcgcttaagcctggaaaactagctgtggaggcgtcttttcttgtatcatactctacacatcttccagtcttactgaaaaacacatggagtgtaagttccaacatggtgaaaccccttctctactaaaattacaaaaaaaaaaa

SEQ ID NO: 37581 - DNA, 775 bp, Homo sapiens
ctctactaaaattagatgggagtgaattgaagagggtaatggcagtccagtgtatatgtgggaactcaactcatagtactacctcaagaagtgggagctctattctcacattgccggtagtggaaactggaagcaagatgaagactcattatgggagctggtacagtgcagacccattctccctgtacccaccctggcctcccatctgtaagtcatgcatctgcaacaactatctccagacaggagcagcgtctcagaggtagagcaatgcctcaagtggctgacaataccagggagaaataaggagcgcttaagcctggaaaactagctgtggaggcgtcttttcttgtatcatactctacacatcttccagtcttactgaaaaacacatggagtgtaagttccaacaatcaaatctgtacctccttcaactacaccctaactccaaggccagttactttctcaagtcaagaaagtttcattctaataggaatctcagtggaaaaaactgcacttatggtaaagaattttcacatacttgagtactctttgaaacagagtttaaagaaaacatcttcacttgaggaaacagctaacagaattggaacagacctttagaaatagcataatactgtcagctgggtgcagtgggtcacgcctgtaatcccagcactttgggaagccgaggcagatggatcacctgaggttaggagttcatgaccagcctggccaacatggtgaaaccccttctctactaaaattacaaaaaaaaaaa

SEQ ID NO: 37582 - DNA, 552 bp, Homo sapiens
ttgcctccgggaccagcgcttccaaattctctggggcgtcccggcgcgcacacgctcctgaggcctcggcgttctgaggaaaggggctggcgtggcgacccgggtcctcgaggccgagatctggctgtggcccgcgaagccccgcttgcccgcgccagcgtcttgtcaccccgagccgagggcctgcgcgcggccgacagatatgggatgctggaggacatctgggggccacaaatgctccttctcctggagacgcaactcaagttctcatggagttttcattgtctcgtgcaatgccatcgaccttgaatttcagcataggacccatatgaagtgccactgttaatgctgggagcactccaggaagcagagaaaagttatgacatttcaagaaaaatctgaattgcttgatatgttccacagattgaggtctgtacctatggttgcccactatttcaatagtcagtgtaaggactattgtaaaaaaaaaataaaataaaataaaggaaattggtgaagctgttgggggtgggggagaagtgcgcctgggtg

SEQ ID NO: 37583 - DNA, 332 bp, Homo sapiens
gtactcccgggcgctggcagcccacggggagggttcgcggcgcaggtgaacgcggaggtagaatcagacagggcagtgagtgcgcccggggctggatctggctcagccgctggtggattcggaacccgggaggcccccaggcccggtgggcttcagttcccacgctctgtaaaatggggcttggactggaattctagtgtccattgagattctgttgcagagcagccccctggctctgtgtgacctacgagttccttcctctgtaaaatacggaggctgagaccgatgatcctaacgtctcttcctacggtgcagtatgttacacactgctg

SEQ ID NO: 37584 - DNA, 521 bp, Homo sapiens
ttgcctccgggaccagcgcttccaaattctctggggcgtcccggcgcgcacacgctcctgaggcctcggcgttctgaggaaaggggctggcgtggcgacccgggtcctcgaggccgagatctggctgtggcccgcgaagccccgcttgcccgcgccagcgtcttgtcaccccgagccgagggcctgcgcgcggccgacagatatgggatgctggaggacatctgggggccacaaatgctccttctcctggagacgcaactcaagttctcatggagttttcattgtctcgtgcaatgccatcgaccttgaatttcagcataggacccatatgaagtgccactgttaatgctgggagcactccaggaagcagagaaaagttatgacatttcaagaaaaatctgaattgcttgatatgttccacagattgaggtctgtacctatggttgcccactatttcaatagtcagtgtaaggactattgtaaaaaaaaaataaaataaaataaaggaaattggtgaagct

SEQ ID NO: 37585 - DNA, 400 bp, Homo sapiens
cagagatgtcacttcaccagttttgtactcctaactccatctcagcctaaaattggcacaattggtaccagtggcccacgaacgtaggtggtaagacagcatttgcaggctgagtgactcactgtctggctggctcggaggcccccatccctggtggataggtggcacagacagtccctggcacaagaaggctgtccagtgatgaagacttcagatgaaatggcatgctggtgcaggggaacgcaatgactggtgggtgatttgggtgtctcaaatatgggaagggtggataaaagagacaaggacagtgggcttccatggttattgctgagttggattgacgtcctgcaagtggataatgaaaagctgaggtcaattaacaaacaaaactaagtgtgag

SEQ ID NO: 37586 - DNA, 353 bp, Homo sapiens
gacaagttatttctacaaggatactacgtgattccagtggtacaagtcgtggtgttggctttgctaggatggagtccagcctgggcaacattcatgagactgtatctctataaacaaacaaacaaacaaacaaataaaacagaaatagtggcacaacttactttgctacgtatttgggagaacgcatattagttaatcaaaatcatttgctgaaggttgtctacatgctgtataaacaagctagatagactctacctacatcaaatatgcaaaactagtgaaataattacagaagagtaaccatttgcttccaggctggcttcttcttccctggagagcaaattggagtttat

SEQ ID NO: 37587 - DNA, 967 bp, Homo sapiens
tttgagacgctctcgtcacccggcctggagtgcagtggtgtgatcacggctcaacctgctgggctcaagcagtcctcctgtctcagcttcctgagtagccgggtctatgctactgggtctacgcatggtgtgtgccaccatcccggctaattttttatgttttgtagagatggggtctcactatgttgcccaagctggtcttgaactcctgggctcaagcagtcctccaaccttggcctcccaaagtgctgagattacaggcaagagccaccatgcctggccttagatggtttttggagctggagttagataaggtttccccatctaaggcaattctctgctatacagattgggggctctactggcagttgtggtcctagggaggtagaatgcaaggcctgggatgagccatgctattccatggttctctaccagggtctgcactgttggtgacataaccacgcaacagaatcctgcatcaccatggaaaacctagttctggacggaggccttggaaggcttggagggcaacaaccacagaacactagtgctatgggctgaatacttttgtgttccctgctctgccaaagtcatatgctcaaatcccactccctggtttcactgtattagaaggtagagcccttgggaggggattaggtcatgagggtggactccttgtgaatggaataatgtgcttagaagagaccccatagagatccctggtcccttccatcatgtgaggacatagaagctggcagttgggccctcaccagacaccaaatctgctgatgtcttgcttctgaacttccagcctcgagaactgtgaagaatgaatttctgttgtttaaaaggtaatgggagttagttacagcagcctgaatggactgagccactagacagggaggagagcaccagctacagaaaaccttctgtcgcgatgagcctcgagaccccaattcctctctct

SEQ ID NO: 37588 - DNA, 429 bp, Homo sapiens
tcccacttcccatcatggatggcttcaactcagctcccgcagtattctggtcacctctcacccagagcacgtactgctctgaggttcctgccagctcgtctgtctgttctttaaagcatcctgaggagtggacaggccctgtttctgtgttgctgcagcggccagcatagacgagatatgcactatttcttgaaagaactgtaacgtccgatcgaggtggaagcactcacttgtgctttgatgcatctcccctccaaacacaacagtgaaaagcctcgagaactgtgaagaatgaatttctgttgtttaaaaggtaatgggagttagttacagcagcctgaatggactgagccactagacagggaggagagcaccagctacagaaaaccttctgtcgcgatgagcctcgagaccccaattcctctctct

SEQ ID NO: 37589 - DNA, 413 bp, Homo sapiens
actaggctggctttgtagccagacaatctgggttcaaattccagatttgactctactactatcgagttgtggaatcagaggcaagttgcttacccctcagaggctcagtttccacatctgtaagatgggaacaggacaagtacctggttgtgtagactaaaacatgaaaatgcatgcaaaatacattgtgcctcctctggcacaaagtaagcactcaataaatgactgttgttgctatttgaaattgtaccatttgtgctatgagcagatcagactagtcttttgagttgggaagttgtattgatgttaagaactttcatggggattgaaaatcggggatttagtctcttcaaatggcctcttttaatgtatatggaggaagggacagagggaagagtgagatttagacaagt

SEQ ID NO: 37590 - DNA, 2729 bp, Homo sapiens
gggaggatgcattggcggctgggatgaatttgagctgacggaaggaggcgttcggagaggaaagggaggaaaaggaaaggcgaccacagttcccatgatgcctggaggggagactacatttcccattattcccctggaagggacgtgaggatgaaagactgcaagtcccgcgatgctctcggctggcaggtggcggagattgcaccggaagacgcttcctgggtttgaggagttcagtgactgctattgaaccaccaaaagtccattatgaaactgtattgcctgtcagggcacccaaccttaccatgcaatgtgctcaaattcaaatcaaccaccattatgttggactgcggactggacatgacttctaccctcaatttccttcctttgccacttgttcaaagtcccaggctgtccaatcttcctggctggtccctgaaggatggaaatgctttcttggacaaggagctaaaggagtgctcgggtcatgtatttgtggattctgtgccggaattctgtttaccagagacggagctaatagatctgtctacagtagatgtgattctcatctctaactatcactgtatgatggcgctgccatacatcaccgagcacaccggcttcacaggcacagtgtatgccacggaacccaccgtccagatcggcaggcttctcatggaagagctggtgaatttcattgaaagagtgccaaaggctcagtctgcctccttgtggaagaataaggacattcagaggctgttaccttctcctctcaaggatgcagtggaagtctcaacctggagaagatgctatacaatgcaagaggtgaactctgcccttagtaaaatccagctggtgggatattctcagaaaattgagctttttggtgcggtccaggtgactcctctgagctctggctatgcccttgggagctccaactggatcatccagtctcattacgagaaagtgtcttatgtctctggatcctccttgcttaccacacacccccagcccatggaccaagcttctctcaaaaacagcgatgttcttgttctgacagggcttacccagatccccactgcaaacccagatggaatggtgggagagttctgcagcaacctagctctgacagtccggaatggaggaaacgtgttggttccctgctacccttctggagtgatctatgacctcctggagtgcctatatcagtacatcgactcagccgggctttccagcgtccccctctacttcatctcccctgtggccaacagttcactggagttttcccagatctttgctgagtggctttgtcacaacaaacagagtaaggtgtatcttccagaaccaccttttcctcatgcagagctcattcagaccaataagctgaagcactaccccagcatccacggagacttcagcaacgactttagacagccctgtgtggtgttcaccgggcacccttccctccgcttcggggacgtggtccacttcatggagctctggggaaaatctagtctcaataccgtcatattcacggaaccagacttctcctacctggaagccctggctccttaccagccgctggccatgaaatgcatctactgccccatcgacacccggctgaacttcatccaggtgtcaaagctgcttaaagaagtgcagcccctgcacgtggtgtgtcctgagcagtacactcagccgcccccagcccagtcccacaggatggacctcatgatcgactgccagccccccgccatgtcctatcggcgggctgaggttctcgccctgcccttcaaacgtcggtacgagaagatcgagatcatgccagagctcgcagattcactggtgcccatggagatcaagcctggcatctccttggcaactgtctcggccgtgctgcacaccaaagataacaagcacttgcttcagccccctcctcggcccgcccagcccacgagcgggaagaagagaaagcgggtgagcgatgacgtaccagactgcaaagtcctgaagcctttgttgagcggttccatccctgtggagcagttcgtgcagaccctggagaagcatggcttcagtgatattaaggtggaggacacagccaagggccatatcgtcctgctccaggaggctgagacgctcatccagattgaagaagactcgacccatatcatctgcgacaatgacgagatgctcagagtgcgactgcgggaccttgtcctcaaattcttacagaagttctgagtgggccatctgagctacttccctgaaatcctgcagtccctcactggctgccctcacaagccacctgaggagtggcatgagaggccattaactgtgtctttgtggtgtcctctggcttaaggagtgaagaggtggctcttgagggaaatggtctggacttattcccagcactgtttcaggcaagaactttccctttcaacttcaggctcattttcttctcaactctggctctctcaaggagctggagggtggcagaagtgggacaggagaagttttccaagaggttcatgggaggcggaggtgactggctggctgtcttgcatcagtcccaggcctcggccaggggagccagcctttggtttcgtttacttgcctacagtgctgtacgcaataagatgatgatcccaaaatatggtaaagtgaacccatctgtctgcattttctactctgagcccatttgttaataaacacttatttttatataa

SEQ ID NO: 37591 - DNA, 783 bp, Homo sapiens
  misc_feature (20)..(20): n is a, c, g, or t
  misc_feature (23)..(23): n is a, c, g, or t
tcggctggtagagccggggntanaaatgagctttttggtgcggtccaggtgactcctctgagctctggctatgcccttgggagctccaactggatcatccagtctcattacgagaaagtgtcttatgtctctggatcctccttgcttaccacacacccccagcccatggaccaagcttctctcaaaaacagcgatgttcttgttctgacagggcttacccagatccccactgcaaacccagatggaatggtgggagagttctgcagcaacctagctctgacagtccggaatggaggaaacgtgttggttccctgctacccttctggagtgatctatgacctcctggagtgcctatatcagtacatcgactcagccgggctttccagcgtccccctctacttcatctcccctgtggccaacagttcactggagttttcccagatctttgctgagtggctttgtcacaacaaacagagtaaggtgtatcttccagaaccaccttttcctcatgcagagctcattcagaccaataagctgaagcactaccccagcatccacggagacttcagcaacgactttagacagccctgtgtggtgttcaccgggcacccttccctccgcttcggggacgtggtccacttcatggagctctggggaaaatctagtctcaataccgtcatattcacggaaccgacttctcctacctgggagcctggttcttacaggcgctggcctgaaatggtctatgcccttgaaccggtgaatctccagggtaggcgttag

SEQ ID NO: 37592 - DNA, 1182 bp, Homo sapiens
gggaggatgcattggcggctgggatgaatttgagctgacggaaggaggcgttcggagaggaaagggaggaaaaggaaaggcgaccacagttcccatgatgcctggaggggagactacatttcccattattcccctggaagggacgtgaggatgaaagactgcaagtcccgcgatgctctcggctggcaggtggcggagattgcaccggaagacgcttcctgggtttgaggagttcagtgactgctattgaaccaccaaaagtccattatgaaactgtattgcctgtcagggcacccaaccttaccatgcaatgtgctcaaattcaaatcaaccaccattatgttggactgcggactggacatgacttctaccctcaatttccttcctttgccacttgttcaaagtcccaggctgtccaatcttcctggctggtccctgaaggatggaaatgctttcttggacaaggtaatatctaagactacaaactaaagcctatctacagccagtggaaagctatcttctcataccagagccaccctgtagtagtgtgactgatggctttttttttttttcctctctgaaaatccccaagatctatgctagggtcttcagaacatggtaactgctgtttttaagcatgtttttagagaatgtcattgttctgattcagatccattttgctcatgtgtagaaatctaagtacttctgctgcaaataccttttatcaccacagaaagacaactattatttctagaattgcaatgagtgtttcaaagacaaggctttttaaagaattcaatccagttcattttgtgattgcaaagagtaaaacctttttttgaataacttttaaaatcctcaagcaggtgagttttaaactgcttctatcaagggtcagatcaggtagggctttgtaaaaagcttgggtcttttttgggtaatgagaggccacagaaggttacagaaggacagtggcattgtcagatcggatcactctggccactgtgtggggaacggtccaggagcagagtgtttgacttccccagcagtgccttcttgtgcaggggacagtactcttaggtaaatttgagtagtgggtctccgacactatgatctgtgatcccgtttcaacctgtcctgatagcctagaatggacaatctttatagatgattaaaaaaaaa

SEQ ID NO: 37593 - DNA, 2803 bp, Homo sapiens
gggaggatgcattggcggctgggatgaatttgagctgacggaaggaggcgttcggagaggaaagggaggaaaaggaaaggcgaccacagttcccatgatgcctggaggggagactacatttcccattattcccctggaagggacgtgaggatgaaagactgcaagtcccgcgatgctctcggctggcaggtggcggagattgcaccggaagacgcttcctgggtttgaggagttcagtgactgctattgaaccaccaaaagtccattatgaaactgtattgcctgtcagggcacccaaccttaccatgcaatgtgctcaaattcaaatcaaccaccattatgttggactgcggactggacatgacttctaccctcaatttccttcctttgccacttgttcaaagtcccaggctgtccaatcttcctggctggtccctgaaggatggaaatgctttcttggacaaggagctaaaggagtgctcgggtcatgtatttgtggattctgtgccggaattctgtttaccagagacggagctaatagatctgtctacagtagatgtgattctcatctctaactatcactgtatgatggcgctgccatacatcaccgagcacaccggcttcacaggcacagtgtatgccacggaacccaccgtccagatcggcaggcttctcatggaagagctggtgaatttcattgaaagagtgccaaaggctcagtctgcctccttgtggaagaataaggacattcagaggctgttaccttctcctctcaaggatgcagtggaagtctcaacctggagaagatgctatacaatgcaagaggtgaactctgcccttagtaaaatccagctggtgggatattctcagaaaattgagctttttggtgcggtccaggtgactcctctgagctctggctatgcccttgggagctccaactggatcatccagtctcattacgagaaagtgtcttatgtctctggatcctccttgcttaccacacacccccagcccatggaccaagcttctctcaaaaacagcgatgttcttgttctgacagggcttacccagatccccactgcaaacccagatggaatggtgggagagttctgcagcaacctagctctgacagtccggaatggaggaaacgtgttggttccctgctacccttctggagtgatctatgacctcctggagtgcctatatcagtacatcgactcagccgggctttccagcgtccccctctacttcatctcccctgtggccaacagttcactggagttttcccagatctttgctgagtggctttgtcacaacaaacagagtaaggtgtatcttccagaaccaccttttcctcatgcagagctcattcagaccaataagctgaagcactaccccagcatccacggagacttcagcaacgactttagacagccctgtgtggtgttcaccgggcacccttccctccgcttcggggacgtggtccacttcatggagctctggggaaaatctagtctcaataccgtcatattcacggaaccagacttctcctacctggaagccctggctccttaccagccgctggccatgaaatgcatctactgccccatcgacacccggctgaacttcatccaggtgtcaaagctgcttaaagaagtgcagcccctgcacgtggtgtgtcctgagcagtacactcagccgcccccagcccagtcccacaggatggacctcatgatcgactgccagccccccgccatgtcctatcggcgggctgaggttctcgccctgcccttcaaacgtcggtacgagaagatcgagatcatgccagagctcgcagattcactggtgcccatggagatcaagcctggcatctccttggcaactgtctcggccgtgctgcacaccaaagataacaagcacttgcttcagccccctcctcggcccgcccagcccacgagcgggaagaagagaaagcgggtgagcgatgacgtaccagactgcaaagtcctgaagcctttgttgagcggttccatccctgtggagcagttcgtgcagaccctggagaagcatggcttcagtgatattaaggtggaggacacagccaagggccatatcgtcctgctccaggaggctgagacgctcatccagattgaagaagactcgacccatatcatctgcgacaatgacgagatgctcagagtgcgactgcgggaccttgtcctcaaattcttacagaagttctgagtgggccatctgagctacttccctgaaatcctgcagtccctcactggctgccctcacaagccacctgaggagtggcatgagaggccattaactgtgtctttgtggtgtcctctggcttaaggagtgaagaggtggctcttgagggaaatggtctggacttattcccagcactgtttcaggcaagaactttccctttcaacttcaggctcattttcttctcaactctggctctctcaaggagctggagggtggcagaagtgggacaggagaagttttccaagaggttcatgggaggcggaggtgactggctggctgtcttgcatcagtcccaggcctcggccaggggagccagcctttggtttcgtttacttgcctacagtgctgtacgcaataagatgatgatcccaaaatatggtaaagtgaacccatctgtctgcattttctactctgagcccatttgttaataaacacttatttttatataaaaaacacgcccacccccccaaccaccacaaaaaggggggcgccaaaaaaacccccgggggccccataccccccc

SEQ ID NO: 37594 - DNA, 2608 bp, Homo sapiens
gggaggatgcattggcggctgggatgaatttgagctgacggaaggaggcgttcggagaggaaagggaggaaaaggaaaggcgaccacagttcccatgatgcctggaggggagactacatttcccattattcccctggaagggacgtgaggatgaaagactgcaagtcccgcgatgctctcggctggcaggtggcggagattgcaccggaagacgcttcctgggtttgaggagttcagtgactgctattgaaccaccaaaagtccattatgaaactgtattgcctgtcagggcacccaaccttaccatgcaatgtgctcaaattcaaatcaaccaccattatgttggactgcggactggacatgacttctaccctcaatttccttcctttgccacttgttcaaagtcccaggctgtccaatcttcctggctggtccctgaaggatggaaatgctttcttggacaaggagctaaaggagtgctcgggtcatgtatttgtggattctgtgccggaattctgtttaccagagacggagctaatagatctgtctacagtagatgtgattctcatctctaactatcactgtatgatggcgctgccatacatcaccgagcacaccggcttcacaggcacagtgtatgccacggaacccaccgtccagatcggcaggcttctcatggaagagctggtgaatttcattgaaagagtgccaaaggctcagtctgcctccttgtggaagaataaggacattcagaggagctttttggtgcggtccaggtgactcctctgagctctggctatgcccttgggagctccaactggatcatccagtctcattacgagaaagtgtcttatgtctctggatcctccttgcttaccacacacccccagcccatggaccaagcttctctcaaaaacagcgatgttcttgttctgacagggcttacccagatccccactgcaaacccagatggaatggtgggagagttctgcagcaacctagctctgacagtccggaatggaggaaacgtgttggttccctgctacccttctggagtgatctatgacctcctggagtgcctatatcagtacatcgactcagccgggctttccagcgtccccctctacttcatctcccctgtggccaacagttcactggagttttcccagatctttgctgagtggctttgtcacaacaaacagagtaaggtgtatcttccagaaccaccttttcctcatgcagagctcattcagaccaataagctgaagcactaccccagcatccacggagacttcagcaacgactttagacagccctgtgtggtgttcaccgggcacccttccctccgcttcggggacgtggtccacttcatggagctctggggaaaatctagtctcaataccgtcatattcacggaaccagacttctcctacctggaagccctggctccttaccagccgctggccatgaaatgcatctactgccccatcgacacccggctgaacttcatccaggtgtcaaagctgcttaaagaagtgcagcccctgcacgtggtgtgtcctgagcagtacactcagccgcccccagcccagtcccacaggatggacctcatgatcgactgccagccccccgccatgtcctatcggcgggctgaggttctcgccctgcccttcaaacgtcggtacgagaagatcgagatcatgccagagctcgcagattcactggtgcccatggagatcaagcctggcatctccttggcaactgtctcggccgtgctgcacaccaaagataacaagcacttgcttcagccccctcctcggcccgcccagcccacgagcgggaagaagagaaagcgggtgagcgatgacgtaccagactgcaaagtcctgaagcctttgttgagcggttccatccctgtggagcagttcgtgcagaccctggagaagcatggcttcagtgatattaaggtggaggacacagccaagggccatatcgtcctgctccaggaggctgagacgctcatccagattgaagaagactcgacccatatcatctgcgacaatgacgagatgctcagagtgcgactgcgggaccttgtcctcaaattcttacagaagttctgagtgggccatctgagctacttccctgaaatcctgcagtccctcactggctgccctcacaagccacctgaggagtggcatgagaggccattaactgtgtctttgtggtgtcctctggcttaaggagtgaagaggtggctcttgagggaaatggtctggacttattcccagcactgtttcaggcaagaactttccctttcaacttcaggctcattttcttctcaactctggctctctcaaggagctggagggtggcagaagtgggacaggagaagttttccaagaggttcatgggaggcggaggtgactggctggctgtcttgcatcagtcccaggcctcggccaggggagccagcctttggtttcgtttacttgcctacagtgctgtacgcaataagatgatgatcccaaaatatggtaaagtgaacccatctgtctgcattttctactctgagcccatttgttaataaacacttatttttatataa

SEQ ID NO: 37595 - DNA, 2207 bp, Homo sapiens
tacctgccaccacacctggctaatttttgtatttttagtagagacagggtttttccatgttggtcaggctggtctcgaactcctgacctcaagttacctggccgccttggggcctcccaaagtgctgggattataggcgtgagccaccgcgcctggcccagattccttttttatgtgctttctcaacactgtgttcttttccttcttaagacatttgggaatgtggtcacactttttgtgagttttaactcttgcattagagccccaagaaagcaggtcatgacttttttgcccactcttatatcctaaacacttagcatgttgctttgcgaaatagtagttgctcagaacattgagctttttggtgcggtccaggtgactcctctgagctctggctatgcccttgggagctccaactggatcatccagtctcattacgagaaagtgtcttatgtctctggatcctccttgcttaccacacacccccagcccatggaccaagcttctctcaaaaacagcgatgttcttgttctgacagggcttacccagatccccactgcaaacccagatggaatggtgggagagttctgcagcaacctagctctgacagtccggaatggaggaaacgtgttggttccctgctacccttctggagtgatctatgacctcctggagtgcctatatcagtacatcgactcagccgggctttccagcgtccccctctacttcatctcccctgtggccaacagttcactggagttttcccagatctttgctgagtggctttgtcacaacaaacagagtaaggtgtatcttccagaaccaccttttcctcatgcagagctcattcagaccaataagctgaagcactaccccagcatccacggagacttcagcaacgactttagacagccctgtgtggtgttcaccgggcacccttccctccgcttcggggacgtggtccacttcatggagctctggggaaaatctagtctcaataccgtcatattcacggaaccagacttctcctacctggaagccctggctccttaccagccgctggccatgaaatgcatctactgccccatcgacacccggctgaacttcatccaggtgtcaaagctgcttaaagaagtgcagcccctgcacgtggtgtgtcctgagcagtacactcagccgcccccagcccagtcccacaggatggacctcatgatcgactgccagccccccgccatgtcctatcggcgggctgaggttctcgccctgcccttcaaacgtcggtacgagaagatcgagatcatgccagagctcgcagattcactggtgcccatggagatcaagcctggcatctccttggcaactgtctcggccgtgctgcacaccaaagataacaagcacttgcttcagccccctcctcggcccgcccagcccacgagcgggaagaagagaaagcgggtgagcgatgacgtaccagactgcaaagtcctgaagcctttgttgagcggttccatccctgtggagcagttcgtgcagaccctggagaagcatggcttcagtgatattaaggtggaggacacagccaagggccatatcgtcctgctccaggaggctgagacgctcatccagattgaagaagactcgacccatatcatctgcgacaatgacgagatgctcagagtgcgactgcgggaccttgtcctcaaattcttacagaagttctgagtgggccatctgagctacttccctgaaatcctgcagtccctcactggctgccctcacaagccacctgaggagtggcatgagaggccattaactgtgtctttgtggtgtcctctggcttaaggagtgaagaggtggctcttgagggaaatggtctggacttattcccagcactgtttcaggcaagaactttccctttcaacttcaggctcattttcttctcaactctggctctctcaaggagctggagggtggcagaagtgggacaggagaagttttccaagaggttcatgggaggcggaggtgactggctggctgtcttgcatcagtcccaggcctcggccaggggagccagcctttggtttcgtttacttgcctacagtgctgtacgcaataagatgatgatcccaaaatatggtaaagtgaacccatctgtctgcattttctactctgagcccatttgttaataaacacttatttttatataa

SEQ ID NO: 37596 - DNA, 2066 bp, Homo sapiens
catttggatcaaatggacaaattactagaaaggaatgctgtagaacatgaagaaatgttcacctggtagttgacattgtgatccatttgcaggctgttaccttctcctctcaaggatgcagtggaagtctcaacctggagaagatgctatacaatgcaagaggtgaactctgcccttagtaaaatccagctggtgggatattctcagaaaattgagctttttggtgcggtccaggtgactcctctgagctctggctatgcccttgggagctccaactggatcatccagtctcattacgagaaagtgtcttatgtctctggatcctccttgcttaccacacacccccagcccatggaccaagcttctctcaaaaacagcgatgttcttgttctgacagggcttacccagatccccactgcaaacccagatggaatggtgggagagttctgcagcaacctagctctgacagtccggaatggaggaaacgtgttggttccctgctacccttctggagtgatctatgacctcctggagtgcctatatcagtacatcgactcagccgggctttccagcgtccccctctacttcatctcccctgtggccaacagttcactggagttttcccagatctttgctgagtggctttgtcacaacaaacagagtaaggtgtatcttccagaaccaccttttcctcatgcagagctcattcagaccaataagctgaagcactaccccagcatccacggagacttcagcaacgactttagacagccctgtgtggtgttcaccgggcacccttccctccgcttcggggacgtggtccacttcatggagctctggggaaaatctagtctcaataccgtcatattcacggaaccagacttctcctacctggaagccctggctccttaccagccgctggccatgaaatgcatctactgccccatcgacacccggctgaacttcatccaggtgtcaaagctgcttaaagaagtgcagcccctgcacgtggtgtgtcctgagcagtacactcagccgcccccagcccagtcccacaggatggacctcatgatcgactgccagccccccgccatgtcctatcggcgggctgaggttctcgccctgcccttcaaacgtcggtacgagaagatcgagatcatgccagagctcgcagattcactggtgcccatggagatcaagcctggcatctccttggcaactgtctcggccgtgctgcacaccaaagataacaagcacttgcttcagccccctcctcggcccgcccagcccacgagcgggaagaagagaaagcgggtgagcgatgacgtaccagactgcaaagtcctgaagcctttgttgagcggttccatccctgtggagcagttcgtgcagaccctggagaagcatggcttcagtgatattaaggtggaggacacagccaagggccatatcgtcctgctccaggaggctgagacgctcatccagattgaagaagactcgacccatatcatctgcgacaatgacgagatgctcagagtgcgactgcgggaccttgtcctcaaattcttacagaagttctgagtgggccatctgagctacttccctgaaatcctgcagtccctcactggctgccctcacaagccacctgaggagtggcatgagaggccattaactgtgtctttgtggtgtcctctggcttaaggagtgaagaggtggctcttgagggaaatggtctggacttattcccagcactgtttcaggcaagaactttccctttcaacttcaggctcattttcttctcaactctggctctctcaaggagctggagggtggcagaagtgggacaggagaagttttccaagaggttcatgggaggcggaggtgactggctggctgtcttgcatcagtcccaggcctcggccaggggagccagcctttggtttcgtttacttgcctacagtgctgtacgcaataagatgatgatcccaaaatatggtaaagtgaacccatctgtctgcattttctactctgagcccatttgttaataaacacttatttttatataa

SEQ ID NO: 37597 - DNA, 1703 bp, Homo sapiens
ttctaggttcccgggtctgtaccaggcctctccactgtgaagtcagtttttcccattgtattaaatcagtaccttgtgggggactctttgaaactatatacatattctgttctccctcaaaatggtatctgatatttttagcatttgttgatgattttcatctgaataagtgatgaactgtaatggttgccaaacggtggttttggtttttatttcatcgtttgtttcttggcatttcgttgtaaaaagagctttcttttctcccccacatatgtatttctccctcatttacctcatctgcctctgctgaagcttggagcccacccacagggtccatcccagcctgcccctccttccacggggcccctttgacctccgtcccccacgtgtgcttcctggctccctcctgaccccctgactgtctgtgggccctcagcgccccagttgctgtctggcttggcagctcctgtgtagtctgcattgtaagatttctttcttgtactttccctagaaccagacttctcctacctggaagccctggctccttaccagccgctggccatgaaatgcatctactgccccatcgacacccggctgaacttcatccaggtgtcaaagctgcttaaagaagtgcagcccctgcacgtggtgtgtcctgagcagtacactcagccgcccccagcccagtcccacaggatggacctcatgatcgactgccagccccccgccatgtcctatcggcgggctgaggttctcgccctgcccttcaaacgtcggtacgagaagatcgagatcatgccagagctcgcagattcactggtgcccatggagatcaagcctggcatctccttggcaactgtctcggccgtgctgcacaccaaagataacaagcacttgcttcagccccctcctcggcccgcccagcccacgagcgggaagaagagaaagcgggtgagcgatgacgtaccagactgcaaagtcctgaagcctttgttgagcggttccatccctgtggagcagttcgtgcagaccctggagaagcatggcttcagtgatattaaggtggaggacacagccaagggccatatcgtcctgctccaggaggctgagacgctcatccagattgaagaagactcgacccatatcatctgcgacaatgacgagatgctcagagtgcgactgcgggaccttgtcctcaaattcttacagaagttctgagtgggccatctgagctacttccctgaaatcctgcagtccctcactggctgccctcacaagccacctgaggagtggcatgagaggccattaactgtgtctttgtggtgtcctctggcttaaggagtgaagaggtggctcttgagggaaatggtctggacttattcccagcactgtttcaggcaagaactttccctttcaacttcaggctcattttcttctcaactctggctctctcaaggagctggagggtggcagaagtgggacaggagaagttttccaagaggttcatgggaggcggaggtgactggctggctgtcttgcatcagtcccaggcctcggccaggggagccagcctttggtttcgtttacttgcctacagtgctgtacgcaataagatgatgatcccaaaatatggtaaagtgaacccatctgtctgcattttctactctgagcccatttgttaataaacacttatttttatataa

SEQ ID NO: 37598 - DNA, 2555 bp, Homo sapiens
gggaggatgcattggcggctgggatgaatttgagctgacggaaggaggcgttcggagaggaaagggaggaaaaggaaaggcgaccacagttcccatgatgcctggaggggagactacatttcccattattcccctggaagggacgtgaggatgaaagactgcaagtcccgcgatgctctcggctggcaggtggcggagattgcaccggaagacgcttcctgggtttgaggagttcagtgactgctattgaaccaccaaaagtccattatgaaactgtattgcctgtcagggcacccaaccttaccatgcaatgtgctcaaattcaaatcaaccaccattatgttggactgcggactggacatgacttctaccctcaatttccttcctttgccacttgttcaaagtcccaggctgtccaatcttcctggctggtccctgaaggatggaaatgctttcttggacaaggagctaaaggagtgctcgggtcatgtatttgtggattctgtgccggaattctgtttaccagagacggagctaatagatctgtctacagtagatgtgattctcatctctaactatcactgtatgatggcgctgccatacatcaccgagcacaccggcttcacaggcacagtgtatgccacggaacccaccgtccagatcggcaggcttctcatggaagagctggtgaatttcattgaaagagtgccaaaggctcagtctgcctccttgtggaagaataaggacattcagaggctgttaccttctcctctcaaggatgcagtggaagtctcaacctggagaagatgctatacaatgcaagaggtgaactctgcccttagtaaaatccagctggtgggatattctcagaaaattgagctttttggtgcggtccaggtgactcctctgagctctggctatgcccttgggagctccaactggatcatccagtctcattacgagaaagtgtcttatgtctctggatcctccttgcttaccacacacccccagcccatggaccaagcttctctcaaaaacagcgatgttcttgttctgacagggcttacccagatccccactgcaaacccagatggaatggtgggagagttctgcagcaacctagctctgacagtccggaatggaggaaacgtgttggttccctgctacccttctggagtgatctatgacctcctggagtgcctatatcagtacatcgactcagccgggctttccagcgtccccctctacttcatctcccctgtggccaacagttcactggagttttcccagatctttgctgagtggctttgtcacaacaaacagagtaaggtgtatcttccagaaccaccttttcctcatgcagagctcattcagaccaataagctgaagcactaccccagcatccacggagacttcagcaacgactttagacagccctgtgtggtgttcaccgggcacccttccctccgcttcggggacgtggtccacttcatggagctctggggaaaatctagtctcaataccgtcatattcacggaaccagacttctcctacctggaagccctggctccttaccagccgctggccatgaaatgcatctactgccccatcgacacccggctgaacttcatccaggtgtcaaagctgcttaaagaagtgcagcccctgcacgtggtgtgtcctgagcagtacactcagccgcccccagcccagtcccacaggatggacctcatgatcgactgccagccccccgccatgtcctatcggcgggctgaggttctcgccctgcccttcaaacgtcggtacgagaagatcgagatcatgccagagctcgcagattcactggtgcccatggagatcaagcctggcatctccttggcaactgtctcggccgtgctgcacaccaaagataacaagcacttgcttcagccccctcctcggcccgcccagcccacgagcgggaagaagagaaagcgggtgagcgatgacgtaccagactgcaaagtcctgaagcctttgttgagcggttccatccctgtggagcagttcgtgcagaccctggagaaggtgagctggtttcgctggtgccgtgaaaactccacacgtggcagcctttccctggctcactatggccccctggctgcagggagtggatgttgctgcttgtcacttagtccccactgtcctgtggcatctgtttggtctaaggtcctgctgggagacccaggagaaagaaagcagagtgaggagtgccccatccttcctcccagcacgaggtcaccagaaggcctctccagactgaagaaaaagctgcttccacacacacatgtgacgagtggggcagggtagtgaggccaggacaaagagggacccggccctgccagagtcttgcacttccacagatgactccttgctgtcagaggggagccaagtctccagtcgactgtcaggatttgcaggaggcagtcgggggaggggacactggcccttcccctctgtctcagcagccctgatggctgcttctcccagagatgagatttcttgactatgattaa

SEQ ID NO: 37599 - DNA, 1404 bp, Homo sapiens
gggaggatgcattggcggctgggatgaatttgagctgacggaaggaggcgttcggagaggaaagggaggaaaaggaaaggcgaccacagttcccatgatgcctggaggggagactacatttcccattattcccctggaagggacgtgaggatgaaagactgcaagtcccgcgatgctctcggctggcaggtggcggagattgcaccggaagacgcttcctgggtttgaggagttcagtgactgctattgaaccaccaaaagtccattatgaaactgtattgcctgtcagggcacccaaccttaccatgcaatgtgctcaaattcaaatcaaccaccattatgttggactgcggactggacatgacttctaccctcaatttccttcctttgccacttgttcaaagtcccaggctgtccaatcttcctggctggtccctgaaggatggaaatgctttcttggacaaggagctaaaggagtgctcgggtcatgtatttgtggattctgtgccggaattctgtttaccagagacggagctaatagatctgtctacagtagatgtgattctcatctctaactatcactgtatgatggcgctgccatacatcaccgagcacaccggcttcacaggcacagtgtatgccacggaacccaccgtccagatcggcaggcttctcatggaagagctggtgaatttcattgaaagagtgccaaaggctcagtctgcctccttgtggaagaataaggacattcagaggctgttaccttctcctctcaaggatgcagtggaagtctcaacctggagaagatgctatacaatgcaagaggtgaactctgcccttagtaaaatccagctggtgggatattctcagaaaattgagctttttggtgcggtccaggtgactcctctgagctctggctatgcccttgggagctccaactggatcatccagtctcattacgagaaagtgtcttatgtctctggatcctccttgcttaccacacacccccagcccatggaccaagcttctctcaaaaacagcgatgttcttgttctgacagggcttacccagatccccactgcaaacccagatggaatggtgggagagttctgcagcaacctagctctgacagtccggaatggaggaaacgtgttggttccctgctacccttctggagtgatctatgacctcctggagtgcctatatcagtacatcgactcagccgggctttccagcgtccccctctacttcatctcccctgtggccaacagttcactggagttttcccagatctttgctgagtggtatgtccgtggtttttttttttgtgtgtgaattttatttgattcaggacattcaagcagtaagaataaaaataatcctgttttttctcaaaaaaaaaag

SEQ ID NO: 37600 - DNA, 966 bp, Homo sapiens
cggcatggtgcaagcagctgagcgtcccagactcctgaacacagtgcttggacgtgccctcaaagaactcacaaaagcttagccaggttgtggaaattctgttgttttgcatgagcttttgcatgtttagggtctcttttcaagtataagaaactatcactatcataggcctatgactagtctgaagaattgtgttgagacgtgtcagtttctagaaagttcagtcgagtctgtgaagtgtcatttacagatctcacagatgtgcagtctgcccagcccacctctttcttttcttctggagcagcatggcttcagtgatattaaggtggaggacacagccaagggccatatcgtcctgctccaggaggctgagacgctcatccagattgaagaagactcgacccatatcatctgcgacaatgacgagatgctcagagtgcgactgcgggaccttgtcctcaaattcttacagaagttctgagtgggccatctgagctacttccctgaaatcctgcagtccctcactggctgccctcacaagccacctgaggagtggcatgagaggccattaactgtgtctttgtggtgtcctctggcttaaggagtgaagaggtggctcttgagggaaatggtctggacttattcccagcactgtttcaggcaagaactttccctttcaacttcaggctcattttcttctcaactctggctctctcaaggagctggagggtggcagaagtgggacaggagaagttttccaagaggttcatgggaggcggaggtgactggctggctgtcttgcatcagtcccaggcctcggccaggggagccagcctttggtttcgtttacttgcctacagtgctgtacgcaataagatgatgatcccaaaatatggtaaagtgaacccatctgtctgcattttctactctgagcccatttgttaataaacacttatttttatataa

SEQ ID NO: 37601 - DNA, 996 bp, Homo sapiens
gggaggatgcattggcggctgggatgaatttgagctgacggaaggaggcgttcggagaggaaagggaggaaaaggaaaggcgaccacagttcccatgatgcctggaggggagactacatttcccattattcccctggaagggacgtgaggatgaaagactgcaagtcccgcgatgctctcggctggcaggtggcggagattgcaccggaagacgcttcctgggtttgaggagttcagtgactgctattgaaccaccaaaagtccattatgaaactgtattgcctgtcagggcacccaaccttaccatgcaatgtgctcaaattcaaatcaaccaccattatgttggactgcggactggacatgacttctaccctcaatttccttcctttgccacttgttcaaagtcccaggctgtccaatcttcctggctggtccctgaaggatggaaatgctttcttggacaaggagctaaaggagtgctcgggtcatgtatttgtggattctgtgccggaattctgtttaccagagacggagctaatagatctgtctacagtagatgtgattctcatctctaactatcactgtatgatggcgctgccatacatcaccgagcacaccggcttcacaggcacagtgtatgccacggaacccaccgtccagatcggcaggcttctcatggaagagctggtgaatttcattgaaagagtgccaaaggctcagtctgcctccttgtggaagaataaggacattcagaggctgttaccttctcctctcaaggatgcagtggaagtctcaacctggagaagatgctatacaatgcaagaggtgaactctgcccttagtaaaatccagctggtgggatattctcagaaaattcttgggagctccacttggtcatccaggctcattctaggaaaggggctatggtcttggacctccttggttacacacacacccaggccatgcccagcttttttaaacaaggtggttttgtta

SEQ ID NO: 37602 - DNA, 2666 bp, Homo sapiens
gggaggatgcattggcggctgggatgaatttgagctgacggaaggaggcgttcggagaggaaagggaggaaaaggaaaggcgaccacagttcccatgatgcctggaggggagactacatttcccattattcccctggaagggacgtgaggatgaaagactgcaagtcccgcgatgctctcggctggcaggtggcggagattgcaccggaagacgcttcctgggtttgaggagttcagtgactgctattgaaccaccaaaagtccattatgaaactgtattgcctgtcagggcacccaaccttaccatgcaatgtgctcaaattcaaatcaaccaccattatgttggactgcggactggacatgacttctaccctcaatttccttcctttgccacttgttcaaagtcccaggctgtccaatcttcctggctggtccctgaaggatggaaatgctttcttggacaagacggagctaatagatctgtctacagtagatgtgattctcatctctaactatcactgtatgatggcgctgccatacatcaccgagcacaccggcttcacaggcacagtgtatgccacggaacccaccgtccagatcggcaggcttctcatggaagagctggtgaatttcattgaaagagtgccaaaggctcagtctgcctccttgtggaagaataaggacattcagaggctgttaccttctcctctcaaggatgcagtggaagtctcaacctggagaagatgctatacaatgcaagaggtgaactctgcccttagtaaaatccagctggtgggatattctcagaaaattgagctttttggtgcggtccaggtgactcctctgagctctggctatgcccttgggagctccaactggatcatccagtctcattacgagaaagtgtcttatgtctctggatcctccttgcttaccacacacccccagcccatggaccaagcttctctcaaaaacagcgatgttcttgttctgacagggcttacccagatccccactgcaaacccagatggaatggtgggagagttctgcagcaacctagctctgacagtccggaatggaggaaacgtgttggttccctgctacccttctggagtgatctatgacctcctggagtgcctatatcagtacatcgactcagccgggctttccagcgtccccctctacttcatctcccctgtggccaacagttcactggagttttcccagatctttgctgagtggctttgtcacaacaaacagagtaaggtgtatcttccagaaccaccttttcctcatgcagagctcattcagaccaataagctgaagcactaccccagcatccacggagacttcagcaacgactttagacagccctgtgtggtgttcaccgggcacccttccctccgcttcggggacgtggtccacttcatggagctctggggaaaatctagtctcaataccgtcatattcacggaaccagacttctcctacctggaagccctggctccttaccagccgctggccatgaaatgcatctactgccccatcgacacccggctgaacttcatccaggtgtcaaagctgcttaaagaagtgcagcccctgcacgtggtgtgtcctgagcagtacactcagccgcccccagcccagtcccacaggatggacctcatgatcgactgccagccccccgccatgtcctatcggcgggctgaggttctcgccctgcccttcaaacgtcggtacgagaagatcgagatcatgccagagctcgcagattcactggtgcccatggagatcaagcctggcatctccttggcaactgtctcggccgtgctgcacaccaaagataacaagcacttgcttcagccccctcctcggcccgcccagcccacgagcgggaagaagagaaagcgggtgagcgatgacgtaccagactgcaaagtcctgaagcctttgttgagcggttccatccctgtggagcagttcgtgcagaccctggagaagcatggcttcagtgatattaaggtggaggacacagccaagggccatatcgtcctgctccaggaggctgagacgctcatccagattgaagaagactcgacccatatcatctgcgacaatgacgagatgctcagagtgcgactgcgggaccttgtcctcaaattcttacagaagttctgagtgggccatctgagctacttccctgaaatcctgcagtccctcactggctgccctcacaagccacctgaggagtggcatgagaggccattaactgtgtctttgtggtgtcctctggcttaaggagtgaagaggtggctcttgagggaaatggtctggacttattcccagcactgtttcaggcaagaactttccctttcaacttcaggctcattttcttctcaactctggctctctcaaggagctggagggtggcagaagtgggacaggagaagttttccaagaggttcatgggaggcggaggtgactggctggctgtcttgcatcagtcccaggcctcggccaggggagccagcctttggtttcgtttacttgcctacagtgctgtacgcaataagatgatgatcccaaaatatggtaaagtgaacccatctgtctgcattttctactctgagcccatttgttaataaacacttatttttatataa

SEQ ID NO: 37603 - DNA, 1880 bp, Homo sapiens
  misc_feature (20)..(20): n is a, c, g, or t
  misc_feature (23)..(23): n is a, c, g, or t
tcggctggtagagccggggntanaaatgagctttttggtgcggtccaggtgactcctctgagctctggctatgcccttgggagctccaactggatcatccagtctcattacgagaaagtgtcttatgtctctggatcctccttgcttaccacacacccccagcccatggaccaagcttctctcaaaaacagcgatgttcttgttctgacagggcttacccagatccccactgcaaacccagatggaatggtgggagagttctgcagcaacctagctctgacagtccggaatggaggaaacgtgttggttccctgctacccttctggagtgatctatgacctcctggagtgcctatatcagtacatcgactcagccgggctttccagcgtccccctctacttcatctcccctgtggccaacagttcactggagttttcccagatctttgctgagtggctttgtcacaacaaacagagtaaggtgtatcttccagaaccaccttttcctcatgcagagctcattcagaccaataagctgaagcactaccccagcatccacggagacttcagcaacgactttagacagccctgtgtggtgttcaccgggcacccttccctccgcttcggggacgtggtccacttcatggagctctggggaaaatctagtctcaataccgtcatattcacggaaccagacttctcctacctggaagccctggctccttaccagccgctggccatgaaatgcatctactgccccatcgacacccggctgaacttcatccaggtgtcaaagctgcttaaagaagtgcagcccctgcacgtggtgtgtcctgagcagtacactcagccgcccccagcccagtcccacaggatggacctcatgatcgactgccagccccccgccatgtcctatcggcgggctgaggttctcgccctgcccttcaaacgtcggtacgagaagatcgagatcatgccagagctcgcagattcactggtgcccatggagatcaagcctggcatctccttggcaactgtctcggccgtgctgcacaccaaagataacaagcacttgcttcagccccctcctcggcccgcccagcccacgagcgggaagaagagaaagcgggtgagcgatgacgtaccagactgcaaagtcctgaagcctttgttgagcggttccatccctgtggagcagttcgtgcagaccctggagaagcatggcttcagtgatattaaggtggaggacacagccaagggccatatcgtcctgctccaggaggctgagacgctcatccagattgaagaagactcgacccatatcatctgcgacaatgacgagatgctcagagtgcgactgcgggaccttgtcctcaaattcttacagaagttctgagtgggccatctgagctacttccctgaaatcctgcagtccctcactggctgccctcacaagccacctgaggagtggcatgagaggccattaactgtgtctttgtggtgtcctctggcttaaggagtgaagaggtggctcttgagggaaatggtctggacttattcccagcactgtttcaggcaagaactttccctttcaacttcaggctcattttcttctcaactctggctctctcaaggagctggagggtggcagaagtgggacaggagaagttttccaagaggttcatgggaggcggaggtgactggctggctgtcttgcatcagtcccaggcctcggccaggggagccagcctttggtttcgtttacttgcctacagtgctgtacgcaataagatgatgatcccaaaatatggtaaagtgaacccatctgtctgcattttctactctgagcccatttgttaataaacacttatttttatataa

SEQ ID NO: 37604 - DNA, 2861 bp, Homo sapiens
gggaggatgcattggcggctgggatgaatttgagctgacggaaggaggcgttcggagaggaaagggaggaaaaggaaaggcgaccacagttcccatgatgcctggaggggagactacatttcccattattcccctggaagggacgtgaggatgaaagactgcaagtcccgcgatgctctcggctggcaggtggcggagattgcaccggaagacgcttcctgggtttgaggagttcagtgactgctattgaaccaccaaaagtccattatgaaactgtattgcctgtcagggcacccaaccttaccatgcaatgtgctcaaattcaaatcaaccaccattatgttggactgcggactggacatgacttctaccctcaatttccttcctttgccacttgttcaaagtcccaggctgtccaatcttcctggctggtccctgaaggatggaaatgctttcttggacaaggagctaaaggagtgctcgggtcatgtatttgtggattctgtgccggaattctgtttaccagagacggagctaatagatctgtctacagtagatgtgattctcatctctaactatcactgtatgatggcgctgccatacatcaccgagcacaccggcttcacaggcacagtgtatgccacggaacccaccgtccagatcggcaggcttctcatggaagagctggtgaatttcattgaaagagtgccaaaggctcagtctgcctccttgtggaagaataaggacattcagaggctgttaccttctcctctcaaggatgcagtggaagtctcaacctggagaagatgctatacaatgcaagaggtgaactctgcccttagtaaaatccagctggtgggatattctcagaaaattgagctttttggtgcggtccaggtgactcctctgagctctggctatgcccttgggagctccaactggatcatccagtctcattacgagaaagtgtcttatgtctctggatcctccttgcttaccacacacccccagcccatggaccaagcttctctcaaaaacagcgatgttcttgttctgacagggcttacccagatccccactgcaaacccagatggaatggtgggagagttctgcagcaacctagctctgacagtccggaatggaggaaacgtgttggttccctgctacccttctggagtgatctatgacctcctggagtgcctatatcagtacatcgactcagccgggctttccagcgtccccctctacttcatctcccctgtggccaacagttcactggagttttcccagatctttgctgagtggctttgtcacaacaaacagagtaaggtgtatcttccagaaccaccttttcctcatgcagagctcattcagaccaataagctgaagcactaccccagcatccacggagacttcagcaacgactttagacagccctgtgtggtgttcaccgggcacccttccctccgcttcggggacgtggtccacttcatggagctctggggaaaatctagtctcaataccgtcatattcacggaaccagacttctcctacctggaagccctggctccttaccagccgctggccatgaaatgcatctactgccccatcgacacccggctgaacttcatccaggtgtcaaagctgcttaaagaagtgcagcccctgcacgtggtgtgtcctgagcagtacactcagccgcccccagcccagtcccacaggatggacctcatgatcgactgccagccccccgccatgtcctatcggcgggctgaggttctcgccctgcccttcaaacgtcggtacgagaagatcgagatcatgccagagctcgcagattcactggtgcccatggagatcaagcctggcatctccttggcaactgtctcggccgtgctgcacaccaaagataacaagcacttgcttcagccccctcctcggcccgcccagcccacgagcgggaagaagagaaagcgggtgagcgatgacgtaccagactgcaaagtcctgaagcctttgttgagcggttccatccctgtggagcagttcgtgcagaccctggagaagcatggcttcagtgatattaaggtggaggacacagccaagggccatatcgtcctgctccaggaggctgagacgctcatccagattgaagaagactcgacccatatcatctgcgacaatgacgagatgctcagagtgcgactgcgggaccttgtcctcaaattcttacagaagttctgagtgggccatctgagctacttccctgaaatcctgcagtccctcactggctgccctcacaagccacctgaggagtggcatgagaggccattaactgtgtctttgtggtgtcctctggcttaaggagtgaagaggtggctcttgagggaaatggtctggacttattcccagcccacgagcgggaagaagagaaagcgggtgagcgatgacgtaccagactgcaaagtcctgaagcctttgttgagcggttccatccctgtggagcagttcgtgcagaccctggagaagcatggcttcagtgatattaaggtggaggacacagccaagggccatatcgtcctgctccaggaggctgagacgctcatccagattgaagaagactcgacccatatcatctgcaggagaagttttccaagaggttcatgggaggcggaggtgactggctggctgtcttgcatcagtcccaggcctcggccaggggagccagcctttggtttcgtttacttgcctacagtgctgtacgcaataagatgatgatcccaaaatatggtaaagtgaacccatctgtctgcattttctactctgagcccatttgttaataaacacttatttttatataa

SEQ ID NO: 37605 - DNA, 1240 bp, Homo sapiens
cagacacatggaagttaccgtgaaacttatgtaaacagtaagaaagataaattaagctgaggcagtttaggggtttccgagatgtttcttctgccccagtgccttcacgttccctctcctgtctacggttcattgggcttgagaggatgaaagttcaccttggcctggaagtgcccctgcacgtggtgtgtcctgagcagtacactcagccgcccccagcccagtcccacaggatggacctcatgatcgactgccagccccccgccatgtcctatcggcgggctgaggttctcgccctgcccttcaaacgtcggtacgagaagatcgagatcatgccagagctcgcagattcactggtgcccatggagatcaagcctggcatctccttggcaactgtctcggccgtgctgcacaccaaagataacaagcacttgcttcagccccctcctcggcccgcccagcccacgagcgggaagaagagaaagcgggtgagcgatgacgtaccagactgcaaagtcctgaagcctttgttgagcggttccatccctgtggagcagttcgtgcagaccctggagaagcatggcttcagtgatattaaggtggaggacacagccaagggccatatcgtcctgctccaggaggctgagacgctcatccagattgaagaagactcgacccatatcatctgcgacaatgacgagatgctcagagtgcgactgcgggaccttgtcctcaaattcttacagaagttctgagtgggccatctgagctacttccctgaaatcctgcagtccctcactggctgccctcacaagccacctgaggagtggcatgagaggccattaactgtgtctttgtggtgtcctctggcttaaggagtgaagaggtggctcttgagggaaatggtctggacttattcccagcactgtttcaggcaagaactttccctttcaacttcaggctcattttcttctcaactctggctctctcaaggagctggagggtggcagaagtgggacaggagaagttttccaagaggttcatgggaggcggaggtgactggctggctgtcttgcatcagtcccaggcctcggccaggggagccagcctttggtttcgtttacttgcctacagtgctgtacgcaataagatgatgatcccaaaatatggtaaagtgaacccatctgtctgcattttctactctgagcccatttgttaataaacacttatttttatataa

SEQ ID NO: 37606 - DNA, 2083 bp, Homo sapiens
gggaggatgcattggcggctgggatgaatttgagctgacggaaggaggcgttcggagaggaaagggaggaaaaggaaaggcgaccacagttcccatgatgcctggaggggagactacatttcccattattcccctggaagggacgtgaggatgaaagactgcaagtcccgcgatgctctcggctggcaggtggcggagattgcaccggaagacgcttcctgggtttgaggagttcagtgactgctattgaaccaccaaaagtccattatgaaactgtattgcctgtcagggcacccaaccttaccatgcaatgtgctcaaattcaaatcaaccaccattatgttggactgcggactggacatgacttctaccctcaatttccttcctttgccacttgttcaaagtcccaggctgtccaatcttcctggctggtccctgaaggatggaaatgctttcttggacaaggagctaaaggagtgctcgggtcatgtatttgtggattctgtgccggaattctgtttaccagagacggagctaatagatctgtctacagtagatgtgattctcatctctaactatcactgtatgatggcgctgccatacatcaccgagcacaccggcttcacaggcacagtgtatgccacggaacccaccgtccagatcggcaggcttctcatggaagagctggtgaatttcattgaaagagtgccaaaggctcagtctgcctccttgtggaagaataaggacattcagaggctgttaccttctcctctcaaggatgcagtggaagtctcaacctggagaagatgctatacaatgcaagaggtgaactctgcccttagtaaaatccagctggtgggatattctcagaaaattgagctttttggtgcggtccaggtgactcctctgagctctggctatgcccttgggagctccaactggatcatccagtctcattacgagaaagtgtcttatgtctctggatcctccttgcttaccacacacccccagcccatggaccaagcttctctcaaaaacagcgatgttcttgttctgacagggcttacccagatccccactgcaaacccagatggaatggtgggagagttctgcagcaacctagctctgacagtccggaatggaggaaacgtgttggttccctgctacccttctggagtgatctatgacctcctggagtgcctatatcagtacatcgactcagccgggctttccagcgtccccctctacttcatctcccctgtggccaacagttcactggagttttcccagatctttgctgagtggctttgtcacaacaaacagagtaaggtgtatcttccagaaccaccttttcctcatgcagagctcattcagaccaataagctgaagcactaccccagcatccacggagacttcagcaacgactttagacagccctgtgtggtgttcaccgggcacccttccctccgcttcggggacgtggtccacttcatggagctctggggaaaatctagtctcaataccgtcatattcacgggtaagtgaaaaaaataaagaaacaaattggttctctccactgaggccatgagtgaatgcacctacaaggtagagacccagggaaggattttgcagtgagacataaatacaaacattattctactgtaggtaccaaagaatgaagaaaccgcagagaaagagtgaagcagtgtgtgccattggacagctgggcatccagcgaggccttcatgcctgtgttttcagatttctccaagacagaatcctgctgagtgcttttgctaggatatcgtaagccatttcaagaagtgcagtgattcagtaacggtcttgttttacctgttaggaattgtttacagaggtagatctttttcttctgattgtggtttactctaactgtggattttcttctggagacaaatccctcaggggaaaaaattcctttgataaggtcaagtagagtgtttacatagataatgactgtatcattttatcagtgtagcgtgcccagccctttgaatgctaggtttttttttttttttttttagctcatcagtcatcattagtg

SEQ ID NO: 37607 - DNA, 221 bp, Homo sapiens
ggagtgagctggaaaggttattctgcagcacttacatttcttgaaatcagtttgtagcagtgcccacttctttgagatgaattttttcagaacatgatttacatagtccagcctgccctttcccttggcttgacatgtacatcttctgttcctccccctccgatctcaccagccactaatttagctgatttctcaccaaactgatttgtgcagtgctcctc

SEQ ID NO: 37608 - DNA, 465 bp, Homo sapiens
taaccatttaaactactactccatactttataatatggaaaactttacactttttattttagatgtgctttatttttgcagatgctaacaacaaaactgtgttctttaaaaaatctctaagcgctggaaaatatcaatagatcagattttgaattgaaatggataagctaaatacattcagttttactcatgggacagtgcttaagtgtgtgaagatccaaatttgctttgaagagttgtagtaaacaagaaataagtaatgtgtgggtataatttcttctcaaatctacgcctgcattttattagttgtgatacaataatatttcaaaaatagaatagtgattcttacttttaaacttatatactttctacctcttctatgaatttctacctcactttattataatattaaatattacaacatgcaaaaatgcatcagtggaaggctactttcaaccagtgttt

SEQ ID NO: 37609 - DNA, 465 bp, Homo sapiens
gaggacctagatattgagttttaaaaggagaaaatataagtacaaaagaagaatgaagattgttacaacaggggcaagtagaagttagaagaaaatgtgataaagtaaatctacattttagaatagtactggaagttattatcaggtgttacagacaagtttgagacttccgtaagtgacctaaagaaattatggacactgcaagactaaataatcattcatttaggaaggagcttaaatgcactttctcaaggccgggcgaggtggctcacgcctgtaatcccagcactttgggaggccaaggtgggcagatcacgaggtcaggtgatcgagaccatcgtgggtaacacggtgaaaccccgtctctactaaaaaatacaaaaaaaaattagccgggcacggtggcgggcgccttagtcccatctactcgggaggctgaggcaggagaatggcgtgaacccggga

SEQ ID NO: 37610 - DNA, 368 bp, Homo sapiens
atgctgctgaacgtgctgccacaccacacaggcctcaacctccgcaccttccggatgctgcgtgtggacctccgcaccctccagaatgctgtgctgcaagctgcacggggagctgctcaaccgctacctgtacctgagcaccatggagcagcaagctggccaagaagatcagcaccatatccgacatcatcctggatgacttgctggagacagatggcgtcactgcccacttctagctccatggatgtcgctgccaccaccacaccgcactacctcccaccaccttttttgaacaaaacacaaggaatatatactttctggaagaccatctgatactatgtatcaagaatctcaaaaatattcatata

SEQ ID NO: 37611 - DNA, 332 bp, Homo sapiens
tgtgtcttcagggtacaaggccccgcggggactgagcactcaagtcttcctggcctggtctggtttcagggcttccagcggctgaaggctgcccacgcggccctagaggaggagtacctgaaggcttgtcgggagcaacaccctgcccagccgcttgccggctccaaggggacgcctggaagatttgatcctcgcaggtacctgctggggtggaaggcctggaaggacagatgggatgggcccctggggtccctcagtctccaggagggaggcactttgtccttataattgtacacggggccttgtagagaaatcttatcctaattagtata

SEQ ID NO: 37612 - DNA, 714 bp, Homo sapiens
gaggctggtctcagcttggaaggccatggaaacaccagccccatggctcttgggcatggtcaggccaggggctgggtggcttctggcgaacaagccagtggggacaaactttctgaacattccgaggtcaacccatccgttgaactcagcccggcaaggtcctggagcagtgggacagtgagcctcgaccaccctagtgacagccttgattctacctgggaaggagagaccgatggcccccagcccactgccctggcagaaaccttgccagagggccccagccaccacctcctaagcccagatggcagaactggaggcagtgttgctcgggcaacccccatggaattccaggactcctcagctcccccagcccagagtccgcagcatgccacagatagatggaggagagaaacgaccagattcttctgccctcagcccaaggaacacatcatggtccccttcagtacctcacgcatggtccccagcttctcctaggatcccagtggcatttatcagtggccagctacctgccaggcccgggctggggcacggtctgcggccatgaggccaggccgcctcccgcacccctaccccgtggcagcagcatacctctgcatttctggaatgtgtgtgcatcaatgatgtttgtatatttgaggcatttaaaaatctattttcgttacgagggcaaatgaagaatgaatattgatctta

SEQ ID NO: 37613 - DNA, 4772 bp, Homo sapiens
gaggctggtctcagcttggaaggccatggaaacaccagccccatggctcttgggcatggtcaggccaggggctgggtggcttctggcgaacaagccagtggggacaaactttctgaacattccgaggtcaacccatccgttgaactcagcccggcaaggtcctggagcagtgggacagtgagcctcgaccaccctagtgacagccttgattctacctgggaaggagagaccgatggcccccagcccactgccctggcagaaaccttgccagagggccccagccaccacctcctaagcccagatggcagaactggaggcagtgttgctcgggcaacccccatggaattccaggactcctcagctcccccagcccagagtccgcagcatgccacagatagatggaggagagaaacgaccagattcttctgccctcagcccaaggaacacatctggaagcagacaaagacgtcacctaagccactcccttcccgattcattggctccatcagccccctgaatccccagcccaggccaacgcggcagggcaggccgctgcccagacagggagccactctggctggccgctcctcttctaatgcccccaagtatggccgggggcagttgaactacccactccctgatttctccaaggtagggccccgggtgagattccccaaagatgagagctaccgtccccccaagtccagaagccacaacaggaagcctcaggcccctgccaggcccctcatcttcaagtctccagctgagattgtgcaggaggtgctgttgagcagtggagaagcagccctggcaaaggacacgcctcctgcccaccctatcaccagggtaccccaagaatttcagacgcctgagcaagccactgagctggtccatcagctccaggaagactaccacaggctcctcaccaagtacgctgaggccgagaacaccattgaccagctacgcctcggggccaaggtgaacctgttctctgacccaccccagcccaaccacagcatccacacgggaatggtgccccaggggaccaaggtcttgtccttcaccatcccacagccccgctctgcagagtggtggccgggcccggccgaggacccccaggcctctgcggcctcagggtggccatcagctcgaggagacttgagcccctcctcgcttaccagcatgcccaccctggggtggcttccggagaaccgggacatctctgaggaccagtcctcagcagagcagacccaggcactggcttctcaggccagccagttcctggccaaggtggagtcctttgaaagactgatacaggcaggacgtctcatgccccaggaccaagtcaagggcttccagcggctgaaggctgcccacgcggccctagaggaggagtacctgaaggcttgtcgggagcaacaccctgcccagccgcttgccggctccaaggggacgcctggaagatttgatcctcgcagggagctggaggcagagatataccgtctgggaagctgcctggaagagctgaaggaacacatagaccagacccagcaagagcctgagccgcccgggtcagactcagctctggacagcaccccagccctgccctgcctccatcagccaacgcacctgcctgctccttctggacaagcccccatgccagccatcaagacctcctgccctgagcctgctaccaccactgccgccgccagcactggcccctgcccattgcacgtaaatgtggaggtgagctctggcaacagtgaggtggaggacaggccacaggaccccctggcccgactcaggcacaaggagctgcagatggagcaagtttaccatggcctcatggagcggtacctcagtgtgaagtctctcccagaagccatgagaatggaggaggaggaagaaggagaggaggaggaggaggaagaggggggaggtgactccctggaagttgatggggtggctgcaactccagggaaagcagaggccaccagggtcctcccaaggcagtgcccggtgcaggctgagaaaagtcatggggctcccctggaggaggccacggagaagatggtatctatgaagccaccaggtttccaggcatccctggctagagacgggcacatgtcaggcctgggcaaggctgaggcagcccctccaggccctggcgtgccaccccaccctccaggcaccaagtccgcagcatcccaccaaagtagtatgaccagcctggagggaagcggcatctctgagcgccttccacagaagcctttgcaccgaggcggtgggccccacctggaggagacctggatggcgtccccagagacagacagtggctttgtgggctcagaaacaagcagagtttcacccctcacccagactccagagcaccggctctcccacatcagcacagcaggaacattagcccagccctttgctgcatctgtgcccagggatggagcttcctaccccaaggccaggggttctctgattcccagaagagccacagagcccagcacaccccggagccaagcacagaggtacctctccagcccaagtgggcctctccggcagagggcacccaacttcagcctggagcggacactggcagccgagatggcggttcctggctcagagtttgaggggcacaaacggatttctgaacagccccttcccaacaagacaatcagcccacccccagcccccgcccctgccgctgcgcctctaccctgtggaccaacagagaccatccccagcttcctgctcaccagggcagggcgagaccaggccatctgtgagctgcaagaagaggtgtcccggcttcgtctgcggctggaagacagcctgcaccagccactccagggcagcccgacacgcccagcatctgcctttgaccgccccgcccggacccgcggccggccagcagactccccagccacctggggctcccattatggcagtaaatccacagagagattgcctggtgagcctagaggtgaagagcagattgtccctccaggaaggcagcgagccaggtcttcctcagtgcctcgggaggtgctccgactgtccctgagttcagaatctgagctgccctccctaccactgttctctgagaagagcaagaccaccaaggacagtccacaggcagctcgggatggaaagagaggggtgggcagtgctggatggccagacagggtcaccttccggggccaatacacaggccacgaataccatgttctgtcccctaaggcggtcccaaaaggcaatggcacagtctcctgtccccactgccggcccattaggacccaggatgcgggtggtgctgtcacaggggacccactgggaccgcctcccgctgatacccttcagtgtcccctgtgtggtcaagttgggtctcccccagaggcagatggtccaggctcagccacctctggggcagagaaggccaccacgaggagaaaagcaccttcaactcccagccccaagcagaggagcaagcaggcggggtcgtcgccacgcccaccccccggactgtggtatctggcaacagcgcccccagcaccagcccctccagcctttgcctacatctcctcggttcccatcatgccttatccacctgccgctgtgtactatgcgcctgcaggacctacctcagcccaaccagctgccaagtggccgcccacagcctctcccccaccagcccggagacaccggcactccatccagctcgacctgggcgacctagaggagctcaacaaggccctgagccgggccgtgcaggctgccgagagcgtccgctctaccaccaggcagatgagaagctcgctgtcagccgacctgcgccaggctcacagcctgcggggctcctgcctcttctgacttcactgggggcccagaggcagatgggtgggtgggtgggcaggtggcctgccaggccaggagtgggctggagctgctgaggcccagaaggcccgcatagttcctcaccaggagggtctccctccagcacaggtcccgcctgctcagtccctgtgctttccaagtggagggggtgtcagctcggtcaccaagagaagtgacttcccaggagcaccagtcccctcacagaggtgctgtgagcgaggcctccttcggtccaggcagaacctcaggcagtctctcctggtcctgcatgtgtgcaactccagctaataataggtattttatatacagatggacagatatttttttaaactggggagttttcctgatcttgggtcctctttagggggccagacaagaaaggcctacggtttctggagcaaacctgtcccccacctgtgaccagtcactctggggcaagcatcactgggaagggcatagccggagacctttctcctagtgactggtagtcagtggggcattttaggatgtcagggccccagggtgacatgtgtccagcttttctatggcagcagaggcctttccctcagacaagctacaaagtgcccaggatgccatccaccatggtccccttcagtacctcacgcatggtccccagcttctcctaggatcccagtggcatttatcagtggccagctacctgccaggcccgggctggggcacggtctgcggccatgaggccaggccgcctcccgcacccctaccccgtggcagcagcatacctctgcatttctggaatgtgtgtgcatcaatgatgtttgtatatttgaggcatttaaaaatctattttcgttacgagggcaaatgaagaatgaatattgatctta

SEQ ID NO: 37614 - DNA, 4816 bp, Homo sapiens
gaggctggtctcagcttggaaggccatggaaacaccagccccatggctcttgggcatggtcaggccaggggctgggtggcttctggcgaacaagccagtggggacaaactttctgaacattccgaggtcaacccatccgttgaactcagcccggcaaggtcctggagcagtgggacagtgagcctcgaccaccctagtgacagccttgattctacctgggaaggagagaccgatggcccccagcccactgccctggcagaaaccttgccagagggccccagccaccacctcctaagcccagatggcagaactggaggcagtgttgctcgggcaacccccatggaattccaggactcctcagctcccccagcccagagtccgcagcatgccacagatagatggaggagagaaacgaccagattcttctgccctcagcccaaggaacacatctggaagcagacaaagacgtcacctaagccactcccttcccgattcattggctccatcagccccctgaatccccagcccaggccaacgcggcagggcaggccgctgcccagacagggagccactctggctggccgctcctcttctaatgcccccaagtatggccgggggcagttgaactacccactccctgatttctccaaggtagggccccgggtgagattccccaaagatgagagctaccgtccccccaagtccagaagccacaacaggaagcctcaggcccctgccaggcccctcatcttcaagtctccagctgagattgtgcaggaggtgctgttgagcagtggagaagcagccctggcaaaggacacgcctcctgcccaccctatcaccagggtaccccaagaatttcagacgcctgagcaagccactgagctggtccatcagctccaggaagactaccacaggctcctcaccaagtacgctgaggccgagaacaccattgaccagctacgcctcggggccaaggtgaacctgttctctgacccaccccagcccaaccacagcatccacacgggaatggtgccccaggggaccaaggtcttgtccttcaccatcccacagccccgctctgcagagtggtggccgggcccggccgaggacccccaggcctctgcggcctcagggtggccatcagctcgaggagacttgagcccctcctcgcttaccagcatgcccaccctggggtggcttccggagaaccgggacatctctgaggaccagtcctcagcagagcagacccaggcactggcttctcaggccagccagttcctggccaaggtggagtcctttgaaagactgatacaggcaggacgtctcatgccccaggaccaagtcaagggcttccagcggctgaaggctgcccacgcggccctagaggaggagtacctgaaggcttgtcgggagcaacaccctgcccagccgcttgccggctccaaggggacgcctggaagatttgatcctcgcagggagctggaggcagagatataccgtctgggaagctgcctggaagagctgaaggaacacatagaccagacccagcaagagcctgagccgcccgggtcagactcagctctggacagcaccccagccctgccctgcctccatcagccaacgcacctgcctgctccttctggacaagcccccatgccagccatcaagacctcctgccctgagcctgctaccaccactgccgccgccagcactggcccctgcccattgcacgtaaatgtggaggtgagctctggcaacagtgaggtggaggacaggccacaggaccccctggcccgactcaggcacaaggagctgcagatggagcaagtttaccatggcctcatggagcggtacctcagtgtgaagtctctcccagaagccatgagaatggaggaggaggaagaaggagaggaggaggaggaggaagaggggggaggtgactccctggaagttgatggggtggctgcaactccagggaaagcagaggccaccagggtcctcccaaggcagtgcccggtgcaggctgagaaaagtcatggggctcccctggaggaggccacggagaagatggtatctatgaagccaccaggtttccaggcatccctggctagagacgggcacatgtcaggcctgggcaaggctgaggcagcccctccaggccctggcgtgccaccccaccctccaggcaccaagtccgcagcatcccaccaaagtagtatgaccagcctggagggaagcggcatctctgagcgccttccacagaagcctttgcaccgaggcggtgggccccacctggaggagacctggatggcgtccccagagacagacagtggctttgtgggctcagaaacaagcagagtttcacccctcacccagactccagagcaccggctctcccacatcagcacagcaggaacattagcccagccctttgctgcatctgtgcccagggatggagcttcctaccccaaggccaggggttctctgattcccagaagagccacagagcccagcacaccccggagccaagcacagaggtacctctccagcccaagtgggcctctccggcagagggcacccaacttcagcctggagcggacactggcagccgagatggcggttcctggctcagagtttgaggggcacaaacggatttctgaacagccccttcccaacaagacaatcagcccacccccagcccccgcccctgccgctgcgcctctaccctgtggaccaacagagaccatccccagcttcctgctcaccagggcagggcgagaccaggccatctgtgagctgcaagaagaggtgtcccggcttcgtctgcggctggaagacagcctgcaccagccactccagggcagcccgacacgcccagcatctgcctttgaccgccccgcccggacccgcggccggccagcagactccccagccacctggggctcccattatggcagtaaatccacagagagattgcctggtgagcctagaggtgaagagcagattgtccctccaggaaggcagcgagccaggtcttcctcagtgcctcgggaggtgctccgactgtccctgagttcagaatctgagctgccctccctaccactgttctctgagaagagcaagaccaccaaggacagtccacaggcagctcgggatggaaagagaggggtgggcagtgctggatggccagacagggtcaccttccggggccaatacacaggccacgaataccatgttctgtcccctaaggcggtcccaaaaggcaatggcacagtctcctgtccccactgccggcccattaggacccaggatgcgggtggtgctgtcacaggggacccactgggaccgcctcccgctgatacccttcagtgtcccctgtgtggtcaagttgggtctcccccagaggcagatggtccaggctcagccacctctggggcagagaaggccaccacgaggagaaaagcaccttcaactcccagccccaagcagaggagcaagcaggcggggtcgtcgccacgcccaccccccggactgtggtatctggcaacagcgcccccagcaccagcccctccagcctttgcctacatctcctcggttcccatcatgccttatccacctgccgctgtgtactatgcgcctgcaggacctacctcagcccaaccagctgccaagtggccgcccacagcctctcccccaccagcccggagacaccggcactccatccagctcgacctgggcgacctagaggagctcaacaaggccctgagccgggccgtgcaggctgccgagagcgtccgctctaccaccaggcagatgagaagctcgctgtcagccgacctgcgccaggctcacagcctgcggggctcctgcctcttctgacttcactgggggcccagaggcagatgggtgggtgggtgggcaggtggcctgccaggccaggagtgggctggagctgctgaggcccagaaggcccgcatagttcctcaccaggagggtctccctccagcacaggtcccgcctgctcagtccctgtgctttccaagtggagggggtgtcagctcggtcaccaagagaagtgacttcccaggagcaccagtcccctcacagaggtgctgtgagcgaggcctccttcggtccaggcagaacctcaggcagtctctcctggtcctgcatgtgtgcaactccagctaataataggtattttatatacagatggacagatatttttttaaactggggagttttcctgatcttgggtcctctttagggggccagacaagaaaggcctacggtttctggagcaaacctgtcccccacctgtgaccagtcactctggggcaagcatcactgggaagggcatagccggagacctttctcctagtgactggtagtcagtggggcattttaggatgtcagggccccagggtgacatgtgtccagcttttctatggcagcagaggcctttccctcagacaagctacaaagtgcccaggatgccatccaccatggtccccttcagtacctcacgcatggtccccagcttctcctaggatcccagtggcatttatcagtggccagctacctgccaggcccgggctggggcacggtctgcggccatgaggccaggccgcctcccgcacccctaccccgtggcagcagcatacctctgcatttctggaatgtgtgtgcatcaatgatgtttgtatatttgaggcatttaaaaatctattttcgttacgagggcaaatgaagaatgaatattgatcttaaaaaaagaaaagaagacaaaaaaaatacccaaagccaaacgtgt

SEQ ID NO: 37615 - DNA, 2102 bp, Homo sapiens
ctggggcacagccaggaagaggcctccactccttctgacacagtcatctgagcgctcatgtctgctggaggcggcaccaggggatactcacccaggagtccaggggccaccagccaggccatctgtgagctgcaagaagaggtgtcccggcttcgtctgcggctggaagacagcctgcaccagccactccagggcagcccgacacgcccagcatctgcctttgaccgccccgcccggacccgcggccggccagcagactccccagccacctggggctcccattatggcagtaaatccacagagagattgcctggtgagcctagaggtgaagagcagattgtccctccaggaaggcagcgagccaggtcttcctcagtgcctcgggaggtgctccgactgtccctgagttcagaatctgagctgccctccctaccactgttctctgagaagagcaagaccaccaaggacagtccacaggcagctcgggatggaaagagaggggtgggcagtgctggatggccagacagggtcaccttccggggccaatacacaggccacgaataccatgttctgtcccctaaggcggtcccaaaaggcaatggcacagtctcctgtccccactgccggcccattaggacccaggatgcgggtggtgctgtcacaggggacccactgggaccgcctcccgctgatacccttcagtgtcccctgtgtggtcaagttgggtctcccccagaggcagatggtccaggctcagccacctctggggcagagaaggccaccacgaggagaaaagcaccttcaactcccagccccaagcagaggagcaagcaggcggggtcgtcgccacgcccaccccccggactgtggtatctggcaacagcgcccccagcaccagcccctccagcctttgcctacatctcctcggttcccatcatgccttatccacctgccgctgtgtactatgcgcctgcaggacctacctcagcccaaccagctgccaagtggccgcccacagcctctcccccaccagcccggagacaccggcactccatccagctcgacctgggcgacctagaggagctcaacaaggccctgagccgggccgtgcaggctgccgagagcgtccgctctaccaccaggcagatgagaagctcgctgtcagccgacctgcgccaggctcacagcctgcggggctcctgcctcttctgacttcactgggggcccagaggcagatgggtgggtgggtgggcaggtggcctgccaggccaggagtgggctggagctgctgaggcccagaaggcccgcatagttcctcaccaggagggtctccctccagcacaggtcccgcctgctcagtccctgtgctttccaagtggagggggtgtcagctcggtcaccaagagaagtgacttcccaggagcaccagtcccctcacagaggtgctgtgagcgaggcctccttcggtccaggcagaacctcaggcagtctctcctggtcctgcatgtgtgcaactccagctaataataggtattttatatacagatggacagatatttttttaaactggggagttttcctgatcttgggtcctctttagggggccagacaagaaaggcctacggtttctggagcaaacctgtcccccacctgtgaccagtcactctggggcaagcatcactgggaagggcatagccggagacctttctcctagtgactggtagtcagtggggcattttaggatgtcagggccccagggtgacatgtgtccagcttttctatggcagcagaggcctttccctcagacaagctacaaagtgcccaggatgccatccaccatggtccccttcagtacctcacgcatggtccccagcttctcctaggatcccagtggcatttatcagtggccagctacctgccaggcccgggctggggcacggtctgcggccatgaggccaggccgcctcccgcacccctaccccgtggcagcagcatacctctgcatttctggaatgtgtgtgcatcaatgatgtttgtatatttgaggcatttaaaaatctattttcgttacgagggcaaatgaagaatgaatattgatctta

SEQ ID NO: 37616 - DNA, 1316 bp, Homo sapiens
gccctggatgtgtgcccattattcccattttagaggtaaagaaactgagacccagagagtaggagccactggcccagctgggatttagaagggggttgaccccacacacggtgctcctcggcttgtccccagccctccccatgtgtaacgagcccactcacttctctcctcaggtactatgcgcctgcaggacctacctcagcccaaccagctgccaagtggccgcccacagcctctcccccaccagcccggagacaccggcactccatccagctcgacctgggcgacctagaggagctcaacaaggccctgagccgggccgtgcaggctgccgagagcgtccgctctaccaccaggcagatgagaagctcgctgtcagccgacctgcgccaggctcacagcctgcggggctcctgcctcttctgacttcactgggggcccagaggcagatgggtgggtgggtgggcaggtggcctgccaggccaggagtgggctggagctgctgaggcccagaaggcccgcatagttcctcaccaggagggtctccctccagcacaggtcccgcctgctcagtccctgtgctttccaagtggagggggtgtcagctcggtcaccaagagaagtgacttcccaggagcaccagtcccctcacagaggtgctgtgagcgaggcctccttcggtccaggcagaacctcaggcagtctctcctggtcctgcatgtgtgcaactccagctaataataggtattttatatacagatggacagatatttttttaaactggggagttttcctgatcttgggtcctctttagggggccagacaagaaaggcctacggtttctggagcaaacctgtcccccacctgtgaccagtcactctggggcaagcatcactgggaagggcatagccggagacctttctcctagtgactggtagtcagtggggcattttaggatgtcagggccccagggtgacatgtgtccagcttttctatggcagcagaggcctttccctcagacaagctacaaagtgcccaggatgccatccaccatggtccccttcagtacctcacgcatggtccccagcttctcctaggatcccagtggcatttatcagtggccagctacctgccaggcccgggctggggcacggtctgcggccatgaggccaggccgcctcccgcacccctaccccgtggcagcagcatacctctgcatttctggaatgtgtgtgcatcaatgatgtttgtatatttgaggcatttaaaaatctattttcgttacgagggcaaatgaagaatgaatattgatctta

SEQ ID NO: 37617 - DNA, 1031 bp, Homo sapiens
gaggctggtctcagcttggaaggccatggaaacaccagccccatggctcttgggcatggtcaggccaggggctgggtggcttctggcgaacaagccagtggggacaaactttctgaacattccgaggtcaacccatccgttgaactcagcccggcaaggtcctggagcagtgggacagtgagcctcgaccaccctagtgacagccttgattctacctgggaaggagagaccgatggcccccagcccactgccctggcagaaaccttgccagagggccccagccaccacctcctaagcccagatggcagaactggaggcagtgttgctcgggcaacccccatggaattccaggactcctcagctcccccagcccagagtccgcagcatgccacagatagatggaggagagaaacgaccagattcttctgccctcagcccaaggaacacatctggaagcagacaaagacgtcacctaagccactcccttcccgattcattggctccatcagccccctgaatccccagcccaggccaacgcggcagggcaggccgctgcccagacagggagccactctggctggccgctcctcttctaatgcccccaagtatggccgggggcagttgaactacccactccctgatttctccaaggtagggccccgggtgagattccccaaagatgagagctaccgtccccccaagtccagaagccacaacaggaagcctcaggcccctgccaggcccctcatcttcaagtctccagctgagattgtgcaggaggtgctgttgagcagtggagaagcagccctggcaaaggacacgcctcctgcccaccctatcaccagggtaccccaagaatttcagacgcctgagcaagccactgagctggtccatcagctccaggaagactaccacaggctcctcaccaagtacgctgaggccgagaacaccattgaccagctacgcctcggggccaaggtgaacctgttttcggaaccccccccacactgggtaccgaagactcgaattcg

SEQ ID NO: 37618 - DNA, 296 bp, Homo sapiens
tgggttagcatgtggaggggctcagatgctgccgcctgagtgtctcactctgtgtgacccctgtgtgtcccttcctccacggtcccccagcacagcaggaacattagcccagccctttgctgcatctgtgcccagggatggagcttcctaccccaaggccaggggttctctgattcccagaagagccacagagcccagcacaccccggagccaagcacagaggtacctctccagcccaagtgggcctctccggcagagggcacccaacttcagcctggagcggacactggcagccg

SEQ ID NO: 37619 - DNA, 931 bp, Homo sapiens
  misc_feature (822)..(822): n is a, c, g, or t
gccctggatgtgtgcccattattcccattttagaggtaaagaaactgagacccagagagtaggagccactggcccagctgggatttagaagggggttgaccccacacacggtgctcctcggcttgtccccagccctccccatgtgtaacgagcccactcacttctctcctcaggtactatgcgcctgcaggacctacctcagcccaaccagctgccaagtggccgcccacagcctctcccccaccagcccggagacaccggcactccatccagctcgacctgggcgacctagaggagctcaacaaggccctgagccgggccgtgcaggctgccgagagcgtccgctctaccaccaggcagatgagaagctcgctgtcagccgacctgcgccaggctcacagcctgcggggctcctgcctcttctgacttcactgggggcccagaggcagatgggtgggtgggtgggcaggtggcctgccaggccaggagtgggctggagctgctgaggcccagaaggcccgcatagttcctcaccaggagggtctccctccagcacaggtcccgcctgctcagtccctgtgctttccaagtggagggggtgtcagctcggtcaccaagagaagtgacttcccaggagcaccagtcccctcacagaggtgctgtgagcgaggcctccttcggtccaggcagaacctcaggcagtctctcctggtcctgcatgtgtgcaactccagctaataataggtattttatatacagatggacagatatttttttaaactggggagttttcctgatcttgggtcctctttagggggcganagaagctcggtttgggaaccggcccccgggacgcctcgggcagctccggaggtgcgcactccctgaggccggttggtggccggtgtccttggaggctccaaaggcgcca

SEQ ID NO: 37620 - DNA, 666 bp, Homo sapiens
gaggctggtctcagcttggaaggccatggaaacaccagccccatggctcttgggcatggtcaggccaggggctgggtggcttctggcgaacaagccagtggggacaaactttctgaacattccgaggtcaacccatccgttgaactcagcccggcaaggtcctggagcagtgggacagtgagcctcgaccaccctagtgacagccttgattctacctgggaaggagagaccgatggcccccagcccactgccctggcagaaaccttgccagagggccccagccaccacctcctaagcccagatggcagaactggaggcagtgttgctcgggcaacccccatggaattccaggactcctcagctcccccagcccagagtccgcagcatgccacagatagatggaggagagaaacgaccagattcttctgccctcagcccaaggaacacatctggggcacggtctgcggccatgaggccaggccgcctcccgcacccctaccccgtggcagcagcatacctctgcatttctggaatgtgtgtgcatcaatgatgtttgtatatttgaggcatttaaaaatctattttcgttacgagggcaaatgaagaatgaatattgatcttaaaaaaagaaaagaagacaaaaaaaatacccaaagccaaacgtgt

SEQ ID NO: 37621 - DNA, 2895 bp, Homo sapiens
cacgaggagtgccttgccctaggtcacacagctagaaggtggcagaaccaggctgggcagccagggatgtctgactccagagcttgtgccctgggctgcttggctcccaggacaggccaacccctgcgtcagggctgcctggcagaactcaaggatggtcttctcttcccatgccagggaggccacggagaagatggtatctatgaagccaccaggtttccaggcatccctggctagagacgggcacatgtcaggcctgggcaaggctgaggcagcccctccaggccctggcgtgccaccccaccctccaggcaccaagtccgcagcatcccaccaaagtagtatgaccagcctggagggaagcggcatctctgagcgccttccacagaagcctttgcaccgaggcggtgggccccacctggaggagacctggatggcgtccccagagacagacagtggctttgtgggctcagaaacaagcagagtttcacccctcacccagactccagagcaccggctctcccacatcagcacagcaggaacattagcccagccctttgctgcatctgtgcccagggatggagcttcctaccccaaggccaggggttctctgattcccagaagagccacagagcccagcacaccccggagccaagcacagaggtacctctccagcccaagtgggcctctccggcagagggcacccaacttcagcctggagcggacactggcagccgagatggcggttcctggctcagagtttgaggggcacaaacggatttctgaacagccccttcccaacaagacaatcagcccacccccagcccccgcccctgccgctgcgcctctaccctgtggaccaacagagaccatccccagcttcctgctcaccagggcagggcgagaccaggccatctgtgagctgcaagaagaggtgtcccggcttcgtctgcggctggaagacagcctgcaccagccactccagggcagcccgacacgcccagcatctgcctttgaccgccccgcccggacccgcggccggccagcagactccccagccacctggggctcccattatggcagtaaatccacagagagattgcctggtgagcctagaggtgaagagcagattgtccctccaggaaggcagcgagccaggtcttcctcagtgcctcgggaggtgctccgactgtccctgagttcagaatctgagctgccctccctaccactgttctctgagaagagcaagaccaccaaggacagtccacaggcagctcgggatggaaagagaggggtgggcagtgctggatggccagacagggtcaccttccggggccaatacacaggccacgaataccatgttctgtcccctaaggcggtcccaaaaggcaatggcacagtctcctgtccccactgccggcccattaggacccaggatgcgggtggtgctgtcacaggggacccactgggaccgcctcccgctgatacccttcagtgtcccctgtgtggtcaagttgggtctcccccagaggcagatggtccaggctcagccacctctggggcagagaaggccaccacgaggagaaaagcaccttcaactcccagccccaagcagaggagcaagcaggcggggtcgtcgccacgcccaccccccggactgtggtatctggcaacagcgcccccagcaccagcccctccagcctttgcctacatctcctcggttcccatcatgccttatccacctgccgctgtgtactatgcgcctgcaggacctacctcagcccaaccagctgccaagtggccgcccacagcctctcccccaccagcccggagacaccggcactccatccagctcgacctgggcgacctagaggagctcaacaaggccctgagccgggccgtgcaggctgccgagagcgtccgctctaccaccaggcagatgagaagctcgctgtcagccgacctgcgccaggctcacagcctgcggggctcctgcctcttctgacttcactgggggcccagaggcagatgggtgggtgggtgggcaggtggcctgccaggccaggagtgggctggagctgctgaggcccagaaggcccgcatagttcctcaccaggagggtctccctccagcacaggtcccgcctgctcagtccctgtgctttccaagtggagggggtgtcagctcggtcaccaagagaagtgacttcccaggagcaccagtcccctcacagaggtgctgtgagcgaggcctccttcggtccaggcagaacctcaggcagtctctcctggtcctgcatgtgtgcaactccagctaataataggtattttatatacagatggacagatatttttttaaactggggagttttcctgatcttgggtcctctttagggggccagacaagaaaggcctacggtttctggagcaaacctgtcccccacctgtgaccagtcactctggggcaagcatcactgggaagggcatagccggagacctttctcctagtgactggtagtcagtggggcattttaggatgtcagggccccagggtgacatgtgtccagcttttctatggcagcagaggcctttccctcagacaagctacaaagtgcccaggatgccatccaccatggtccccttcagtacctcacgcatggtccccagcttctcctaggatcccagtggcatttatcagtggccagctacctgccaggcccgggctggggcacggtctgcggccatgaggccaggccgcctcccgcacccctaccccgtggcagcagcatacctctgcatttctggaatgtgtgtgcatcaatgatgtttgtatatttgaggcatttaaaaatctattttcgttacgagggcaaatgaagaatgaatattgatctta

SEQ ID NO: 37622 - DNA, 1300 bp, Homo sapiens
gcggccgcccccggggagcccggcgggcgccggcgcgcccccccccacgcccaccccccggactgtggtatctggcaacagcgcccccagcaccagcccctccagcctttgcctacatctcctcggttcccatcatgccttatccacctgccgctgtgtactatgcgcctgcaggacctacctcagcccaaccagctgccaagtggccgcccacagcctctcccccaccagcccggagacaccggcactccatccagctcgacctgggcgacctagaggagctcaacaaggccctgagccgggccgtgcaggctgccgagagcgtccgctctaccaccaggcagatgagaagctcgctgtcagccgacctgcgccaggctcacagcctgcggggctcctgcctcttctgacttcactgggggcccagaggcagatgggtgggtgggtgggcaggtggcctgccaggccaggagtgggctggagctgctgaggcccagaaggcccgcatagttcctcaccaggagggtctccctccagcacaggtcccgcctgctcagtccctgtgctttccaagtggagggggtgtcagctcggtcaccaagagaagtgacttcccaggagcaccagtcccctcacagaggtgctgtgagcgaggcctccttcggtccaggcagaacctcaggcagtctctcctggtcctgcatgtgtgcaactccagctaataataggtattttatatacagatggacagatatttttttaaactggggagttttcctgatcttgggtcctctttagggggccagacaagaaaggcctacggtttctggagcaaacctgtcccccacctgtgaccagtcactctggggcaagcatcactgggaagggcatagccggagacctttctcctagtgactggtagtcagtggggcattttaggatgtcagggccccagggtgacatgtgtccagcttttctatggcagcagaggcctttccctcagacaagctacaaagtgcccaggatgccatccaccatggtccccttcagtacctcacgcatggtccccagcttctcctaggatcccagtggcatttatcagtggccagctacctgccaggcccgggctggggcacggtctgcggccatgaggccaggccgcctcccgcacccctaccccgtggcagcagcatacctctgcatttctggaatgtgtgtgcatcaatgatgtttgtatatttgaggcatttaaaaatctattttcgttacgagggcaaatgaagaatgaatattgatctta

SEQ ID NO: 37623 - DNA, 3254 bp, Homo sapiens
gaggctggtctcagcttggaaggccatggaaacaccagccccatggctcttgggcatggtcaggccaggggctgggtggcttctggcgaacaagccagtggggacaaactttctgaacattccgaggtcaacccatccgttgaactcagcccggcaaggtcctggagcagtgggacagtgagcctcgaccaccctagtgacagccttgattctacctgggaaggagagaccgatggcccccagcccactgccctggcagaaaccttgccagagggccccagccaccacctcctaagcccagatggcagaactggaggcagtgttgctcgggcaacccccatggaattccaggactcctcagctcccccagcccagagtccgcagcatgccacagatagatggaggagagaaacgaccagattcttctgccctcagcccaaggaacacatctggaagcagacaaagacgtcacctaagccactcccttcccgattcattggctccatcagccccctgaatccccagcccaggccaacgcggcagggcaggccgctgcccagacagggagccactctggctggccgctcctcttctaatgcccccaagtatggccgggggcagttgaactacccactccctgatttctccaaggtagggccccgggtgagattccccaaagatgagagctaccgtccccccaagtccagaagccacaacaggaagcctcaggcccctgccaggcccctcatcttcaagtctccagctgagattgtgcaggaggtgctgttgagcagtggagaagcagccctggcaaaggacacgcctcctgcccaccctatcaccagggtaccccaagaatttcagacgcctgagcaagccactgagctggtccatcagctccaggaagactaccacaggctcctcaccaagtacgctgaggccgagaacaccattgaccagctacgcctcggggccaaggtgaacctgttctctgacccaccccagcccaaccacagcatccacacgggaatggtgccccaggggaccaaggtcttgtccttcaccatcccacagccccgctctgcagagtggtggccgggcccggccgaggacccccaggcctctgcggcctcagggtggccatcagctcgaggagacttgagcccctcctcgcttaccagcatgcccaccctggggtggcttccggagaaccgggacatctctgaggaccagtcctcagcagagcagacccaggcactggcttctcaggccagccagttcctggccaaggtggagtcctttgaaagactgatacaggcaggacgtctcatgccccaggaccaagtcaagggcttccagcggctgaaggctgcccacgcggccctagaggaggagtacctgaaggcttgtcgggagcaacaccctgcccagccgcttgccggctccaaggggacgcctggaagatttgatcctcgcagggagctggaggcagagatataccgtctgggaagctgcctggaagagctgaaggaacacatagaccagacccagcaagagcctgagccgcccgggtcagactcagctctggacagcaccccagccctgccctgcctccatcagccaacgcacctgcctgctccttctggacaagcccccatgccagccatcaagacctcctgccctgagcctgctaccaccactgccgccgccagcactggcccctgcccattgcacgtaaatgtggaggtgagctctggcaacagtgaggtggaggacaggccacaggaccccctggcccgactcaggcacaaggagctgcagatggagcaagtttaccatggcctcatggagcggtacctcagtgtgaagtctctcccagaagccatgagaatggaggaggaggaagaaggagaggaggaggaggaggaagaggggggaggtgactccctggaagttgatggggtggctgcaactccagggaaagcagaggccaccagggtcctcccaaggcagtgcccggtgcaggctgagaaaagtcatggggctcccctggaggaggccacggagaagatggtatctatgaagccaccaggtttccaggcatccctggctagagacgggcacatgtcaggcctgggcaaggctgaggcagcccctccaggccctggcgtgccaccccaccctccaggcaccaagtccgcagcatcccaccaaagtagtatgaccagcctggagggaagcggcatctctgagcgccttccacagaagcctttgcaccgaggcggtgggccccacctggaggagacctggatggcgtccccagagacagacagtggctttgtgggctcagaaacaagcagagtttcacccctcacccagactccagagcaccggctctcccacatcagcacagcaggaacattagcccagccctttgctgcatctgtgcccagggatggagcttcctaccccaaggccaggggttctctgattcccagaagagccacagagcccagcacaccccggagccaagcacagaggtacctctccagcccaagtgggcctctccggcagagggcacccaacttcagcctggagcggacactggcagccgagatggcggttcctggctcagagtttgaggggcacaaacggatttctgaacagccccttcccaacaagacaatcagcccacccccagcccccgcccctgccgctgcgcctctaccctgtggaccaacagagaccatccccagcttcctgctcaccagggcagggcgagaccaggccatctgtgagctgcaagaagaggtgtcccggcttcgtctgcggctggaagacagcctgcaccagccactccagggcagcccgacacgcccagcatctgcctttgaccgccccgcccggacccgcggccggccagcagactccccagccacctggggctcccattatggcagtaaatccacagagagattgcctggtgagcctagaggtgaagagcagattgtccctccaggaaggcagcgagccaggtcttcctcagtgcctcgggaggtgctccgactgtccctgagttcagaatctgagctgccctccctaccactgttctctgagaagagcaagaccaccaaggacagtccacaggcagctcgggatggaaagagaggggtgggcagtgctggatggccagacagggtcaccttccggggccaatacacaggtaggtcaggagggagggccgggatgggtgc

SEQ ID NO: 37624 - DNA, 849 bp, Homo sapiens
aagctgaccccaggagtccttctttccagcagcaggtcttgagctgcacttctctgtagctacaatccaggcaggaacaagccctaggtacctccggagaggagggcaagagaggaagaatgagttcagctactctagccaccaaactgattatgaattgccctgaaatctgaaaaatttcaattccaatcgtaagtttgttttgtttcattttgttttcttaaattgtatatttgaaagatggcattaactaaagatatatattcaatatagagtggaaaaaatggaatacttgcatagtatcttttacttataggtgatttatgatggggagtggggtggataggttggcagttcccccaagaagttggaaatgaagtttgtcctctgtgagttgaactaattagatccacaagtaatgaaagcagtattgtgttgtagttaagagcacactctagaaccagattgcttagtttcaaatcctggttctgccttttattatctgtgtactttgggcaagttacttgccctttgtgtgcttcatttttctcatctagaaaatggagaggccaggcgtagtggctcatgcctataatcccagcactttgggaggccgaggcgggcagatcacctgaggtgagaagttcaagaccagcctggccaacatggtgaaaccctgtctctacaaaaatacaaaaattagccaggcatgatggcgggtgcctgtaatcccagctacccaggagcctgaggcgggagaaacacttgaacctggaaggcagaggttgtagtgagccaggattgcaccactgcactccagcctgggtgacaagagctagactcagacta

SEQ ID NO: 37625 - DNA, 372 bp, Homo sapiens
gaagactatggtacagattgcgacaacatgagagtaacggccttcttggacattccaggccaggataacctgcctccactcactcgcctggagaagtatgctttcagcgagaacaccttcaaccggcagattattgccagagggctgcttgatatcttccgggacttcggtaacaatgaagaagacttcctcacggtaatggagattgtagtcagattgtcagaagatgcagagcccacagtgcggactgagctgatggaacagattcctcctattgccatttttttacaagaaaacagatcaaattttccagtggtgctctctgaatatctcatacctattgtagtgaggtacctcacagatccaaacaat

SEQ ID NO: 37626 - DNA, 428 bp, Homo sapiens
agctggttatataatgcgcgatgtggctaacaagaaaggcaagctatttttattttgtttaccgtatgctgtgcagtagggactcctccaaactggttctgtccccgaagagattcttagcttccctgcgagatccacaggatacaattagcaaaattagaagaccctattacacccacagaataaaaactaatgccttacagtggctttctccctgcacatcctgtcgtgcatgcacgggaatgtgtgtatgcaaataagttctcctttggcaatctagtagtcacatctcaatgacatttgtgttttataatgcaggctgtttttaatatttaaacatcattgttatatattgcacacagcagtgggtagttacttggttatttttaggcacagctagttactttttcaacagtgttagctgagac

SEQ ID NO: 37627 - DNA, 600 bp, Homo sapiens
agggagcccgccttgggggcgggggtctctgcagcctgttctggggctgggcctcggtgcaggtctggtcgggctggtggcctggtggccctgagcggagcgcgtgacaagaacgccgggtttaatgaggttctcagggaacggcctgctcctagcatgggatgtactttacgctggggaggtgaaggagacccctagtaacagtctccagctgcctactgctggaggcagtagaacaaggtgcattcccaagaacaatcctctccgtcggtgcaggaggaaaggtgggatttgctaaaggctcagtgggaaacaaaggaagcacttgggctgtgctgggggcatccacaaagaagataaagggctcctccccagactcagtgaccacatccacggtcgctcaaagcaggcagcaagaaaaggttcgaccacaaaagagacaataggtgatgatatttttattcgttgctttttacttttcaagctaacccttcatgggaaagtaactgtataagactattaaatttttttgttattttttaaaggagaatgccaatttattaacttacaatgtgtaataaaattgtcaactggaacaaa

SEQ ID NO: 37628 - DNA, 366 bp, Homo sapiens
ggagaaggaccttcacgttgtgcacatgtaccctagaacttaaagtataataatgaggagaaagaaagtggacgttcactacaaattttgattttttgttgttgttgtttgatgttgcagaaatgatacagtgtatctgtaatgattttgtgagtaaatgtttaatttttcacagattttataaagttaaagatgaagcaagatgattcaggaatcctgtaacttgcagcccacttcccacttcccaatccaacccatatccatcaccagcttgagaaagggaaagggaggaggacccagcaaagtggttgaatctcagcaaatcaatgagtttggaaagaaacagtttcagactgaagattgcag

SEQ ID NO: 37629 - DNA, 380 bp, Homo sapiens
caaattcaccagccaatccagagaggtctaaatagtagaccagtgccctgcccatgttgatttctgattcgtcattactcttacctctgtcttaatagctgtcatttgctccctgcttgctatctgctgggtgatctcaatgctttctctgtattctccttaagccttacagggactcaatgggatgtgcctgctgttattatacccattttaacagataaggaagctgagcctagaaagattgtataacttgtccaaggttactaggcaacaaaggcagaactaggcttcaagcctaagcctgatttcaaagcttttgctttttaacaaccacacagacccttttttattcttccttatttcagttatcaattgcacaa

SEQ ID NO: 37630 - DNA, 401 bp, Homo sapiens
gttgcttccaagaaaaagaatctcattctggggagtgtgttagctagggctttcactttgaaacatgcattatttatttgttattattattattatgcagaaagaacaacaaatggcttaaattaggcaccaagacacaggagttaaaatgtgtccttttgtcaaagagaatcataatgcaatcttacccgtatatggcatgtaactatatagtttacaaagagcttttatacgttcatcatcttgcttgattctcaaaaccaccctgtgcgtgggaaaggtcaccaaccccacttcacatatcaggacactgagaccttggatatgttcagagacttgctcaaggacacacaagcaggacaagctggcagaggaatctaagtcttcaattttcttctctg

SEQ ID NO: 37631 - DNA, 340 bp, Homo sapiens
ctaatgtaaaaaagttgaattgatgtttttaaaatttattgttactgcccaaatatcttgttttaagttcaaagaattgtttataggttagcaaaatacaatacaaaaacaccatgggaagtcttaaaacatgagagcctacagataatactgcaaacagtgaagagatttggttaaacattgaaagtatgcaatatacctggtctgtgtttacagaaaagttagaaaaacttcctcggaatacacctaaaattaagagcccagaggaaaaccaggtggccggctgattgcaacataccaggaatacacataatttaggatttctgattaacatcaactg

SEQ ID NO: 37632 - DNA, 336 bp, Homo sapiens
ctcagcgttattgggatagtctctgtctgtctagatctggactctgctttctttttgttgattgtcttataaggcaagttttccgacgcagaggctgctagaatcctcaagtttacattctaccagtggaagcaactctatgttccttgttgtcctagcaaaaccctatgccaagaactgttttgggtcttgtatagttgtggtcatgtgtgcattactggagtcatagccaggtcagccacttatggtgtggacttgttattttagagatgagttctcaaaagaaacttgaattagcctgggcaacaaagcaagactctgactcttaaaaaaaaa

SEQ ID NO: 37633 - DNA, 470 bp, Homo sapiens
cacttctgtcggtaatttttatgctcaccagacgccaaaacccaccattctagaaagtagatgatgcaaactattattacagtggagagaagaaatatttaataacagtcaatactgtctcagtttgtgcaatgtcccatgcaaatactagtactctataagtattagttcatttaaaacagcagtccccaacctttctggaaccagagaccagagttcacttaaaacagcggtccccaaccttttgcatcaggcaccagttttgtggaagacagtttttccatggaccacggtgtggggaggggtgcagttaagatgggtttttggatgaaactgtttcagctcagatcataaggcattagattgtcataaggaatgtgcaacctagatccctcacatatgcaattcacaatagggttcctgcttctgtgagaatctattgccattgctgatctgataggagacagggc

SEQ ID NO: 37634 - DNA, 414 bp, Homo sapiens
tcaatgtaggttcccatcaatgttggatgggataaagaaaatgtggtgctgtacaccatggaatactatgtaagccttaaaaaatattgaaatcatgtcctttgcaggaatatagatggaactggagtccaaaatcctaagtgaattaatgcagaaacagaaaactaaatacctcatgttctcacttataactgggagctaaacttgagcacccatagacttaaacatgggaacaatagccatggcaaactactatagggtcaagggagtggggcatgggtcataaaagcatctcttgggtatatgctcactacctgagtccaatatacccacgtaacaaacctgcacattaccccccccatatctaaaataaaagtcaagggtagaaaagcacactttgaaatttaagggatg

SEQ ID NO: 37635 - DNA, 3727 bp, Homo sapiens
ggcgggcagccgccggcggctgggagccgaggcgtcggtgcagacctggagacgggcatgggggggctgcggctgctggctgtggccctcacgtgctgctggtggccgcagggcagccagggtaagaccctgcggggcagcttcagcagcaccgcggcccaggacgcccagggccagcgcatcggccacttcgagttccatggtgaccatgctcttctgtgtgtcagaatcaacaacatagcagtagctgttggaaaagaagctaaactctacctgttccaagcccaggaatggctaaagctacagcaaagcagtcatggttatagctgtagtgaaaaattatccaaagctcagttgacaatgaccatgaaccagaccgaacataatctgacagtgtcccagattccgtctccacaaacgtggcatgtgttttatgcagacaagtatacatgccaagatgacaaggagaattctcaggtggaagatatcccatttgaaatggtgttactaaacccagatgctgaagggaatccatttgatcattttagtgctggagaatctgttactccaaagatggaataggggtaccatttatgggaagtttggcagaattttttgacatcgcttcccaaattcagatgttatacttacttttgagtctatgcatgggttggacaatagtcagaatgaagaagtctcaaagcagacctctccagtgggattctacgcctgcatccactggcattgcagtattcattgtcatgacacagagtgttttgctactttgggaacagtttgaagatatcagtcatcatagctaccattcacaccacaacttagcagggatcctcctaattgttctaagaatttgcctagcattgtcattaggctgtggactctatcagatcatcacagtggagagaagtacactcaaaagggagttctacatcacatttgccaaaggctgtatcttgtggtttttatgccatccagttcttgcatgcatttctgtcatttttagcgactaccaaagagacaaggttattacaataggtgttatcctttgccagtctgtttccatggttattctctacagactctttctgtctcacagtctatactgggaagtttcttcactttcttcagtaacactaccactgaccatatcatctggacacaaaagtcgccctcatttctgatacttgatttttgttgagaggaaaagtgaattggttaaaagagtgcaataaggatccaaatacagtgacttttttttcatacatttagtatgaaaacttgaacagcgaaagcagagcatgttatttatataactgcatttaagcagtaccaagactgaaaaaaaaggtaataaatgaaatgttttgaaatatacttaaacaacaaactttgaagaaagtgttgttataaaattattgaagcgatttctatgtggaaataaatgtgaaaaataactatgatattttggtaaaatattcaccacttataatgcctcatcttaatagctaactcaggtttaatagtcttataaaaagtaatcagttaaatgattacttgcttataaatatctaaactagtccagttatgaaatcagtgtaatacattgatttttaaaactgctgctttttatgctttaaggaaaatgtatttcatatttgagtttaaaggaattgaaattacttcaggaaatgaatataaaataggttcacagttaaatgaataagcttttgtttatttgtgggtggagttattctccaattttttctgccatttttggctctagttcaggttttagcttgattagcaaaggtttttgacaaacagtttatgaaaaaataaaacttaaatacattacacgggttgtaaggacaaaggattttaaaatctgagcacttaggtgaagggacaagcaggtttatgtgtttaaacagaaagaagggaaaaggtactatgtgatatggtactgaaattttgatcccaatagaattcatttctcttacgttgaatccccaatcataattaagccgtatacacagattaaattaacagaagcatttcacataaatgttggtttcagtcatcaactacccatgaattcctgcccaaggatacttaatcaggattaaattttctatgaataattgaaaaacaaaacactcactggatttgttataatccgtgttggcactggattctaagtagttgccatcttgaatcctttgtaataaagccatacttttgtgtgtgtgtgtgatgccccagtattgagtatgctagctaaaaaatatcaagtgcctgattaaagaattgctaaatggttgtcaatactcgctgtataaaatgagtattcccattaatagtcactgattggaaattattctgttgctgtttgtcaagctgttcaggccttttcctttttacttctggcttattttaaaaatattttttatctatttactgtgtgtttaagcaagcaacagtgcactgatctggtagttaaattttttaattaaatagttaaaataatgtagtgcaacttaaaaatatctatggctttgtttttgtttttcttttgtacctagtctcattggaaatgactagtattctgcctcattttcagggcagaatatgtgtttgtgacccaaaatgacaaagttaccaagttcaacctgctcatttaatcatctctctattagttctttgtaaatcacttagtacattagagctacaggttaagactagaaagtctgagttatgttttaggtatacatgatcgtctgagtggtcataaccttttcttttatcatgtctcgctaataaccccagctattgtctgttgtgttcagctgagatgcaaaaaagaaattaagcaaaaaagaaaaaggtgaagacttttcatgaattttgtgaacttgccaaaaggggaagggaaaaatctttgtgttacttcactcaaagaacataagtaactgcaattaacatatatgaaatttattactctgcttgcatttatgaaactaaccagttttttaaactttaattcttaaatttgtggttggaaatgctgataatttattttgttatttaagagctgttgttaagtggaggaaagtagttgttaataaatgtataaaactgttcttgactagtaatcagggacaaaatttatagttcataagtcatgacacagtattcgctctttttctgaatgtttacatagagattcatcactgcagattacagaaagttaagtgtatactacaaactctaattaaagataaaaatcttttctacttttctttgtcagataatgcttttttatgtgtttttacattttttgaaagaagataaatggttcatccagagctttattaagaagcatttcttttcttcccttaaaaaatagatgcttatttttattgacatgtgtataataagatgggtgcctactgtgatgcattttaccaggcattttaccttcattattactcatctctattgtgataaccaggctcccatttaactgagtataagagagaataaatgatttctctaaggtcatcaaactatttagtttttccactttaccttcatgatttaaggaacatgtattagctgtgttttagtgagaatgaattgctatccatcataatttttgctgttgatttgaacattaaaactggaattgtgctaaaatcagaaaatgcgc

SEQ ID NO: 37636 - DNA, 3908 bp, Homo sapiens
ggcgggcagccgccggcggctgggagccgaggcgtcggtgcagacctggagacgggcatgggggggctgcggctgctggctgtggccctcacgtgctgctggtggccgcagggcagccagggtaagaccctgcggggcagcttcagcagcaccgcggcccaggacgcccagggccagcgcatcggccacttcgagttccatggtgaccatgctcttctgtgtgtcagaatcaacaacatagcagtagctgttggaaaagaagctaaactctacctgttccaagcccaggaatggctaaagctacagcaaagcagtcatggttatagctgtagtgaaaaattatccaaagctcagttgacaatgaccatgaaccagaccgaacataatctgacagtgtcccagattccgtctccacaaacgtggcatgtgttttatgcagacaagtatacatgccaagatgacaaggagaattctcaggtggaagatatcccatttgaaatggtgttactaaacccagatgctgaagggaatccatttgatcattttagtgctggagaatctgggttacatgagttctttttcctcctagtcctagtgtactttgtgattgcttgcatttatgctcaatcattgtggcaggctattaagaaaggcggacccatgcacatgattttaaaggttctgacaactgcattgctgttacaagctggttcagctttagctaattacattcatttctccagttactccaaagatggaataggggtaccatttatgggaagtttggcagaattttttgacatcgcttcccaaattcagatgttatacttacttttgagtctatgcatgggttggacaatagtcagaatgaagaagtctcaaagcagacctctccagtgggattctacgcctgcatccactggcattgcagtattcattgtcatgacacagagtgttttgctactttgggaacagtttgaagatatcagtcatcatagctaccattcacaccacaacttagcagggatcctcctaattgttctaagaatttgcctagcattgtcattaggctgtggactctatcagatcatcacagtggagagaagtacactcaaaagggagttctacatcacatttgccaaaggctgtatcttgtggtttttatgccatccagttcttgcatgcatttctgtcatttttagcgactaccaaagagacaaggttattacaataggtgttatcctttgccagtctgtttccatggttattctctacagactctttctgtctcacagtctatactgggaagtttcttcactttcttcagtaacactaccactgaccatatcatctggacacaaaagtcgccctcatttctgatacttgatttttgttgagaggaaaagtgaattggttaaaagagtgcaataaggatccaaatacagtgacttttttttcatacatttagtatgaaaacttgaacagcgaaagcagagcatgttatttatataactgcatttaagcagtaccaagactgaaaaaaaaggtaataaatgaaatgttttgaaatatacttaaacaacaaactttgaagaaagtgttgttataaaattattgaagcgatttctatgtggaaataaatgtgaaaaataactatgatattttggtaaaatattcaccacttataatgcctcatcttaatagctaactcaggtttaatagtcttataaaaagtaatcagttaaatgattacttgcttataaatatctaaactagtccagttatgaaatcagtgtaatacattgatttttaaaactgctgctttttatgctttaaggaaaatgtatttcatatttgagtttaaaggaattgaaattacttcaggaaatgaatataaaataggttcacagttaaatgaataagcttttgtttatttgtgggtggagttattctccaattttttctgccatttttggctctagttcaggttttagcttgattagcaaaggtttttgacaaacagtttatgaaaaaataaaacttaaatacattacacgggttgtaaggacaaaggattttaaaatctgagcacttaggtgaagggacaagcaggtttatgtgtttaaacagaaagaagggaaaaggtactatgtgatatggtactgaaattttgatcccaatagaattcatttctcttacgttgaatccccaatcataattaagccgtatacacagattaaattaacagaagcatttcacataaatgttggtttcagtcatcaactacccatgaattcctgcccaaggatacttaatcaggattaaattttctatgaataattgaaaaacaaaacactcactggatttgttataatccgtgttggcactggattctaagtagttgccatcttgaatcctttgtaataaagccatacttttgtgtgtgtgtgtgatgccccagtattgagtatgctagctaaaaaatatcaagtgcctgattaaagaattgctaaatggttgtcaatactcgctgtataaaatgagtattcccattaatagtcactgattggaaattattctgttgctgtttgtcaagctgttcaggccttttcctttttacttctggcttattttaaaaatattttttatctatttactgtgtgtttaagcaagcaacagtgcactgatctggtagttaaattttttaattaaatagttaaaataatgtagtgcaacttaaaaatatctatggctttgtttttgtttttcttttgtacctagtctcattggaaatgactagtattctgcctcattttcagggcagaatatgtgtttgtgacccaaaatgacaaagttaccaagttcaacctgctcatttaatcatctctctattagttctttgtaaatcacttagtacattagagctacaggttaagactagaaagtctgagttatgttttaggtatacatgatcgtctgagtggtcataaccttttcttttatcatgtctcgctaataaccccagctattgtctgttgtgttcagctgagatgcaaaaaagaaattaagcaaaaaagaaaaaggtgaagacttttcatgaattttgtgaacttgccaaaaggggaagggaaaaatctttgtgttacttcactcaaagaacataagtaactgcaattaacatatatgaaatttattactctgcttgcatttatgaaactaaccagttttttaaactttaattcttaaatttgtggttggaaatgctgataatttattttgttatttaagagctgttgttaagtggaggaaagtagttgttaataaatgtataaaactgttcttgactagtaatcagggacaaaatttatagttcataagtcatgacacagtattcgctctttttctgaatgtttacatagagattcatcactgcagattacagaaagttaagtgtatactacaaactctaattaaagataaaaatcttttctacttttctttgtcagataatgcttttttatgtgtttttacattttttgaaagaagataaatggttcatccagagctttattaagaagcatttcttttcttcccttaaaaaatagatgcttatttttattgacatgtgtataataagatgggtgcctactgtgatgcattttaccaggcattttaccttcattattactcatctctattgtgataaccaggctcccatttaactgagtataagagagaataaatgatttctctaaggtcatcaaactatttagtttttccactttaccttcatgatttaaggaacatgtattagctgtgttttagtgagaatgaattgctatccatcataatttttgctgttgatttgaacattaaaactggaattgtgctaaaatcagaaaatgcgc

SEQ ID NO: 37637 - DNA, 2272 bp, Homo sapiens
ggcgggcagccgccggcggctgggagccgaggcgtcggtgcagacctggagacgggcatgggggggctgcggctgctggctgtggccctcacgtgctgctggtggccgcagggcagccagggtaagaccctgcggggcagcttcagcagcaccgcggcccaggacgcccagggccagcgcatcggccacttcgagttccatggtgaccatgctcttctgtgtgtcagaatcaacaacatagcagtagctgttggaaaagaagctaaactctacctgttccaagcccaggaatggctaaagctacagcaaagcagtcatggttatagctgtagtgaaaaattatccaaagctcagttgacaatgaccatgaaccagaccgaacataatctgacagtgtcccagattccgtctccacaaacgtggcatgtgttttatgcagacaagtatacatgccaagatgacaaggagaattctcaggtggaagatatcccatttgaaatggtgttactaaacccagatgctgaagggaatccatttgatcattttagtgctggagaatctgggttacatgagttctttttcctcctagtcctagtgtactttgtgattgcttgcatttatgctcaatcattgtggcaggctattaagaaaggcggacccatgcacatgattttaaaggttctgacaactgcattgctgttacaagctggttcagctttagctaattacattcatttctccagttactccaaagatggaataggggtaccatttatgggaagtttggcagaatgtgagtatctttctgagcattttttaaaaagcttttacactcgctatctgctttttttttatttcttgtcatagtataaattttctgtcgaaaattgtttagaaatcagcttgactgagaacaggattacagtttaagttcccatatgtcttacttagtttcttcttaataataggtaatgtgtacagctcctcgttgtttttttgtttgtttgtttgagacagggttcttactccgtagcccaggctggagtgcagtggcacagtcacggctcactgcagcctcaaactcctaggctcaggtgatcctcctgcctcaggccttcccagtagctgggattacaggcacataccatcatgcctggctgatttttaaatttccttttctgtagatggggtctcactatgttgcccaggctggccttatactcttgggcttgagggatccacccaccctggcctcccaaagtcctggaattacaggcatgagtctccacactctgccttttcattgtttttaggtatatttatatacattctctcatcttatcctcaatagaaaaggggtctgcatatccttattttgcagataaaggatctgggctcagtgatgtgaaacatacttccacatgtcagtcagctattgagtggtagagactagactcagacctaaattttcttacctcaaagctgaagtttttcttcctattataattccactctctgttataactgactcttttctatttctgacccaaagcctaaaactcacatcaaaatatgctgtgaagaaaagtgataagttttcttaaaaatcattaaatgctacctcataaaataaatatatatatgaaacttgaagcatttatagatttctgttgttttcttgtagtgttaacctggatacaggtggttttgatacatcttttctgtttgaagtagcaggcttcccctgcagtgtaggtgatggccacctggtggcacatcacactaatgcatggagcttctcatttgtcttcaggattctgaaagtaaagccaatgtttggatgttatgggagctatgcatttcattgtattgtttcttgttaatagttttagaaaatactcttcacattatagttcagccatcaaaaaaaattcacccagaaatgaaggtactagtattctccatattgcagaaatcgtatttagaatttgctttaataagcagtgagttatagagaacaggattatgtagttagaaaagctaagaaaaatgggaaacgaaaagagttaaggttggacttaatggacatatggtatgggcatatatatgtatttttaaatagtattgctgctgttttaactattttaataaatatattacaaaatttatggcaatttttaaatctttagaattattacctgcgaatatctcttaatgaatttcgttagcttctctttgaaaatggctttttgtggtttttcttaaaaaaaaa

SEQ ID NO: 37638 - DNA, 380 bp, Homo sapiens
  misc_feature (359)..(359): n is a, c, g, or t
aattaccctgaatttctaagtagaatattatactttttaaaagactttcagatgtaattctaagctttaaaaaaaaaaaaaaattctaccacagttacattgcttaccaaatactgagttccattacttttctttttttcctttttaatttttttgagacaggttcttgctctgtcacccagggctggagtgcagtggcacaatctctactcattgcaaccttgggcctcctgggcttcaagagatcctcccacatcagcttcccaggtagctgagactacaggcacatgccaccacgcccaggtaatttttgtatttttttagagacagcgttttgccacgttgcccatggtggggtngacaggggcaaggaacctttt

SEQ ID NO: 37639 - DNA, 593 bp, Homo sapiens
aattaccctgaatttctaagtagaatattatactttttaaaagactttcagatgtaattctaagctttaaaaaaaaaaaaaaattctaccacagttacattgcttaccaaatactgagttccattacttttctttttttcctttttaatttttttgagacaggttcttgctctgtcacccagggctggagtgcagtggcacaatctctactcattgcaaccttgggcctcctgggcttcaagagatcctcccacatcagcttcccaggtagctgagactacaggcacatgccaccacgcccaggtaatttttgtatttttttagagacagcgttttgccacgttgcccatgctgatctcaaactccttggcaagtgatccgcccacctcagcctctcaaattgctcagattacaggcatgagccaccatcacgcccagccccattactgtctccctccaacccccacctgagacagggtttcactctgttgcccaggtggactgccaaggtgcaaacacagcttaccacagcctcgacctcccaggctcagtctctgaagtagctgggactacaagcatgcaccaccatgctc

SEQ ID NO: 37640 - DNA, 313 bp, Homo sapiens
gtcccattcttcccaacatgtttctgaagcaactttgtatttctgtctgcagattttcaggtccaggacccgtcaatcaaatttcagattctaataaagtccaagggtctctccacttaggtttgtcttagctgtttcatcaatgagcccctccccctttcccagcaaattgcacacttattcccacttaaaaaaaaaaaagagagagagagagagacagaaaaataacccttcccactggttctaatgacatcttcagtcattaatgagttaataaaaatctcgaagtcatctgggctagataagaaagaag

SEQ ID NO: 37641 - DNA, 208 bp, Homo sapiens
aacagagaactagaatttattttctaaaaatccaatgaatgtcctagagttaaatataagactttaagttagcaaatgataacatctgttcatagacatgaatgtctgatatgaagaaggtgaatatttttagtagctttattccttcgtttagtttctcaatctccaaaaccgtatccaggccatcaccaatcattctatcgcaatg

SEQ ID NO: 37642 - DNA, 188 bp, Homo sapiens
ggtgggataaagtgtggtgagaacatgactaaatgtcaaagtagatcagacagaataggagcaccttggcaattctgatggaggggtccagaaacaatactttgaaaagcacaaccatagggcaactgttggagggaaagttcctggctctaggtgctctgctagactgtctggtgttggggactgtc

SEQ ID NO: 37643 - DNA, 414 bp, Homo sapiens
tttaagaaattacaaataccttggaaatatatctaatgaaagatatgtaagacctctacattgaaaactaaaacactaatgagataaatgaacagaaactttaaataaaattgaagatatttaatggactcaatattaagatgtcaattctccataaattgatctacaaattcaatgcaatctgaattaaaatcccagcaagattttgaatatgtgtttgtttataaaaattaacaagctgattctcaaattgatataacaatgcaaaggacctagaatagctaagataatgttgaagagtaacaaagttagaagatttacactaccagatagacttattataaagctacaataatgatgacagtacattactggcacacgacagagaccaacggaacagaataaatagtccag

SEQ ID NO: 37644 - DNA, 363 bp, Homo sapiens
gttttgggataacatgaattattacactttcgtgtgtgatacagttatacttaacgcattctaaaataattcatggagttctaaaataagaacactaggtttttatagtaagtatattatattgttagttttaaaaatattataaccagatgagatcttagtgattattcaatttctgttacagataaggttaggtaaagcccagataggttaagtgaattccctatgatttccagctagagttaggcttggaactcaagaatcttgggttctttctcttaggtctgcatgttttctgctataccatccttaggaaactctgttatctccttacccacaatttcatgtgtagataaaatgaag

SEQ ID NO: 37645 - DNA, 658 bp, Homo sapiens
gtcaaaatctaagtgacttctttcaagccatttagtaaagagttttgcaaaagtgtaaaacaaaatgttttgcttcttaccatatttttgcatatatatttaagattttttaacagtttttcctttctaatgtggtaactatttataatccatgtgtataaagaagtcctgaaaccaagatgtttgaaaatcactgatatgtagatctatggattataaaaaaagctcatgattttttagaatctatattagaaatcctcatgtatttacagtgagttgtattctagagttttctttaaaattgccttatagtcagtggaagtagtgtgaaggagaataaaatagtctgaaatgaaaaactgggaaattgaggccggtcgcaacagctcatgcctgtaatcctagcatgttgggaggctaaggcaggtggatcacttgagatcaggagtttgagacctgcctggccaacatggagaaacatcatttctactaaaaatacaaaaattagctgggaacagtggtgcatggctgtaatcccagctacttgggaggtagaggagggagaatagcttgaacctgggaggcagaggctgcagtgacctgagatggcgcccctgcactcccgcctggttgacagccagactctatctcaaaaaaa

SEQ ID NO: 37646 - DNA, 721 bp, Homo sapiens
tttacagagatagggtctccctatgttgcctaggctggtctcgaattcctggagtcaagggatcctcctgcctctgcctcccaaagtgctaggattacaggtgtgagccaccacacctggccatgtaaactcttaatagagcacctgacacacactgaatgtcagctcaaaaatttcagttattttattttcaaaaccttcttggctcttttagcctccattctttgttactcccaaaatcacttcccatttttctatctctgtcttactacattctaggacactgatggtattaggccacattaggttcattcacctataatgttaataagttctacagcattatcattgaacagatctcaaaatatcttctgaatttatagaaaagctccaatatattccctaaattagaagtaaataattttaaaattttctgaatttaaaattgtattatcttcaaagtagcttaataattacatttaccagccaggcatgatgattcatacctgtagtctccacactttgggaggccaaggcaggaggatcgcttgagcccagaagtttgaaaccagcctgggcaacatggcaagacttcgtctcgacaggtgtggtgttacatgcctgcagtcccagctacttggaagttgagccaggagaactgcttgagcccaggcggttaagagtgcagtgagctgtgattgtgccactgcactccagtctg

SEQ ID NO: 37647 - DNA, 787 bp, Homo sapiens
gccaagaattcggcacgaggggagcggcgcatgttattttcttgagagtgaagagttacatacctctggtgttctcaatcaatttctatcatttctctggatttgtggtctcttcagccaagactatttcctcaatggcaattgcagaattgcttttcttaaacaatttctctttactgctattcatagcccatcttttcttagactgagcagatgacagtgtgtagccatgtgaggggtcatgcaccattacctctttttctgagctccattttccatgggaagcccttcaagcattgttctctgtagcaataatatcagagtttacatgggtcaacacctcatctgtcccgaactagaaaggtccttcatggaacacccacacgaaaaaatgttaagaagggcattttgctccaaatggaggcaagaaatgtgctgatccagttaatctgatggaacgcttttgataaatcaagaaagaaaaaacaaaaacccaatctaaataacctatcctttggaaaaaagcttgtagatctttgctagaaagaagttaatgagaaaatggccaaaaggaaaaatgagtgtccagtgttttaggagctcaggttttaaactgacatatccaagtttattccatctaagtattattgacattcatcctacttagtcaacattgacagttaataccttgtaaacattttgggatcattaactgacattaacaattttaacttacatgaaagattttaattattttttaaacatcttagtttactgttgtacagca

SEQ ID NO: 37648 - DNA, 3931 bp, Homo sapiens
  misc_feature (3766)..(3766): n is a, c, g, or t
  misc_feature (3789)..(3789): n is a, c, g, or t
agacaaagcggaggccgagcccaggaagcaagcgcgctctccgccccgcctggagggagggcccaaccacagcacagccgcgctcactcctcacccggacgtgacctagttctcacagaggcccggcctcttccgccacaactccggcccgcggtcccgccccgttccgtgaatggtcggccggcctcaggtcaaaaaagcgtttaggtgtctgcgacggagcctccggagaaaggcaagcacgtcgcagccaatgaggtgatagaaacgcaaagcagcgaccaatgactagctgagttgggctgggccggccgacgaatcacgaggcttcgcacccggatatggttatgggctcggaaatctagttcgggaaaagtgtgaggggctcttcacgtggggaaggaacagcaggcgcggaggagggggcaagcgtgtgtgagattcagtggtccatgcgtgcgtttgtcgtgtaagggtcattcctggggtttggagtgggggaacaaatcaatgtggctgtttttccgtggaaagaattcccactgcagtgtcccggagcctgcgtgtggtgggcaagctcctcaaatggtatctcacagggaataggggagtcttgaaaacgcagcttcggcagtaggaacatgaacctcttacctaaaagttccagggagtttggctccgttgactattgggagaagttcttccagcagcgaggaaagaaagctttcgagtggtatggaacctacctggaactgtgcggggtgctacataaatatatcaagcccagggaaaaggtgctggtgattgggtgtggcaactcagaactgagtgagcaactgtatgatgtgggctatcgggatatagtgaacatcgacatcagtgaggttgtcatcaagcaaatgaaggaatgtaatgccacccgacggccccagatgagcttcttgaagatggacatgacgcagatggagtttcctgatgcctcgttccaggtggtgttggacaagggcaccctggatgctgtcctgacagatgaggaagagaagaccttacaacaggtggacaggatgctggctgaggttggccgtgtcctgcaggtgggcggtcgctatctctgcatctccctggctcaggctcacatcctgaagaaagcagtgggccacttctcccgggaggggtggatggtgagggtgcaccaagtggccaacagccaggaccaggtgttggaagcagagcctcagttctccttgcctgtctttgccttcatcatgaccaagttcaggccagtccctggctctgcccttcagatctttgagctgtgtgctcaggagcagcgcaagcctgtgcggctggagagtgccgagcggctggccgaggcggtgcaggagcgacagcagtatgcctggctgtgcagccagctgcgccgcaaggccaggctggggagtgtgtctctggacttgtgcgatggggacacgggggagccacgctacaccctccacgtggtggacagccccactgtgaaaccatcgcgggacaatcattttgcgattttcatcatccctcagggccgggagaccgagtggctctttggcatggatgagggccggaaacagctggcggccagtgctggcttcaggaggttgattacagtggcccttcaccgaggtcagcagtatgaaagcatggaccacatccaagctgagctgtcggctagagtcatggagctggccccagctgggatgcccacccagcagcaggtcccctttctgtctgtgggtggggacattggggtccggaccgttcagcaccaagactgcagccccttgagcggtgactatgtcattgaggatgtgcaaggggatgacaagcgatacttccgtcgactgatcttcctcagcaacaggaatgtggtgcagtccgaagccaggttgctgaaggatgtgtctcacaaagcccagaagaagcggaaaaaggacaggaagaagcagcggcctgctgatgcggaggacctccctgcagccccggggcagtccattgataagagttacctgtgttgtgaacaccacaaagccatgatcgctggccttgccctgctgagaaacccagagctactcctagagatcccactggcattgttggtggtaggcctgggcgggggcagcctccccctctttgtccacgatcattttccaaagtcctgcattgatgctgtggagatcgatccctccatgttggaagtggccacccagtggtttggcttctcccagagtgaccgaatgaaggtccacattgcagatggcctggactatatcgccagcttggcaggaggaggagaagcacggccttgctacgatgtcataatgtttgatgttgacagtaaggacccaacactgggaatgagttgtccgcccccagcatttgtggagcaatcttttctacagaaggttaaaagcatcttgactcctgaaggtgtttttattctcaaccttgtgtgccgagacttggggctaaaagactcagtgctggctgggctcaaggcagtgttccccctcctatatgtccggcgaattgagggtgaagtgaatgagatcctgttctgtcagctgcaccctgagcaaaaacttgccacaccagagctcctagaaacagcccaggctttggagcggaccctgaggaagcctgggaggggttgggatgacacgtatgtcttgtcagatatgctcaagacggtgaaaattgtgtgactgcttaggccaagcagccctcctgcctagactgaccttggactcccagcctgccagagaatgaagaaatacaacgcacagtacttttgaagcttcgtatttttcttggtttcacactcagctacatgtgacctccagcttggtgaggttgcctgaagattagggaaaataaaaatgtccttcccatcttgtcctcttcagtaccacttgggttggtttgtctttgcttcctacaccacgtccttgagtggagttccctgctgaagcccctagcacacactgcatgccttaacaagtgtgtgcaagcccctcagaactcaagacatccaaattttattgcgtctctacttatactggtttgcttttgatttattcctctattagttctataggagtgatctcaagtgagatagcagagcaagatgccaaaagaccataaatagagtaaggtttctatagatgtgagacagatttgagagagcatttactctgtctccctgtggatgaaactgctgctgaaatggttccaatttttaggaatctgcttacccacttcattatttgacagctttccttggtgacccaaaccttgtagcctaagccatttgtctttttctcagtggagggagtgtatggacctggccccatggctttgcatgttagagacctggcagactaaagtctctagtgtttgtttgctcacatttgctgagtgacagctatgtgccagactgcataaagggtggtggcagaagtgaaaatgtttaagaatgaccaaaaacattagtaatgaaagttaatgtgttccaggcattcttctaagtggtttacatgcactgtctcatttaatctgagataaaggatacttaagcccaaactatatctaaacccaaatctcacttggctggaaacatcaatcttaaccatttattcagaaccattaaaccaatgattccaaaaaaaaaaagaagtcttattacggccagctatcgttagtaggtattagctgcctgcgcgttcacgcngcatggacatgggtctactagcntagaccactcgcgcggactgaagtcccatgtcctcactcatcttggcgccctcggcgggttgcgtgacaccgcctgtctttatgctaccagctggcttgcgcaaaatgctgcttgtcggttcacactcgtcggaattccgtt

SEQ ID NO: 37649 - DNA, 3606 bp, Homo sapiens
  misc_feature (3441)..(3441): n is a, c, g, or t
  misc_feature (3464)..(3464): n is a, c, g, or t
agacaaagcggaggccgagcccaggaagcaagcgcgctctccgccccgcctggagggagggcccaaccacagcacagccgcgctcactcctcacccggacgtgacctagttctcacagaggcccggcctcttccgccacaactccggcccgcggtcccgccccgttccgtgaatggtcggccggcctcaggtcaaaaaagcgtttaggtgtctgcgacggagcctccggagaaaggcaagcacgtcgcagccaatgaggtgatagaaacgcaaagcagcgaccaatgactagctgagttgggctgggccggccgacgaatcacgaggcttcgcacccggatatggttatgggctcggaaatctagttcgggaaaagtgtgaggggctcttcacgtggggaaggaacagcaggcgcggaggagggggcaagcgtgtgtgagattcagtggtccatgcgtgcgtttgtcgtgtgctggtgattgggtgtggcaactcagaactgagtgagcaactgtatgatgtgggctatcgggatatagtgaacatcgacatcagtgaggttgtcatcaagcaaatgaaggaatgtaatgccacccgacggccccagatgagcttcttgaagatggacatgacgcagatggagtttcctgatgcctcgttccaggtggtgttggacaagggcaccctggatgctgtcctgacagatgaggaagagaagaccttacaacaggtggacaggatgctggctgaggttggccgtgtcctgcaggtgggcggtcgctatctctgcatctccctggctcaggctcacatcctgaagaaagcagtgggccacttctcccgggaggggtggatggtgagggtgcaccaagtggccaacagccaggaccaggtgttggaagcagagcctcagttctccttgcctgtctttgccttcatcatgaccaagttcaggccagtccctggctctgcccttcagatctttgagctgtgtgctcaggagcagcgcaagcctgtgcggctggagagtgccgagcggctggccgaggcggtgcaggagcgacagcagtatgcctggctgtgcagccagctgcgccgcaaggccaggctggggagtgtgtctctggacttgtgcgatggggacacgggggagccacgctacaccctccacgtggtggacagccccactgtgaaaccatcgcgggacaatcattttgcgattttcatcatccctcagggccgggagaccgagtggctctttggcatggatgagggccggaaacagctggcggccagtgctggcttcaggaggttgattacagtggcccttcaccgaggtcagcagtatgaaagcatggaccacatccaagctgagctgtcggctagagtcatggagctggccccagctgggatgcccacccagcagcaggtcccctttctgtctgtgggtggggacattggggtccggaccgttcagcaccaagactgcagccccttgagcggtgactatgtcattgaggatgtgcaaggggatgacaagcgatacttccgtcgactgatcttcctcagcaacaggaatgtggtgcagtccgaagccaggttgctgaaggatgtgtctcacaaagcccagaagaagcggaaaaaggacaggaagaagcagcggcctgctgatgcggaggacctccctgcagccccggggcagtccattgataagagttacctgtgttgtgaacaccacaaagccatgatcgctggccttgccctgctgagaaacccagagctactcctagagatcccactggcattgttggtggtaggcctgggcgggggcagcctccccctctttgtccacgatcattttccaaagtcctgcattgatgctgtggagatcgatccctccatgttggaagtggccacccagtggtttggcttctcccagagtgaccgaatgaaggtccacattgcagatggcctggactatatcgccagcttggcaggaggaggagaagcacggccttgctacgatgtcataatgtttgatgttgacagtaaggacccaacactgggaatgagttgtccgcccccagcatttgtggagcaatcttttctacagaaggttaaaagcatcttgactcctgaaggtgtttttattctcaaccttgtgtgccgagacttggggctaaaagactcagtgctggctgggctcaaggcagtgttccccctcctatatgtccggcgaattgagggtgaagtgaatgagatcctgttctgtcagctgcaccctgagcaaaaacttgccacaccagagctcctagaaacagcccaggctttggagcggaccctgaggaagcctgggaggggttgggatgacacgtatgtcttgtcagatatgctcaagacggtgaaaattgtgtgactgcttaggccaagcagccctcctgcctagactgaccttggactcccagcctgccagagaatgaagaaatacaacgcacagtacttttgaagcttcgtatttttcttggtttcacactcagctacatgtgacctccagcttggtgaggttgcctgaagattagggaaaataaaaatgtccttcccatcttgtcctcttcagtaccacttgggttggtttgtctttgcttcctacaccacgtccttgagtggagttccctgctgaagcccctagcacacactgcatgccttaacaagtgtgtgcaagcccctcagaactcaagacatccaaattttattgcgtctctacttatactggtttgcttttgatttattcctctattagttctataggagtgatctcaagtgagatagcagagcaagatgccaaaagaccataaatagagtaaggtttctatagatgtgagacagatttgagagagcatttactctgtctccctgtggatgaaactgctgctgaaatggttccaatttttaggaatctgcttacccacttcattatttgacagctttccttggtgacccaaaccttgtagcctaagccatttgtctttttctcagtggagggagtgtatggacctggccccatggctttgcatgttagagacctggcagactaaagtctctagtgtttgtttgctcacatttgctgagtgacagctatgtgccagactgcataaagggtggtggcagaagtgaaaatgtttaagaatgaccaaaaacattagtaatgaaagttaatgtgttccaggcattcttctaagtggtttacatgcactgtctcatttaatctgagataaaggatacttaagcccaaactatatctaaacccaaatctcacttggctggaaacatcaatcttaaccatttattcagaaccattaaaccaatgattccaaaaaaaaaaagaagtcttattacggccagctatcgttagtaggtattagctgcctgcgcgttcacgcngcatggacatgggtctactagcntagaccactcgcgcggactgaagtcccatgtcctcactcatcttggcgccctcggcgggttgcgtgacaccgcctgtctttatgctaccagctggcttgcgcaaaatgctgcttgtcggttcacactcgtcggaattccgtt

SEQ ID NO: 37650 - DNA, 3739 bp, Homo sapiens
  misc_feature (3574)..(3574): n is a, c, g, or t
  misc_feature (3597)..(3597): n is a, c, g, or t
agacaaagcggaggccgagcccaggaagcaagcgcgctctccgccccgcctggagggagggcccaaccacagcacagccgcgctcactcctcacccggacgtgacctagttctcacagaggcccggcctcttccgccacaactccggcccgcggtcccgccccgttccgtgaatggtcggccggcctcaggtcaaaaaagcgtttaggtgtctgcgacggagcctccggagaaaggcaagcacgtcgcagccaatgaggtgatagaaacgcaaagcagcgaccaatgactagctgagttgggctgggccggccgacgaatcacgaggcttcgcacccggatatggttatgggctcggaaatctagttcgggaaaagtgtgaggggctcttcacgtggggaaggaacagcaggcgcggaggagggggcaagcgtgtgtgagattcagtggtccatgcgtgcgtttgtcgtttccagggagtttggctccgttgactattgggagaagttcttccagcagcgaggaaagaaagctttcgagtggtatggaacctacctggaactgtgcggggtgctacataaatatatcaagcccagggaaaaggtgctggtgattgggtgtggcaactcagaactgagtgagcaactgtatgatgtgggctatcgggatatagtgaacatcgacatcagtgaggttgtcatcaagcaaatgaaggaatgtaatgccacccgacggccccagatgagcttcttgaagatggacatgacgcagatggagtttcctgatgcctcgttccaggtggtgttggacaagggcaccctggatgctgtcctgacagatgaggaagagaagaccttacaacaggtggacaggatgctggctgaggttggccgtgtcctgcaggtgggcggtcgctatctctgcatctccctggctcaggctcacatcctgaagaaagcagtgggccacttctcccgggaggggtggatggtgagggtgcaccaagtggccaacagccaggaccaggtgttggaagcagagcctcagttctccttgcctgtctttgccttcatcatgaccaagttcaggccagtccctggctctgcccttcagatctttgagctgtgtgctcaggagcagcgcaagcctgtgcggctggagagtgccgagcggctggccgaggcggtgcaggagcgacagcagtatgcctggctgtgcagccagctgcgccgcaaggccaggctggggagtgtgtctctggacttgtgcgatggggacacgggggagccacgctacaccctccacgtggtggacagccccactgtgaaaccatcgcgggacaatcattttgcgattttcatcatccctcagggccgggagaccgagtggctctttggcatggatgagggccggaaacagctggcggccagtgctggcttcaggaggttgattacagtggcccttcaccgaggtcagcagtatgaaagcatggaccacatccaagctgagctgtcggctagagtcatggagctggccccagctgggatgcccacccagcagcaggtcccctttctgtctgtgggtggggacattggggtccggaccgttcagcaccaagactgcagccccttgagcggtgactatgtcattgaggatgtgcaaggggatgacaagcgatacttccgtcgactgatcttcctcagcaacaggaatgtggtgcagtccgaagccaggttgctgaaggatgtgtctcacaaagcccagaagaagcggaaaaaggacaggaagaagcagcggcctgctgatgcggaggacctccctgcagccccggggcagtccattgataagagttacctgtgttgtgaacaccacaaagccatgatcgctggccttgccctgctgagaaacccagagctactcctagagatcccactggcattgttggtggtaggcctgggcgggggcagcctccccctctttgtccacgatcattttccaaagtcctgcattgatgctgtggagatcgatccctccatgttggaagtggccacccagtggtttggcttctcccagagtgaccgaatgaaggtccacattgcagatggcctggactatatcgccagcttggcaggaggaggagaagcacggccttgctacgatgtcataatgtttgatgttgacagtaaggacccaacactgggaatgagttgtccgcccccagcatttgtggagcaatcttttctacagaaggttaaaagcatcttgactcctgaaggtgtttttattctcaaccttgtgtgccgagacttggggctaaaagactcagtgctggctgggctcaaggcagtgttccccctcctatatgtccggcgaattgagggtgaagtgaatgagatcctgttctgtcagctgcaccctgagcaaaaacttgccacaccagagctcctagaaacagcccaggctttggagcggaccctgaggaagcctgggaggggttgggatgacacgtatgtcttgtcagatatgctcaagacggtgaaaattgtgtgactgcttaggccaagcagccctcctgcctagactgaccttggactcccagcctgccagagaatgaagaaatacaacgcacagtacttttgaagcttcgtatttttcttggtttcacactcagctacatgtgacctccagcttggtgaggttgcctgaagattagggaaaataaaaatgtccttcccatcttgtcctcttcagtaccacttgggttggtttgtctttgcttcctacaccacgtccttgagtggagttccctgctgaagcccctagcacacactgcatgccttaacaagtgtgtgcaagcccctcagaactcaagacatccaaattttattgcgtctctacttatactggtttgcttttgatttattcctctattagttctataggagtgatctcaagtgagatagcagagcaagatgccaaaagaccataaatagagtaaggtttctatagatgtgagacagatttgagagagcatttactctgtctccctgtggatgaaactgctgctgaaatggttccaatttttaggaatctgcttacccacttcattatttgacagctttccttggtgacccaaaccttgtagcctaagccatttgtctttttctcagtggagggagtgtatggacctggccccatggctttgcatgttagagacctggcagactaaagtctctagtgtttgtttgctcacatttgctgagtgacagctatgtgccagactgcataaagggtggtggcagaagtgaaaatgtttaagaatgaccaaaaacattagtaatgaaagttaatgtgttccaggcattcttctaagtggtttacatgcactgtctcatttaatctgagataaaggatacttaagcccaaactatatctaaacccaaatctcacttggctggaaacatcaatcttaaccatttattcagaaccattaaaccaatgattccaaaaaaaaaaagaagtcttattacggccagctatcgttagtaggtattagctgcctgcgcgttcacgcngcatggacatgggtctactagcntagaccactcgcgcggactgaagtcccatgtcctcactcatcttggcgccctcggcgggttgcgtgacaccgcctgtctttatgctaccagctggcttgcgcaaaatgctgcttgtcggttcacactcgtcggaattccgtt

SEQ ID NO: 37651 - DNA, 3726 bp, Homo sapiens
  misc_feature (3561)..(3561): n is a, c, g, or t
  misc_feature (3584)..(3584): n is a, c, g, or t
ccgggttcgcgcccatgtgtgttgagagcttctcagactatcagctttgggtcgctttgctgttcgtgatatgagacagacagttgcggtgggtgtcatcaaagcagtggacaagaaggctgctggagctggcaaggtcaccaagtctgcccagaaagctcagaaggctaaatgaatattatccctaatacctgccaccccactcttaatcagtggtggaagaacggtctcagaactgtttgtatcaattggccatttaagtttagtagtaaaagactggttaatgataacaatgcatcgtaaaaccttcagaaggaaaggagaatgttttgtggaccactttggttttctttcctgcgtgtggtgggcaagctcctcaaatggtatctcacagggaataggggagtcttgaaaacgcagcttcggcagtaggaacatgaacctcttacctaaaagttccagggagtttggctccgttgactattgggagaagttcttccagcagcgaggaaagaaagctttcgagtggtatggaacctacctggaactgtgcggggtgctacataaatatatcaagcccagggaaaaggtgctggtgattgggtgtggcaactcagaactgagtgagcaactgtatgatgtgggctatcgggatatagtgaacatcgacatcagtgaggttgtcatcaagcaaatgaaggaatgtaatgccacccgacggccccagatgagcttcttgaagatggacatgacgcagatggagtttcctgatgcctcgttccaggtggtgttggacaagggcaccctggatgctgtcctgacagatgaggaagagaagaccttacaacaggtggacaggatgctggctgaggttggccgtgtcctgcaggtgggcggtcgctatctctgcatctccctggctcaggctcacatcctgaagaaagcagtgggccacttctcccgggaggggtggatggtgagggtgcaccaagtggccaacagccaggaccaggtgttggaagcagagcctcagttctccttgcctgtctttgccttcatcatgaccaagttcaggccagtccctggctctgcccttcagatctttgagctgtgtgctcaggagcagcgcaagcctgtgcggctggagagtgccgagcggctggccgaggcggtgcaggagcgacagcagtatgcctggctgtgcagccagctgcgccgcaaggccaggctggggagtgtgtctctggacttgtgcgatggggacacgggggagccacgctacaccctccacgtggtggacagccccactgtgaaaccatcgcgggacaatcattttgcgattttcatcatccctcagggccgggagaccgagtggctctttggcatggatgagggccggaaacagctggcggccagtgctggcttcaggaggttgattacagtggcccttcaccgaggtcagcagtatgaaagcatggaccacatccaagctgagctgtcggctagagtcatggagctggccccagctgggatgcccacccagcagcaggtcccctttctgtctgtgggtggggacattggggtccggaccgttcagcaccaagactgcagccccttgagcggtgactatgtcattgaggatgtgcaaggggatgacaagcgatacttccgtcgactgatcttcctcagcaacaggaatgtggtgcagtccgaagccaggttgctgaaggatgtgtctcacaaagcccagaagaagcggaaaaaggacaggaagaagcagcggcctgctgatgcggaggacctccctgcagccccggggcagtccattgataagagttacctgtgttgtgaacaccacaaagccatgatcgctggccttgccctgctgagaaacccagagctactcctagagatcccactggcattgttggtggtaggcctgggcgggggcagcctccccctctttgtccacgatcattttccaaagtcctgcattgatgctgtggagatcgatccctccatgttggaagtggccacccagtggtttggcttctcccagagtgaccgaatgaaggtccacattgcagatggcctggactatatcgccagcttggcaggaggaggagaagcacggccttgctacgatgtcataatgtttgatgttgacagtaaggacccaacactgggaatgagttgtccgcccccagcatttgtggagcaatcttttctacagaaggttaaaagcatcttgactcctgaaggtgtttttattctcaaccttgtgtgccgagacttggggctaaaagactcagtgctggctgggctcaaggcagtgttccccctcctatatgtccggcgaattgagggtgaagtgaatgagatcctgttctgtcagctgcaccctgagcaaaaacttgccacaccagagctcctagaaacagcccaggctttggagcggaccctgaggaagcctgggaggggttgggatgacacgtatgtcttgtcagatatgctcaagacggtgaaaattgtgtgactgcttaggccaagcagccctcctgcctagactgaccttggactcccagcctgccagagaatgaagaaatacaacgcacagtacttttgaagcttcgtatttttcttggtttcacactcagctacatgtgacctccagcttggtgaggttgcctgaagattagggaaaataaaaatgtccttcccatcttgtcctcttcagtaccacttgggttggtttgtctttgcttcctacaccacgtccttgagtggagttccctgctgaagcccctagcacacactgcatgccttaacaagtgtgtgcaagcccctcagaactcaagacatccaaattttattgcgtctctacttatactggtttgcttttgatttattcctctattagttctataggagtgatctcaagtgagatagcagagcaagatgccaaaagaccataaatagagtaaggtttctatagatgtgagacagatttgagagagcatttactctgtctccctgtggatgaaactgctgctgaaatggttccaatttttaggaatctgcttacccacttcattatttgacagctttccttggtgacccaaaccttgtagcctaagccatttgtctttttctcagtggagggagtgtatggacctggccccatggctttgcatgttagagacctggcagactaaagtctctagtgtttgtttgctcacatttgctgagtgacagctatgtgccagactgcataaagggtggtggcagaagtgaaaatgtttaagaatgaccaaaaacattagtaatgaaagttaatgtgttccaggcattcttctaagtggtttacatgcactgtctcatttaatctgagataaaggatacttaagcccaaactatatctaaacccaaatctcacttggctggaaacatcaatcttaaccatttattcagaaccattaaaccaatgattccaaaaaaaaaaagaagtcttattacggccagctatcgttagtaggtattagctgcctgcgcgttcacgcngcatggacatgggtctactagcntagaccactcgcgcggactgaagtcccatgtcctcactcatcttggcgccctcggcgggttgcgtgacaccgcctgtctttatgctaccagctggcttgcgcaaaatgctgcttgtcggttcacactcgtcggaattccgtt

SEQ ID NO: 37652 - DNA, 2632 bp, Homo sapiens
  misc_feature (2467)..(2467): n is a, c, g, or t
  misc_feature (2490)..(2490): n is a, c, g, or t
attgtatatgttaaatgtttaatgactatgtctttgtggggcggggtagggggggcacatcctaatttatagtgtttatcagttctctagtataaataccaccactgtatttgtttgttttacgttgcttataaaggaatacctgagactggataatttgtaaagaaaagacttttattttggcttatggttctgcagactgtacaagaagcatggtaccaacttctgcatttggtgaggcttcaggaagcttacaattatcacagaaggtgaagggagaccaggtacatcacatagcaagagagggagcaaaagagatgccaggcttttttcaacaacagctctagagtgagaactcactcaataccatggggaaggcacccagccattcatgagggatctgcccccgtgaccagcatggtggctccgacattggggatcacatttcaacgtgagatttgtaggggacaaacatcccagatgatttcactacggccagtttcaagctatcaacatgatgtcaaccagtttgcaaaattttaacgattgggtcttttgagtgttcaagccatctggagcacactgctgccagtaacccttgcttcctgaggactagtgtactaagcatagggcttcatatctcttgtttagcccagaagaagcggaaaaaggacaggaagaagcagcggcctgctgatgcggaggacctccctgcagccccggggcagtccattgataagagttacctgtgttgtgaacaccacaaagccatgatcgctggccttgccctgctgagaaacccagagctactcctagagatcccactggcattgttggtggtaggcctgggcgggggcagcctccccctctttgtccacgatcattttccaaagtcctgcattgatgctgtggagatcgatccctccatgttggaagtggccacccagtggtttggcttctcccagagtgaccgaatgaaggtccacattgcagatggcctggactatatcgccagcttggcaggaggaggagaagcacggccttgctacgatgtcataatgtttgatgttgacagtaaggacccaacactgggaatgagttgtccgcccccagcatttgtggagcaatcttttctacagaaggttaaaagcatcttgactcctgaaggtgtttttattctcaaccttgtgtgccgagacttggggctaaaagactcagtgctggctgggctcaaggcagtgttccccctcctatatgtccggcgaattgagggtgaagtgaatgagatcctgttctgtcagctgcaccctgagcaaaaacttgccacaccagagctcctagaaacagcccaggctttggagcggaccctgaggaagcctgggaggggttgggatgacacgtatgtcttgtcagatatgctcaagacggtgaaaattgtgtgactgcttaggccaagcagccctcctgcctagactgaccttggactcccagcctgccagagaatgaagaaatacaacgcacagtacttttgaagcttcgtatttttcttggtttcacactcagctacatgtgacctccagcttggtgaggttgcctgaagattagggaaaataaaaatgtccttcccatcttgtcctcttcagtaccacttgggttggtttgtctttgcttcctacaccacgtccttgagtggagttccctgctgaagcccctagcacacactgcatgccttaacaagtgtgtgcaagcccctcagaactcaagacatccaaattttattgcgtctctacttatactggtttgcttttgatttattcctctattagttctataggagtgatctcaagtgagatagcagagcaagatgccaaaagaccataaatagagtaaggtttctatagatgtgagacagatttgagagagcatttactctgtctccctgtggatgaaactgctgctgaaatggttccaatttttaggaatctgcttacccacttcattatttgacagctttccttggtgacccaaaccttgtagcctaagccatttgtctttttctcagtggagggagtgtatggacctggccccatggctttgcatgttagagacctggcagactaaagtctctagtgtttgtttgctcacatttgctgagtgacagctatgtgccagactgcataaagggtggtggcagaagtgaaaatgtttaagaatgaccaaaaacattagtaatgaaagttaatgtgttccaggcattcttctaagtggtttacatgcactgtctcatttaatctgagataaaggatacttaagcccaaactatatctaaacccaaatctcacttggctggaaacatcaatcttaaccatttattcagaaccattaaaccaatgattccaaaaaaaaaaagaagtcttattacggccagctatcgttagtaggtattagctgcctgcgcgttcacgcngcatggacatgggtctactagcntagaccactcgcgcggactgaagtcccatgtcctcactcatcttggcgccctcggcgggttgcgtgacaccgcctgtctttatgctaccagctggcttgcgcaaaatgctgcttgtcggttcacactcgtcggaattccgtt

SEQ ID NO: 37653 - DNA, 2778 bp, Homo sapiens
agacaaagcggaggccgagcccaggaagcaagcgcgctctccgccccgcctggagggagggcccaaccacagcacagccgcgctcactcctcacccggacgtgacctagttctcacagaggcccggcctcttccgccacaactccggcccgcggtcccgccccgttccgtgaatggtcggccggcctcaggtcaaaaaagcgtttaggtgtctgcgacggagcctccggagaaaggcaagcacgtcgcagccaatgaggtgatagaaacgcaaagcagcgaccaatgactagctgagttgggctgggccggccgacgaatcacgaggcttcgcacccggatatggttatgggctcggaaatctagttcgggaaaagtgtgaggggctcttcacgtggggaaggaacagcaggcgcggaggagggggcaagcgtgtgtgagattcagtggtccatgcgtgcgtttgtcgtgtaagggtcattcctggggtttggagtgggggaacaaatcaatgtggctgtttttccgtggaaagaattcccactgcagtgtcccggagcctgcgtgtggtgggcaagctcctcaaatggtatctcacagggaataggggagtcttgaaaacgcagcttcggcagtaggaacatgaacctcttacctaaaagttccagggagtttggctccgttgactattgggagaagttcttccagcagcgaggaaagaaagctttcgagtggtatggaacctacctggaactgtgcggggtgctacataaatatatcaagcccagggaaaaggtgctggtgattgggtgtggcaactcagaactgagtgagcaactgtatgatgtgggctatcgggatatagtgaacatcgacatcagtgaggttgtcatcaagcaaatgaaggaatgtaatgccacccgacggccccagatgagcttcttgaagatggacatgacgcagatggagtttcctgatgcctcgttccaggtggtgttggacaagggcaccctggatgctgtcctgacagatgaggaagagaagaccttacaacaggtggacaggatgctggctgaggttggccgtgtcctgcaggtgggcggtcgctatctctgcatctccctggctcaggctcacatcctgaagaaagcagtgggccacttctcccgggaggggtggatggtgagggtgcaccaagtggccaacagccaggaccaggtgttggaagcagagcctcagttctccttgcctgtctttgccttcatcatgaccaagttcaggccagtccctggctctgcccttcagatctttgagctgtgtgctcaggagcagcgcaagcctgtgcggctggagagtgccgagcggctggccgaggcggtgcaggagcgacagcagtatgcctggctgtgcagccagctgcgccgcaaggccaggctggggagtgtgtctctggacttgtgcgatggggacacgggggagccacgctacaccctccacgtggtggacagccccactgtgaaaccatcgcgggacaatcattttgcgattttcatcatccctcagggccgggagaccgagtggctctttggcatggatgagggccggaaacagctggcggccagtgctggcttcaggaggttgattacagtggcccttcaccgaggtcagcagtatgaaagcatggaccacatccaagctgagctgtcggctagagtcatggagctggccccagctgggatgcccacccagcagcaggtcccctttctgtctgtgggtggggacattggggtccggaccgttcagcaccaagactgcagccccttgagcggtgactatgtcattgaggatgtgcaaggggatgacaagcgatacttccgtcgactgatcttcctcagcaacaggaatgtggtgcagtccgaagccaggttgctgaaggatgtgtctcacaaagcccagaagaagcggaaaaaggacaggaagaagcagcggcctgctgatgcggaggacctccctgcagccccggggcagtccattgataagagttacctgtgttgtgaacaccacaaagccatgatcgctggccttgccctgctgagaaacccagagctactcctagagatcccactggcattgttggtggtaggcctgggcgggggcagcctccccctctttgtccacgatcattttccaaagtcctgcattgatgctgtggagatcgatccctccatgttggaagtggccacccagtggtttggcttctcccagagtgaccgaatgaaggtccacattgcagatggcctggactatatcgccagcttggcaggaggaggagaagcacggccttgctacgatgtcataatgtttgatgttgacagtaaggacccaacactgggaatgagttgtccgcccccagcatttgtggagcaatcttttctacagaaggttaaaagcatcttgactcctgaaggtgtttttattctcaaccttgtgtgccgagacttggggctaaaagactcagtgctggctgggctcaaggcagtgttccccctcctatatgtccggcgaattgagggtgaagtgaatgagatcccattcaagacgcttctctgacgacggccagtgcacatttgggatgcccaattcaacccaggatttggtacggaccccggagacagactgggaggcgttgcggatgacacgcatgtcttgctcacataatgattcacagtcgatgaaaatatgtctgactgcttagcgccagcgacacttcctgcttagc

SEQ ID NO: 37654 - DNA, 2617 bp, Homo sapiens
agacaaagcggaggccgagcccaggaagcaagcgcgctctccgccccgcctggagggagggcccaaccacagcacagccgcgctcactcctcacccggacgtgacctagttctcacagaggcccggcctcttccgccacaactccggcccgcggtcccgccccgttccgtgaatggtcggccggcctcaggtcaaaaaagcgtttaggtgtctgcgacggagcctccggagaaaggcaagcacgtcgcagccaatgaggtgatagaaacgcaaagcagcgaccaatgactagctgagttgggctgggccggccgacgaatcacgaggcttcgcacccggatatggttatgggctcggaaatctagttcgggaaaagtgtgaggggctcttcacgtggggaaggaacagcaggcgcggaggagggggcaagcgtgtgtgagattcagtggtccatgcgtgcgtttgtcgtgtaagggtcattcctggggtttggagtgggggaacaaatcaatgtggctgtttttccgtggaaagaattcccactgcagtgtcccggagcctgcgtgtggtgggcaagctcctcaaatggtatctcacagggaataggggagtcttgaaaacgcagcttcggcagtaggaacatgaacctcttacctaaaagttccagggagtttggctccgttgactattgggagaagttcttccagcagcgaggaaagaaagctttcgagtggtatggaacctacctggaactgtgcggggtgctacataaatatatcaagcccagggaaaaggtgctggtgattgggtgtggcaactcagaactgagtgagcaactgtatgatgtgggctatcgggatatagtgaacatcgacatcagtgaggttgtcatcaagcaaatgaaggaatgtaatgccacccgacggccccagatgagcttcttgaagatggacatgacgcagatggagtttcctgatgcctcgttccaggtggtgttggacaagggcaccctggatgctgtcctgacagatgaggaagagaagaccttacaacaggtggacaggatgctggctgaggttggccgtgtcctgcaggtgggcggtcgctatctctgcatctccctggctcaggctcacatcctgaagaaagcagtgggccacttctcccgggaggggtggatggtgagggtgcaccaagtggccaacagccaggaccaggtgttggaagcagagcctcagttctccttgcctgtctttgccttcatcatgaccaagttcaggccagtccctggctctgcccttcagatctttgagctgtgtgctcaggagcagcgcaagcctgtgcggctggagagtgccgagcggctggccgaggcggtgcaggagcgacagcagtatgcctggctgtgcagccagctgcgccgcaaggccaggctggggagtgtgtctctggacttgtgcgatggggacacgggggagccacgctacaccctccacgtggtggacagccccactgtgaaaccatcgcgggacaatcattttgcgattttcatcatccctcagggccgggagaccgagtggctctttggcatggatgagggccggaaacagctggcggccagtgctggcttcaggaggttgattacagtggcccttcaccgaggtcagcagtatgaaagcatggaccacatccaagctgagctgtcggctagagtcatggagctggccccagctgggatgcccacccagcagcaggtcccctttctgtctgtgggtggggacattggggtccggaccgttcagcaccaagactgcagccccttgagcggtgactatgtcattgaggatgtgcaaggggatgacaagcgatacttccgtcgactgatcttcctcagcaacaggaatgtggtgcagtccgaagccaggttgctgaaggatgtgtctcacaaagcccagaagaagcggaaaaaggacaggaagaagcagcggcctgctgatgcggaggacctccctgcagccccggggcagtccattgataagagttacctgtgttgtgaacaccacaaagccatgatcgctggccttgccctgctgagaaacccagagctactcctagagatcccactggcattgttggtggtaggcctgggcgggggcagcctccccctctttgtccacgatcattttccaaagtcctgcattgatgctgtggagatcgatccctccatgttggaagtggccacccagtggtttggcttctcccagagtgaccgaatgaaggtccacattgcagatggcctggactatatcgccagcttggcaggaggaggagaagcacggccttgctacgatgtcataatgtttgatgttgacagtaaggacccaacactgggaatgagttgtccgcccccagcatttgtggagcaatcttttctacagaaggttaaaagcatcttgactcctgaagggtcaccagatcctcctcctcctgcaggctcaccatggcttcaaaagaattcagtgttctgcaagactcttcagtcctactactgctctctattgagattggatcatgtgcccataatccaagagatttccttcaaatctgtgtaccaggt

SEQ ID NO: 37655 - DNA, 2428 bp, Homo sapiens
agacaaagcggaggccgagcccaggaagcaagcgcgctctccgccccgcctggagggagggcccaaccacagcacagccgcgctcactcctcacccggacgtgacctagttctcacagaggcccggcctcttccgccacaactccggcccgcggtcccgccccgttccgtgaatggtcggccggcctcaggtcaaaaaagcgtttaggtgtctgcgacggagcctccggagaaaggcaagcacgtcgcagccaatgaggtgatagaaacgcaaagcagcgaccaatgactagctgagttgggctgggccggccgacgaatcacgaggcttcgcacccggatatggttatgggctcggaaatctagttcgggaaaagtgtgaggggctcttcacgtggggaaggaacagcaggcgcggaggagggggcaagcgtgtgtgagattcagtggtccatgcgtgcgtttgtcgtgtaagggtcattcctggggtttggagtgggggaacaaatcaatgtggctgtttttccgtggaaagaattcccactgcagtgtcccggagcctgcgtgtggtgggcaagctcctcaaatggtatctcacagggaataggggagtcttgaaaacgcagcttcggcagtaggaacatgaacctcttacctaaaagttccagggagtttggctccgttgactattgggagaagttcttccagcagcgaggaaagaaagctttcgagtggtatggaacctacctggaactgtgcggggtgctacataaatatatcaagcccagggaaaaggtgctggtgattgggtgtggcaactcagaactgagtgagcaactgtatgatgtgggctatcgggatatagtgaacatcgacatcagtgaggttgtcatcaagcaaatgaaggaatgtaatgccacccgacggccccagatgagcttcttgaagatggacatgacgcagatggagtttcctgatgcctcgttccaggtggtgttggacaagggcaccctggatgctgtcctgacagatgaggaagagaagaccttacaacaggtggacaggatgctggctgaggttggccgtgtcctgcaggtgggcggtcgctatctctgcatctccctggctcaggctcacatcctgaagaaagcagtgggccacttctcccgggaggggtggatggtgagggtgcaccaagtggccaacagccaggaccaggtgttggaagcagagcctcagttctccttgcctgtctttgccttcatcatgaccaagttcaggccagtccctggctctgcccttcagatctttgagctgtgtgctcaggagcagcgcaagcctgtgcggctggagagtgccgagcggctggccgaggcggtgcaggagcgacagcagtatgcctggctgtgcagccagctgcgccgcaaggccaggctggggagtgtgtctctggacttgtgcgatggggacacgggggagccacgctacaccctccacgtggtggacagccccactgtgaaaccatcgcgggacaatcattttgcgattttcatcatccctcagggccgggagaccgagtggctctttggcatggatgagggccggaaacagctggcggccagtgctggcttcaggaggttgattacagtggcccttcaccgaggtcagcagtatgaaagcatggaccacatccaagctgagctgtcggctagagtcatggagctggccccagctgggatgcccacccagcagcaggtcccctttctgtctgtgggtggggacattggggtccggaccgttcagcaccaagactgcagccccttgagcggtgactatgtcattgaggatgtgcaaggggatgacaagcgatacttccgtcgactgatcttcctcagcaacaggaatgtggtgcagtccgaagccaggttgctgaaggatgtgtctcacaaagcccagaagaagcggaaaaaggacaggaagaagcagcggcctgctgatgcggaggacctccctgcagccccggggcagtccattgataagagttacctgtgttgtgaacaccacaaagccatgatcgctggccttgccctgctgagaaacccagagctactcctaggtgagagagatgccactgccttccacagaagggagcataaagattacagacctaaacaattggtgtcacttgcattgtagttgaagaacagcaattacaagctgacaatgtatctttcttcatctcaaccatgttataagttaatgagcattctaattaactgttgcctcaaactcaacctgttatattgaaattgtattgaaatatgttagagtctaagtggtattttttctgttcatttctttttaaaattaaggtatatcatgtattcaatgagatatgtaaaaatacacagattttaattgttcaaatt

SEQ ID NO: 37656 - DNA, 1428 bp, Homo sapiens
  misc_feature (1263)..(1263): n is a, c, g, or t
  misc_feature (1286)..(1286): n is a, c, g, or t
aaaaagattcaccggtggtcaggtctcactgcagtgatcctctccaatatagtccggaggacatgaagcttaacacaagtgacgcctgttctgtcagctgcaccctgagcaaaaacttgccacaccagagctcctagaaacagcccaggctttggagcggaccctgaggaagcctgggaggggttgggatgacacgtatgtcttgtcagatatgctcaagacggtgaaaattgtgtgactgcttaggccaagcagccctcctgcctagactgaccttggactcccagcctgccagagaatgaagaaatacaacgcacagtacttttgaagcttcgtatttttcttggtttcacactcagctacatgtgacctccagcttggtgaggttgcctgaagattagggaaaataaaaatgtccttcccatcttgtcctcttcagtaccacttgggttggtttgtctttgcttcctacaccacgtccttgagtggagttccctgctgaagcccctagcacacactgcatgccttaacaagtgtgtgcaagcccctcagaactcaagacatccaaattttattgcgtctctacttatactggtttgcttttgatttattcctctattagttctataggagtgatctcaagtgagatagcagagcaagatgccaaaagaccataaatagagtaaggtttctatagatgtgagacagatttgagagagcatttactctgtctccctgtggatgaaactgctgctgaaatggttccaatttttaggaatctgcttacccacttcattatttgacagctttccttggtgacccaaaccttgtagcctaagccatttgtctttttctcagtggagggagtgtatggacctggccccatggctttgcatgttagagacctggcagactaaagtctctagtgtttgtttgctcacatttgctgagtgacagctatgtgccagactgcataaagggtggtggcagaagtgaaaatgtttaagaatgaccaaaaacattagtaatgaaagttaatgtgttccaggcattcttctaagtggtttacatgcactgtctcatttaatctgagataaaggatacttaagcccaaactatatctaaacccaaatctcacttggctggaaacatcaatcttaaccatttattcagaaccattaaaccaatgattccaaaaaaaaaaagaagtcttattacggccagctatcgttagtaggtattagctgcctgcgcgttcacgcngcatggacatgggtctactagcntagaccactcgcgcggactgaagtcccatgtcctcactcatcttggcgccctcggcgggttgcgtgacaccgcctgtctttatgctaccagctggcttgcgcaaaatgctgcttgtcggttcacactcgtcggaattccgtt

SEQ ID NO: 37657 - DNA, 137 bp, Homo sapiens
catgcttttctccatctgcctttctatgctgtgtattctctgcaaactcatcaccaccgtgtgttttagtccaccagtctccctgggacaggaattggtattttcctcaaagccgatccttgtctttcatatgtctc

SEQ ID NO: 37658 - DNA, 3471 bp, Homo sapiens
  misc_feature (3306)..(3306): n is a, c, g, or t
  misc_feature (3329)..(3329): n is a, c, g, or t
agacaaagcggaggccgagcccaggaagcaagcgcgctctccgccccgcctggagggagggcccaaccacagcacagccgcgctcactcctcacccggacgtgacctagttctcacagaggcccggcctcttccgccacaactccggcccgcggtcccgccccgttccgtgaatggtcggccggcctcaggtcaaaaaagcgtttaggtgtctgcgacggagcctccggagaaaggcaagcacgtcgcagccaatgaggtgatagaaacgcaaagcagcgaccaatgactagctgagttgggctgggccggccgacgaatcacgaggcttcgcacccggatatggttatgggctcggaaatctagttcgggaaaagtgtgaggggctcttcacgtggggaaggaacagcaggcgcggaggagggggcaagcgtgtgtgagattcagtggtccatgcgtgcgtttgtcgtgtaagggtcattcctggggtttggagtgggggaacaaatcaatgtggctgtttttccgtggaaagaattcccactgcagtgtcccggagcctgcgtgtggtgggcaagctcctcaaatggtatctcacagggaataggggagtcttgaaaacgcagcttcggcagtaggaacatgaacctcttacctaaaagttccagggagtttggctccgttgactattgggagaagttcttccagcagcgaggaaagaaagctttcgagtggtatggaacctacctggaactgtgcggggtgctacataaatatatcaagcccagggaaaaggtgctggtgattgggtgtggcaactcagaactgagtgagcaactgtatgatgtgggctatcgggatatagtgaacatcgacatcagtgaggttgtcatcaagcaaatgaaggaatgtaatgccacccgacggccccagatgagcttcttgaagatggacatgacgcagatggagtttcctgatgcctcgttccaggtggtgttggacaagggcaccctggatgctgtcctgacagatgaggaagagaagaccttacaacaggtggacaggatgctggctgaggttggccgtgtcctgcagtccctcagggccgggagaccgagtggctctttggcatggatgagggccggaaacagctggcggccagtgctggcttcaggaggttgattacagtggcccttcaccgaggtcagcagtatgaaagcatggaccacatccaagctgagctgtcggctagagtcatggagctggccccagctgggatgcccacccagcagcaggtcccctttctgtctgtgggtggggacattggggtccggaccgttcagcaccaagactgcagccccttgagcggtgactatgtcattgaggatgtgcaaggggatgacaagcgatacttccgtcgactgatcttcctcagcaacaggaatgtggtgcagtccgaagccaggttgctgaaggatgtgtctcacaaagcccagaagaagcggaaaaaggacaggaagaagcagcggcctgctgatgcggaggacctccctgcagccccggggcagtccattgataagagttacctgtgttgtgaacaccacaaagccatgatcgctggccttgccctgctgagaaacccagagctactcctagagatcccactggcattgttggtggtaggcctgggcgggggcagcctccccctctttgtccacgatcattttccaaagtcctgcattgatgctgtggagatcgatccctccatgttggaagtggccacccagtggtttggcttctcccagagtgaccgaatgaaggtccacattgcagatggcctggactatatcgccagcttggcaggaggaggagaagcacggccttgctacgatgtcataatgtttgatgttgacagtaaggacccaacactgggaatgagttgtccgcccccagcatttgtggagcaatcttttctacagaaggttaaaagcatcttgactcctgaaggtgtttttattctcaaccttgtgtgccgagacttggggctaaaagactcagtgctggctgggctcaaggcagtgttccccctcctatatgtccggcgaattgagggtgaagtgaatgagatcctgttctgtcagctgcaccctgagcaaaaacttgccacaccagagctcctagaaacagcccaggctttggagcggaccctgaggaagcctgggaggggttgggatgacacgtatgtcttgtcagatatgctcaagacggtgaaaattgtgtgactgcttaggccaagcagccctcctgcctagactgaccttggactcccagcctgccagagaatgaagaaatacaacgcacagtacttttgaagcttcgtatttttcttggtttcacactcagctacatgtgacctccagcttggtgaggttgcctgaagattagggaaaataaaaatgtccttcccatcttgtcctcttcagtaccacttgggttggtttgtctttgcttcctacaccacgtccttgagtggagttccctgctgaagcccctagcacacactgcatgccttaacaagtgtgtgcaagcccctcagaactcaagacatccaaattttattgcgtctctacttatactggtttgcttttgatttattcctctattagttctataggagtgatctcaagtgagatagcagagcaagatgccaaaagaccataaatagagtaaggtttctatagatgtgagacagatttgagagagcatttactctgtctccctgtggatgaaactgctgctgaaatggttccaatttttaggaatctgcttacccacttcattatttgacagctttccttggtgacccaaaccttgtagcctaagccatttgtctttttctcagtggagggagtgtatggacctggccccatggctttgcatgttagagacctggcagactaaagtctctagtgtttgtttgctcacatttgctgagtgacagctatgtgccagactgcataaagggtggtggcagaagtgaaaatgtttaagaatgaccaaaaacattagtaatgaaagttaatgtgttccaggcattcttctaagtggtttacatgcactgtctcatttaatctgagataaaggatacttaagcccaaactatatctaaacccaaatctcacttggctggaaacatcaatcttaaccatttattcagaaccattaaaccaatgattccaaaaaaaaaaagaagtcttattacggccagctatcgttagtaggtattagctgcctgcgcgttcacgcngcatggacatgggtctactagcntagaccactcgcgcggactgaagtcccatgtcctcactcatcttggcgccctcggcgggttgcgtgacaccgcctgtctttatgctaccagctggcttgcgcaaaatgctgcttgtcggttcacactcgtcggaattccgtt

SEQ ID NO: 37659 - DNA, 2927 bp, Homo sapiens
agacaaagcggaggccgagcccaggaagcaagcgcgctctccgccccgcctggagggagggcccaaccacagcacagccgcgctcactcctcacccggacgtgacctagttctcacagaggcccggcctcttccgccacaactccggcccgcggtcccgccccgttccgtgaatggtcggccggcctcaggtcaaaaaagcgtttaggtgtctgcgacggagcctccggagaaaggcaagcacgtcgcagccaatgaggtgatagaaacgcaaagcagcgaccaatgactagctgagttgggctgggccggccgacgaatcacgaggcttcgcacccggatatggttatgggctcggaaatctagttcgggaaaagtgtgaggggctcttcacgtggggaaggaacagcaggcgcggaggagggggcaagcgtgtgtgagattcagtggtccatgcgtgcgtttgtcgtgtaagggtcattcctggggtttggagtgggggaacaaatcaatgtggctgtttttccgtggaaagaattcccactgcagtgtcccggagcctgcgtgtggtgggcaagctcctcaaatggtatctcacagggaataggggagtcttgaaaacgcagcttcggcagtaggaacatgaacctcttacctaaaagttccagggagtttggctccgttgactattgggagaagttcttccagcagcgaggaaagaaagctttcgagtggtatggaacctacctggaactgtgcggggtgctacataaatatatcaagcccagggaaaaggtgctggtgattgggtgtggcaactcagaactgagtgagcaactgtatgatgtgggctatcgggatatagtgaacatcgacatcagtgaggttgtcatcaagcaaatgaaggaatgtaatgccacccgacggccccagatgagcttcttgaagatggacatgacgcagatggagtttcctgatgcctcgttccaggtggtgttggacaagggcaccctggatgctgtcctgacagatgaggaagagaagaccttacaacaggtggacaggatgctggctgaggttggccgtgtcctgcaggtgggcggtcgctatctctgcatctccctggctcaggctcacatcctgaagaaagcagtgggccacttctcccgggaggggtggatggtgagggtgcaccaagtggccaacagccaggaccaggtgttggaagcagagcctcagttctccttgcctgtctttgccttcatcatgaccaagttcaggccagtccctggctctgcccttcagatctttgagctgtgtgctcaggagcagcgcaagcctgtgcggctggagagtgccgagcggctggccgaggcggtgcaggagcgacagcagtatgcctggctgtgcagccagctgcgccgcaaggccaggctggggagtgtgtctctggacttgtgcgatggggacacgggggagccacgctacaccctccacgtggtggacagccccactgtgaaaccatcgcgggacaatcattttgcgattttcatcatccctcagggccgggagaccgagtggctctttggcatggatgagggccggaaacagctggcggccagtgctggcttcaggaggttgattacagtggcccttcaccgaggtcagcagtatgaaagcatggaccacatccaagctgagctgtcggctagagtcatggagctggccccagctgggatgcccacccagcagcaggtcccctttctgtctgtgggtggggacattggggtccggaccgttcagcaccaagactgcagccccttgagcggtgactatgtcattgaggatgtgcaaggggatgacaagcgatacttccgtcgactgatcttcctcagcaacaggaatgtggtgcagtccgaagccaggttgctgaaggatgtgtctcacaaagcccagaagaagcggaaaaaggacaggaagaagcagcggcctgctgatgcggaggacctccctgcagccccggggcagtccattgataagagttacctgtgttgtgaacaccacaaagccatgatcgctggccttgccctgctgagaaacccagagctactcctagagatcccactggcattgttggtggtaggcctgggcgggggcagcctccccctctttgtccacgatcattttccaaagtcctgcattgatgctgtggagatcgatccctccatgttggaagtggccacccagtggtttggcttctcccagagtgaccgaatgaaggtccacattgcagatggcctggactatatcgccagcttggcaggaggaggagaagcacggccttgctacgatgtcataatgtttgatgttgacagtaaggacccaacactgggaatgagttgtccgcccccagcatttgtggagcaatcttttctacagaaggttaaaagcatcttgactcctgaaggtgtttttattctcaaccttgtgtgccgagacttggggctaaaagactcagtgctggctgggctcaaggcagtgttccccctcctatatgtccggcgaattgagggtgaagtgaatgagatcctgttctgtcagctgcaccctgagcaaaaacttgccacaccagagctcctagaaacagcccaggctttggagcggaccctgaggaagcctgggaggggttgggatgacacgtatgtcttgtcagatatgctcaagacggtgaaaattgtgtgactgcttaggccaagcagccctcctgcctagactgaccttggactcccagcctgccagagaatgaagaaatacaacgcacagtacttttgaagcttcgtatttttcttggtttcacactcagctacatgtgacctccagcttggtgaggttgcctgaagattagggaaaataaaaatgtccttccca

SEQ ID NO: 37660 - DNA, 3766 bp, Homo sapiens
  misc_feature (3601)..(3601): n is a, c, g, or t
  misc_feature (3624)..(3624): n is a, c, g, or t
agacaaagcggaggccgagcccaggaagcaagcgcgctctccgccccgcctggagggagggcccaaccacagcacagccgcgctcactcctcacccggacgtgacctagttctcacagaggcccggcctcttccgccacaactccggcccgcggtcccgccccgttccgtgaatggtcggccggcctcaggtcaaaaaagcgtttaggtgtctgcgacggagcctccggagaaaggcaagcacgtcgcagccaatgaggtgatagaaacgcaaagcagcgaccaatgactagctgagttgggctgggccggccgacgaatcacgaggcttcgcacccggatatggttatgggctcggaaatctagttcgggaaaagtgtgaggggctcttcacgtggggaaggaacagcaggcgcggaggagggggcaagcgtgtgtgagattcagtggtccatgcgtgcgtttgtcgtgtaagggtcattcctggggtttggagtgggggaacaaatcaatgtggctgtttttccgtggaaagaattcccactgcagtgtcccggagcctgcgtgtggtgggcaagctcctcaaatggtatctcacagggaataggggagtcttgaaaacgcagcttcggcagtaggaacatgaacctcttacctaaaagttccagggagtttggctccgttgactattgggagaagttcttccagcagcgaggaaagaaagctttcgagtggtatggaacctacctggaactgtgcggggtgctacataaatatatcaagcccagggaaaaggtgctggtgattgggtgtggcaactcagaactgagtgagcaactgtatgatgtgggctatcgggatatagtgaacatcgacatcagtgaggttgtcatcaagcaaatgaaggaatgtaatgccacccgacggccccagatgagcttcttgaagatggacatgacgcagatggagtttcctgatgcctcgttccaggtggtgttggacaagggcaccctggatgctgtcctgacagatgaggaagagaagaccttacaacaggtggacaggatgctggctgaggttggccgtgtcctgcaggtgggcggtcgctatctctgcatctccctggctcaggctcacatcctgaagaaagcagtgggccacttctcccgggaggggtggatggtgagggtgcaccaagtggccaacagccaggaccaggtgttggaagcagagcctcagttctccttgcctgtctttgccttcatcatgaccaagttcaggccagtccctggctctgcccttcagatctttgagctgtgtgctcaggagcagcgcaagcctgtgcggctggagagtgccgagcggctggccgaggcggtgcaggagcgacagcagtatgcctggctgtgcagccagctgcgccgcaaggccaggctggggagtgtgtctctggacttgtgcgatggggacacgggggagccacgctacaccctccacgtggtggacagccccactgtgaaaccatcgcgggacaatcattttgcgattttcatcatccctcagggccgggagaccgagtggctctttggcatggatgagggccggaaacagctggcggccagtgctggcttcaggaggttgattacagtggcccttcaccgaggtcagcagtatgaaagcatggaccacatccaagctgagctgtcggctagagtcatggagctggccccagctgggatgcccacccagcagcaggtcccctttctgtctgtgggtggggacattggggtccggaccgttcagcaccaagactgcagccccttgagcggtgactatgtcattgaggatgtgcaaggggatgacaagcgatacttccgtcgactgatcttcctcagcaacaggaatgtggtgcagtccgaagccaggttgctgaaggatgtgtctcacaaagagatcccactggcattgttggtggtaggcctgggcgggggcagcctccccctctttgtccacgatcattttccaaagtcctgcattgatgctgtggagatcgatccctccatgttggaagtggccacccagtggtttggcttctcccagagtgaccgaatgaaggtccacattgcagatggcctggactatatcgccagcttggcaggaggaggagaagcacggccttgctacgatgtcataatgtttgatgttgacagtaaggacccaacactgggaatgagttgtccgcccccagcatttgtggagcaatcttttctacagaaggttaaaagcatcttgactcctgaaggtgtttttattctcaaccttgtgtgccgagacttggggctaaaagactcagtgctggctgggctcaaggcagtgttccccctcctatatgtccggcgaattgagggtgaagtgaatgagatcctgttctgtcagctgcaccctgagcaaaaacttgccacaccagagctcctagaaacagcccaggctttggagcggaccctgaggaagcctgggaggggttgggatgacacgtatgtcttgtcagatatgctcaagacggtgaaaattgtgtgactgcttaggccaagcagccctcctgcctagactgaccttggactcccagcctgccagagaatgaagaaatacaacgcacagtacttttgaagcttcgtatttttcttggtttcacactcagctacatgtgacctccagcttggtgaggttgcctgaagattagggaaaataaaaatgtccttcccatcttgtcctcttcagtaccacttgggttggtttgtctttgcttcctacaccacgtccttgagtggagttccctgctgaagcccctagcacacactgcatgccttaacaagtgtgtgcaagcccctcagaactcaagacatccaaattttattgcgtctctacttatactggtttgcttttgatttattcctctattagttctataggagtgatctcaagtgagatagcagagcaagatgccaaaagaccataaatagagtaaggtttctatagatgtgagacagatttgagagagcatttactctgtctccctgtggatgaaactgctgctgaaatggttccaatttttaggaatctgcttacccacttcattatttgacagctttccttggtgacccaaaccttgtagcctaagccatttgtctttttctcagtggagggagtgtatggacctggccccatggctttgcatgttagagacctggcagactaaagtctctagtgtttgtttgctcacatttgctgagtgacagctatgtgccagactgcataaagggtggtggcagaagtgaaaatgtttaagaatgaccaaaaacattagtaatgaaagttaatgtgttccaggcattcttctaagtggtttacatgcactgtctcatttaatctgagataaaggatacttaagcccaaactatatctaaacccaaatctcacttggctggaaacatcaatcttaaccatttattcagaaccattaaaccaatgattccaaaaaaaaaaagaagtcttattacggccagctatcgttagtaggtattagctgcctgcgcgttcacgcngcatggacatgggtctactagcntagaccactcgcgcggactgaagtcccatgtcctcactcatcttggcgccctcggcgggttgcgtgacaccgcctgtctttatgctaccagctggcttgcgcaaaatgctgcttgtcggttcacactcgtcggaattccgtt

SEQ ID NO: 37661 - DNA, 2789 bp, Homo sapiens
agacaaagcggaggccgagcccaggaagcaagcgcgctctccgccccgcctggagggagggcccaaccacagcacagccgcgctcactcctcacccggacgtgacctagttctcacagaggcccggcctcttccgccacaactccggcccgcggtcccgccccgttccgtgaatggtcggccggcctcaggtcaaaaaagcgtttaggtgtctgcgacggagcctccggagaaaggcaagcacgtcgcagccaatgaggtgatagaaacgcaaagcagcgaccaatgactagctgagttgggctgggccggccgacgaatcacgaggcttcgcacccggatatggttatgggctcggaaatctagttcgggaaaagtgtgaggggctcttcacgtggggaaggaacagcaggcgcggaggagggggcaagcgtgtgtgagattcagtggtccatgcgtgcgtttgtcgtgtaagggtcattcctggggtttggagtgggggaacaaatcaatgtggctgtttttccgtggaaagaattcccactgcagtgtcccggagcctgcgtgtggtgggcaagctcctcaaatggtatctcacagggaataggggagtcttgaaaacgcagcttcggcagtaggaacatgaacctcttacctaaaagttccagggagtttggctccgttgactattgggagaagttcttccagcagcgaggaaagaaagctttcgagtggtatggaacctacctggaactgtgcggggtgctacataaatatatcaagcccagggaaaaggtgctggtgattgggtgtggcaactcagaactgagtgagcaactgtatgatgtgggctatcgggatatagtgaacatcgacatcagtgaggttgtcatcaagcaaatgaaggaatgtaatgccacccgacggccccagatgagcttcttgaagatggacatgacgcagatggagtttcctgatgcctcgttccaggtggtgttggacaagggcaccctggatgctgtcctgacagatgaggaagagaagaccttacaacaggtggacaggatgctggctgaggttggccgtgtcctgcaggtgggcggtcgctatctctgcatctccctggctcaggctcacatcctgaagaaagcagtgggccacttctcccgggaggggtggatggtgagggtgcaccaagtggccaacagccaggaccaggtgttggaagcagagcctcagttctccttgcctgtctttgccttcatcatgaccaagttcaggccagtccctggctctgcccttcagatctttgagctgtgtgctcaggagcagcgcaagcctgtgcggctggagagtgccgagcggctggccgaggcggtgcaggagcgacagcagtatgcctggctgtgcagccagctgcgccgcaaggccaggctggggagtgtgtctctggacttgtgcgatggggacacgggggagccacgctacaccctccacgtggtggacagccccactgtgaaaccatcgcgggacaatcattttgcgattttcatcatccctcagggccgggagaccgagtggctctttggcatggatgagggccggaaacagctggcggccagtgctggcttcaggaggttgattacagtggcccttcaccgaggtcagcagtatgaaagcatggaccacatccaagctgagctgtcggctagagtcatggagctggccccagctgggatgcccacccagcagcaggtcccctttctgtctgtgggtggggacattggggtccggaccgttcagcaccaagactgcagccccttgagcggtgactatgtcattgaggatgtgcaaggggatgacaagcgatacttccgtcgactgatcttcctcagcaacaggaatgtggtgcagtccgaagccaggttgctgaaggatgtgtctcacaaagcccagaagaagcggaaaaaggacaggaagaagcagcggcctgctgatgcggaggacctccctgcagccccggggcagtccattgataagagttacctgtgttgtgaacaccacaaagccatgatcgctggccttgccctgctgagaaacccagagctactcctagagatcccactggcattgttggtggtaggcctgggcgggggcagcctccccctctttgtccacgatcattttccaaagtcctgcattgatgctgtggagatcgatccctccatgttggaagtggccacccagtggtttggcttctcccagagtgaccgaatgaaggtccacattgcagatggcctggactatatcgccagcttggcaggaggaggagaagcacggccttgctacgatgtcataatgtttgatgttgacagtaaggacccaacactgggaatgagttgtccgcccccagcatttgtggagcaatcttttctacagaaggttaaaagcatcttgactcctgaaggtgtttttattctcaaccttgtgtgccgagacttggggctaaaagactcagtgctggctgggctcaaggcagtgttccccctcctatatgtccggcgaattgagggtgaagtgaatgagatcctgttctgtcagctgcaccctgagcaaaaacttccagctttaggggaaaaaaatttaaaacaggcattggaacggacactgagacagcctgggactcgttaggatgacaacctatgtcttcgctgagatatgactccagtcgatgacaagttgtgtgactggctctagaaccagtcagcactactgtcatagtcaatatta

SEQ ID NO: 37662 - DNA, 2663 bp, Homo sapiens
agacaaagcggaggccgagcccaggaagcaagcgcgctctccgccccgcctggagggagggcccaaccacagcacagccgcgctcactcctcacccggacgtgacctagttctcacagaggcccggcctcttccgccacaactccggcccgcggtcccgccccgttccgtgaatggtcggccggcctcaggtcaaaaaagcgtttaggtgtctgcgacggagcctccggagaaaggcaagcacgtcgcagccaatgaggtgatagaaacgcaaagcagcgaccaatgactagctgagttgggctgggccggccgacgaatcacgaggcttcgcacccggatatggttatgggctcggaaatctagttcgggaaaagtgtgaggggctcttcacgtggggaaggaacagcaggcgcggaggagggggcaagcgtgtgtgagattcagtggtccatgcgtgcgtttgtcgtgtaagggtcattcctggggtttggagtgggggaacaaatcaatgtggctgtttttccgtggaaagaattcccactgcagtgtcccggagcctgcgtgtggtgggcaagctcctcaaatggtatctcacagggaataggggagtcttgaaaacgcagcttcggcagtaggaacatgaacctcttacctaaaagttccagggagtttggctccgttgactattgggagaagttcttccagcagcgaggaaagaaagctttcgagtggtatggaacctacctggaactgtgcggggtgctacataaatatatcaagcccagggaaaaggtgctggtgattgggtgtggcaactcagaactgagtgagcaactgtatgatgtgggctatcgggatatagtgaacatcgacatcagtgaggttgtcatcaagcaaatgaaggaatgtaatgccacccgacggccccagatgagcttcttgaagatggacatgacgcagatggagtttcctgatgcctcgttccaggtggtgttggacaagggcaccctggatgctgtcctgacagatgaggaagagaagaccttacaacaggtggacaggatgctggctgaggttggccgtgtcctgcaggtgggcggtcgctatctctgcatctccctggctcaggctcacatcctgaagaaagcagtgggccacttctcccgggaggggtggatggtgagggtgcaccaagtggccaacagccaggaccaggtgttggaagcagagcctcagttctccttgcctgtctttgccttcatcatgaccaagttcaggccagtccctggctctgcccttcagatctttgagctgtgtgctcaggagcagcgcaagcctgtgcggctggagagtgccgagcggctggccgaggcggtgcaggagcgacagcagtatgcctggctgtgcagccagctgcgccgcaaggccaggctggggagtgtgtctctggacttgtgcgatggggacacgggggagccacgctacaccctccacgtggtggacagccccactgtgaaaccatcgcgggacaatcattttgcgattttcatcatccctcagggccgggagaccgagtggctctttggcatggatgagggccggaaacagctggcggccagtgctggcttcaggaggttgattacagtggcccttcaccgaggtcagcagtatgaaagcatggaccacatccaagctgagctgtcggctagagtcatggagctggccccagctgggatgcccacccagcagcaggtcccctttctgtctgtgggtggggacattggggtccggaccgttcagcaccaagactgcagccccttgagcggtgactatgtcattgaggatgtgcaaggggatgacaagcgatacttccgtcgactgatcttcctcagcaacaggaatgtggtgcagtccgaagccaggttgctgaaggatgtgtctcacaaagcccagaagaagcggaaaaaggacaggaagaagcagcggcctgctgatgcggaggacctccctgcagccccggggcagtccattgataagagttacctgtgttgtgaacaccacaaagccatgatcgctggccttgccctgctgagaaacccagagctactcctagagatcccactggcattgttggtggtaggcctgggcgggggcagcctccccctctttgtccacgatcattttccaaagtcctgcattgatgctgtggagatcgatccctccatgttggaagtggccacccagtggtttggcttctcccagagtgaccgaatgaaggtccacattgcagatggcctggactatatcgccagcttggcaggaggaggagaagcacggccttgctacgatgtcataatgtttgatgttgacagtaaggacccaacactgggaatgagttgtccgcccccagcatttgtggagcaatcttttctacagaaggttaaaagcatcttgactcctgaaggtatggagaacaaaaggtgggagagggaggagagaagggaccattaacaaaaattatctttttaatgaaaaatgcacagaagtgcgagctcgatcaatttttccaaatttaatacacccatttactagcactagacacagaaaatttccagcttgccagaaagtcgtatctcttatcccctttcagtaacttgtcct

SEQ ID NO: 37663 - DNA, 1501 bp, Homo sapiens
  misc_feature (1336)..(1336): n is a, c, g, or t
  misc_feature (1359)..(1359): n is a, c, g, or t
tcctaccgaacgttgtacccatctcgactccttaatgtttgtcttttctctaccctttttgaaattgttctccgataaaagactcagtgctggctgggctcaaggcagtgttccccctcctatatgtccggcgaattgagggtgaagtgaatgagatcctgttctgtcagctgcaccctgagcaaaaacttgccacaccagagctcctagaaacagcccaggctttggagcggaccctgaggaagcctgggaggggttgggatgacacgtatgtcttgtcagatatgctcaagacggtgaaaattgtgtgactgcttaggccaagcagccctcctgcctagactgaccttggactcccagcctgccagagaatgaagaaatacaacgcacagtacttttgaagcttcgtatttttcttggtttcacactcagctacatgtgacctccagcttggtgaggttgcctgaagattagggaaaataaaaatgtccttcccatcttgtcctcttcagtaccacttgggttggtttgtctttgcttcctacaccacgtccttgagtggagttccctgctgaagcccctagcacacactgcatgccttaacaagtgtgtgcaagcccctcagaactcaagacatccaaattttattgcgtctctacttatactggtttgcttttgatttattcctctattagttctataggagtgatctcaagtgagatagcagagcaagatgccaaaagaccataaatagagtaaggtttctatagatgtgagacagatttgagagagcatttactctgtctccctgtggatgaaactgctgctgaaatggttccaatttttaggaatctgcttacccacttcattatttgacagctttccttggtgacccaaaccttgtagcctaagccatttgtctttttctcagtggagggagtgtatggacctggccccatggctttgcatgttagagacctggcagactaaagtctctagtgtttgtttgctcacatttgctgagtgacagctatgtgccagactgcataaagggtggtggcagaagtgaaaatgtttaagaatgaccaaaaacattagtaatgaaagttaatgtgttccaggcattcttctaagtggtttacatgcactgtctcatttaatctgagataaaggatacttaagcccaaactatatctaaacccaaatctcacttggctggaaacatcaatcttaaccatttattcagaaccattaaaccaatgattccaaaaaaaaaaagaagtcttattacggccagctatcgttagtaggtattagctgcctgcgcgttcacgcngcatggacatgggtctactagcntagaccactcgcgcggactgaagtcccatgtcctcactcatcttggcgccctcggcgggttgcgtgacaccgcctgtctttatgctaccagctggcttgcgcaaaatgctgcttgtcggttcacactcgtcggaattccgtt

SEQ ID NO: 37664 - DNA, 1270 bp, Homo sapiens
ccaaggtcccccaggcctgaagcagatgcatctcagacctcctccccacctcacccagttggtcaccgaggtctgctaatccttgctccgaaatgtttcacagctctgtccttttcgagctgttggctccagttccagctgcatctctagcctgctatgttcagcattttcctggtggctgtgtcttgtttccctcaaaggcacctgtgcactgtcatcagagtcatcttataatgagtctggggtcttgctgtgctggaggatggggatgagctccctcagagtgtgagcctcaacagtcctcgcccacacacccgacagtgtgcgcccactgtccccagccttgagtgctgcttctgtctcccgagtcacatgggagaacctcacacagctgactgttctcccggggtcccagtctgggtctcacctccactctcaggccccctctgctgggatacagtatccccgccccatcttatcctccgagttcagcttacatgccctcttcaggaacccttttcctcgggtttcctgcacataggcgtctctggaattggcatttatcaagctgtactctaactacttccacccccttcactaggttgtgggaggtttttgaggtcaaaactatgcctcattgatctttgtaacccccagcaaatgctcagtgcatacatgtttattgaacagatgaactgataaatggatgaatggctggatggcgtatcctgatctccagccccacacccgcacacggtggcagctgtggccaacctactcttttgcttttgcttggttccttccttccttacctcacaccacaaacaccttcatagacctgcctggggcccaacacctggctgcagcctctgcttggggtctctttgattcttccctttatgagagatttgaagcttcctttctggggttgtgtatctgctccccagacccagttacctgttcttcctcctgcaggtgtccctcgcccttttggtttgttcaaggagctgctgctttgcatagctgctctagtgtctggtatcatcggatctggttttgaataattcccaggagtcctgggtccctggcctccaaagctggaatgtgaacgcatgccacggtggtctgaccctcacactccttttctcttaacagcaaaatgcaatggaaggaagaaaagttccaacaaagaatgattttgtgaattctgtgatttttcttctgatcagtttcaatctgtaataaatgccttatttttcctgtaaaactt

SEQ ID NO: 37665 - DNA, 941 bp, Homo sapiens
atgatttccagaatggagaagatgacgatgatgatgaagatattgattatgtttgctcttggaatgaactactggtcttgctcaggtttcccagtgtacgactacgatccatcctccttaagggatgccctcagtgcctctgtggtaaaagtgaattcccagtcactgagtccgtatctgtttcgggcattcagaagctcattaaaaagagttgaggtcctagatgagaacaacttggtcatgaatttagagttcagcatccgggagacaacatgcaggaaggattctggagaagatcccgctacatgtgccttccagagggactactatgtgtccacagctgtttgcagaagcaccgtgaaggtatctgcccagcaggtgcagggcgtgcatgctcgctgcagctggtcctcctccacgtctgagtcttacagcagcgaagagatgatttttggggacatgttgggatctcataaatggagaaacaattatctatttggtctcatttcagacgagtccataagtgaacaattttatgatcggtcacttgggatcatgagaagggtattgcctcctggaaacagaaggtacccaaaccaccggcacagagcaagaataaatactgactttgagtaacggccttgaggtgtccctcgcccttttggtttgttcaaggagctgctgctttgcatagctgctctagtgtctggtatcatcggatctggttttgaataattcccaggagtcctgggtccctggcctccaaagctggaatgtgaacgcatgccacggtggtctgaccctcacactccttttctcttaacagcaaaatgcaatggaaggaagaaaagttccaacaaagaatgattttgtgaattctgtgatttttcttctgatcagtttcaatctgtaataaatgccttatttttcctgtaaaactt

SEQ ID NO: 37666 - DNA, 431 bp, Homo sapiens
atgatttccagaatggagaagatgacgatgatgatgaagatattgattatgtttgctcttggaatgaactactggtcttgctcaggtttcccagtgtacgactacgatccatcctccttaagggatgccctcagtgcctctgtggtaaaagtgaattcccagtcactgagtccgtatctgtttcgggcattcagaagctcattaaaaagattgacaaatgggatctaattaaactaaagagcttctgcacggcaaaataaactaccatcagagtgaacaggcaacctacagaatgggagaaaatttttgcaatctactcatctgacaaagggctaatatccagaatctacaatgaactcaaacaaatttacaagaaaaaaaacaaacaaccccatcaacaagtgggcgaaggatatgaacagacacttctc

SEQ ID NO: 37667 - DNA, 761 bp, Homo sapiens
atgatttccagaatggagaagatgacgatgatgatgaagatattgattatgtttgctcttggaatgaactactggtcttgctcaggtttcccagtgtacgactacgatccatcctccttaagggatgccctcagtgcctctgtggtaaaagtgaattcccagtcactgagtccgtatctgtttcgggcattcagaagctcattaaaaagagttgaggtcctagatgagaacaacttggtcatgaatttagagttcagcatccgggagacaacatgcaggaaggattctggagaagatcccgctacatgtgccttccagagggactactatgtgtccacagctgtttgcagaagcaccgtgaaggtatctgcccagcaggtgcagggcgtgcatgctcgctgcagctggtcctcctccacgtctgagtcttacagcagcgaagagatgatttttggggacatgttgggatctcataaatggagaaacaattatctatttggtctcatttcagacgagtccataagtgaacaattttatgatcggtcacttgggatcatgagaagggtattgcctcctggaaacagaaggtacccaaaccaccggcacagagcaagaataaatactgactttgagtaacggccttgagcaaaatgcaatggaaggaagaaaagttccaacaaagaatgattttgtgaattctgtgatttttcttctgatcagtttcaatctgtaataaatgccttatttttcctgtaaaactt

SEQ ID NO: 37668 - DNA, 1967 bp, Homo sapiens
  misc_feature (934)..(934): n is a, c, g, or t
  misc_feature (1250)..(1250): n is a, c, g, or t
  misc_feature (1916)..(1916): n is a, c, g, or t
aaacaaactattctgtataggtaatgaacgattttcaaaaatcttagatgaatcaatgagataacagccaaacactcactcaactggcatctactcaaaaagctattggtttctcatgattagctttgccaaaccatctccctagattatttttctttttaaatttcactttgcatttggttaatcattccctgggaaagcacacggggcaggtgggcctccttgtcttcactttgccattccctatctgatgaattctgaacctcagtttttcatccaagaactggagttaaaacacctgcactattatacagggcgtgaggctgttgtcatgataatcaatgagctgatgtgtggttgaagctcttatctgactccatagatagttttaaactacctaagtataaattcagcagctttgcttaagatttaaagcaggtattataaatatgcattcctttgccgatcttttaatagaaggacaggcctattcttttgaagatggatctgctgatgagagctcccctttgtctactttacatcaaccacacccttatttcattgttttgtgattccagtgttggtttctttaaagtaaaggaagaatttagatatttgccgagccattctgaatatagaaacttcctagatcgcatatcccttgatcttttatcgttaatttactctcatctaattaacagcgttttgtttttttttttagaaattgacttttattaagtctttccaaagtagccaacttagttttcaaagaaaatttctctctatttttatgttcatctaatcagtgacagtaataagtcaatcagctcatgtaatcccagtaacaaacagcaggattgtggacacacacagtggagccctgatatgctgcagctggacagtgggagctgagcaggcagggcacccccccccnccgccggccaggactccaggccttcggtgttcagtcttgccatggcatcagtcattggttttgtatagggagcagagaaggttatttaatctggttagtcagataagtggagtttactcgtatgtgaaattgctttctttgctgtgctgtgaggagctgtacaaatataaggtgctgttactgattattcagccaacatttatggactaccaactctgtacctggcacagttttggttctggggtcagagatgacaaactcctaccctgggagtccactgagcgaccataccaataggtcatggcctcagagccgngtggcccacggcccctgtgactctctctgctgtggacctttctcctagaacccgatcatcagccagttcttccccaccctcctgctctggtccttctcggccctgctcccctccattgtctactactctacactgctggagtctcactggaccaagtgagtgcccgggagccccgaggccctgcccctaagaaggatatctctgaccgctcccttgtccacaccctaaccccccagctgctcaggcagtgggcacatggcaggggcctcactggggcacatagagcatttgggggactgcgagtgctcacctttgacttcctgcaggtcgggggaaaaccagatcatgatgaccaaagtctacatattcttgatcttcatggtgctgatcctgccctccctgggtctcaccaggtatatgccaccaccttctgctctaaattcagaataagagtcacatcaggagagcactgtccccaggagaatgcaaacggtttggcagcagaagcaaacctctaacaatatctaagcctgtcgcaaccactcggcgtgcagtagggctgggtcattgattcttctggcaatatgattgattgttcttctttaaaaaagaaaaaaacaccatattggtcaggctgttcttgagctcctgacctcaggtgatccncccgcctcggcctcccaaagtgctgggattacaggcgtgagactctgtctc

SEQ ID NO: 37669 - DNA, 2150 bp, Homo sapiens
cttggttccaggcctgggtcctcctctgatctgctgtgtgaccgcatttgagtcacttcccctctttctcagtctcctgccatgcaaagaaggctcatagagttgctttggaagtggattctttgtacagcctggaagaagacgctgtgtaaatgacatgctttgggggctcccccggccacagaaggagaaaactggagccttctgatttcctgttgtttactttccagaggctggagttgggtaggaaacctgagcataccggcacactggcttgtgggtgacttctctccctgctgtatttcccggacaggtgaggcggaccctgttcatcacaggactccccagagatgccaggaaggagactgtggagagccacttccgggacgcgtatcccacgtgtgaggtggttgatgtgcagctgtgctacaacgtggccaaactgatctacctgtgcaaggagaaaaagaagactgagaagagcctgacctattacacaaacctgcaggtgaagacaggccagcggaccctcatcaaccccaagccctgtggccagttttgctgctgtgaagtgctgggctgtgagtgggaagacgccatctcttactacacacggatgaaggacaggctgctggagaggatcacagaggaagaacgccacgtccaggaccagcccctgggaatggccttcgtcaccttccaggagaagtccatggccacctacatcctgaaagatttcaatgcctgcaagtgtcagagccttcagtgcaaaggtgagccccagccgtcctcccatagcagggagctctatacctccaagtggacagtcacctttgctgctgaccctgaggacatctgctggaagaacctctctatccagggcctccgctggtggctacagtggctgggcatcaacttcaccctcttcctggggctatttttcctgaccacaccctccatcatcctgtccaccatggacaagtttaatgtcaccaaacccatccatgcgctgaataacccgatcatcagccagttcttccccaccctcctgctctggtccttctcggccctgctcccctccattgtctactactctacactgctggagtctcactggaccaagtcgggggaaaaccagatcatgatgaccaaagtctacatattcttgatcttcatggtgctgatcctgccctccctgggtctcaccagtctagattttttcttccggtggctctttgacaaaacttcctcggaggcctccatcaggttggagtgcgtcttcctgcctgaccagggtgccttctttgtgaactatgtcatcgcctcggccttcatcggcaatggcatggagctgctgcggctgccaggtctcatcctctataccttccgcatgatcatggccaagacggctgctgaccgcaggaatgtcaagcagaaccaggccttccagtacgagtttggagccatgtatgcatggatgctgtgtgtcttcactgtcatcgtggcctacagcatcacttgtcccatcatcgcgccatttggcctcatctacatcctgctcaagcacatggtggaccggcacaacctctacttcgtctacctcccagccaagctggagaaggggatccactttgccgctgtgaaccaggccttggcagcccccatcctgtgcctcttctggctctacttcttttccttcctgcgcctgggtatgaaggcccccgccactctgttcaccttcctggtgctgctgctcaccatcctggtctgcctggctcacacctgctttggatgcttcaagcacctcagccctctgaactacaaaacagaagagcctgcaagtgacaaaggaagtgaggcagaggcccacatgcccccaccgttcacaatcacatggcaggcaagtttgtgaattaatggcagagaaggaatcctggtccccctgggtattttaacctgcatatttgaaactgttgaggagatagagtcttgtctcgattcatggccatcccccttggtttcagttccctgctctctttccttctctgcatatttaatgcctgccctacgtgcctcggattctgaacggcttggcctcggagaggacagcactgtctccgcagcagcagcagcagcagacctatggtgcc

SEQ ID NO: 37670 - DNA, 1975 bp, Homo sapiens
cttggttccaggcctgggtcctcctctgatctgctgtgtgaccgcatttgagtcacttcccctctttctcagtctcctgccatgcaaagaaggctcatagagttgctttggaagtggattctttgtacagcctggaagaagacgctgtgtaaatgacatgctttgggggctcccccggccacagaaggagaaaactggagccttctgatttcctgttgtttactttccagaggctggagttgggtaggaaacctgagcataccggcacactggcttgtgggtgacttctctccctgctgtatttcccggacaggtgaggcggaccctgttcatcacaggactccccagagatgccaggaaggagactgtggagagccacttccgggacgcgtatcccacgtgtgaggtggttgatgtgcagctgtgctacaacgtggccaaactgatctacctgtgcaaggagaaaaagaagactgagaagagcctgacctattacacaaacctgcaggtgaagacaggccagcggaccctcatcaaccccaagccctgtggccagttttgctgctgtgaagtgctgggctgtgagtgggaagacgccatctcttactacacacggatgaaggacaggctgctggagaggatcacagaggaagaacgccacgtccaggaccagcccctgggaatggccttcgtcaccttccaggagaagtccatggccacctacatcctgaaagatttcaatgcctgcaagtgtcagagccttcagtgcaaaggtgagccccagccgtcctcccatagcagggagctctatacctccaagtggacagtcacctttgctgctgaccctgaggacatctgctggaagaacctctctatccagggcctccgctggtggctacagtggctgggcatcaacttcaccctcttcctggggctatttttcctgaccacaccctccatcatcctgtccaccatggacaagtttaatgtcaccaaacccatccatgcgctgaataacccgatcatcagccagttcttccccaccctcctgctctggtccttctcggccctgctcccctccattgtctactactctacactgctggagtctcactggaccaagtcgggggaaaaccagatcatgatgaccaaagtctacatattcttgatcttcatggtgctgatcctgccctccctgggtctcaccagtctagattttttcttccggtggctctttgacaaaacttcctcggaggcctccatcaggttggagtgcgtcttcctgcctgaccagggtgccttctttgtgaactatgtcatcgcctcggccttcatcggcaatggcatggagctgctgcggctgccaggtctcatcctctataccttccgcatgatcatggccaagacggctgctgaccgcaggaatgtcaagcagaaccaggccttccagtacgagtttggagccatgtatgcatggatgctgtgtgtcttcactgtcatcgtggcctacagcatcacttgtcccatcatcgcgccatttggcctcatctacatcctgctcaagcacatggtggaccggcacaacctctacttcgtctacctcccagccaagctggagaaggggatccactttgccgctgtgaaccaggccttggcagcccccatcctgtgcctcttctggctctacttcttttccttcctgcgcctgggtatgaaggcccccgccactctgttcaccttcctggtgctgctgctcaccatcctggtctgcctggctcacacctgctttggatgcttcaagcacctcagccctctgaactacaaaacagaagagcctgcaagtgacaaaggaagtgaggcagaggcccacatgcccccaccgttcacaccctacgtgcctcggattctgaacggcttggcctcggagaggacagcactgtctccgcagcagcagcagcagcagacctatggtgcc

SEQ ID NO: 37671 - DNA, 1488 bp, Homo sapiens
cttggttccaggcctgggtcctcctctgatctgctgtgtgaccgcatttgagtcacttcccctctttctcagtctcctgccatgcaaagaaggctcatagagttgctttggaagtggattctttgtacagcctggaagaagacgctgtgtaaatgacatgctttgggggctcccccggccacagaaggagaaaactggagccttctgatttcctgttgtttactttccagaggctggagttgggtaggaaacctgagcataccggcacactggcttgtgggtgacttctctccctgctgtatttcccggacaggtgaggcggaccctgttcatcacaggactccccagagatgccaggaaggagactgtggagagccacttccgggacgcgtatcccacgtgtgaggtggttgatgtgcagctgtgctacaacgtggccaaactgatctacctgtgcaaggagaaaaagaagactgagaagagcctgacctattacacaaacctgcaggtgaagacaggccagcggaccctcatcaaccccaagccctgtggccagttttgctgctgtgaagtgctgggctgtgagtgggaagacgccatctcttactacacacggatgaaggacaggctgctggagaggatcacagaggaagaacgccacgtccaggaccagcccctgggaatggccttcgtcaccttccaggagaagtccatggccacctacatcctgaaagatttcaatgcctgcaagtgtcagagccttcagtgcaaaggtgagccccagccgtcctcccatagcagggagctctatacctccaagtggacagtcacctttgctgctgaccctgaggacatctgctggaagaacctctctatccagggcctccgctggtggctacagtggctgggcatcaacttcaccctcttcctggggctatttttcctgaccacaccctccatcatcctgtccaccatggacaagtttaatgtcaccaaacccatccatgcgctgaataacccgatcatcagccagttcttccccaccctcctgctctggtccttctcggccctgctcccctccattgtctactactctacactgctggagtctcactggaccaagtcgggggaaaaccagatcatgatgaccaaagtctacatattcttgatcttcatggtgctgatcctgccctccctgggtctcaccagtctagattttttcttccggtggctctttgacaaaacttcctcggaggcctccatcaggttggagtgcgtcttcctgcctgaccagggtgccttctttgtgaactatgtcatcgcctcggccttcatcggcaatggcatggagctgctgcggctgccaggtctcatcctctataccttccgcatgatcatggccaagacggctgctgaccgcaggaatgtcaagcagaaccagccttccagtacgagtttggaccattcactcgccgcgatctctagagt

SEQ ID NO: 37672 - DNA, 1698 bp, Homo sapiens
cttggttccaggcctgggtcctcctctgatctgctgtgtgaccgcatttgagtcacttcccctctttctcagtctcctgccatgcaaagaaggctcatagagttgctttggaagtggattctttgtacagcctggaagaagacgctgtgtaaatgacatgctttgggggctcccccggccacagaaggagaaaactggagccttctgatttcctgttgtttactttccagaggctggagttgggtaggaaacctgagcataccggcacactggcttgtgggtgacttctctccctgctgtatttcccggacaggtgaggcggaccctgttcatcacaggactccccagagatgccaggaaggagactgtggagagccacttccgggacgcgtatcccacgtgtgaggtggttgatgtgcagctgtgctacaacgtggccaaactgatctacctgtgcaaggagaaaaagaagactgagaagagcctgacctattacacaaacctgcaggtgaagacaggccagcggaccctcatcaaccccaagccctgtggccagttttgctgctgtgaagtgctgggctgtgagtgggaagacgccatctcttactacacacggatgaaggacaggctgctggagaggatcacagaggaagaacgccacgtccaggaccagcccctgggaatggccttcgtcaccttccaggagaagtccatggccacctacatcctgaaagatttcaatgcctgcaagtgtcagagccttcagtgcaaaggtgagccccagccgtcctcccatagcagggagctctatacctccaagtggacagtcacctttgctgctgaccctgaggacatctgctggaagaacctctctatccagggcctccgctggtggctacagtggctgggcatcaacttcaccctcttcctggggctatttttcctgaccacaccctccatcatcctgtccaccatggacaagtttaatgtcaccaaacccatccatgcgctgaataacccgatcatcagccagttcttccccaccctcctgctctggtccttctcggccctgctcccctccattgtctactactctacactgctggagtctcactggaccaagtgagtgcccgggagccccgaggccctgcccctaagaaggatatctctgaccgctcccttgtccacaccctaaccccccagctgctcaggcagtgggcacatggcaggggcctcactggggcacatagagcatttgggggactgcgagtgctcacctttgacttcctgcaggtcgggggaaaaccagatcatgatgaccaaagtctacatattcttgatcttcatggtgctgatcctgccctccctgggtctcaccaggtatatgccaccaccttctgctctaaattcagaataagagtcacatcaggagagcactgtccccaggagaatgcaaacggtttggcagcagaagcaaacctctaacaatatctaagcctgtcgcaaccactcggcgtgcagtagggctgggtcattgattcttctggcaatatgattgattgttcttctttaaaaaagaaaaaaacaccatattggtcaggctgttcttgagctcctgaaaaagataatccaccccctcgaaaacaaagtgtaggttaaaagagaagactctgactcaaaaatataaaaggaaaaaga

SEQ ID NO: 37673 - DNA, 453 bp, Homo sapiens
agtagcctgggcctggctgttgctacatttccttgcagcatcctgaaagatttcaatgcctgcaagtgtcagagccttcagtgcaaaggtgagccccagccgtcctcccatagcagggagctctatacctccaagtggacagtcacctttgctgctgaccctgaggacatctgctggtaagctcctagaccaaggagaggtgggagagaggcctgggttcctggtgggagctgcccatcacctggagcacaggtgtgacctggcagtcaatggagatctccacacatctgcaattctgtgggctgtgatgctgtgatgtgctcggtgtggcccaactggggtatctgcccagcccttccctccagtgttcctccctagcattcaagtgctacccagcagaaatataatgccagttctgcatctaattttaaatttcctaatagccatgctaaa

SEQ ID NO: 37674 - DNA, 1684 bp, Homo sapiens
gaacctgggaggcagaggttgcagtgagccgagatcacaccactgcactctagcctgggtgactgagcaagactctgtctcccaaaaaaaaaaaacagaaaaagaaaaaataaatgccatgctggagccttgtttggcctgcttgggtgctcatgccatctctttgggtaggttctggcccccagactttagctggggagccacatctgagagaataattgttccctctgagctcttggggacctaagatttggtctttctgtagttgaaggtcagtgcagagaacttgcccccaggctagtctcttggtctgcctaaatctgaccttctgacccacctaagccacgagcactgggagacaagcctcgagacctgtatcccctctcccgctgcaggaagaacctctctatccagggcctccgctggtggctacagtggctgggcatcaacttcaccctcttcctggggctatttttcctgaccacaccctccatcatcctgtccaccatggacaagtttaatgtcaccaaacccatccatgcgctgaataacccgatcatcagccagttcttccccaccctcctgctctggtccttctcggccctgctcccctccattgtctactactctacactgctggagtctcactggaccaagtcgggggaaaaccagatcatgatgaccaaagtctacatattcttgatcttcatggtgctgatcctgccctccctgggtctcaccagtctagattttttcttccggtggctctttgacaaaacttcctcggaggcctccatcaggttggagtgcgtcttcctgcctgaccagggtgccttctttgtgaactatgtcatcgcctcggccttcatcggcaatggcatggagctgctgcggctgccaggtctcatcctctataccttccgcatgatcatggccaagacggctgctgaccgcaggaatgtcaagcagaaccaggccttccagtacgagtttggagccatgtatgcatggatgctgtgtgtcttcactgtcatcgtggcctacagcatcacttgtcccatcatcgcgccatttggcctcatctacatcctgctcaagcacatggtggaccggcacaacctctacttcgtctacctcccagccaagctggagaaggggatccactttgccgctgtgaaccaggccttggcagcccccatcctgtgcctcttctggctctacttcttttccttcctgcgcctgggtatgaaggcccccgccactctgttcaccttcctggtgctgctgctcaccatcctggtctgcctggctcacacctgctttggatgcttcaagcacctcagccctctgaactacaaaacagaagagcctgcaagtgacaaaggaagtgaggcagaggcccacatgcccccaccgttcacaatcacatggcaggcaagtttgtgaattaatggcagagaaggaatcctggtccccctgggtattttaacctgcatatttgaaactgttgaggagatagagtcttgtctcgattcatggccatcccccttggtttcagttccctgctctctttccttctctgcatatttaatgcctgccctacgtgcctcggattctgaacggcttggcctcggagaggacagcactgtctccgcagcagcagcagcagcagacctatggtgcc

SEQ ID NO: 37675 - DNA, 1302 bp, Homo sapiens
cttggttccaggcctgggtcctcctctgatctgctgtgtgaccgcatttgagtcacttcccctctttctcagtctcctgccatgcaaagaaggctcatagagttgctttggaagtggattctttgtacagcctggaagaagacgctgtgtaaatgacatgctttgggggctcccccggccacagaaggagaaaactggagccttctgatttcctgttgtttactttccagaggctggagttgggtaggaaacctgagcataccggcacactggcttgtgggtgacttctctccctgctgtatttcccggacaggtgaggcggaccctgttcatcacaggactccccagagatgccaggaaggagactgtggagagccacttccgggacgcgtatcccacgtgtgaggtggttgatgtgcagctgtgctacaacgtggccaaactgatctacctgtgcaaggagaaaaagaagactgagaagagcctgacctattacacaaacctgcaggtgaagacaggccagcggaccctcatcaaccccaagccctgtggccagttttgctgctgtgaagtgctgggctgtgagtgggaagacgccatctcttactacacacggatgaaggacaggctgctggagaggatcacagaggaagaacgccacgtccaggaccagcccctgggaatggccttcgtcaccttccaggagaagtccatggccacctacatcctgaaagatttcaatgcctgcaagtgtcagagccttcagtgcaaaggtgagccccagccgtcctcccatagcagggagctctatacctccaagtggacagtcacctttgctgctgaccctgaggacatctgctggtaagctcctagaccaaggagaggtgggagagaggcctgggttcctggtgggagctgcccatcacctggagcacaggtgtgacctggcagtcaatggagatctccacacatctgcaattctgtgggctgtgatgctgtgatgtgctcggtgtggcccaactggggtatctgcccagcccttccctccagtgttcctccctagcattcaagtgctacccagcagaaatataatgccagttctgcatctaattttaaatttcctaatagccatgctaaaaaagtaaaaagaaacagttgaaattaattttaataatgtatctcgcccaatatatccaaactgttatttcaacatgcaatttttgaaaaatgtgagatgttttacattctctttttcacacttagtcttcaatatctggtgtgtattttacacttctagcacct

SEQ ID NO: 37676 - DNA, 178 bp, Homo sapiens
cagcatggggccacgtcatcccaatgggatgtgtcttgtggcaggaagacgccatctcttactacacacggatgaaggacaggctgctggagaggatcacagaggaagaacgccacgtccaggaccagcccctgggaatggccttcgtcaccttccaggagaagtccatggccaccta

SEQ ID NO: 37677 - DNA, 645 bp, Homo sapiens
caatgctgttgcagatagaactgttttcttaatttcctttttgaattatttatagtatataactctatgcaactgatttgtatgtgttgatttttatatactgcagctttgctgaatttgtttgttctaatggttttttttggtggaatcttcagggtcttaacttagtttttgatccctaaaattagtgctgcatatgtagactcagaaacctcacgtaaaaatttaaattggcctcaggttggcaatgttccaaggcaatggttagaagcaaattcagattctccaaggcctcaaataattcctacagataaaatcccaaggaaattcagcagtgcctagtcaaaaatccacaaatcaggcaaggtaataaggcactatgaataagaacctaagaaaaagtacacaacaaaaacacatccgccctcgggaggctgaggcaggagaatggcttgaacccgggaggcaaagcttgcagtgagccgacatcatgccactacactccagcctgggcgacagagcaagactccgtctcaaaaaaaaaccaaaaaaaccaacaaaaaaaccacacccaccaaagcttcggattatataagaaatataaaaacacgtttattatgatgaaagaaataaaatagaaacctg

SEQ ID NO: 37678 - DNA, 418 bp, Homo sapiens
gcatatatttagtaacttttttgtagagattattgatgagattatttagagagaatgtttattgaagaatggtgttgaaaatgtaaggaaaataatttttaaactggttttctgggatgatttatttatagtcttgtgcagtcatgggcaaggattggaatatttttcagtcctcactagatctctgaatctatgacttattttgttaacttaaaattacatgcatgtttggggattgtcttgttattcaaaacagtgacataatggatatatttgatttttcaaggtctttgatcttttatgatttcatttattaactattagagaattgttattactctgttaataatgattaagttattctgaagaaacgtacaggaaaatattttgaaaaaaatttaaaacttccatggtcaga

SEQ ID NO: 37679 - DNA, 1451 bp, Homo sapiens
gtatcaacgcagagtgcccattacggccgggtaatgtctttaacagcaatcttttatttatttatttatttatttttgagacggagtcttgctgtgtcaccaggctggagcagtggcacgatctcgcctcactgcaacctccgcctcccaggttcaagctattctcctgcctcagcctcccaagtaactgggactgcaggcacatgccaccacatccagctaattttgtatttttagtagagacggggtttcaccttgttggccaggatgatctcgatctcttgatctcgtgatctgcccgcattggcctcctgaagtgctgggattacaggcatgagccactgcgcccggcccaaatcttttattttttaacagccttagttatttataattcaaatgcactaaaatatcatcgctgtcatgaactttgctgtttacaggttctgtgtaattcagaatgctttgtacttagaaaataatttctaggcttatcttgttttgcagttttcatgttttgacaattgcccaccatttacaatactcaatttttgattatgaaatgaatagtaaaattcaaacatatctaataataatttgccttagtttgattaataaattatatcaaaaaacttggggatagaaagaggcttttttttccccctgtagtatttttaaaactttttagatgagctggatgaaaccttagtacattggagctggagttgtattgagtacagccccaactctgaagccttatattcatgtcttaagtaccattgattgttctgtgaattgttgttagtttcatatttgacattgtagtaatccaccttgcattttagtctttgcaaaaaggatattgctaggtatattcttatttctgattgagtattgaatttacatttttcagaatttcattctttgtcattataatccaaaaacaatgtccacatcagacttggaacttctcacttcaaaaatgaaatacagatttagcagtgttgtacataatgatgtccaagcatttttccacctgtttactgagttttccaaccatttactatgtgttgagattggtgggttttctggctgtttttctgaggtgaatgacttgttacagagcctcagtaagaaatttcaactaaaatcacaaaaacataaagtccaggaaaccaccagaagatggatttttagtgtttttgaaatcttgtatttccttttgatatcatttactcattttaattttacgactgccaacttgttacggtattaattatatgtatgtgtttatatgtatgcatataatatatgtatatgtatatgaagaataaagttaagatttggtcaaactatattttcccattcaagtacaaaaatgttttcaaggctgcaaaaagtgtacagttgttaaacaagttgtaaataaagacttgtataaaaattcaaaaaaa

SEQ ID NO: 37680 - DNA, 522 bp, Homo sapiens
tatattaatattcaaatcatagttcaaaaatactgaaatacttgtttattatgttacataaatatggacacaattactgccaaagaatagagagatttgcttatgagaacattctgtcatttgttctgtttgtagatgagagacatgcttttaaagtacaaaacgtttctcttctaccttaccccctgttctactgacgtgctttgcatgagaagctcatctagaagagagcaacgctggaatagagaagtctagaccctggcctttgagggaaaggactgctttttttctctcccaaagtgctgggattattataggtgtgagccaccatgcccagtgaacttggccattttcttacattcatatatagcaaagttttcaacttgtctaccgagagactttctttaggagccaggacttctacatttgtaacttgagtatattaatattcaaatcatagttcaaaaatactgaaatacttgtttattatgtacataatatgacacaatactgctaagaaca

SEQ ID NO: 37681 - DNA, 3251 bp, Homo sapiens
tatattaatattcaaatcatagttcaaaaatactgaaatacttgtttattatgttacataaatatggacacaattactgccaaagaatagagagatttgcttatgagaacattctgtcatttgttctgtttgtagatgagagacatgcttttaaagtacaaaacgtttctcttctaccttaccccctgttctactgacgtgctttgcatgagaagctcatctagaagagagcaacgctggaatagagaagtctagaccctggcctttgagggaaaggactgctttttttctctcccaaattagaaaattaaaagtgaaacataacacataaggacgaaatacaatgttctgaatatcttccactaattaattgttgaatgattaagtctctaagtatcttaacttccattgtcttcttgttaacctagacaagagtagattattcagtagccacatgtgacagttaaaattaagtaaaattaaaactatagtttctcagtggcctagccacatttcaagtgttccacagtcacatgtggatagtagttacctatcagacagtacaggtatagaacatttccagtattgccaaaaatgctattcaacagcacttttattgcccagagagaaaataaggacaaaataaaggcagtgaagtaacttaagacaactctgagattttaccaccatacttagagaaagtttttctgttataaaaattaatactaatcctttttaaagaccttggaaaaaatcaaaaccccattcctttaagctagtcttcagtatatatttttctaagaacagattctcaatactttatttttcaagtgataaaatcattttataaatcatttcttaatatcttcagtgttttttccctttttatgtaaactcttttaaaattgatattagctgggcatggtagctcatgcctgtagtcccagctactccagaggtcgaggcaggagcatcgcttaagcccaggaggttcaggctgcagtaaggtctgatcacacctgactgcactccagcctgggtggcaaagcaagacccctgtctctaaaaaaaaataatataaattgatgttatatagttaacatttatcaggcaaattcatatgaatgcttatttcaaataaagattgatagatttaatgatatccttccttttaaatttatatagatctaatgaacattgccaacagttttttttgtttctgtcccttaaacatttcccctgaaagtccacctcaaaggtacatcaagatgcaaacaatttttttatcttcataacttcctgctcttattaacttgtattatgaatcaaattaagttttatgtataaggcatttactattccagtgacttagctaatgaaaacatttaaaaatatgtattaatttacttggcctgctactaaagtgcttaacataactaaatggatctatagtaacatgtctaaattttttaatggaaataagggactaaccataatccttttgagtcagcttggtgcttacaattattttgttaggaaatcttgatgctttcttctttctctttaaatttttgtaatcaagcaacagacttgatccagcagtgtcgaattccaagcaagttatgatgattcttattgtagttcaagtacagatgagtaagtggtgtgacttcagtttattatcttcttggtgacctactttagtatgtgttctgtagcgattcatattagttaagggacgttttcaatatgcttgaaataagaaatagcattttactctaaatacaagaaatgactgtacacaaatgctaatcagtgatttggggccttttaatgtctttaacagcaatcttttatttatttatttatttatttttgagacggagtcttgctgtgtcaccaggctggagcagtggcacgatctcgcctcactgcaacctccgcctcccaggttcaagctattctcctgcctcagcctcccaagtaactgggactgcaggcacatgccaccacatccagctaattttgtatttttagtagagacggggtttcaccttgttggccaggatgatctcgatctcttgatctcgtgatctgcccgcattggcctcctgaagtgctgggattacaggcatgagccactgcgcccggcccaaatcttttattttttaacagccttagttatttataattcaaatgcactaaaatatcatcgctgtcatgaactttgctgtttacaggttctgtgtaattcagaatgctttgtacttagaaaataatttctaggcttatcttgttttgcagttttcatgttttgacaattgcccaccatttacaatactcaatttttgattatgaaatgaatagtaaaattcaaacatatctaataataatttgccttagtttgattaataaattatatcaaaaaacttggggatagaaagaggcttttttttccccctgtagtatttttaaaactttttagatgagctggatgaaaccttagtacattggagctggagttgtattgagtacagccccaactctgaagccttatattcatgtcttaagtaccattgattgttctgtgaattgttgttagtttcatatttgacattgtagtaatccaccttgcattttagtctttgcaaaaaggatattgctaggtatattcttatttctgattgagtattgaatttacatttttcagaatttcattctttgtcattataatccaaaaacaatgtccacatcagacttggaacttctcacttcaaaaatgaaatacagatttagcagtgttgtacataatgatgtccaagcatttttccacctgtttactgagttttccaaccatttactatgtgttgagattggtgggttttctggctgtttttctgaggtgaatgacttgttacagagcctcagtaagaaatttcaactaaaatcacaaaaacataaagtccaggaaaccaccagaagatggatttttagtgtttttgaaatcttgtatttccttttgatatcatttactcattttaattttacgactgccaacttgttacggtattaattatatgtatgtgtttatatgtatgcatataatatatgtatatgtatatgaagaataaagttaagatttggtcaaactatattttcccattcaagtacaaaaatgttttcaaggctgcaaaaagtgtacagttgttaaacaagttgtaaataaagacttgtataaaaattcaaaaaaa

SEQ ID NO: 37682 - DNA, 3197 bp, Homo sapiens
tatattaatattcaaatcatagttcaaaaatactgaaatacttgtttattatgttacataaatatggacacaattactgccaaagaatagagagatttgcttatgagaacattctgtcatttgttctgtttgtagatgagagacatgcttttaaagtacaaaacgtttctcttctaccttaccccctgttctactgacgtgctttgcatgagaagctcatctagaagagagcaacgctggaatagagaagtctagaccctggcctttgagggaaaggactgctttttttctctcccaaattagaaaattaaaagtgaaacataacacataaggacgaaatacaatgttctgaatatcttccactaattaattgttgaatgattaagtctctaagtatcttaacttccattgtcttcttgttaacctagacaagagtagattattcagtagccacatgtgacagttaaaattaagtaaaattaaaactatagtttctcagtggcctagccacatttcaagtgttccacagtcacatgtggatagtagttacctatcagacagtacaggtatagaacatttccagtattgccaaaaatgctattcaacagcacttttattgcccagagagaaaataaggacaaaataaaggcagtgaagtaacttaagacaactctgagattttaccaccatacttagagaaagtttttctgttataaaaattaatactaatcctttttaaagaccttggaaaaaatcaaaaccccattcctttaagctagtcttcagtatatatttttctaagaacagattctcaatactttatttttcaagtgataaaatcattttataaatcatttcttaatatcttcagtgttttttccctttttatgtaaactcttttaaaattgatattagctgggcatggtagctcatgcctgtagtcccagctactccagaggtcgaggcaggagcatcgcttaagcccaggaggttcaggctgcagtaaggtctgatcacacctgactgcactccagcctgggtggcaaagcaagacccctgtctctaaaaaaaaataatataaattgatgttatatagttaacatttatcaggcaaattcatatgaatgcttatttcaaataaagattgatagatttaatgatatccttccttttaaatttatatagatctaatgaacattgccaacagttttttttgtttctgtcccttaaacatttcccctgaaagtccacctcaaaggtacatcaagatgcaaacaatttttttatcttcataacttcctgctcttattaacttgtattatgaatcaaattaagttttatgtataaggcatttactattccagtgacttagctaatgaaaacatttaggatctatagtaacatgtctaaattttttaatggaaataagggactaaccataatccttttgagtcagcttggtgcttacaattattttgttaggaaatcttgatgctttcttctttctctttaaatttttgtaatcaagcaacagacttgatccagcagtgtcgaattccaagcaagttatgatgattcttattgtagttcaagtacagatgagtaagtggtgtgacttcagtttattatcttcttggtgacctactttagtatgtgttctgtagcgattcatattagttaagggacgttttcaatatgcttgaaataagaaatagcattttactctaaatacaagaaatgactgtacacaaatgctaatcagtgatttggggccttttaatgtctttaacagcaatcttttatttatttatttatttatttttgagacggagtcttgctgtgtcaccaggctggagcagtggcacgatctcgcctcactgcaacctccgcctcccaggttcaagctattctcctgcctcagcctcccaagtaactgggactgcaggcacatgccaccacatccagctaattttgtatttttagtagagacggggtttcaccttgttggccaggatgatctcgatctcttgatctcgtgatctgcccgcattggcctcctgaagtgctgggattacaggcatgagccactgcgcccggcccaaatcttttattttttaacagccttagttatttataattcaaatgcactaaaatatcatcgctgtcatgaactttgctgtttacaggttctgtgtaattcagaatgctttgtacttagaaaataatttctaggcttatcttgttttgcagttttcatgttttgacaattgcccaccatttacaatactcaatttttgattatgaaatgaatagtaaaattcaaacatatctaataataatttgccttagtttgattaataaattatatcaaaaaacttggggatagaaagaggcttttttttccccctgtagtatttttaaaactttttagatgagctggatgaaaccttagtacattggagctggagttgtattgagtacagccccaactctgaagccttatattcatgtcttaagtaccattgattgttctgtgaattgttgttagtttcatatttgacattgtagtaatccaccttgcattttagtctttgcaaaaaggatattgctaggtatattcttatttctgattgagtattgaatttacatttttcagaatttcattctttgtcattataatccaaaaacaatgtccacatcagacttggaacttctcacttcaaaaatgaaatacagatttagcagtgttgtacataatgatgtccaagcatttttccacctgtttactgagttttccaaccatttactatgtgttgagattggtgggttttctggctgtttttctgaggtgaatgacttgttacagagcctcagtaagaaatttcaactaaaatcacaaaaacataaagtccaggaaaccaccagaagatggatttttagtgtttttgaaatcttgtatttccttttgatatcatttactcattttaattttacgactgccaacttgttacggtattaattatatgtatgtgtttatatgtatgcatataatatatgtatatgtatatgaagaataaagttaagatttggtcaaactatattttcccattcaagtacaaaaatgttttcaaggctgcaaaaagtgtacagttgttaaacaagttgtaaataaagacttgtataaaaattcaaaaaaa

SEQ ID NO: 37683 - DNA, 2369 bp, Homo sapiens
gaggacccgatacactggaggagcatatcaattgatagattgattgattgactgattgagacagagtctcactctgtcgcccaggcaggaatgcagtggtgcgatctcagctcactgcagtctctggctcctgagttcaagtgactctccagcctgggtggcaaagcaagacccctgtctctaaaaaaaaataatataaattgatgttatatagttaacatttatcaggcaaattcatatgaatgcttatttcaaataaagattgatagatttaatgatatccttccttttaaatttatatagatctaatgaacattgccaacagttttttttgtttctgtcccttaaacatttcccctgaaagtccacctcaaaggtacatcaagatgcaaacaatttttttatcttcataacttcctgctcttattaacttgtattatgaatcaaattaagttttatgtataaggcatttactattccagtgacttagctaatgaaaacatttaaaaatatgtattaatttacttggcctgctactaaagtgcttaacataactaaatggatctatagtaacatgtctaaattttttaatggaaataagggactaaccataatccttttgagtcagcttggtgcttacaattattttgttaggaaatcttgatgctttcttctttctctttaaatttttgtaatcaagcaacagacttgatccagcagtgtcgaattccaagcaagttatgatgattcttattgtagttcaagtacagatgagtaagtggtgtgacttcagtttattatcttcttggtgacctactttagtatgtgttctgtagcgattcatattagttaagggacgttttcaatatgcttgaaataagaaatagcattttactctaaatacaagaaatgactgtacacaaatgctaatcagtgatttggggccttttaatgtctttaacagcaatcttttatttatttatttatttatttttgagacggagtcttgctgtgtcaccaggctggagcagtggcacgatctcgcctcactgcaacctccgcctcccaggttcaagctattctcctgcctcagcctcccaagtaactgggactgcaggcacatgccaccacatccagctaattttgtatttttagtagagacggggtttcaccttgttggccaggatgatctcgatctcttgatctcgtgatctgcccgcattggcctcctgaagtgctgggattacaggcatgagccactgcgcccggcccaaatcttttattttttaacagccttagttatttataattcaaatgcactaaaatatcatcgctgtcatgaactttgctgtttacaggttctgtgtaattcagaatgctttgtacttagaaaataatttctaggcttatcttgttttgcagttttcatgttttgacaattgcccaccatttacaatactcaatttttgattatgaaatgaatagtaaaattcaaacatatctaataataatttgccttagtttgattaataaattatatcaaaaaacttggggatagaaagaggcttttttttccccctgtagtatttttaaaactttttagatgagctggatgaaaccttagtacattggagctggagttgtattgagtacagccccaactctgaagccttatattcatgtcttaagtaccattgattgttctgtgaattgttgttagtttcatatttgacattgtagtaatccaccttgcattttagtctttgcaaaaaggatattgctaggtatattcttatttctgattgagtattgaatttacatttttcagaatttcattctttgtcattataatccaaaaacaatgtccacatcagacttggaacttctcacttcaaaaatgaaatacagatttagcagtgttgtacataatgatgtccaagcatttttccacctgtttactgagttttccaaccatttactatgtgttgagattggtgggttttctggctgtttttctgaggtgaatgacttgttacagagcctcagtaagaaatttcaactaaaatcacaaaaacataaagtccaggaaaccaccagaagatggatttttagtgtttttgaaatcttgtatttccttttgatatcatttactcattttaattttacgactgccaacttgttacggtattaattatatgtatgtgtttatatgtatgcatataatatatgtatatgtatatgaagaataaagttaagatttggtcaaactatattttcccattcaagtacaaaaatgttttcaaggctgcaaaaagtgtacagttgttaaacaagttgtaaataaagacttgtataaaaattcaaaaaaa

SEQ ID NO: 37684 - DNA, 2049 bp, Homo sapiens
tatattaatattcaaatcatagttcaaaaatactgaaatacttgtttattatgttacataaatatggacacaattactgccaaagaatagagagatttgcttatgagaacattctgtcatttgttctgtttgtagatgagagacatgcttttaaagtacaaaacgtttctcttctaccttaccccctgttctactgacgtgctttgcatgagaagctcatctagaagagagcaacgctggaatagagaagtctagaccctggcctttgagggaaaggactgctttttttctctcccaaattagaaaattaaaagtgaaacataacacataaggacgaaatacaatgttctgaatatcttccactaattaattgttgaatgattaagtctctaagtatcttaacttccattgtcttcttgttaacctagacaagagtagattattcagtagccacatgtgacagttaaaattaagtaaaattaaaactatagtttctcagtggcctagccacatttcaagtgttccacagtcacatgtggatagtagttacctatcagacagtacaggtatagaacatttccagtattgccaaaaatgctattcaacagcacttttattgcccagagagaaaataaggacaaaataaaggcagtgaagtaacttaagacaactctgagattttaccaccatacttagagaaagtttttctgttataaaaattaatactaatcctttttaaagaccttggaaaaaatcaaaaccccattcctttaagctagtcttcagtatatatttttctaagaacagattctcaatactttatttttcaagtgataaaatcattttataaatcatttcttaatatcttcagtgttttttccctttttatgtaaactcttttaaaattgatattagctgggcatggtagctcatgcctgtagtcccagctactccagaggtcgaggcaggagcatcgcttaagcccaggaggttcaggctgcagtaaggtctgatcacacctgactgcactccagcctgggtggcaaagcaagacccctgtctctaaaaaaaaataatataaattgatgttatatagttaacatttatcaggcaaattcatatgaatgcttatttcaaataaagattgatagatttaatgatatccttccttttaaatttatatagatctaatgaacattgccaacagttttttttgtttctgtcccttaaacatttcccctgaaagtccacctcaaaggtacatcaagatgcaaacaatttttttatcttcataacttcctgctcttattaacttgtattatgaatcaaattaagttttatgtataaggcatttactattccagtgacttagctaatgaaaacatttaaaaatatgtattaatttacttggcctgctactaaagtgcttaacataactaaatggatctatagtaacatgtctaaattttttaatggaaataagggactaaccataatccttttgagtcagcttggtgcttacaattattttgttaggaaatcttgatgctttcttctttctctttaaatttttgtaatcaagcaacagacttgatccagcagtgtcgaattccaagcaagttatgatgattcttattgtagttcaagtacagatgagtaagtggtgtgacttcagtttattatcttcttggtgacctactttagtatgtgttctgtagcgattcatattagttaagggacgttttcaatatgcttgaaataagaaatagcattttactctaaatacaagaaatgactgtacacaaatgctaatcagtgatttggggccttttaatgtctttaacagcaatcttttatttatttatttatttatttttgagacggagtcttgctgtgtcaccaggctggagcagtggcacgatctcgcctcactgcaacctccgcctcccaggagaattacttaaacccaggagacggaggttgcagtgagccgagattgcgccactgcacaccagcctgggcaacaagagtgaaactctgtcccaaagg

SEQ ID NO: 37685 - DNA, 2016 bp, Homo sapiens
agactggagtgcaatggtacaatctcggctcactgcatcctcttcctcccagtttcaagtgatcctcccgcctcagctttccaagtagctgggagtataagcgtgtgccaccacactcagctaatttttgtatttttagtggaggtggagtttcaccatgttagccaggctagtctccaactcctgacctcagcctcccgagtagctgggactacaggcgcccaccaccacgcccagctaatttttttgtatttttagtagagatggggtttcaccatcttaacaaagctatcattaaatcatttgcttgtaatgaaattcagccgttgtcagctgtgagcgttgcggggctggtggggtgtgtttgagtatgtaagtgtctatttcctgtgctctaacagtgactatttcagttctaacccttcaattgctaattggatgagggaatggcctcttagattgtccttgttttgacttatctgctaaggcgagagaatgtctgggtttgccacacagtcccgcagggacccctgctctttgccaggatttttatatcaagtacttagtttggccaaatttagagtatagtttaaaggggaaaaaaagtttgtatttgatgagtctaattactatattagaatgctttttaaatgaatatgctgtgattggaatctcttcttgggggccggggagagtgctgagagatgcagctgtgtctctgctctctgcagtcttgggcaggcagcaccgctgtctcctgatacagagggttgaatgcactgcttcacattgatgccacattttcaaatctaaacatgattaacatgttttttaagtatttatcaaataattcacatttttgcaggtttaagtgctgttttttaagatattaaacatgttccttgtttcttttttctttttaaccactggagactatgtgaaaatcttgtgttatatggaatttttctaaaacaatttccttttacttttcatgttgcatattttccagtggggataaattggaggttcttattactaataatcctgaaactaaaatttgcttttcctgcatagacatcttttgttagtccatttgagttttgttgccatccagtttcatgatcatgttgtattagtctaatagacaatgagttactgcttgaatgatatgaaattctctagtaaaaaatgctctgaagatgtgagaagctctgttgtattacttggcaccaggaatgttacaaaaatgttgttgctagcatattgctaacctagtccttaagtttcagggattcctgtaatatgttgagtttggagtattaatagcaggctaacagaatacagtaccaatatgccaagttaaataattgagaatatatacagtatagtttgctatgtataatagacctcatttcatttacagtacacctcacacttgggattaattcacctataacctctgtgaactgcgagtgctcggcagaagcagccctgtgtcttacatgtctacatttatatttatatttatatttatttttttgagacagagtctcactctgtcacccaggctagagtgcagtggcatgatcatagctcacttgcgtcttgaactcctggctcaagtgatcctcccacctcagcctgctgagtagctgggactacaggtgcacaccaccatgcctggctaaaggcatgtctgcatttatgcgaggtgtgttgaccgggtggggagggagctaggactgagattcgcctgtgtaaaatgcacaaaaagggtttgctaagcaaattgatatttgaaatgaaagatggattaggtgagagacttagtttattcaggaataagagcaaaaccaaccacatcaaaaaatgtatttcactgagacagccttttgtacatacagcagggtgctgtttacagatttcaagaaaggagaaaaagaatgcttatactgagattacctacctcccagtagtgaaaataataaatttatcccttgaaatataatcgtgtgt

SEQ ID NO: 37686 - DNA, 281 bp, Homo sapiens
gcttccatccctatccccttaccttgatatatataatgtccttcagagcccattaccaccactgatatttatttgtttttctattggaattaaacagagatttgtttttaaattttattatggaaagtttaaaacacagagaaaagtagagtaatatataatgaactcctgtatgcccatcacacccaggtgcaactatttaaggctgaatgaaaacagggattttattttatttcatttttatttattttttttgagacagcatttcgctcttgttgccc

SEQ ID NO: 37687 - DNA, 229 bp, Homo sapiens
gatttttgacttaaatattttctttaaaaggagtgacaggatacattgatcgagatacatgtagtgttaaatgacctctgaggacataaaatagactaccagaaaatgtacattcagaacatgaacttaataaattttctgaactgctgttagcagcaagttgacttgaaatccttaaaaatagttgcaggataattttattatcttagaaattatcaccagaaaaaat

SEQ ID NO: 37688 - DNA, 443 bp, Homo sapiens
ttgagatggagtcttaactctgttacccaggctggagtgccgtggcacaatcttggctcactgcaacctccgcctcccaggttcaaactattctcctgcctcagctgcccaagtagctgggattacaggcgcccgccaccatgcccgactaatttttgtatttttagtagagacgaggtttcaccatgttagccaggctgctctcgaactcctgacctcaagtgatccacccatcttggcctccctaagtgctgggattacaggcgtgagctgccgcacccagctgatattttggattctattttcctaaagctcatgggttgcaatctggaatcccacaagcggtatccaacctgctgacatgtcccctttgaccctttcactacttttaaaaaaatgagttgccgacattttaataaatgtcacataaaaatctggattcc

SEQ ID NO: 37689 - DNA, 1514 bp, Homo sapiens
tggtggagtctgtagcaaggctggaaattttgacttggaatcacttggatttctctaagagaataccccaggttggatgtgttactgtggcagcagagaagacttaaaaattacattgtttttagcttgaacttcgtcttgtgaagtcctaattagggaagaggagtcaggctgggggtctaggggaaagcaaagagataaagcagataagccataggtctaccttgcttcatggtccaggacatacaaacaaaaagaagaagcagataagctataggtctgcctttctttatggcccaggacatacgaccctcctgcacacataactcacaatcttcctgcgtatcatcaaatgcttcaacttatcatcaaacatctcggctgaccgaaaaatgcaagttagctccctgctaccttggcgttgtcagtcctccacatagcactcttcagcttaaattgcattttataaaatccccagcaagcctttgtctcctggcagtcaactcgtctcttactgacctgcccattgctcccttgcaatgtattttcctactttctctaataaatctgcctttcttgacctaaactgtcatggtaaattcttcttactcctatgtcaccagccacagacagtcgccacaagccatgacaagtctgcgatttcatggtctttttttattttgatgatatttccccagtgtttgggggacagaagaatgcccacaatctataggtcttagtcacatggatggggacagaatatctgagagagagagaaggaacaagatctactggggctccttaaaattcttcttgaagaactcctttctcaccttggagtagggaagactttctgattatgactcaaaatttagaagctaagaaagaaaatacctttaaatctgaaaacataaaactcaaaaacttctgggtgtttttttgggggggttgtttttttttaaacagcacaagcaactcaaagggcaagtgacaaactggggagagaagaaaaagatgtgactcatatcacagtttcccttctacttaaaaaaaaaaaaaactgcaaaccagtaagaaaatagcaacagctcaacagaaaaattgccaaaggcacgaacagttaatgagaaggagatgcaaatcgctcttaaacctatgaaaagatgaaggtgttccatcacaaagagtaagagaaatacaaattaatattaatgtgaaagacaacttttcatttatgaatttgagaaaaatccaagaacttgatgatatacctctaagaagcaacggtagggaaacgaaaattctcacacattgcaggtggttatgtaaattggtatagccccgcgggtggtcagtgtgacagtttctatccaaattacagatgcatagtttcattgccaggtctcttctgtctgcttcttcagacccaccctcccctctccccactgtttagttggcccaggaccctgtctggtaaggatacaactccaggccccttgccctatggcttctgg

SEQ ID NO: 37690 - DNA, 1879 bp, Homo sapiens
tgagcactcaggcgccatcactgccttcttggggcttacaccctattggggtgtcagagatattataacactcaatattgacccaatgggatgaaaattgttatcttcatgatttcttccaatgggcttagatttgttgggacagggcagaattagaataattatttctcacatataagagtaagtgatatgagattgggaatttcttgccaacactcaagcaaactgcagaagataattactccattttactagctcacctagtttctgaaggatggggtggggagtgagacatggagcctctggggacaaggataggggggtgggactgtcccagtggagggtgccactggaagcctccacccaagtgggccagcagctgtgcaagggtgcagcagtaggctggtgaaagccaggttgtccagatctttctaggggaagagaaggattatagaaaaggagaaaagggaggagcaagaacatctctccatggcctatttttatttttgttccccaagagactagtgtaataaccttatgcccccaaagacagcccagaactgagtatcttcagtgttcctgagtgtaaatcagtgaatctgttatatagaaagttaacatttcaggagcacaattatttcctgatttcaaatatgaacagaagactaaatgtcatttttttaaatcataaatttggtatccatagttactttacacattccagagtctaagcatggaatttaagttttgtattttgaacaaaaatagcaacatctgttttctgtatggcaaagaaaaactaaatcccagacttttatttttaaccacagaaaccatcacttctttctaaattatttgcttgcctgctcatttcccctaaacatctctgtttatgccaatggctttttaaatccaaataatactagttattgccaaattgcattagaatcctattgaattagaataattcatatacttcatatactaggcagtaaatggttagagacggtaaagatctgattgtgatcaaaagtagggtttttgttttgtttttaatcatgagcacatataaaaggaaattcaaatgaaaccaagccaatttctgatttagtaagattaaaaccatagatggagctcagttattaaggatggaaaggaggaaagcacagagtgaggagagaaaaaggggaaggaaaaaaagtagtgtttttttggggaacagtataatgtctcagaagttcttctctcttatcctgctgatgttgagacagtggctttgtataagcttttatttatacctatttcaacatcatgaaaatttttccatcagcattttcttgcaactttaaaaatcacaagggattatttgtttataaagagatacaggatctataatttattggcaatactttattttaggaatcttcaaattgtacttaataaataaatcacaggtcaaaatgactgtaaaatcaatcaggctttctcgtaagttatttcctgaaaaccatccatgataaatacaacaaggcttggcgaaacctcattactcttggaagtcttcagaggttattatacctactgatctgtatttgtctctaagagacatttgaaacacagttacaatgtcaatttggtgtaacattacctgtagtagagctcagagtatatggcagtgcacggtcactcaagatgcatggcgtgtcatttgggtcgctttgatgggtgctcgggtagaattagccttgtagagactaatgtgttcatgctatctctgatcctgtggtgttgtataaaaatgaacagctaaaaatttacccatgacaagattaaagcaaaaataaacacaaagttgttagactttaaacatgaaaaaaat

SEQ ID NO: 37691 - DNA, 433 bp, Homo sapiens
tttttgagacagggtcttgccctgtcacccaggctgtagtgcagtggcaggatcacagctcactgcaacctctgcctcctgggctcaattgatcttcccacctcagcttcctgagtagctgagactacagttgtgtgccaccatgcccggctaatttttgtattttttgtagagatggggtttcaccatgttgcccaggctggtctcaaactcctgggctcaagcaatccacccacctcggcttccccaagtgctgggattacaggtgtgagccactacacctggcctgtacctatttttcatatgtacccagtcataatcttttgattttttggtcacatgtaattccccgttggtgacattctctactcctcattccctacttcatgcttctttcttctgtctctctcactctttcagtttctggtcgacc

SEQ ID NO: 37692 - DNA, 306 bp, Homo sapiens
ttttttgtggagacagggtctcagtctcactatgttttatggaggcctcaggcaatcctctcacctcagcctcccagagtgttgggtttacaagtgtgagccaatgcgcccagcttgtacagttgaaaagggtgaattttacagtgtgtaagttaaatgtcaatcatttaaaaaaaaaaaaaaaaaaggccaggcgcggtcacacctgtaatcccggcactttgggaggccaaggcgggcagatcacctgaggtcaagagttcaagaccagcctagccaacatggtgaaaccccatccctgcaaaa

SEQ ID NO: 37693 - DNA, 584 bp, Homo sapiens
ggaagatgggatatgtgggagagcaccttgtaaatgcctggtcattcctcatctgtcacaccccattactgccactccctgagtacgaattgccctctgttttttgggaatgagttagtgccactcccccactagaccctcagcttcccaaggactggagtcatgacatctgtgtctcctctccctctagttcagaaacagagctagaaacagagaaagccagcgataaataactattcacatttcctgtgggccaggcgtgatgccaagctccctaaatgggtttcttctttcatctctgcaatagccaagtattattgtccccattttaaagataagacactgaggctcaggggttcctggaggtggcctggcctcaggtcctaggacggggaggtgctggcttggctaagaggtcaggaagcttcccagcagggagggggaatgcagcagtgtgcagcgctatggtccttgaggatctggtgagactccttccctcagcagtcagattccagaggtgacaaatgggaaagggttttcttctttccagtcattgccttcagctagacttggctgaatcttcc

SEQ ID NO: 37694 - DNA, 425 bp, Homo sapiens
cgcaacagcccccatcatcacttgggcttccttgaacttaaaacttcattgccatgaacgatgttccaaatctgatttgctgttgtaaagcacagagagaactaaaactagctgtaactcttcattgtgtcttttaacactgagatgataaaaaagatggtgttattctctgaagtcttacctctttagctgggtaactacatctgttactactatacttacttgatcactattaaaacattaaaattaaaattatgttcagtaagataaaatcatcaaattgtttaaaattctcccataaaagttactgagaattatttgaaaaacatcttaaaatatcctactacacttgcctcttcagatgttctgtgggtgtgttttcccattaattaaagctcattcttctggctgctgcaattgtttca

SEQ ID NO: 37695 - DNA, 710 bp, Homo sapiens
ttttactctaaaacaacatttagccagtattttagaaacagtattgatcagcagaagatctactgcaaagctcaattttatgttgactagtcattaagaaaaggaatactggctccgatgtatttaccagtcagtagaattgggtcttgtctgctttctatcatttttccctgataagctttttatattcccacaacactgttctctcaaactgttaggctcatttttgtcagatcagcatgtggaagtcttctgccaattccatcttactgtcctaatctgttggtttattttgttattctctgactttactacattaatatagtagataacaaagaagggatcctgttctttaggttaaactaaaacaaaaaaaaaaaaacggagactatctttattaccaagaccaactgtaatctgtataatagtttgaaatgtgtgtatgtcataatgatttcttcttgctgtgctgctttatcatagttttgatagaagaaaacagaaaagtaaaaaaagatttagccagaaacaatggaagaatctctaaatatcagaaaagaagaatggttttctcgttgatgtcttataaatgaatgttagttcctttaggaaacttgatctccaaagacactatttttgctttgctttgctttgcttttcctattccttgattacgcccacacaaatgttagagttcagtgcaaggtttt

SEQ ID NO: 37696 - DNA, 413 bp, Homo sapiens
tcaagccaatctagaagtgtaggaggcatctttgacaatcgcctcaccctcagcatctaatcagtccctatgtcctgcagattccaccaccaaaatccatgtattaataaaactgaccacacctccatcttcactgtcatctcaagccaagctaccaactctaaccttgacatgtgcagtagcagtagccgcctgtcttctttccccactttcacttttacctttgtctacttcattttctgcacaacagccagaaggatcttttgaatttacttatatttatttgctgtttttataaaaagttattgattgaaaaaatgtagttttgttatacgttcttaaagtggtagagatctccattgttttagggtttaaaaaaattttaaaataatttttatattttgcaataactt

SEQ ID NO: 37697 - DNA, 406 bp, Homo sapiens
aaaaaactttattcatttaataaattggcgtattccataatcaggtacaatattaggggacagaaggatatagtagccaaaaagacaagtgtagtctccacacatatgcaaattatagcaagttaaatagagacatgcaataaacagaaagtcacacaaatgaccaattatttgtacttgtagggttataagagccaagtgggagggcataaaaattaattatgaaagtgggaaggtgccacaggcatacttaaccaatttcacaatttgccaacggctaacttttgctaagtctaatacaaggctttgattttacatttgatgaaatttcccaacatgctcctatgatcagctcagggaacagacactgccctaagagtgcctgttattgacaaatctttggtct

SEQ ID NO: 37698 - DNA, 458 bp, Homo sapiens
ttgtgcagtggttaataacataatcaatactgtttatttgtagaataaccattttcagagcattttcactagattcttaaactgtgtaaacaggatatatgctatttttattttgtagataaaaatcccctgagacttagagaggttaagtgtttatccaaagctgcacagctagtaaaatgtcagaactaagatgtagggtatttagttttgaaaattctattatttaaagtaaatgtgtgttatttataaatagtgtatagttctgagtttcttgacccattttcccatatgaaaagctataagcaaagagagatagaagtgagctagaaaaaatgtctagaaggagaccagtagtggggagtcaaattaaattcttacaaatatctgcccaaatgacagacttagtgattttcaaaggcttgcaaatccaagcatacaaagtaataaaaaaaaaa

SEQ ID NO: 37699 - DNA, 377 bp, Homo sapiens
cccagcaggagaatcacttgaacccgggaggtggaggttgcagtgccaagataacaccactgcactccagcctgcatgacagagcgagaccccatctcaaaaaaacaaaaaacaaaaacactacctttggcttctgaaaactaatactgtttactccctgctactagtaggtattcagtaatagtgaacaacttcctccgggtcctgtggagagtgggagaggtccagctgtacagttaagcatctctgttaagggaccagttttgaaagaattgatgcatggtaacatcttggttaataaagtggcaatttggtaatgacattttgcttttctgtgaatagaactgatcttttattaaagttatggaaactgaact

SEQ ID NO: 37700 - DNA, 197 bp, Homo sapiens
gcattctctaatgactgacttaatcctgaaggatttttgtctctgttttcatttagctttctgccatcctgtttttaaaacaccttcatattgtccagattcactcacttcataaaaatgctgtggttctagtcccagagtattctagtcccaggaattcctgaaggatgtgattcctaaattcctaaatcctcata

SEQ ID NO: 37701 - DNA, 390 bp, Homo sapiens
cattctagggaagtgtattatagtcttcttcctcatggtataaaggagagcgtggcataaatgctgtgccactaatttgcatatttgaagaagtaaaggtaattggatgacagaaaacatcaggattgatctttcctttttcctctcttcctttgtcttcttcctgtttcttctttctaaaagatagttatctgtggtcccttaaatagctttgtaatgcaataaataaattggtgtttaaaaattatgaaatatgaatataaaataatattcataatacatgatacataaatatataatataaataaatataaaagtataagtaagaggctaggtgcggtggcttatgcctgtaatcttagccctttgggagactgaggtgggaggatc

SEQ ID NO: 37702 - DNA, 319 bp, Homo sapiens
tccgtctcaaaaaaaaagaaagaggggctcaaccatgtcacattaaatcctaggttgaattgttaactttgtagtcagaagaaggaacaccagagcgaggggtcttaaactctcatgctggttccccccgtgaggctgtggaaagtcagctccctgagaagcccatgcacctgcctcctttgtgaaatgatggggtggctcccaccagaacccattggtttgtccaagtcgcagtagtcccaattcctttagaagcagccctggaaagaaagggcatctgaggagaagtctagggagccccaccagccccaaacacaga

SEQ ID NO: 37703 - DNA, 474 bp, Homo sapiens
gcgtcgacgggtgtatgtttggtagtaaaagtataaagacggccaggcgcggtggctctcccaaagtgctgtgattacaggcgtgacgactgtgcccggccgagtattatttttaaaactaaattatgctaggtacactcttaacaaggcaaggatttccattcacaaaaggaagcgtaaattatgcaggctaaatgaagcactgtcatacccaaaatattagatacaatattttcttatgatttaacttttacaaagggcctctttgtcagaagttgctgaagttcccggttcagcctattaattgctgcatattctttgaaaacaaaattgttgatgattcagatgtatgtgtgactgtgcgaagaaaccccgtccatagtaaaaaatgcaaaattagctgggaatggtggcacatacctgtaatcccagctactcgggaggctgaggcaggagaattgcttgaaccccgga

SEQ ID NO: 37704 - DNA, 612 bp, Homo sapiens
aagtacccaccttacctggcttcacagtgaatccttacccctggccttgtttcgttacttagacctggctagcaggccctatgtcaccagagtctccgcaggccagagggcataaaaacacccagagactgtagtgggtatttatcaatcctggtgaggcctctccccacaggtagaatcatctgtagctgtgtacactcatgatgttggggaagtagctggcactacgtgccgtacatctgatggagggcatggtgtgtatcctgctttgtgtagtcgtgcccatatggtgattttggaatcctttgtgtagcctttaacgttgtctattattagcatgtttctgtcgtgactgccataggtggagcccacaacagtgcaggtgtttctttatcctttgagctgggcacctggtgggaactttcaatttggaaaatcatgtttctgacgccaggaaatttcttgtatgatttatttgataatatccaactcctgcctttccctacctttttttcctctcctgtttctgtactttaaaaagtctacaagtcagatattggggccattttggattgatgctctgatattcatctttttctccttttgcccatt

SEQ ID NO: 37705 - DNA, 226 bp, Homo sapiens
tcctaatgttggtctcaattattagcctattttatatcattacatcataagcatgaaatgtcacataaataaaattgcataattcagtttggttcattagcatgatagaagttcagctcataacaatgttctcacacttcacttcattcaaaattaaaccaacacaaacacagaaattcaagaactaaagaaatatctactaacacttagaatgagacttttccat

SEQ ID NO: 37706 - DNA, 414 bp, Homo sapiens
ttgactggcccttgatgtgaataaatcaactgcgaaaagagatttatgaagctgctgggaacacctgactggatgctcgtaagaacgttcaggtgttatgatgctgtggtgtttctctgaatttaaagaaacgtactcagagcatataagattcaaaactatgggtttgctttaaaagaatccagtccaccaggtgcagtggctcacgcctgtagtcccagaactttgggaggccgaggcaggcagatcacgaggccaggagtccaagagaagactggccaaaatggtgaaaccccacaaaagatacaaaaaattagccgggtgtggtggcgtgcacctgtaatcccagttactcaggaggttaaagcagaagaatcgcttgaacctgggaggcggaggttgcagtgagccaag

SEQ ID NO: 37707 - DNA, 535 bp, Homo sapiens
ttttttttttttgtagagatgaggtttcaccatattgtccaggctgatgaagttttctataaaggtccagagagtaaacattttctgctttgagagccatatgatctgttgcaactattcaactctgctgttgcagacaaaagcagtcaaaggtaatatgtattaaataaatgagtgagtgtggctgttttccagtaaaatttagtttacaaaaataggtacaagctaaacatagctcatgggctgtagtttgagggctcctgtgctaatttaaagctcttctcgtccatctgaccatccattcatataactacccatccatttgtctattcaaccatccatccatccaaccatccatccatctatccatccaatcatccaatcagccatccacccaactatccagcattctaaaaaatattcattggatatctattatgtacaggaaactatgattagatgctgaaaacacagcaaagagctaaaaagacaaggttcctgaccgaatttaaaaaacagtttaatggaggaggca

SEQ ID NO: 37708 - DNA, 241 bp, Homo sapiens
ggacacaaaaaacataaacaacataaaccactgaagaaaataatgacaaaattttaaaattttcagtctttgaaagatatcattacaaaaatcaaaatgtggtccatagtcttggggaacatagtctaggggaacatattttcaacctataaatctggatattatgtaaatctctatccagaatacataaaggagtcttacaacccactaataaaaaagacaaacaccccaataaaaaatg

SEQ ID NO: 37709 - DNA, 463 bp, Homo sapiens
aaaggatcccctcctatctttccttccaaaataattgtgtgtggtccagattaagttttaagtctggtttaggccggagaactaggtggatactttgtatacctcatccttgactagttacttaggggtaggagcctcagcctccacatccctacaatgagaattctagagctcttcatcaagtaattatagggaacaaatgggaaaatgattgtggccattctctggaaactgcaaagcgtcatacaatatatatattgtttatttagacttgatggaagataggttaaaacattttctttttattaatcttctgagctcctgaagtcttcaatgtatttattcacttatagtcagaatgaaatagtcctgaaggaagagtagtgtctcagcctcataacatcaaagactgtttcctctgacttctttttcttttattcctggaaactgaagctttgttcat

SEQ ID NO: 37710 - DNA, 303 bp, Homo sapiens
aaaaatgaaagcacatttattatagcaattagaaataatttatgtgctgaaagataaacactgtggtttgatggttcatttttgtctgtatgaagatggtaatttcaattttgtcatttaagctacaaaatttaaatgtgtcttaagtgtattatattacacttatttttcaagctcacccttacatttttggttatgtataaccatttttaaaatcacccaaaagtgattttctgctgttcagtttcattcttatacagttgatagaatccaggttgcctatagggttaaaagaaaaagaaa

SEQ ID NO: 37711 - DNA, 534 bp, Homo sapiens
aaggaattctaggcacaaagttcaggatcatggttaactgaggggagagaacagggagtatgatggcaagatagaaggtatcgttcacatccaagtttataggttgggttcttgatttagtcattattcaaaggctaataactaaataaaaggtagctagcgtgagagtgcaacatgaaccaaagatcatgactggctttgcgcatcgaggggccattaaagagtctacttttcatgttatcacttaaaatcattttgcacccaccagggcatgagcatctcgtgctggcaaacaccacatgaccgtggtgacctcagggccagcccgggggtcatcttgaatctctcctgctgaagagacccaggagggtaacacacgcccctccaatctctgagttctaggaaatgaacacctggtatttaaaggggctgacataatgcaaatcatctgatgaaatgtttgttttagttcacttaaagatcaacacgagagtcttcactctgaatgggccacacctgaattaagagaatcct

SEQ ID NO: 37712 - DNA, 439 bp, Homo sapiens
acaacattgtccagttgtaatagtgttgatatttcattatgtgtaagtaatgtgatcatttatagtaaaaacattaggagtgagaaaagatatgaagagcacgtatttcctctctggaatttctataattgtgtccagattcacaatgataaagagtgccactttacataatggcaactaaatctttattatgctttttattaaatatgaaagtcattactattatctgatactgaatattttcttaaatagttgttttggtttttgtcttttgctgttttttaatgtcaaggaaagtgaagggcattggctatacctgcaaagacaaagtgggatagggtgaaaccaacccaatatttgtaataaactgtgttctgtatgatccaggaagcaattcattgagcatctattacgcactagggccattaagttgaaggag

SEQ ID NO: 37713 - DNA, 566 bp, Homo sapiens
caagacttcttaggaagccttctcagtggttgactacagtttgaggtctaaatgtgaaagaaggcatgtataatatgaaggatattgtgtaaggtgagaaaacatgatgaatatattgctatcatgtaaattgtgttatcttaatcctacataaacagatttttaacatctgagattctctgtcttgtaattgatgaaactagtccattcatattcattttgattattgaaatctttggaattatttttacttgtgtacttttgtttgctgttgtcttttttatgttctttttccagaaagtttttttcatttattttaaaaattcatcatttttctattaaccagttcgaaatgtatgtgctctcttttgcttactttaatgcataccttgaatattttattatacatatttattatagaaatacatgctattcttttatttctttaagaagtgtacttaaaatcctattcattaatagccaagtatttcatgaaattattatcttactctcatttctcaaagtcataagttgaggaagtaaatccttaatttcatctgatggtc

SEQ ID NO: 37714 - DNA, 416 bp, Homo sapiens
taaaaaaaacacacacacacacacacacaccaaaaagcaaataataaattatcccagatgatgattcaggacttattttctttatgcaatttaacaatctcttgtaaatgctcaagactttttcccttaatgctatttcttgtacagctataggggaagttgacaaaacattcctttatttaagcaagaaaacaacttccatatttgaagacacctgaaaatctctatcagattcttttattctgtgttcacatccaatattccatttccaacgccctttctagctatcataactgaggttaaactgcccctctgttactatttcttatctccattattcaggttaagactcttagttgaaaatcacaggatgatttctaactaatttgagcaaaatgagacttattgaatatatg

SEQ ID NO: 37715 - DNA, 418 bp, Homo sapiens
ttaaacaaggtacctagagtagtcaaactcatagggctagaaagtagaatggtagttgcaagggctaaagggaggggagaaagggagttattgtttaatggatacagagtttggaaagctgaaaaagttctgcatattgataatactgatggttgcacaacactgtgaatgtacttaatgccactgaactgtacccttaaaaatggttaagatggtacattttgtgttatgtatataaaaaaatatgtattttacaaaaccactactgtcaaaatccttaaaaagacagagcaggctggccgtagtggctcacacctgtaatcccagcactttgggaggccaagacaggaggattgcttgagcccaggagtttgagatcagcctaagcaacacagcaagaccctgtctctagaaaaaa

SEQ ID NO: 37716 - DNA, 742 bp, Homo sapiens
atagtagagttattgtagagtaactactatatatttaattgtttgaatataccatagtttgtccattcttctatgcaagaacatttaatttgcttttaggtttttgctgttacacacaaagctacaataagcacatcttcttcttgcacacctcccacccctagttgccatttttctatacagcaaaaatactcttggaaaattataaatggtgtcacaaagacactgagttaaccatggctagcgagggtttagacacctctgtgatcagagctcatgacctggagcttagtctctggaatctgaatggctccttccatactttctaagtacttctctgctctgtacattcattcaacacacatatcccaagtgccagtgagtgccaggtcagtttacaatccaacatggtatgtgctacagctctgccaagccactgcgaaatcagccctcattagcataggtttgaaacatgcctttcaatgcactctggggcttccctggatctagctctcttcctggagagtaaacaaacaccagaaagcatgaaggacaagcacagctccagaagatttctcccccaagatcaaatgtctgtattcctcatgggctcttctcacaattctcccctgaaactctgcgatggaagattgtcactcaatgtatagtataatgactttccaggttttttttctaccatgacccagaagaagaaatgtcatgttgccaacgaggactaaga

SEQ ID NO: 37717 - DNA, 2082 bp, Homo sapiens
gcacaatcagggaagacacgcgtgacccggaaggtcttcccgccacactccagagcgggtgtgaggggcgccgatggcggagggaacggcggaggctcctctagagaatggtggtggtggcgactcgggagccggagctttggaacgaggagtggcgcccattaagcgtcaatacctcaccaccaaggagcagtttcaccaattcctggaagccaaagggcaggagaagacttgccgggaaaccgaggtaggagaccctgctggcaatgagctggctgagcctgaggctaagcggatccgactggaggatggacagacggcggacgggcagacggaggaggcagcagagcccggggagcagctacagactcagaagagggcccggggacaaaacaagggccggccccatgtgaagcccacgaactacgacaagaacaggctgtgtccctccctaatccaggagtcggctgctaagtgtttcttcggtgatcgctgccgctttctgcacgacgtggggcgctacctggagaccaagccggccgacctgggcccccgctgcgtgctcttcgagaccttcggccggtgcccctacggcgtgacctgccgcttcgctggggcccacctggggcccgagggacagaacctggtgcaggaggagttggcggcccgcgggacccagcccccgtccatccgcaacggcctggacaaagccctgcagcagcagctgcggaagcgcgaggtccgcttcgagcgagctgagcaggccctgcgccggttcagccagggccccacacccgctgccgctgtccccgagggcacggcagccgagggcgctcccaggcaggaaaactgtggtgcccagcaggtccccgcagggccgggcactagcaaccctcccagcagccccgtgcggacctgcgggccctgacggatgaggacgtggtcaggctgcggccctgtgagaagaagcggctggacatccgtggcaaactttacctggcccccctcaccacgtgtgggaacctgcccttccgacggatctgcaagcgcttcggggcggatgtgacatgtggagagatggccgtctgcaccaacctgctgcagggccagatgtccgagtgggccctactcaaacgccaccagtgtgaggacatctttggcgtccagctggagggcgccttccccgacaccatgaccaagtgtgccgagctgctgagccgcaccgtggaggtggactttgtggacatcaacgtcggctgccccatcgacctcgtgtacaagaagggtgggggctgtgccctcatgaatcgctccaccaagttccagcagatcgtccgtggcatgaaccaggtgctggatgtgccgctgactgtgaagatccgcacaggcgtccaggagcgtgtgaacctggcgcaccgcctgctgcccgagctgcgggactggggcgtggcactcgtcacgctccacggccgctctcgggagcagcgctacaccaagctagctgactggcagtacatcgaggagtgcgtgcaggccgccagccccatgcccctgttcggaaatggggacatcttgtcatttgaggatgccaaccgcgccatgcagactggtgtcaccgggatcatgattgcccgtggcgccctgctcaagccgtggctcttcacggagatcaaggagcagcggcactgggacatctcgtcgtccgagcgcctggacatctgcgggacttcaccaactacggcctggagcactggggctcggacacgcagggcgtggagaagacccggcgctttctgctcgagtggctgtccttcctgtgccggtacgtcccgtggggctgctggagcggctcccacagaggatcaacgagcggccgccctactacctgggccgcgactacctggagacgctgatggccagccagaaggcagccgactggatccgcatcagcgagatgctccttgggccagtgccccccagcttcgccttcttgccgaagcacaaggccaacgcgtacaagtagcctcaggctttcccaggggcaccctggggcgaggagagtacaataaattttattctttt

SEQ ID NO: 37718 - DNA, 2071 bp, Homo sapiens
  misc_feature (37)..(37): n is a, c, g, or t
  misc_feature (39)..(39): n is a, c, g, or t
  misc_feature (51)..(51): n is a, c, g, or t
  misc_feature (57)..(57): n is a, c, g, or t
aatcgcccttttatggggtacacataaatgaaacccngntgtggctctaanacaaangcagggtccgtcgaatcggattgtagggcgcgatgcgaggacgcgagtctctaagatgtgggggcgatcggagcgacttggacgagagtgcgccattagcgtcatacctcaccaccaaggagcagtttcaccaattcctggaagccaaagggcaggagaagacttgccgggaaaccgaggtaggagaccctgctggcaatgagctggctgagcctgaggctaagcggatccgactggaggatggacagacggcggacgggcagacggaggaggcagcagagcccggggagcagctacagactcagaagagggcccggggacaaaacaagggccggccccatgtgaagcccacgaactacgacaagaacaggctgtgtccctccctaatccaggagtcggctgctaagtgtttcttcggtgatcgctgccgctttctgcacgacgtggggcgctacctggagaccaagccggccgacctgggcccccgctgcgtgctcttcgagaccttcggccggtgcccctacggcgtgacctgccgcttcgctggggcccacctggggcccgagggacagaacctggtgcaggaggagttggcggcccgcgggacccagcccccgtccatccgcaacggcctggacaaagccctgcagcagcagctgcggaagcgcgaggtccgcttcgagcgagctgagcaggccctgcgccggttcagccagggccccacacccgctgccgctgtccccgagggcacggcagccgagggcgctcccaggcaggaaaactgtggtgcccagcaggtccccgcagggccgggcactagcaaccctcccagcagccccgtgcggacctgcgggccctgacggatgaggacgtggtcaggctgcggccctgtgagaagaagcggctggacatccgtggcaaactttacctggcccccctcaccacgtgtgggaacctgcccttccgacggatctgcaagcgcttcggggcggatgtgacatgtggagagatggccgtctgcaccaacctgctgcagggccagatgtccgagtgggccctactcaaacgccaccagtgtgaggacatctttggcgtccagctggagggcgccttccccgacaccatgaccaagtgtgccgagctgctgagccgcaccgtggaggtggactttgtggacatcaacgtcggctgccccatcgacctcgtgtacaagaagggtgggggctgtgccctcatgaatcgctccaccaagttccagcagatcgtccgtggcatgaaccaggtgctggatgtgccgctgactgtgaagatccgcacaggcgtccaggagcgtgtgaacctggcgcaccgcctgctgcccgagctgcgggactggggcgtggcactcgtcacgctccacggccgctctcgggagcagcgctacaccaagctagctgactggcagtacatcgaggagtgcgtgcaggccgccagccccatgcccctgttcggaaatggggacatcttgtcatttgaggatgccaaccgcgccatgcagactggtgtcaccgggatcatgattgcccgtggcgccctgctcaagccgtggctcttcacggagatcaaggagcagcggcactgggacatctcgtcgtccgagcgcctggacatctgcgggacttcaccaactacggcctggagcactggggctcggacacgcagggcgtggagaagacccggcgctttctgctcgagtggctgtccttcctgtgccggtacgtcccgtggggctgctggagcggctcccacagaggatcaacgagcggccgccctactacctgggccgcgactacctggagacgctgatggccagccagaaggcagccgactggatccgcatcagcgagatgctccttgggccagtgccccccagcttcgccttcttgccgaagcacaaggccaacgcgtacaagtagcctcaggctttcccaggggcaccctggggcgaggagagtacaataaattttattctttt

SEQ ID NO: 37719 - DNA, 1848 bp, Homo sapiens
aaggctagtacgaggccggtggttaatcggccgagggctggctgagcctgaggctaagcggatccgactggaggatggacagacggcggacgggcagacggaggaggcagcagagcccggggagcagctacagactcagaagagggcccggggacaaaacaagggccggccccatgtgaagcccacgaactacgacaagaacaggctgtgtccctccctaatccaggagtcggctgctaagtgtttcttcggtgatcgctgccgctttctgcacgacgtggggcgctacctggagaccaagccggccgacctgggcccccgctgcgtgctcttcgagaccttcggccggtgcccctacggcgtgacctgccgcttcgctggggcccacctggggcccgagggacagaacctggtgcaggaggagttggcggcccgcgggacccagcccccgtccatccgcaacggcctggacaaagccctgcagcagcagctgcggaagcgcgaggtccgcttcgagcgagctgagcaggccctgcgccggttcagccagggccccacacccgctgccgctgtccccgagggcacggcagccgagggcgctcccaggcaggaaaactgtggtgcccagcaggtccccgcagggccgggcactagcaaccctcccagcagccccgtgcggacctgcgggccctgacggatgaggacgtggtcaggctgcggccctgtgagaagaagcggctggacatccgtggcaaactttacctggcccccctcaccacgtgtgggaacctgcccttccgacggatctgcaagcgcttcggggcggatgtgacatgtggagagatggccgtctgcaccaacctgctgcagggccagatgtccgagtgggccctactcaaacgccaccagtgtgaggacatctttggcgtccagctggagggcgccttccccgacaccatgaccaagtgtgccgagctgctgagccgcaccgtggaggtggactttgtggacatcaacgtcggctgccccatcgacctcgtgtacaagaagggtgggggctgtgccctcatgaatcgctccaccaagttccagcagatcgtccgtggcatgaaccaggtgctggatgtgccgctgactgtgaagatccgcacaggcgtccaggagcgtgtgaacctggcgcaccgcctgctgcccgagctgcgggactggggcgtggcactcgtcacgctccacggccgctctcgggagcagcgctacaccaagctagctgactggcagtacatcgaggagtgcgtgcaggccgccagccccatgcccctgttcggaaatggggacatcttgtcatttgaggatgccaaccgcgccatgcagactggtgtcaccgggatcatgattgcccgtggcgccctgctcaagccgtggctcttcacggagatcaaggagcagcggcactgggacatctcgtcgtccgagcgcctggacatctgcgggacttcaccaactacggcctggagcactggggctcggacacgcagggcgtggagaagacccggcgctttctgctcgagtggctgtccttcctgtgccggtacgtcccgtggggctgctggagcggctcccacagaggatcaacgagcggccgccctactacctgggccgcgactacctggagacgctgatggccagccagaaggcagccgactggatccgcatcagcgagatgctccttgggccagtgccccccagcttcgccttcttgccgaagcacaaggccaacgcgtacaagtagcctcaggctttcccaggggcaccctggggcgaggagagtacaataaattttattctttt

SEQ ID NO: 37720 - DNA, 723 bp, Homo sapiens
cgcctgtgtctctctctgtctctctcagcctggctctcttggtctcttcctctctgcatctcactctctgcctcctaccctgcgtggcggcttctcccccagctccacggccgctctcgggagcagcgctacaccaagctagctgactggcagtacatcgaggagtgcgtgcaggccgccagccccatgcccctgttcggaaatggggacatcttgtcatttgaggatgccaaccgcgccatgcagactggtgtcaccgggatcatgattgcccgtggcgccctgctcaagccgtggctcttcacggagatcaaggagcagcggcactgggacatctcgtcgtccgagcgcctggacatctgcgggacttcaccaactacggcctggagcactggggctcggacacgcagggcgtggagaagacccggcgctttctgctcgagtggctgtccttcctgtgccggtacgtcccgtggggctgctggagcggctcccacagaggatcaacgagcggccgccctactacctgggccgcgactacctggagacgctgatggccagccagaaggcagccgactggatccgcatcagcgagatgctccttgggccagtgccccccagcttcgccttcttgccgaagcacaaggccaacgcgtacaagtagcctcaggctttcccaggggcaccctggggcgaggagagtacaataaattttattctttt

SEQ ID NO: 37721 - DNA, 540 bp, Homo sapiens
tttaggatcccaatcgccacgaccagagcagcggcactgggacatctcgtcgtccgagcgcctggacatctgcgggacttcaccaactacggcctggagcactggggctcggacacgcagggcgtggagaagacccggcgctttctgctcgagtggctgtccttcctgtgccggtacgtcccgtggggctgctggagcggctcccacagaggatcaacgagcggccgccctactacctgggccgcgactacctggagacgctgatggccagccagaaggcagccgactggatccgcatcaggtgcctgggtgggctggagttggggagctgcagtcgggggcccggggtcacggagggtactttgcaggtcctgggcctgacctcgctttccacctgctctcccacagcgagatgctccttgggccagtgccccccagcttcgccttcttgccgaagcacaaggccaacgcgtacaagtagcctcaggctttcccaggggcaccctggggcgaggagagtacaataaattttattctttt

SEQ ID NO: 37722 - DNA, 800 bp, Homo sapiens
gcacaatcagggaagacacgcgtgacccggaaggtcttcccgccacactccagagcgggtgtgaggggcgccgatggcggagggaacggcggaggctcctctagagaatggtggtggtggcgactcgggagccggagctttggaacgaggagtggcgcccattaagcgtcaatacctcaccaccaaggagcagtttcaccaattcctggaagccaaagggcaggagaagacttgccgggaaaccgaggtaggagaccctgctggcaatgagctggctgagcctgaggctaagcggatccgactggaggatggacagacggcggacgggcagacggaggaggcagcagagcccggggagcagctacagatcggacacgcagggcgtggagaagacccggcgctttctgctcgagtggctgtccttcctgtgccggtacgtcccgtggggctgctggagcggctcccacagaggatcaacgagcggccgccctactacctgggccgcgactacctggagacgctgatggccagccagaaggcagccgactggatccgcatcaggtgcctgggtgggctggagttggggagctgcagtcgggggcccggggtcacggagggtactttgcaggtcctgggcctgacctcgctttccacctgctctcccacagcgagatgctccttgggccagtgccccccagcttcgccttcttgccgaagcacaaggccaacgcgtacaagtagcctcaggctttcccaggggcaccctggggcgaggagagtacaataaattttattctttt

SEQ ID NO: 37723 - DNA, 2189 bp, Homo sapiens
gcacaatcagggaagacacgcgtgacccggaaggtcttcccgccacactccagagcgggtgtgaggggcgccgatggcggagggaacggcggaggctcctctagagaatggtggtggtggcgactcgggagccggagctttggaacgaggagtggcgcccattaagcgtcaatacctcaccaccaaggagcagtttcaccaattcctggaagccaaagggcaggagaagacttgccgggaaaccgaggtaggagaccctgctggcaatgagctggctgagcctgaggctaagcggatccgactggaggatggacagacggcggacgggcagacggaggaggcagcagagcccggggagcagctacagactcagaagagggcccggggacaaaacaagggccggccccatgtgaagcccacgaactacgacaagaacaggctgtgtccctccctaatccaggagtcggctgctaagtgtttcttcggtgatcgctgccgctttctgcacgacgtggggcgctacctggagaccaagccggccgacctgggcccccgctgcgtgctcttcgagaccttcggccggtgcccctacggcgtgacctgccgcttcgctggggcccacctggggcccgagggacagaacctggtgcaggaggagttggcggcccgcgggacccagcccccgtccatccgcaacggcctggacaaagccctgcagcagcagctgcggaagcgcgaggtccgcttcgagcgagctgagcaggccctgcgccggttcagccagggccccacacccgctgccgctgtccccgagggcacggcagccgagggcgctcccaggcaggaaaactgtggtgcccagcaggtccccgcagggccgggcactagcaaccctcccagcagccccgtgcggacctgcgggccctgacggatgaggacgtggtcaggctgcggccctgtgagaagaagcggctggacatccgtggcaaactttacctggcccccctcaccacgtgtgggaacctgcccttccgacggatctgcaagcgcttcggggcggatgtgacatgtggagagatggccgtctgcaccaacctgctgcagggccagatgtccgagtgggccctactcaaacgccaccagtgtgaggacatctttggcgtccagctggagggcgccttccccgacaccatgaccaagtgtgccgagctgctgagccgcaccgtggaggtggactttgtggacatcaacgtcggctgccccatcgacctcgtgtacaagaagggtgggggctgtgccctcatgaatcgctccaccaagttccagcagatcgtccgtggcatgaaccaggtgctggatgtgccgctgactgtgaagatccgcacaggcgtccaggagcgtgtgaacctggcgcaccgcctgctgcccgagctgcgggactggggcgtggcactcgtcacgctccacggccgctctcgggagcagcgctacaccaagctagctgactggcagtacatcgaggagtgcgtgcaggccgccagccccatgcccctgttcggaaatggggacatcttgtcatttgaggatgccaaccgcgccatgcagactggtgtcaccgggatcatgattgcccgtggcgccctgctcaagccgtggctcttcacggagatcaaggagcagcggcactgggacatctcgtcgtccgagcgcctggacatctgcgggacttcaccaactacggcctggagcactggggctcggacacgcagggcgtggagaagacccggcgctttctgctcgagtggctgtccttcctgtgccggtacgtcccgtggggctgctggagcggctcccacagaggatcaacgagcggccgccctactacctgggccgcgactacctggagacgctgatggccagccagaaggcagccgactggatccgcatcaggtgcctgggtgggctggagttggggagctgcagtcgggggcccggggtcacggagggtactttgcaggtcctgggcctgacctcgctttccacctgctctcccacagcgagatgctccttgggccagtgccccccagcttcgccttcttgccgaagcacaaggccaacgcgtacaagtagcctcaggctttcccaggggcaccctggggcgaggagagtacaataaattttattctttt

SEQ ID NO: 37724 - DNA, 1079 bp, Homo sapiens
  misc_feature (37)..(37): n is a, c, g, or t
  misc_feature (39)..(39): n is a, c, g, or t
  misc_feature (51)..(51): n is a, c, g, or t
  misc_feature (57)..(57): n is a, c, g, or t
aatcgcccttttatggggtacacataaatgaaacccngntgtggctctaanacaaangcagggtccgtcgaatcggattgtagggcgcgatgcgaggacgcgagtctctaagatgtgggggcgatcggagcgacttggacgagagtgcgccattagcgtcatacctcaccaccaaggagcagtttcaccaattcctggaagccaaagggcaggagaagacttgccgggaaaccgaggtaggagaccctgctggcaatgagctggctgagcctgaggctaagcggatccgactggaggatggacagacggcggacgggcagacggaggaggcagcagagcccggggagcagctacagactcagaagagggcccggggacaaaacaagggccggccccatgtgaagcccacgaactacgacaagaacaggctgtgtccctccctaatccaggagtcggctgctaagtgtttcttcggtgatcgctgccgctttctgcacgacgtggggcgctacctggagaccaagtggcgccctgctcaagccgtggctcttcacggagatcaaggagcagcggcactgggacatctcgtcgtccgagcgcctggacatctgcgggacttcaccaactacggcctggagcactggggctcggacacgcagggcgtggagaagacccggcgctttctgctcgagtggctgtccttcctgtgccggtacgtcccgtggggctgctggagcggctcccacagaggatcaacgagcggccgccctactacctgggccgcgactacctggagacgctgatggccagccagaaggcagccgactggatccgcatcaggtgcctgggtgggctggagttggggagctgcagtcgggggcccggggtcacggagggtactttgcaggtcctgggcctgacctcgctttccacctgctctcccacagcgagatgctccttgggccagtgccccccagcttcgccttcttgccgaagcacaaggccaacgcgtacaagtagcctcaggctttcccaggggcaccctggggcgaggagagtacaataaattttattctttt

SEQ ID NO: 37725 - DNA, 1089 bp, Homo sapiens
  misc_feature (37)..(37): n is a, c, g, or t
  misc_feature (39)..(39): n is a, c, g, or t
  misc_feature (51)..(51): n is a, c, g, or t
  misc_feature (57)..(57): n is a, c, g, or t
aatcgcccttttatggggtacacataaatgaaacccngntgtggctctaanacaaangcagggtccgtcgaatcggattgtagggcgcgatgcgaggacgcgagtctctaagatgtgggggcgatcggagcgacttggacgagagtgcgccattagcgtcatacctcaccaccaaggagcagtttcaccaattcctggaagccaaagggcaggagaagacttgccgggaaaccgaggtaggagaccctgctggcaatgagctggctgagcctgaggctaagcggatccgactggaggatggacagacggcggacgggcagacggaggaggcagcagagcccggggagcagctacagactcagaagagggcccggggacaaaacaagggccggccccatgtgaagcccacgaactacgacaagaacaggctgtgtccctccctaatccaggagtcggctgctaagtgtttcttcggtgatcgctgccgctttctgcacgacgtggggcgctacctggagaccaagccggccgacctgggcccccgctgcgtgctcttcgagaccttcggccggtgcccctacggcgtgacctgccgcttcgctggggcccacctggggcccgagggacttcaccaactacggcctggagcactggggctcggacacgcagggcgtggagaagacccggcgctttctgctcgagtggctgtccttcctgtgccggtacgtcccgtggggctgctggagcggctcccacagaggatcaacgagcggccgccctactacctgggccgcgactacctggagacgctgatggccagccagaaggcagccgactggatccgcatcaggtgcctgggtgggctggagttggggagctgcagtcgggggcccggggtcacggagggtactttgcaggtcctgggcctgacctcgctttccacctgctctcccacagcgagatgctccttgggccagtgccccccagcttcgccttcttgccgaagcacaaggccaacgcgtacaagtagcctcaggctttcccaggggcaccctggggcgaggagagtacaataaattttattctttt

SEQ ID NO: 37726 - DNA, 312 bp, Homo sapiens
tccaaaaatccttcttcaagcaattaaaaaaaatcctttattttgaaagaatctaagtctctaacttctgtcccttatagcaagtcactctctggaaaaactattacctgattgggttgtttcgctgttcaatagaacaattctcatactgcaactatttcaaagactctcataagttcaacttgctaagtaaccatcaaaatggaactcatattaattttctttgtctactcaatttccagtaattccttactgcaatgacttaaaatactttgttgtcaatgttagcaacctattttcagtagacccttc

SEQ ID NO: 37727 - DNA, 488 bp, Homo sapiens
tatccaccaaagctaaggttcaccatcacaacaataaagccccaggttttagggtatagaaaaaaattcaacagccatgttttcagacataggactccatcagaggggaatattagtgtgttccaccttcagaaaaaatcctgcaatgtagtgataattcaccccatcttacagatgtggttaaaccacttacccagagtcacacagctagtaaggaacagatcccaaattcaaatttaggaatgctcttatcttttttacctgcatcatgcagcctgccatacaaacatatttgaaatgagggtgctgagggttccagtagattcttcagatctttcaaaaatctttctggcctccactattctgactttcaaaaatcttcagttttcctgggtctcttccctaacagtacacaaatgcaggttaagtgagcacctgctaaaagtttagtttaaatagcaactaacttgattaagctcctctagtct

SEQ ID NO: 37728 - DNA, 351 bp, Homo sapiens
aatgggagcagaggagaaggccggagcacggagaaggggcgggggtgtcacctcccatctccccaaagggctgtctccaacgcctccaactccacctagcaggtgccacctgcacactggagagccatgggggcaggtcgggggtggccgcctcgactctccagtcctcagtttctccaggggtcatgtctatttggctcaaagtcaagaaacaggcttttctcggctgggcacagtggctcacgcctataatctccgcactttgggaggctgaggtggccagatcacttgaggtcaggagttcgagaccagcctggccaacacggtgaaactctgtctctactaaatata

SEQ ID NO: 37729 - DNA, 3346 bp, Homo sapiens
ggtggggggaagcgcagtgcgcaggcgcaactgcctggctctgctcgctccggcgctccggcccagctctcgcggacaagtccagacatcgcgcgcccccccttctccgggtccgccccctcccccttctcggcgtcgtcgaagataaacaatagttggccggcgagcgcctagtgtgtctcccgccgccggattcggcgggctgcgtgggaccggcgggatcccggccagccggccatggcggggctgtactcgctgggagtgagcgtcttctccgaccagggcgggaggaagtacatggaggacgttactcaaatcgttgtggagcccgaaccgacggctgaagaaaagccctcgccgcggcggtcgctgtctcagccgttgcctccgcggccgtcgccggccgcccttcccggcggcgaagtctcggggaaaggcccagcggtggcagcccgagaggctcgcgaccctctcccggacgccggggcctcgccggcacctagccgctgctgccgccgccgttcctccgtggcctttttcgccgtgtgcgacgggcacggcgggcgggaggcggcacagtttgcccgggagcacttgtggggtttcatcaagaagcagaagggtttcacctcgtccgagccggctaaggtttgcgctgccatccgcaaaggctttctcgcttgtcaccttgccatgtggaagaaactggcggaatggccaaagactatgacgggtcttcctagcacatcagggacaactgccagtgtggtcatcattcggggcatgaagatgtatgtagctcacgtaggtgactcaggggtggttcttggaattcaggatgacccgaaggatgactttgtcagagctgtggaggtgacacaggaccataagccagaacttcccaaggaaagagaacgaatcgaaggacttggtgggagtgtaatgaacaagtctggggtgaatcgtgtagtttggaaacgacctcgactcactcacaatggacctgttagaaggagcacagttattgaccagattccttttctggcagtagcaagagcacttggtgatttgtggagctatgatttcttcagtggtgaatttgtggtgtcacctgaaccagacacaagtgtccacactcttgaccctcagaagcacaagtatattatattggggagtgatggactttggaatatgattccaccacaagatgccatctcaatgtgccaggaccaagaggagaaaaaatacctgatgggtgagcatggacaatcttgtgccaaaatgcttgtgaatcgagcattgggccgctggaggcagcgtatgctccgagcagataacactagtgccatagtaatctgcatctctccagaagtggacaatcagggaaactttaccaatgaagatgagttatacctgaacctgactgacagcccttcctataatagtcaagaaacctgtgtgatgactccttccccatgttctacaccaccagtcaagtcactggaggaggatccatggccaagggtgaattctaaggaccatatacctgccctggttcgtagcaatgccttctcagagaattttttagaggtttcagctgagatagctcgagagaatgtccaaggtgtagtcataccctcaaaagatccagaaccacttgaagaaaattgcgctaaagccctgactttaaggatacatgattctttgaataatagccttccaattggccttgtgcctactaattcaacaaacactgtcatggaccaaaaaaatttgaagatgtcaactcctggccaaatgaaagcccaagaaattgaaagaacccctccaacaaactttaaaaggacattagaagagtccaattctggccccctgatgaagaagcatagacgaaatggcttaagtcgaagtagtggtgctcagcctgcaagtctccccacaacctcacagcgaaagaactctgttaaactcaccatgcgacgcagacttaggggccagaagaaaattggaaatcctttacttcatcaacacaggaaaactgtttgtgtttgctgaaatgcatctgggaaatgaggtttttccaaacttaggatataagagggctttttaaatttggtgccgatgttgaactttttttaaggggagaaaattaaaagaaatatacagtttgactttttggaattcagcagttttatcctggccttgtacttgcttgtattgtaaatgtggattttgtagatgttagggtataagttgctgtaaaatttgtgtaaatttgtatccacacaaattcagtctctgaatacacagtattcagagtctctgatacacagtaattgtgacaatagggctaaatgtttaaagaaatcaaaagaatctattagattttagaaaaacatttaaactttttaaaatacttattaaaaaatttgtataagccacttgtcttgaaaactgtgcaactttttaaagtaaattattaagcagactggaaaagtgatgtattttcatagtgacctgtgtttcacttaatgtttcttagagccaagtgtcttttaaacattattttttatttctgatttcataattcagaactaaatttttcatagaagtgttgagccatgctacagttagtcttgtcccaattaaaatactatgcagtatctcttacatcagtagcatttttctaaaaccttagtcatcagatatgcttactaaatcttcagcatagaaggaagtgtgtttgcctaaaacaatctaaaacaattcccttctttttcatcccagaccaatggcattattaggtcttaaagtagttactcccttctcgtgtttgcttaaaatatgtgaagttttccttgctatttcaataacagatggtgctgctaattcccaacatttcttaaattattttatatcatacagttttcattgattatatgggtatatattcatctaataaatcagtgaactgttcctcatgttgctgaatttgtagttgttggtttattttaatggtatgtacaagttgagtatcccttatccaaaatgcttgggaccagaagtgtttcagattttttaaaattttggaatatttgctttatactgagcttttgagtgttcccaatctgaaattcaaaatgctctaatgagcatttcctttgagcatcatgcctgctctgaaaaagtttctgattctggagcattttggattttggattttcagattagggatgcttaacctggattaacattctgttgtgccatgatcatgctttacagtgagtgtattttatttatttattattttgtttgtttgtttgagatggagtctcactctgtcatc

SEQ ID NO: 37730 - DNA, 2092 bp, Homo sapiens
tctccctactgtatcctacgaatcgaaggacttggtgggagtgtaatgaacaagtctggggtgaatcgtgtagtttggaaacgacctcgactcactcacaatggacctgttagaaggagcacagttattgaccagattccttttctggcagtagcaagagcacttggtgatttgtggagctatgatttcttcagtggtgaatttgtggtgtcacctgaaccagacacaagtgtccacactcttgaccctcagaagcacaagtatattatattggggagtgatggactttggaatatgattccaccacaagatgccatctcaatgtgccaggaccaagaggagaaaaaatacctgatgggtgagcatggacaatcttgtgccaaaatgcttgtgaatcgagcattgggccgctggaggcagcgtatgctccgagcagataacactagtgccatagtaatctgcatctctccagaagtggacaatcagggaaactttaccaatgaagatgagttatacctgaacctgactgacagcccttcctataatagtcaagaaacctgtgtgatgactccttccccatgttctacaccaccagtcaagtcactggaggaggatccatggccaagggtgaattctaaggaccatatacctgccctggttcgtagcaatgccttctcagagaattttttagaggtttcagctgagatagctcgagagaatgtccaaggtgtagtcataccctcaaaagatccagaaccacttgaagaaaattgcgctaaagccctgactttaaggatacatgattctttgaataatagccttccaattggccttgtgcctactaattcaacaaacactgtcatggaccaaaaaaatttgaagatgtcaactcctggccaaatgaaagcccaagaaattgaaagaacccctccaacaaactttaaaaggacattagaagagtccaattctggccccctgatgaagaagcatagacgaaatggcttaagtcgaagtagtggtgctcagcctgcaagtctccccacaacctcacagcgaaagaactctgttaaactcaccatgcgacgcagacttaggggccagaagaaaattggaaatcctttacttcatcaacacaggaaaactgtttgtgtttgctgaaatgcatctgggaaatgaggtttttccaaacttaggatataagagggctttttaaatttggtgccgatgttgaactttttttaaggggagaaaattaaaagaaatatacagtttgactttttggaattcagcagttttatcctggccttgtacttgcttgtattgtaaatgtggattttgtagatgttagggtataagttgctgtaaaatttgtgtaaatttgtatccacacaaattcagtctctgaatacacagtattcagagtctctgatacacagtaattgtgacaatagggctaaatgtttaaagaaatcaaaagaatctattagattttagaaaaacatttaaactttttaaaatacttattaaaaaatttgtataagccacttgtcttgaaaactgtgcaactttttaaagtaaattattaagcagactggaaaagtgatgtattttcatagtgacctgtgtttcacttaatgtttcttagagccaagtgtcttttaaacattattttttatttctgatttcataattcagaactaaatttttcatagaagtgttgagccatgctacagttagtcttgtcccaattaaaatactatgcagtatctcttacatcagtagcatttttctaaaaccttagtcatcagatatgcttactaaatcttcagcatagaaggaagtgtgtttgcctaaaacaatctaaaacaattcccttctttttcatcccagaccaatggcattattaggtcttaaagtagttactcccttctcgtgtttgcttaaaatatgtgaagttttccttgctatttcaataacagatggtgctgctaattcccaacatttcttaaattattttatatcatacagttttcattgattatatgggtatatattcatctaataaatcagtgaactgttcctcatgttgctg

SEQ ID NO: 37731 - DNA, 340 bp, Homo sapiens
tcttatttgttttaccttcttatttttcagtcactggaggaggatccatggccaagggtgaattctaaggaccatatacctgccctggttcgtagcaatgccttctcagagaattttttagaggtttcagctgagatagctcgagagaatgtccaaggtgtagtcataccctcaaaagatccagaaccacttgaagaaaattgcgctaaagccctgactttaaggatacatgattctttgaataatagccttccaattggccttgtgcctactaattcaacaaacactgtcatggaccaaaaaaatttgaagatgtcaactcctggccaaatgaaagccc

SEQ ID NO: 37732 - DNA, 2989 bp, Homo sapiens
ggtggggggaagcgcagtgcgcaggcgcaactgcctggctctgctcgctccggcgctccggcccagctctcgcggacaagtccagacatcgcgcgcccccccttctccgggtccgccccctcccccttctcggcgtcgtcgaagataaacaatagttggccggcgagcgcctagtgtgtctcccgccgccggattcggcgggctgcgtgggaccggcgggatcccggccagccggccatggcggggctgtactcgctgggagtgagcgtcttctccgaccagggcgggaggaagtacatggaggacgttactcaaatcgttgtggagcccgaaccgacggctgaagaaaagccctcgccgcggcggtcgctgtctcagccgttgcctccgcggccgtcgccggccgcccttcccggcggcgaagtctcggggaaaggcccagcggtggcagcccgagaggctcgcgaccctctcccggacgccggggcctcgccggcacctagccgctgctgccgccgccgttcctccgtggcctttttcgccgtgtgcgacgggcacggcgggcgggaggcggcacagtttgcccgggagcacttgtggggtttcatcaagaagcagaagggtttcacctcgtccgagccggctaaggtttgcgctgccatccgcaaaggctttctcgcttgtcaccttgccatgtggaagaaactggcggaatggccaaagactatgacgggtcttcctagcacatcagggacaactgccagtgtggtcatcattcggggcatgaagatgtatgtagctcacgtaggtgactcaggggtggttcttggaattcaggatgacccgaaggatgactttgtcagagctgtggaggtgacacaggaccataagccagaacttcccaaggaaagagaacgaatcgaaggacttggtgggagtgtaatgaacaagtctggggtgaatcgtgtagtttggaaacgacctcgactcactcacaatggacctgttagaaggagcacagttattgaccagattccttttctggcagtagcaagagcacttggtgatttgtggagctatgatttcttcagtggtgaatttgtggtgtcacctgaaccagacacaagtgtccacactcttgaccctcagaagcacaagtatattatattggggagtgatggactttggaatatgattccaccacaagatgccatctcaatgtgccaggaccaagaggagaaaaaatacctgatgggtgagcatggacaatcttgtgccaaaatgcttgtgaatcgagcattgggccgctggaggcagcgtatgctccgagcagataacactagtgccatagtaatctgcatctctccagaagtggacaatcagggaaactttaccaatgaagatgagttatacctgaacctgactgacagcccttcctataatagtcaagaaacctgtgtgatgactccttccccatgttctacaccaccagtcaagtcactggaggaggatccatggccaagggtgaattctaaggaccatatacctgccctggttcgtagcaatgccttctcagagaattttttagaggtttcagctgagatagctcgagagaatgtccaaggtgtagtcataccctcaaaagatccagaaccacttgaagaaaattgcgctaaagccctgactttaaggatacatgattctttgaataatagccttccaattggccttgtgcctactaattcaacaaacactgtcatggaccaaaaaaatttgaagatgtcaactcctggccaaatgaaagcccaagaaattgaaagaacccctccaacaaactttaaaaggacattagaagagtccaattctggccccctgatgaagaagcatagacgaaatggcttaagtcgaagtagtggtgctcagcctgcaagtctccccacaacctcacagcgaaagaactctgttaaactcaccatgcgacgcagacttaggggccagaagaaaattggaaatcctttacttcatcaacacaggaaaactgtttgtgtttgctgaaatgcatctgggaaatgaggtttttccaaacttaggatataagagggctttttaaatttggtgccgatgttgaactttttttaaggggagaaaattaaaagaaatatacagtttgactttttggaattcagcagttttatcctggccttgtacttgcttgtattgtaaatgtggattttgtagatgttagggtataagttgctgtaaaatttgtgtaaatttgtatccacacaaattcagtctctgaatacacagtattcagagtctctgatacacagtaattgtgacaatagggctaaatgtttaaagaaatcaaaagaatctattagattttagaaaaacatttaaactttttaaaatacttattaaaaaatttgtataagccacttgtcttgaaaactgtgcaactttttaaagtaaattattaagcagactggaaaagtgatgtattttcatagtgacctgtgtttcacttaatgtttcttagagccaagtgtcttttaaacattattttttatttctgatttcataattcagaactaaatttttcatagaagtgttgagccatgctacagttagtcttgtcccaattaaaatactatgcagtatctcttacatcagtagcatttttctaaaaccttagtcatcagatatgcttactaaatcttcagcatagaaggaagtgtgtttgcctaaaacaatctaaaacaattcccttctttttcatcccagaccaatggcattattaggtcttaaagtagttactcccttctcgtgtttgcttaaaatatgtgaagttttccttgctatttcaataacagatggtgctgctaattcccaacatttcttaaattattttatatcatacagttttcattgattatatgggtatatattcatctaataaatcagtgaactgttcctcatgttgctg

SEQ ID NO: 37733 - DNA, 2651 bp, Homo sapiens
ggtggggggaagcgcagtgcgcaggcgcaactgcctggctctgctcgctccggcgctccggcccagctctcgcggacaagtccagacatcgcgcgcccccccttctccgggtccgccccctcccccttctcggcgtcgtcgaagataaacaatagttggccggcgagcgcctagtgtgtctcccgccgccggattcggcgggctgcgtgggaccggcgggatcccggccagccggccatggcggggctgtactcgctgggagtgagcgtcttctccgaccagggcgggaggaagtacatggaggacgttactcaaatcgttgtggagcccgaaccgacggctgaagaaaagccctcgccgcggcggtcgctgtctcagccgttgcctccgcggccgtcgccggccgcccttcccggcggcgaagtctcggggaaaggcccagcggtggcagcccgagaggctcgcgaccctctcccggacgccggggcctcgccggcacctagccgctgctgccgccgccgttcctccgtggcctttttcgccgtgtgcgacgggcacggcgggcgggaggcggcacagtttgcccgggagcacttgtggggtttcatcaagaagcagaagggtttcacctcgtccgagccggctaaggtttgcgctgccatccgcaaaggctttctcgcttgtcaccttgccatgtggaagaaactggcggaatggccaaagactatgacgggtcttcctagcacatcagggacaactgccagtgtggtcatcattcggggcatgaagatgtatgtagctcacgtaggtgactcaggggtggttcttggaattcaggatgacccgaaggatgactttgtcagagctgtggaggtgacacaggaccataagccagaacttcccaaggaaagagaacgaatcgaaggacttggtgggagtgtaatgaacaagtctggggtgaatcgtgtagtttggaaacgacctcgactcactcacaatggacctgttagaaggagcacagttattgaccagattccttttctggcagtagcaagagcacttggtgatttgtggagctatgatttcttcagtggtgaatttgtggtgtcacctgaaccagacacaagtgtccacactcttgaccctcagaagcacaagtatattatattggggagtgatggactttggaatatgattccaccacaagatgccatctcaatgtgccaggaccaagaggagaaaaaatacctgatgggtgagcatggacaatcttgtgccaaaatgcttgtgaatcgagcattgggccgctggaggcagcgtatgctccgagcagataacactagtgccatagtaatctgcatctctccagaagtggacaatcagggaaactttaccaatgaagatgagttatacctgaacctgactgacagcccttcctataatagtcaagaaacctgtgtgatgactccttccccatgttctacaccaccagtcaagtcactggaggaggatccatggccaagggtgaattctaaggaccatatacctgccctggttcgtagcaatgccttctcagagaattttttagaggtttcagctgagatagctcgagagaatgtccaaggtgtagtcataccctcaaaagatccagaaccacttgaagaaaattggaaatcctttacttcatcaacacaggaaaactgtttgtgtttgctgaaatgcatctgggaaatgaggtttttccaaacttaggatataagagggctttttaaatttggtgccgatgttgaactttttttaaggggagaaaattaaaagaaatatacagtttgactttttggaattcagcagttttatcctggccttgtacttgcttgtattgtaaatgtggattttgtagatgttagggtataagttgctgtaaaatttgtgtaaatttgtatccacacaaattcagtctctgaatacacagtattcagagtctctgatacacagtaattgtgacaatagggctaaatgtttaaagaaatcaaaagaatctattagattttagaaaaacatttaaactttttaaaatacttattaaaaaatttgtataagccacttgtcttgaaaactgtgcaactttttaaagtaaattattaagcagactggaaaagtgatgtattttcatagtgacctgtgtttcacttaatgtttcttagagccaagtgtcttttaaacattattttttatttctgatttcataattcagaactaaatttttcatagaagtgttgagccatgctacagttagtcttgtcccaattaaaatactatgcagtatctcttacatcagtagcatttttctaaaaccttagtcatcagatatgcttactaaatcttcagcatagaaggaagtgtgtttgcctaaaacaatctaaaacaattcccttctttttcatcccagaccaatggcattattaggtcttaaagtagttactcccttctcgtgtttgcttaaaatatgtgaagttttccttgctatttcaataacagatggtgctgctaattcccaacatttcttaaattattttatatcatacagttttcattgattatatgggtatatattcatctaataaatcagtgaactgttcctcatgttgctg

SEQ ID NO: 37734 - DNA, 1577 bp, Homo sapiens
cgcttaacgttgtgacagctatactataaagtgatgtaactgtgtgatgagtccttacccctatgtactagaccaacagttaatgtcactggaggaggatccatggccaagggtgaattctaaggaccatatacctgccctggttcgtagcaatgccttctcagagaattttttagaggtttcagctgagatagctcgagagaatgtccaaggtgtagtcataccctcaaaagatccagaaccacttgaagaaaattgcgctaaagccctgactttaaggatacatgattctttgaataatagccttccaattggccttgtgcctactaattcaacaaacactgtcatggaccaaaaaaatttgaagatgtcaactcctggccaaatgaaagcccaagaaattgaaagaacccctccaacaaactttaaaaggacattagaagagtccaattctggccccctgatgaagaagcatagacgaaatggcttaagtcgaagtagtggtgctcagcctgcaagtctccccacaacctcacagcgaaagaactctgttaaactcaccatgcgacgcagacttaggggccagaagaaaattggaaatcctttacttcatcaacacaggaaaactgtttgtgtttgctgaaatgcatctgggaaatgaggtttttccaaacttaggatataagagggctttttaaatttggtgccgatgttgaactttttttaaggggagaaaattaaaagaaatatacagtttgactttttggaattcagcagttttatcctggccttgtacttgcttgtattgtaaatgtggattttgtagatgttagggtataagttgctgtaaaatttgtgtaaatttgtatccacacaaattcagtctctgaatacacagtattcagagtctctgatacacagtaattgtgacaatagggctaaatgtttaaagaaatcaaaagaatctattagattttagaaaaacatttaaactttttaaaatacttattaaaaaatttgtataagccacttgtcttgaaaactgtgcaactttttaaagtaaattattaagcagactggaaaagtgatgtattttcatagtgacctgtgtttcacttaatgtttcttagagccaagtgtcttttaaacattattttttatttctgatttcataattcagaactaaatttttcatagaagtgttgagccatgctacagttagtcttgtcccaattaaaatactatgcagtatctcttacatcagtagcatttttctaaaaccttagtcatcagatatgcttactaaatcttcagcatagaaggaagtgtgtttgcctaaaacaatctaaaacaattcccttctttttcatcccagaccaatggcattattaggtcttaaagtagttactcccttctcgtgtttgcttaaaatatgtgaagttttccttgctatttcaataacagatggtgctgctaattcccaacatttcttaaattattttatatcatacagttttcattgattatatgggtatatattcatctaataaatcagtgaactgttcctcatgttgctg

SEQ ID NO: 37735 - DNA, 1685 bp, Homo sapiens
ggtggggggaagcgcagtgcgcaggcgcaactgcctggctctgctcgctccggcgctccggcccagctctcgcggacaagtccagacatcgcgcgcccccccttctccgggtccgccccctcccccttctcggcgtcgtcgaagataaacaatagttggccggcgagcgcctagtgtgtctcccgccgccggattcggcgggctgcgtgggaccggcgggatcccggccagccggccatggcggggctgtactcgctgggagtgagcgtcttctccgaccagggcgggaggaagtacatggaggacgttactcaaatcgttgtggagcccgaaccgacggctgaagaaaagccctcgccgcggcggtcgctgtctcagccgttgcctccgcggccgtcgccggccgcccttcccggcggcgaagtctcggggaaaggcccagcggtggcagcccgagaggctcgcgaccctctcccggacgccggggcctcgccggcacctagccgctgctgccgccgccgttcctccgtggcctttttcgccgtgtgcgacgggcacggcgggcgggaggcggcacagtttgcccgggagcacttgtggggtttcatcaagaagcagaagggtttcacctcgtccgagccggctaaggtttgcgctgccatccgcaaaggctttctcgcttgtcaccttgccatgtggaagaaactggcggaatggccaaagactatgacgggtcttcctagcacatcagggacaactgccagtgtggtcatcattcggggcatgaagatgtatgtagctcacgtaggtgactcaggggtggttcttggaattcaggatgacccgaaggatgactttgtcagagctgtggaggtgacacaggaccataagccagaacttcccaaggaaagagaacgaatcgaaggacttggtgggagtgtaatgaacaagtctggggtgaatcgtgtagtttggaaacgacctcgactcactcacaatggacctgttagaaggagcacagttattgaccagattccttttctggcagtagcaagagcacttggtgatttgtggagctatgatttcttcagtggtgaatttgtggtgtcacctgaaccagacacaagtgtccacactcttgaccctcagaagcacaagtatattatattggggagtgatggactttggaatatgattccaccacaagatgccatctcaatgtgccaggaccaagaggagaaaaaatacctgatgggtgagcatggacaatcttgtgccaaaatgcttgtgaatcgagcattgggccgctggaggcagcgtatgctccgagcagataacactagtgccatagtaatctgcatctctccagaagtggacaatcagggaaactttaccaatgaagatgagttatacctgaacctgactgacagcccttcctataatagtcaagaaacctgtgtgatgactccttccccatgttctacaccaccagtcaagtcactggaggaggatccatggccaagggtgaattctaaggaccatatacctgccctggttcgtagcaatgccttctcagagaattttttagaggtttcagctgagatagctcgagagaatgtccaaggtgtagtcataccctcaaaagatccagaaccacttaacatcgcacttgacaggaccggccg

SEQ ID NO: 37736 - DNA, 319 bp, Homo sapiens
ggaagttttggaacacccttccacagacagggaatctagggccccagctccgccttgctgcagactcttggggccatgctgggacagctactagaaaaatccttacagaacttctcttggcctcttgtgttttctttatctctatttctttctgtacttacccagctctttgtgcttctacattaatcacatgagactgcccaggtgtgactgttaagtgactgatttccttattctgtgttctgtgatcaactctcctgcacctgcgggagaagagccacgccgcaggccgtgttccccaaccttgctggcaccaggg

SEQ ID NO: 37737 - DNA, 587 bp, Homo sapiens
attggccattcaagtttcctcctttatgaaatggttgttcatgtcatttgctcatttttatattagattgtttttcttttttccagctgacttgtaggaactctacatcttatcaatattaatcatttatcgaaaactatttgggtgccattatcttctcctagtcaatgttttttgtttgtgatatcttttataatatataagtttttaatgttggcagaagtaaagttaatctttttggctgtgttgtgtgtcttgtttgatgtaaagatagtttctgtaatagttttgcagtttgattgttcatctttaggtcttcaattacaacctgcacatccatcccctctatcctctttcttactctgtttttctccatagcacttatcatccaataatatgtcatgcactttatttatctgttttgcatatatattttgtctgttacctgtttccttccactagaatgtaagtcccatgagggcagggacttgcatctattttgtttgtggttgtatctctaacacctgggatagtcactggcaaatgatagttgctcaataaatatttgttggacaaataaagatcca

SEQ ID NO: 37738 - DNA, 305 bp, Homo sapiens
cgccaccacacccagctaatttttgcatttttagtagagacagggtttcgccatgttggtctcgaactcctgacctcaggtgatccaccaaacttggcctcccaaagtgctgggattacaggtgcgagccaccgcacccggacgagggtttatgtcttttatcagatggtacactcttaccatctgagtggtaatcccatttttgtaaccccaacattcagcacactgcctaaggttcagtaattatccaatagtcactcaatagagtttatcttcatgggaataaaattgcttaaaaaaactgg

SEQ ID NO: 37739 - DNA, 422 bp, Homo sapiens
aattctctcatgagtcattatacatattacaaggaagaaagcaactctagctttattcccccggatcaaacatggatcctgttgagaagaggtctcttatgagagcgtactgtgtcccagactttgtatgtggaagcccaaacccccagtacctcacaatgtgactgtgtttggagacagagccttttaagagacagttcaggtaaaataaagtcattatatggtggaccctaatccaatatgaccagtgccctcacaagaagaggccataaggatgcaaacgcacacagagggaagaccatgtgaagacagagaagatggtcatctccaagccagggacaatggtacagagagaaaccaaccctgctgacaccttgatctaggactcccaacctccagaactgtgaggaactacattcctg

SEQ ID NO: 37740 - DNA, 857 bp, Homo sapiens
atgcgtttctggccctgacataagctgtctggcctctctgtgacatgatgaaattgaaatcaatccacagtccatgaaattgtgacactccaccagattaagttagggcataacattaacttggaaatggccatgtcatcacccctgcggctgtcctatagctgagatgcgtgggtcgcaggggaggtgatttctaggcatattgctgtcccttttgtgtatctgtcatccggatgcttcggaccccacgcctctgcaagtgggagagacccgagcatcctccccacccccatagctccagtgcacgccacccccgtcttgcctgggtcggggcctgcggccagcaccatttcacacacactccttgtagatgggagccagaggaaacctgaacgtgggtggagcgttccactgagtctacttcaggagacagaaggcccatgctgatgggggaggaggagggacgtgggcattttggacaccaggggaaatggaaatgctgctttcaaaacttagtttcctttccatttcttcctagtctggcctttgacacaaatctggtagaaagaagcctgataaattgagggcacttgtaccctccctgtgcccccagaaggttcttggagagaagtgcaagaatttgtgaacacggcggtggagggcgggtggatggccatgggctgggcctccgtatcaggcctgctcaccttgctgggagctttattctgatctcattttgaatgttccagagggagcatcataagagcccagagctccgatttccaaagagtgatattgacatttatggagattggtgttgtaacatattttgataaatactaacttattttgttggg

SEQ ID NO: 37741 - DNA, 468 bp, Homo sapiens
  misc_feature (431)..(431): n is a, c, g, or t
gccggacgaactcagagtgtcttcctcctccacaaacaatcctgcttatctcctcaggagagaagcaggatggaaagatgcattcagactgttaatttattaacaaggcaaatgattttgtgtttcttgatgacagactattaagtttgggacttattttcccatttgagaagttataatatatatttaagatgataagtttcctgcttaagttgtgcctttcagcttcaatgagtttaaggagcactaagggtaatgataccaatgagggttggtttattatcaaacctgaatagctgtggtttctccagtaaatattttcttctactgaacatggagccattattaagagttgtgtgttttttattatgtacatttgtatatttttttgcttttgttttttaaataacgtacttctacctgagtttccnaggttttattatatctaacgcaagtcctgctatctgg

SEQ ID NO: 37742 - DNA, 4040 bp, Homo sapiens
  misc_feature (3047)..(3047): n is a, c, g, or t
atgcgtttctggccctgacataagctgtctggcctctctgtgacatgatgaaattgaaatcaatccacagtccatgaaattgtgacactccaccagattaagttagggcataacattaacttggaaatggccatgtcatcacccctgcggctgtcctatagctgagatgcgtgggtcgcaggggaggtgatttctaggcatattgctgtcccttttgtgtatctgtcatccggatgcttcggaccccacgcctctgcaagtgggagagacccgagcatcctccccacccccatagctccagtgcacgccacccccgtcttgcctgggtcggggcctgcggccagcaccatttcacacacactccttgtagatgggagccagaggaaacctgaacgtgggtggagcgttccactgagtctacttcaggagacagaaggcccatgctgatgggggaggaggagggacgtgggcattttggacaccaggggaaatggaaatgctgctttcaaaacttagtttcctttccatttcttcctagtctggcctttgacacaaatctggtagaaagaagcctgataaattgagggcacttgtaccctccctgtgcccccagaaggttcttggagagaagtgcaagaatttgtgaacacggcggtggagggcgggtggatggccatgggctgggcctccgtatcaggcctgctcaccttgctgggagctttattctgatctcattttgaatgttccagagggagcatcataagagcccagagctccgatttccaaagagtgatattgacatttatggagattggtgttgtaacatattttgataaatactaacttattttgttggggtttggttgtctcttgtcttaggacctggtagttatttgcttgatttttttttccgttattttctacataggcaaagagaattcgagggatagacagtctccaagaaaagtgaagtggtgggagagaattgcttttttcttttttttcttttctctagtttttctttctggctgagatttccgtgcaagacagcacccaatagactatttagagttgacatttgacattttaatgggcgccatggctcattttgtagattgagaaggtgcgtctcccctgctccaagtctcatcatgacagcgtgctgacagctgggagtctgtggccttcctcacgcagaggccttaaagctggacacagaagcacgcctaggctgggcagggatgggacccatgccccctccttagaggacgggcttcctggttaggaaaggacacgtgggggtgccttgcataatagttcactggtcaccgtgcttttatgagtagtgtttttgtgcacttgccaggggttttctctctgtgtgcgaggggagtgatttaagcaatggtgtctggagtaagccttacaattttaatagactttttcttatcatatccctcatttctttccctgaaataaaaatacacacaagcaaaaaaaaaatgatagtttcacatctcttagttcccttgcccaaacaagaatattcttagttccactggccaggattttcctacatagtcagaacttacacattactagaggcacacccaccaaggagtattgtgtctacttttatctgtgcaccagccacaaatacccacattggaaagacccatttgtgatgggtaaacatcccttcctgtctcccacaacccctgtgactgccctgcatgtgttcatgacctccgaaggccctaattcatgaagcagcaaacccagcagatctccacccccctgcctcaggacctctgctgaagagggggatgaagtgggtctccagggaggcagtgggggccttgttggcagctggctcgggagccggcttacaggagggcagctctgcagttgggaggggcaccgtccggaggagaccaggcctctacacaccccccactctacttatcatccctgctcacacacccttgtccaaggctttatgcatcggatttatttttccaaatcaagaggacagtgatagatgcattttccccaggctgtctcagaaaggtcgctaaatgtatactgttgtcagaattgctgagatctccccccacttttggtttttgcagcagtaaaaactctttccactgtgacttattttctctctcaggcagccagccacctggtcccttgtgctgactctagcacagtggccaggatccaatacgagtccaggggtgaccgcaggatggtgggggcagcgggcttctccacctaccccagccaccaaggccctgacgcactgcctcctgcaccttcagcacatccctgtgcacagctggaagggtgcatggcccgctcacctttgttcagatgggtggaaacgctgatgataccagctcctccctgccgtgcccctgccacggagcaggcattgtgaactggctggtgtttgcagtcccacgtggcatggcctccagcccaacccacagtggagactggagacagggcaatgagtctggtcgggggcacgtggacatgccccataggggccccacccagacttaacaggcaaggtcctgggcattgcgcgacgcaggactcaatgctaaagcaagcctgcctggctctgtgccagggcccctcttctgatttacacatcccatttttacacagacccttccttcttaataaaggctgacagttctgttggcagccaagaacccacaccatgaagacagggagtgaggggcctttgtgcccaactccagcacagctgcgttctggggtgtgtgagaggcatgttcgtgtctgtgcgctggtggtctcgtgagacagttccgaggacggggaaattgcagggtggtgggggcgtgaggcttatatgtggaactgatgcagagttcgcctgcagacggatctggatatacactatgtataattgttacgtgtaatttaaaatatatctgtttgccatcgtcatgagaagattatatgtaaggctctgaagggagagggagatgtacattctgccaggctcctgnggaccttatccgagtcatgaaattgatgactgttgatccagtggtgcaagaagctacactccatgtgtcatcacgcttatgactcctaatgtatttttaaggcaaaaaatgtcagccgactccatcttcacccctcgattcctcgagtccagcctttctgtgccagtgcttcactgagccacaacgctctcgccatcgggacccggctgggcctggagtctcggggcacagttgccatggagccctcctgggtcattctacaaatgtgctgagtgccagctgaaaaccccacaggagatggagtaccttggccaagcttaaagagaagattttctcagggtatttattagtgtgtccagcagggtcaggaagcaggatggaaagatgcattcagactgttaatttattaacaaggcaaatgattttgtgtttcttgatgacagactattaagtttgggacttattttcccatttgagaagttataatatatatttaagatgataagtttcctgcttaagttgtgcctttcagcttcaatgagtttaaggagcactaagggtaatgataccaatgagggttggtttattatcaaacctgaatagctgtggtttctccagtaaatattttcttctactgaacatggagccattattaagagttgtgtgttttttattatgtacatttgtatatttttttgcttgtttgatgttctatttttctaatagttttcttttagtttcttaaagttgtgatactagatttagattctgatgctaactgcaaatcaggttggtctctgctgggtctctcctgcttttattttactttaaggacaagtgtagttgtcgtccaccacctttcaaaaaatgtgaaactgccctgcctcccctttttgctgacaacactgtgtacattgaccacttcctaccatactttatgttgtaaaatcaaactcttttgtggtacattatctcatgcttctgcaaattcga

SEQ ID NO: 37743 - DNA, 3125 bp, Homo sapiens
  misc_feature (2132)..(2132): n is a, c, g, or t
ccctccacaaacgtaaacacaattcttcgcgatccacgctctccgttaaatttgaagtggtgggagagaattgcttttttcttttttttcttttctctagtttttctttctggctgagatttccgtgcaagacagcacccaatagactatttagagttgacatttgacattttaatgggcgccatggctcattttgtagattgagaaggtgcgtctcccctgctccaagtctcatcatgacagcgtgctgacagctgggagtctgtggccttcctcacgcagaggccttaaagctggacacagaagcacgcctaggctgggcagggatgggacccatgccccctccttagaggacgggcttcctggttaggaaaggacacgtgggggtgccttgcataatagttcactggtcaccgtgcttttatgagtagtgtttttgtgcacttgccaggggttttctctctgtgtgcgaggggagtgatttaagcaatggtgtctggagtaagccttacaattttaatagactttttcttatcatatccctcatttctttccctgaaataaaaatacacacaagcaaaaaaaaaatgatagtttcacatctcttagttcccttgcccaaacaagaatattcttagttccactggccaggattttcctacatagtcagaacttacacattactagaggcacacccaccaaggagtattgtgtctacttttatctgtgcaccagccacaaatacccacattggaaagacccatttgtgatgggtaaacatcccttcctgtctcccacaacccctgtgactgccctgcatgtgttcatgacctccgaaggccctaattcatgaagcagcaaacccagcagatctccacccccctgcctcaggacctctgctgaagagggggatgaagtgggtctccagggaggcagtgggggccttgttggcagctggctcgggagccggcttacaggagggcagctctgcagttgggaggggcaccgtccggaggagaccaggcctctacacaccccccactctacttatcatccctgctcacacacccttgtccaaggctttatgcatcggatttatttttccaaatcaagaggacagtgatagatgcattttccccaggctgtctcagaaaggtcgctaaatgtatactgttgtcagaattgctgagatctccccccacttttggtttttgcagcagtaaaaactctttccactgtgacttattttctctctcaggcagccagccacctggtcccttgtgctgactctagcacagtggccaggatccaatacgagtccaggggtgaccgcaggatggtgggggcagcgggcttctccacctaccccagccaccaaggccctgacgcactgcctcctgcaccttcagcacatccctgtgcacagctggaagggtgcatggcccgctcacctttgttcagatgggtggaaacgctgatgataccagctcctccctgccgtgcccctgccacggagcaggcattgtgaactggctggtgtttgcagtcccacgtggcatggcctccagcccaacccacagtggagactggagacagggcaatgagtctggtcgggggcacgtggacatgccccataggggccccacccagacttaacaggcaaggtcctgggcattgcgcgacgcaggactcaatgctaaagcaagcctgcctggctctgtgccagggcccctcttctgatttacacatcccatttttacacagacccttccttcttaataaaggctgacagttctgttggcagccaagaacccacaccatgaagacagggagtgaggggcctttgtgcccaactccagcacagctgcgttctggggtgtgtgagaggcatgttcgtgtctgtgcgctggtggtctcgtgagacagttccgaggacggggaaattgcagggtggtgggggcgtgaggcttatatgtggaactgatgcagagttcgcctgcagacggatctggatatacactatgtataattgttacgtgtaatttaaaatatatctgtttgccatcgtcatgagaagattatatgtaaggctctgaagggagagggagatgtacattctgccaggctcctgnggaccttatccgagtcatgaaattgatgactgttgatccagtggtgcaagaagctacactccatgtgtcatcacgcttatgactcctaatgtatttttaaggcaaaaaatgtcagccgactccatcttcacccctcgattcctcgagtccagcctttctgtgccagtgcttcactgagccacaacgctctcgccatcgggacccggctgggcctggagtctcggggcacagttgccatggagccctcctgggtcattctacaaatgtgctgagtgccagctgaaaaccccacaggagatggagtaccttggccaagcttaaagagaagattttctcagggtatttattagtgtgtccagcagggtcaggaagcaggatggaaagatgcattcagactgttaatttattaacaaggcaaatgattttgtgtttcttgatgacagactattaagtttgggacttattttcccatttgagaagttataatatatatttaagatgataagtttcctgcttaagttgtgcctttcagcttcaatgagtttaaggagcactaagggtaatgataccaatgagggttggtttattatcaaacctgaatagctgtggtttctccagtaaatattttcttctactgaacatggagccattattaagagttgtgtgttttttattatgtacatttgtatatttttttgcttgtttgatgttctatttttctaatagttttcttttagtttcttaaagttgtgatactagatttagattctgatgctaactgcaaatcaggttggtctctgctgggtctctcctgcttttattttactttaaggacaagtgtagttgtcgtccaccacctttcaaaaaatgtgaaactgccctgcctcccctttttgctgacaacactgtgtacattgaccacttcctaccatactttatgttgtaaaatcaaactcttttgtggtacattatctcatgcttctgcaaattcga

SEQ ID NO: 37744 - DNA, 3692 bp, Homo sapiens
  misc_feature (3047)..(3047): n is a, c, g, or t
atgcgtttctggccctgacataagctgtctggcctctctgtgacatgatgaaattgaaatcaatccacagtccatgaaattgtgacactccaccagattaagttagggcataacattaacttggaaatggccatgtcatcacccctgcggctgtcctatagctgagatgcgtgggtcgcaggggaggtgatttctaggcatattgctgtcccttttgtgtatctgtcatccggatgcttcggaccccacgcctctgcaagtgggagagacccgagcatcctccccacccccatagctccagtgcacgccacccccgtcttgcctgggtcggggcctgcggccagcaccatttcacacacactccttgtagatgggagccagaggaaacctgaacgtgggtggagcgttccactgagtctacttcaggagacagaaggcccatgctgatgggggaggaggagggacgtgggcattttggacaccaggggaaatggaaatgctgctttcaaaacttagtttcctttccatttcttcctagtctggcctttgacacaaatctggtagaaagaagcctgataaattgagggcacttgtaccctccctgtgcccccagaaggttcttggagagaagtgcaagaatttgtgaacacggcggtggagggcgggtggatggccatgggctgggcctccgtatcaggcctgctcaccttgctgggagctttattctgatctcattttgaatgttccagagggagcatcataagagcccagagctccgatttccaaagagtgatattgacatttatggagattggtgttgtaacatattttgataaatactaacttattttgttggggtttggttgtctcttgtcttaggacctggtagttatttgcttgatttttttttccgttattttctacataggcaaagagaattcgagggatagacagtctccaagaaaagtgaagtggtgggagagaattgcttttttcttttttttcttttctctagtttttctttctggctgagatttccgtgcaagacagcacccaatagactatttagagttgacatttgacattttaatgggcgccatggctcattttgtagattgagaaggtgcgtctcccctgctccaagtctcatcatgacagcgtgctgacagctgggagtctgtggccttcctcacgcagaggccttaaagctggacacagaagcacgcctaggctgggcagggatgggacccatgccccctccttagaggacgggcttcctggttaggaaaggacacgtgggggtgccttgcataatagttcactggtcaccgtgcttttatgagtagtgtttttgtgcacttgccaggggttttctctctgtgtgcgaggggagtgatttaagcaatggtgtctggagtaagccttacaattttaatagactttttcttatcatatccctcatttctttccctgaaataaaaatacacacaagcaaaaaaaaaatgatagtttcacatctcttagttcccttgcccaaacaagaatattcttagttccactggccaggattttcctacatagtcagaacttacacattactagaggcacacccaccaaggagtattgtgtctacttttatctgtgcaccagccacaaatacccacattggaaagacccatttgtgatgggtaaacatcccttcctgtctcccacaacccctgtgactgccctgcatgtgttcatgacctccgaaggccctaattcatgaagcagcaaacccagcagatctccacccccctgcctcaggacctctgctgaagagggggatgaagtgggtctccagggaggcagtgggggccttgttggcagctggctcgggagccggcttacaggagggcagctctgcagttgggaggggcaccgtccggaggagaccaggcctctacacaccccccactctacttatcatccctgctcacacacccttgtccaaggctttatgcatcggatttatttttccaaatcaagaggacagtgatagatgcattttccccaggctgtctcagaaaggtcgctaaatgtatactgttgtcagaattgctgagatctccccccacttttggtttttgcagcagtaaaaactctttccactgtgacttattttctctctcaggcagccagccacctggtcccttgtgctgactctagcacagtggccaggatccaatacgagtccaggggtgaccgcaggatggtgggggcagcgggcttctccacctaccccagccaccaaggccctgacgcactgcctcctgcaccttcagcacatccctgtgcacagctggaagggtgcatggcccgctcacctttgttcagatgggtggaaacgctgatgataccagctcctccctgccgtgcccctgccacggagcaggcattgtgaactggctggtgtttgcagtcccacgtggcatggcctccagcccaacccacagtggagactggagacagggcaatgagtctggtcgggggcacgtggacatgccccataggggccccacccagacttaacaggcaaggtcctgggcattgcgcgacgcaggactcaatgctaaagcaagcctgcctggctctgtgccagggcccctcttctgatttacacatcccatttttacacagacccttccttcttaataaaggctgacagttctgttggcagccaagaacccacaccatgaagacagggagtgaggggcctttgtgcccaactccagcacagctgcgttctggggtgtgtgagaggcatgttcgtgtctgtgcgctggtggtctcgtgagacagttccgaggacggggaaattgcagggtggtgggggcgtgaggcttatatgtggaactgatgcagagttcgcctgcagacggatctggatatacactatgtataattgttacgtgtaatttaaaatatatctgtttgccatcgtcatgagaagattatatgtaaggctctgaagggagagggagatgtacattctgccaggctcctgnggaccttatccgagtcatgaaattgatgactgttgatccagtggtgcaagaagctacactccatgtgtcatcacgcttatgactcctaatgtatttttaaggcaaaaaatgtcagccgactccatcttcacccctcgattcctcgagtccagcctttctgtgccagtgcttcactgagccacaacgctctcgccatcgggacccggctgggcctggagtctcggggcacagttgccatggagccctcctgggtcattctacaaatgtgctgagtgccagctgaaaaccccacaggagatggagtaccttggccaagcttaaagagaagattttctcagggtatttattagtgtgtccagcagggtcaggaagcaggatggaaagatgcattcagactgttaatttattaacaaggcaaatgattttgtgtttcttgatgacagactattaagtttgggacttattttcccatttgagaagttataatatatatttaagatgataagtttcctgcttaagttgtgcctttcagcttcaatgagtttaaggagcactaagggtaatgataccaatgagggttggtttattatcaaacctgaatagctgtggtttctccagtaaatattttcttctactgaacatgga

SEQ ID NO: 37745 - DNA, 3657 bp, Homo sapiens
atgcgtttctggccctgacataagctgtctggcctctctgtgacatgatgaaattgaaatcaatccacagtccatgaaattgtgacactccaccagattaagttagggcataacattaacttggaaatggccatgtcatcacccctgcggctgtcctatagctgagatgcgtgggtcgcaggggaggtgatttctaggcatattgctgtcccttttgtgtatctgtcatccggatgcttcggaccccacgcctctgcaagtgggagagacccgagcatcctccccacccccatagctccagtgcacgccacccccgtcttgcctgggtcggggcctgcggccagcaccatttcacacacactccttgtagatgggagccagaggaaacctgaacgtgggtggagcgttccactgagtctacttcaggagacagaaggcccatgctgatgggggaggaggagggacgtgggcattttggacaccaggggaaatggaaatgctgctttcaaaacttagtttcctttccatttcttcctagtctggcctttgacacaaatctggtagaaagaagcctgataaattgagggcacttgtaccctccctgtgcccccagaaggttcttggagagaagtgcaagaatttgtgaacacggcggtggagggcgggtggatggccatgggctgggcctccgtatcaggcctgctcaccttgctgggagctttattctgatctcattttgaatgttccagagggagcatcataagagcccagagctccgatttccaaagagtgatattgacatttatggagattggtgttgtaacatattttgataaatactaacttattttgttggggtttggttgtctcttgtcttaggacctggtagttatttgcttgatttttttttccgttattttctacataggcaaagagaattcgagggatagacagtctccaagaaaagtgaagtggtgggagagaattgcttttttcttttttttcttttctctagtttttctttctggctgagatttccgtgcaagacagcacccaatagactatttagagttgacatttgacattttaatgggcgccatggctcattttgtagattgagaaggtgcgtctcccctgctccaagtctcatcatgacagcgtgctgacagctgggagtctgtggccttcctcacgcagaggccttaaagctggacacagaagcacgcctaggctgggcagggatgggacccatgccccctccttagaggacgggcttcctggttaggaaaggacacgtgggggtgccttgcataatagttcactggtcaccgtgcttttatgagtagtgtttttgtgcacttgccaggggttttctctctgtgtgcgaggggagtgatttaagcaatggtgtctggagtaagccttacaattttaatagactttttcttatcatatccctcatttctttccctgaaataaaaatacacacaagcaaaaaaaaaatgatagtttcacatctcttagttcccttgcccaaacaagaatattcttagttccactggccaggattttcctacatagtcagaacttacacattactagaggcacacccaccaaggagtattgtgtctacttttatctgtgcaccagccacaaatacccacattggaaagacccatttgtgatgggtaaacatcccttcctgtctcccacaacccctgtgactgccctgcatgtgttcatgacctccgaaggccctaattcatgaagcagcaaacccagcagatctccacccccctgcctcaggacctctgctgaagagggggatgaagtgggtctccagggaggcagtgggggccttgttggcagctggctcgggagccggcttacaggagggcagctctgcagttgggaggggcaccgtccggaggagaccaggcctctacacaccccccactctacttatcatccctgctcacacacccttgtccaaggctttatgcatcggatttatttttccaaatcaagaggacagtgatagatgcattttccccaggctgtctcagaaaggtcgctaaatgtatactgttgtcagaattgctgagatctccccccacttttggtttttgcagcagtaaaaactctttccactgtgacttattttctctctcaggcagccagccacctggtcccttgtgctgactctagcacagtggccaggatccaatacgagtccaggggtgaccgcaggatggtgggggcagcgggcttctccacctaccccagccaccaaggccctgacgcactgcctcctgcaccttcagcacatccctgtgcacagctggaagggtgcatggcccgctcacctttgttcagatgggtggaaacgctgatgataccagctcctccctgccgtgcccctgccacggagcaggcattgtgaactggctggtgtttgcagtcccacgtggcatggcctccagcccaacccacagtggagactggagacagggcaatgagtctggtcgggggcacgtggacatgccccataggggccccacccagacttaacaggcaaggtcctgggcattgcgcgacgcaggactcaatgctaaagcaagcctgcctggctctgtgccagggcccctcttctgatttacacatcccatttttacacagacccttccttcttaataaaggctgacagttctgttggcagccaagaacccacaccatgaagacagggagtgaggggcctttgtgcccaactccagcacagctgcgttctggggtgtgtgagaggcatgttcgtgtctgtgcgctggtggtctcgtgagacagttccgaggacggggaaattgcagggtggtgggggcgtgaggcttatatgtggaactgatgcagagttcgcctgcagacggatctggatatacactatgtataattgttacgtgtaatttaaaatatatctgtttgccatcgtcatgagaagattttctcagggtatttattagtgtgtccagcagggtcaggaagcaggatggaaagatgcattcagactgttaatttattaacaaggcaaatgattttgtgtttcttgatgacagactattaagtttgggacttattttcccatttgagaagttataatatatatttaagatgataagtttcctgcttaagttgtgcctttcagcttcaatgagtttaaggagcactaagggtaatgataccaatgagggttggtttattatcaaacctgaatagctgtggtttctccagtaaatattttcttctactgaacatggagccattattaagagttgtgtgttttttattatgtacatttgtatatttttttgcttgtttgatgttctatttttctaatagttttcttttagtttcttaaagttgtgatactagatttagattctgatgctaactgcaaatcaggttggtctctgctgggtctctcctgcttttattttactttaaggacaagtgtagttgtcgtccaccacctttcaaaaaatgtgaaactgccctgcctcccctttttgctgacaacactgtgtacattgaccacttcctaccatactttatgttgtaaaatcaaactcttttgtggtacattatctcatgcttctgcaaattcga

SEQ ID NO: 37746 - DNA, 1494 bp, Homo sapiens
atgcgtttctggccctgacataagctgtctggcctctctgtgacatgatgaaattgaaatcaatccacagtccatgaaattgtgacactccaccagattaagttagggcataacattaacttggaaatggccatgtcatcacccctgcggctgtcctatagctgagatgcgtgggtcgcaggggaggtgatttctaggcatattgctgtcccttttgtgtatctgtcatccggatgcttcggaccccacgcctctgcaagtgggagagacccgagcatcctccccacccccatagctccagtgcacgccacccccgtcttgcctgggtcggggcctgcggccagcaccatttcacacacactccttgtagatgggagccagaggaaacctgaacgtgggtggagcgttccactgagtctacttcaggagacagaaggcccatgctgatgggggaggaggagggacgtgggcattttggacaccaggggaaatggaaatgctgctttcaaaacttagtttcctttccatttcttcctagtctggcctttgacacaaatctggtagaaagaagcctgataaattgagggcacttgtaccctccctgtgcccccagaaggttcttggagagaagtgcaagaatttgtgaacacggcggtggagggcgggtggatggccatgggctgggcctccgtatcaggcctgctcaccttgctgggagctttattctgatctcattttgaatgttccagagggagcatcataagagcccagagctccgatttccaaagagtgatattgacatttatggagattggtgttgtaacatattttgataaatactaacttattttgttggggtttggttgtctcttgtcttaggacctggtagttatttgcttgatttttttttccgttattttctacataggcaaagagaattcgagggatagacagtctccaagaaaagtgaagtggtgggagagaattgcttttttcttttttttcttttctctagtttttctttctggctgagatttccgtgcaagacagcacccaatagactatttagagttgacatttgacattttaatgggcgccatggctcattttgtagattgagaaggtgcgtctcccctgctccaagtctcatcatgacagcgtgctgacagctgggagtctgtggccttcctcacgcagaggccttaaagctggacacagaagcacgcctaggctgggcagggatgggacccatgccccctccttagaggacgggcttcctggttaggaaaggacacgtgggggtgccttgcataatagttcactggtcaccgtgcttttatgagtagtgtttttgtgcacttgccaggggttttctctctgtgtgcgaggggagtgatttaagcaatggtgtctggagtaagccttacaattttaatagactttttcttatcatatccctcatttctttccctgaaataaaaatacacacaagca

SEQ ID NO: 37747 - DNA, 686 bp, Homo sapiens
gccggacgaactcagagtgtcttcctcctccacaaacaatcctgcttatctcctcaggagagaagcaggatggaaagatgcattcagactgttaatttattaacaaggcaaatgattttgtgtttcttgatgacagactattaagtttgggacttattttcccatttgagaagttataatatatatttaagatgataagtttcctgcttaagttgtgcctttcagcttcaatgagtttaaggagcactaagggtaatgataccaatgagggttggtttattatcaaacctgaatagctgtggtttctccagtaaatattttcttctactgaacatggagccattattaagagttgtgtgttttttattatgtacatttgtatatttttttgcttgtttgatgttctatttttctaatagttttcttttagtttcttaaagttgtgatactagatttagattctgatgctaactgcaaatcaggttggtctctgctgggtctctcctgcttttattttactttaaggacaagtgtagttgtcgtccaccacctttcaaaaaatgtgaaactgccctgcctcccctttttgctgacaacactgtgtacattgaccacttcctaccatactttatgttgtaaaatcaaactcttttgtggtacattatctcatgcttctgcaaattcga

SEQ ID NO: 37748 - DNA, 1058 bp, Homo sapiens
  misc_feature (3)..(3): n is a, c, g, or t
  misc_feature (906)..(906): n is a, c, g, or t
  misc_feature (1031)..(1031): n is a, c, g, or t
ganaattaggctaggtacgaggctgggtgttaatcggccgaggcaatgacatccgcgtgctggcacaggagagggtggcctggaggagatggtggaggagctcaacagcgggaaggtgatgtacgccttctgcagagtgaaggaccccaactctggactgcccaaatttgtcctcatcaactggacaggcgagggcgtgaacgatgtgcggaagggagcctgtgccagccacgtcagcaccatggccagcttcctgaagggggcccatgtgaccatcaacgcacgggccgaggaggatgtggagcctgagtgcatcatggagaaggtggccaaggcttcaggtgccaactacagctttcacaaggagagtggccgcttccaggacgtgggaccccaggccccagtgggctctgtgtaccagaagaccaatgccgtgtctgagattaaaagggttggtaaagacagcttctgggccaaagcagagaaggaggaggagaaccgtcggctggaggaaaagcggcgggccgaggaggcacagcggcagctggagcaggagcgccgggagcgtgagctgcgtgaggctgcacgccgggagcagcgctatcaggagcagggtggcgaggccagcccccagaggacgtgggagcagcagcaagaagtggtttcaaggaaccgaaatgagcaggagtctgccgtgcacccgagggagattttcaagcagaaggagagggccatgtccaccacctccatctccagtcctcagcctggcaagctgaggagccccttcctgcagaagcagctcacccaaccagagacccactttggcagagagccagctgctgccatctcaaggcccagggcagagatctcctgtgaggagcgggccgatctcctgttggggggcgnaagggggggtttgacccccgcggggtttttgggccccgtgtggagggtggtgtggctacacactgcgggcggggggtgcgccgcttatgagcggagatttgcccaccggcggcagggggcggcangggtgtctctcttctcgatgtataggc

SEQ ID NO: 37749 - DNA, 778 bp, Homo sapiens
gtggaaatgaccctgtttttatttccagaattacctctgggtttagagaagtggtttttaaacgagtgtgggtaaaaaaaattacctgaggtacttgtcagaatcgcagacttctaggtcccacccagctctcatcaatcagtttagtgagggtggtgcccaggactctgattttaaacatacccctagaaagattctgatacaggtagaggtgagaagccctggtttagaagcagctcggcctcccttcatggtgggaccagggccagcagggaatgtcagggccacccctgaccttcactgtgactctgctgcagagagggtggcctggaggagatggtggaggagctcaacagcgggaaggtgatgtacgccttctgcagagtgaaggaccccaactctggactgcccaaatttgtcctcatcaactgggtatgtggagcctgtttcatctaggtgtgacccaggaaaccccattgtcttctttcctgttttgacttgacttcaggaacaaagtgttttactggcatgacttagtagatcaatagaacagctctgagctggtgaatgagcagaatagttgacagattcattgtggcccaaagaataactgtggctttgctatgcagaattcaccttccaagcctagagttcttcctgcaaaatggattaaaagcagtcacagggagtccttgctccgtgctcttgagggtggttgttctgatggagtagagagcctgagggagtgtttaggagcctgggagtacagggacagggc

SEQ ID NO: 37750 - DNA, 2858 bp, Homo sapiens
taagggggccgggggggcccgggggcggggcgggcgggtcctgagccggaacgggccagcgctgcaagaggcctacgtgcgggtggtcaccgagaagtccccgaccgactgggctctctttacctatgaaggcaacagcaatgacatccgcgtggctggcacaggggagggtggcctggaggagatggtggaggagctcaacagcgggaaggtgatgtacgccttctgcagagtgaaggaccccaactctggactgcccaaatttgtcctcatcaactggacaggcgagggcgtgaacgatgtgcggaagggagcctgtgccagccacgtcagcaccatggccagcttcctgaagggggcccatgtgaccatcaacgcacgggccgaggaggatgtggagcctgagtgcatcatggagaaggtggccaaggcttcaggtgccaactacagctttcacaaggagagtggccgcttccaggacgtgggaccccaggccccagtgggctctgtgtaccagaagaccaatgccgtgtctgagattaaaagggttggtaaagacagcttctgggccaaagcagagaaggaggaggagaaccgtcggctggaggaaaagcggcgggccgaggaggcacagcggcagctggagcaggagcgccgggagcgtgagctgcgtgaggctgcacgccgggagcagcgctatcaggagcagggtggcgaggccagcccccagaggacgtgggagcagcagcaagaagtggtttcaaggaaccgaaatgagcaggagtctgccgtgcacccgagggagattttcaagcagaaggagagggccatgtccaccacctccatctccagtcctcagcctggcaagctgaggagccccttcctgcagaagcagctcacccaaccagagacccactttggcagagagccagctgctgccatctcaaggcccagggcagatctccctgctgaggagccggcgcccagcactcctccatgtctggtgcaggcagaagaggaggctgtgtatgaggaacctccagagcaggagaccttctacgagcagcccccactggtgcagcagcaaggtgctggctctgagcacattgaccaccacattcagggccaggggctcagtgggcaagggctctgtgcccgtgccctgtacgactaccaggcagccgacgacacagagatctcctttgaccccgagaacctcatcacgggcatcgaggtgatcgacgaaggctggtggcgtggctatgggccggatggccattttggcatgttccctgccaactacgtggagctcattgagtgaggctgagggcacatcttgcccttcccctctcagacatggcttccttattgctggaagaggaggcctgggagttgacattcagcactcttccaggaataggacccccagtgaggatgaggcctcagggctccctccggcttggcagactcagcctgtcaccccaaatgcagcaatggcctggtgattcccacacatccttcctgcatcccccgaccctcccagacagcttggctcttgcccctgacaggatactgagccaagccctgcctgtggccaagccctgagtggccactgccaagctgcggggaagggtcctgagcaggggcatctgggaggctctggctgccttctgcatttatttgccttttttctttttctcttgcttctaaggggtggtggccaccactgtttagaatgacccttgggaacagtgaacgtagagaattgtttttagcagagtttgtgaccaaagtcagagtggatcatggtggtttggcagcagggaatttgtcttgttggagcctgctctgtgctccccactccatttctctgtccctctgcctgggctatgggaagtggggatgcagatggccaagctcccaccctgggtattcaaaaacggcagacacaacatgttcctccacgcggctcactcgatgcctgcaggccccagtgtgtgcctcaactgattctgacttcaggaaaagtaacacagagtggccttggcctgttgtcttcccctattttctgtcccagctcatccgtgtctctgaagaacaaatatgcttttggaccacgaaaaaaaaaaacaaaaccaaaaatctccgcaggcaacccatataatgcagtacgaggacacaaacaggcacagagaagagcgacaacatgggccacaaaagaggaacccaggaaccaaacatgaacagagaaaaccagagggacaaaacaagcagcagcacacacaaatagagaggaaccgaaacaacaagacacgaaatacacagccgcggatatacaccccgtagcaacaaacatggacttccccggagagagcattcacgcagtactatcgtcgctcgaacacagacatacagaagaatgcaacaaagacaagacaagacaagacgaagaccacgaaagcaaccaagaagctcagaacaagcccgcacagactccgacaacaccagagaacacaaaaacacaacacagagacataaacataaacagtgcaatgaaacaacaactagctatcacttatgcagcagagggaagggcagaggggagactgaaaaagaagagaggcaaagcaggcgggagaagcggtgcggcggtgggcgcagggagagggagagttggcagtggatatacgagaggagaagtgacgaagatagagagaggaagagggagagctagcagacaacacggagaggaaagaaagcgaagtgagaaagaggaaggagagagtcgcgaggaaggggtgaggggggaagagagagaggaccgggcaggcggcggaggcggcgagagagtgagagaa

SEQ ID NO: 37751 - DNA, 3043 bp, Homo sapiens
aggtttgtagcggtgtgatcgtcacttagcactcatttattcgtgtattcatacatttatgcatgtttctttcacagatcaaactgttgagggtccacaaacaggctgaagacctcgtctggagggagactgcagtgaacccaagatcgttcaaataagcgcatcgacataacaagatttagaaaagaataagcacggtgctgtgagagcagctagcgggggctggactgggtccctgcggccaggcttccaagtcgagctgccgtttgggtgggaccagaagacgggctagtctgcgccccaggatccctccctgaggacaaacagaaggccgggtcctcccttctcccgcttgtccttcggcattcgcgggacctgcatgctagaccagctggccggacagctcgctaggacccgcgggtgcggctggcccctgccatttccgcttcctgccgtggggcggggtttccggatgtcggaggcgaggcttgtcggctgtcaaaggggcggcccggccgggcccggaagctacagcagcggcgcggagactgcggggcgggccatggcggcgaacctgagccggaacgggccagcgctgcaagaggcctacgtgcgggtggtcaccgagaagtccccgaccgactgggctctctttacctatgaaggcaacagcaatgacatccgcgtggctggcacaggggagggtggcctggaggagatggtggaggagctcaacagcgggaaggtgatgtacgccttctgcagagtgaaggaccccaactctggactgcccaaatttgtcctcatcaactggacaggcgagggcgtgaacgatgtgcggaagggagcctgtgccagccacgtcagcaccatggccagcttcctgaagggggcccatgtgaccatcaacgcacgggccgaggaggatgtggagcctgagtgcatcatggagaaggtggccaaggcttcaggtgccaactacagctttcacaaggagagtggccgcttccaggacgtgggaccccaggccccagtgggctctgtgtaccagaagaccaatgccgtgtctgagattaaaagggttggtaaagacagcttctgggccaaagcagagaaggaggaggagaaccgtcggctggaggaaaagcggcgggccgaggaggcacagcggcagctggagcaggagcgccgggagcgtgagctgcgtgaggctgcacgccgggagcagcgctatcaggagcagggtggcgaggccagcccccagaggacgtgggagcagcagcaagaagtggtttcaaggaaccgaaatgagcaggagtctgccgtgcacccgagggagattttcaagcagaaggagagggccatgtccaccacctccatctccagtcctcagcctggcaagctgaggagccccttcctgcagaagcagctcacccaaccagagacccactttggcagagagccagctgctgccatctcaaggcccagggcagatctccctgctgaggagccggcgcccagcactcctccatgtctggtgcaggcagaagaggaggctgtgtatgaggaacctccagagcaggagaccttctacgagcagcccccactggtgcagcagcaaggtgctggctctgagcacattgaccaccacattcagggccaggggctcagtgggcaagggctctgtgcccgtgccctgtacgactaccaggcagccgacgacacagagatctcctttgaccccgagaacctcatcacgggcatcgaggtgatcgacgaaggctggtggcgtggctatgggccggatggccattttggcatgttccctgccaactacgtggagctcattgagtgaggctgagggcacatcttgcccttcccctctcagacatggcttccttattgctggaagaggaggcctgggagttgacattcagcactcttccaggaataggacccccagtgaggatgaggcctcagggctccctccggcttggcagactcagcctgtcaccccaaatgcagcaatggcctggtgattcccacacatccttcctgcatcccccgaccctcccagacagcttggctcttgcccctgacaggatactgagccaagccctgcctgtggccaagccctgagtggccactgccaagctgcggggaagggtcctgagcaggggcatctgggaggctctggctgccttctgcatttatttgccttttttctttttctcttgcttctaaggggtggtggccaccactgtttagaatgacccttgggaacagtgaacgtagagaattgtttttagcagagtttgtgaccaaagtcagagtggatcatggtggtttggcagcagggaatttgtcttgttggagcctgctctgtgctccccactccatttctctgtccctctgcctgggctatgggaagtggggatgcagatggccaagctcccaccctgggtattcaaaaacggcagacacaacatgttcctccacgcggctcactcgatgcctgcaggccccagtgtgtgcctcaactgattctgacttcaggaaaagtaacacagagtggcctaaaaaaaaaaaaaaaaaaaaaaaaaaaaaaaaaaaaaaaagaaaaaaaaaaaaagaagaaaaaaaaaaaagaagaagaacaaaacaacagaaaaaacaacgaggcgcggcggcggcgcgcgcggccaacatacgatcctccgccacggaggcggcagcccaaagaacacgagcgccccacgccgaaagatatcaagacgacaagcagggagcccaccacacggaggacgggcggcgggggctagatgcaccagaacgacagacgagcggagcggcgggggcgtagccggaatacaaaccgacgggcacggacggaggacgggagaggcagacaaagaggacggcgacaacgagtgagtcgaggaaaaacacgaatgaggaggacaaacgagccacccacagtgcccgtgagggggggagggcggacggagacaacaaagagagcagcgcagggcgacgcccgaag

SEQ ID NO: 37752 - DNA, 3010 bp, Homo sapiens
gtggaaatgaccctgtttttatttccagaattacctctgggtttagagaagtggtttttaaacgagtgtgggtaaaaaaaattacctgaggtacttgtcagaatcgcagacttctaggtcccacccagctctcatcaatcagtttagtgagggtggtgcccaggactctgattttaaacatacccctagaaagattctgatacaggtagaggtgagaagccctggtttagaagcagctcggcctcccttcatggtgggaccagggccagcagggaatgtcagggccacccctgaccttcactgtgactctgctgcagagagggtggcctggaggagatggtggaggagctcaacagcgggaaggtgatgtacgccttctgcagagtgaaggaccccaactctggactgcccaaatttgtcctcatcaactggacaggcgagggcgtgaacgatgtgcggaagggagcctgtgccagccacgtcagcaccatggccagcttcctgaagggggcccatgtgaccatcaacgcacgggccgaggaggatgtggagcctgagtgcatcatggagaaggtggccaaggcttcaggtgccaactacagctttcacaaggagagtggccgcttccaggacgtgggaccccaggccccagtgggctctgtgtaccagaagaccaatgccgtgtctgagattaaaagggttggtaaagacagcttctgggccaaagcagagaaggaggaggagaaccgtcggctggaggaaaagcggcgggccgaggaggcacagcggcagctggagcaggagcgccgggagcgtgagctgcgtgaggctgcacgccgggagcagcgctatcaggagcagggtggcgaggccagcccccagaggacgtgggagcagcagcaagaagtggtttcaaggaaccgaaatgagcaggagtctgccgtgcacccgagggagattttcaagcagaaggagagggccatgtccaccacctccatctccagtcctcagcctggcaagctgaggagccccttcctgcagaagcagctcacccaaccagagacccactttggcagagagccagctgctgccatctcaaggcccagggcagatctccctgctgaggagccggcgcccagcactcctccatgtctggtgcaggcagaagaggaggctgtgtatgaggaacctccagagcaggagaccttctacgagcagcccccactggtgcagcagcaaggtgctggctctgagcacattgaccaccacattcagggccaggggctcagtgggcaagggctctgtgcccgtgccctgtacgactaccaggcagccgacgacacagagatctcctttgaccccgagaacctcatcacgggcatcgaggtgatcgacgaaggctggtggcgtggctatgggccggatggccattttggcatgttccctgccaactacgtggagctcattgagtgaggctgagggcacatcttgcccttcccctctcagacatggcttccttattgctggaagaggaggcctgggagttgacattcagcactcttccaggaataggacccccagtgaggatgaggcctcagggctccctccggcttggcagactcagcctgtcaccccaaatgcagcaatggcctggtgattcccacacatccttcctgcatcccccgaccctcccagacagcttggctcttgcccctgacaggatactgagccaagccctgcctgtggccaagccctgagtggccactgccaagctgcggggaagggtcctgagcaggggcatctgggaggctctggctgccttctgcatttatttgccttttttctttttctcttgcttctaaggggtggtggccaccactgtttagaatgacccttgggaacagtgaacgtagagaattgtttttagcagagtttgtgaccaaagtcagagtggatcatggtggtttggcagcagggaatttgtcttgttggagcctgctctgtgctccccactccatttctctgtccctctgcctgggctatgggaagtggggatgcagatggccaagctcccaccctgggtattcaaaaacggcagacacaacatgttcctccacgcggctcactcgatgcctgcaggccccagtgtgtgcctcaactgattctgacttcaggaaaagtaacacagagtggccttggcctgttgtcttcccctattttctgtcccagctcatccgtgtctctgaagaacaaatatgcttttggaccacgaaaaaaaaaaacaaaaccaaaaatctccgcaggcaacccatataatgcagtacgaggacacaaacaggcacagagaagagcgacaacatgggccacaaaagaggaacccaggaaccaaacatgaacagagaaaaccagagggacaaaacaagcagcagcacacacaaatagagaggaaccgaaacaacaagacacgaaatacacagccgcggatatacaccccgtagcaacaaacatggacttccccggagagagcattcacgcagtactatcgtcgctcgaacacagacatacagaagaatgcaacaaagacaagacaagacaagacgaagaccacgaaagcaaccaagaagctcagaacaagcccgcacagactccgacaacaccagagaacacaaaaacacaacacagagacataaacataaacagtgcaatgaaacaacaactagctatcacttatgcagcagagggaagggcagaggggagactgaaaaagaagagaggcaaagcaggcgggagaagcggtgcggcggtgggcgcagggagagggagagttggcagtggatatacgagaggagaagtgacgaagatagagagaggaagagggagagctagcagacaacacggagaggaaagaaagcgaagtgagaaagaggaaggagagagtcgcgaggaaggggtgaggggggaagagagagaggaccgggcaggcggcggaggcggcgagagagtgagagaa

SEQ ID NO: 37753 - DNA, 3416 bp, Homo sapiens
aggtttgtagcggtgtgatcgtcacttagcactcatttattcgtgtattcatacatttatgcatgtttctttcacagatcaaactgttgagggtccacaaacaggctgaagacctcgtctggagggagactgcagtgaacccaagatcgttcaaataagcgcatcgacataacaagatttagaaaagaataagcacggtgctgtgagagcagctagcgggggctggactgggtccctgcggccaggcttccaagtcgagctgccgtttgggtgggaccagaagacgggctagtctgcgccccaggatccctccctgaggacaaacagaaggccgggtcctcccttctcccgcttgtccttcggcattcgcgggacctgcatgctagaccagctggccggacagctcgctaggacccgcgggtgcggctggcccctgccatttccgcttcctgccgtggggcggggtttccggatgtcggaggcgaggcttgtcggctgtcaaaggggcggcccggccgggcccggaagctacagcagcggcgcggagactgcggggcgggccatggcggcgaacctgagccggaacgggccagcgctgcaagaggcctacgtgcgggtggtcaccgagaagtccccgaccgactgggctctctttacctatgaaggcaacagcaatgacatccgcgtggctggcacaggggagggtggcctggaggagatggtggaggagctcaacagcgggaaggtgatgtacgccttctgcagagtgaaggaccccaactctggactgcccaaatttgtcctcatcaactggacaggcgagggcgtgaacgatgtgcggaagggagcctgtgccagccacgtcagcaccatggccagcttcctgaagggggcccatgtgaccatcaacgcacgggccgaggaggatgtggagcctgagtgcatcatggagaaggtggccaaggcttcaggtgccaactacagctttcacaaggagagtggccgcttccaggacgtgggaccccaggccccagtgggctctgtgtaccagaagaccaatgccgtgtctgagattaaaagggttggtaaagacagcttctgggccaaagcagagaaggaggaggagaaccgtcggctggaggaaaagcggcgggccgaggaggcacagcggcagctggagcaggagcgccgggagcgtgagctgcgtgaggctgcacgccgggagcagcgctatcaggagcagggtggcgaggccagcccccagaggacgtgggagcagcagcaagaagtggtttcaaggaaccgaaatgagcaggggtcaacatgtgcttccctccaggagtctgccgtgcacccgagggagattttcaagcagaaggagagggccatgtccaccacctccatctccagtcctcagcctggcaagctgaggagccccttcctgcagaagcagctcacccaaccagagacccactttggcagagagccagctgctgccatctcaaggcccagggcagatctccctgctgaggagccggcgcccagcactcctccatgtctggtgcaggcagaagaggaggctgtgtatgaggaacctccagagcaggagaccttctacgagcagcccccactggtgcagcagcaaggtgctggctctgagcacattgaccaccacattcagggccaggggctcagtgggcaagggctctgtgcccgtgccctgtacgactaccaggcagccgacgacacagagatctcctttgaccccgagaacctcatcacgggcatcgaggtgatcgacgaaggctggtggcgtggctatgggccggatggccattttggcatgttccctgccaactacgtggagctcattgagtgaggctgagggcacatcttgcccttcccctctcagacatggcttccttattgctggaagaggaggcctgggagttgacattcagcactcttccaggaataggacccccagtgaggatgaggcctcagggctccctccggcttggcagactcagcctgtcaccccaaatgcagcaatggcctggtgattcccacacatccttcctgcatcccccgaccctcccagacagcttggctcttgcccctgacaggatactgagccaagccctgcctgtggccaagccctgagtggccactgccaagctgcggggaagggtcctgagcaggggcatctgggaggctctggctgccttctgcatttatttgccttttttctttttctcttgcttctaaggggtggtggccaccactgtttagaatgacccttgggaacagtgaacgtagagaattgtttttagcagagtttgtgaccaaagtcagagtggatcatggtggtttggcagcagggaatttgtcttgttggagcctgctctgtgctccccactccatttctctgtccctctgcctgggctatgggaagtggggatgcagatggccaagctcccaccctgggtattcaaaaacggcagacacaacatgttcctccacgcggctcactcgatgcctgcaggccccagtgtgtgcctcaactgattctgacttcaggaaaagtaacacagagtggccttggcctgttgtcttcccctattttctgtcccagctcatccgtgtctctgaagaacaaatatgcttttggaccacgaaaaaaaaaaacaaaaccaaaaatctccgcaggcaacccatataatgcagtacgaggacacaaacaggcacagagaagagcgacaacatgggccacaaaagaggaacccaggaaccaaacatgaacagagaaaaccagagggacaaaacaagcagcagcacacacaaatagagaggaaccgaaacaacaagacacgaaatacacagccgcggatatacaccccgtagcaacaaacatggacttccccggagagagcattcacgcagtactatcgtcgctcgaacacagacatacagaagaatgcaacaaagacaagacaagacaagacgaagaccacgaaagcaaccaagaagctcagaacaagcccgcacagactccgacaacaccagagaacacaaaaacacaacacagagacataaacataaacagtgcaatgaaacaacaactagctatcacttatgcagcagagggaagggcagaggggagactgaaaaagaagagaggcaaagcaggcgggagaagcggtgcggcggtgggcgcagggagagggagagttggcagtggatatacgagaggagaagtgacgaagatagagagaggaagagggagagctagcagacaacacggagaggaaagaaagcgaagtgagaaagaggaaggagagagtcgcgaggaaggggtgaggggggaagagagagaggaccgggcaggcggcggaggcggcgagagagtgagagaa

SEQ ID NO: 37754 - DNA, 2398 bp, Homo sapiens
  misc_feature (2383)..(2383): n is a, c, g, or t
aggtttgtagcggtgtgatcgtcacttagcactcatttattcgtgtattcatacatttatgcatgtttctttcacagatcaaactgttgagggtccacaaacaggctgaagacctcgtctggagggagactgcagtgaacccaagatcgttcaaataagcgcatcgacataacaagatttagaaaagaataagcacggtgctgtgagagcagctagcgggggctggactgggtccctgcggccaggcttccaagtcgagctgccgtttgggtgggaccagaagacgggctagtctgcgccccaggatccctccctgaggacaaacagaaggccgggtcctcccttctcccgcttgtccttcggcattcgcgggacctgcatgctagaccagctggccggacagctcgctaggacccgcgggtgcggctggcccctgccatttccgcttcctgccgtggggcggggtttccggatgtcggaggcgaggcttgtcggctgtcaaaggggcggcccggccgggcccggaagctacagcagcggcgcggagactgcggggcgggccatggcggcgaacctgagccggaacgggccagcgctgcaagaggcctacgtgcgggtggtcaccgagaagtccccgaccgactgggctctctttacctatgaaggcaacagcaatgacatccgcgtggctggcacaggggagggtggcctggaggagatggtggaggagctcaacagcgggaaggtgatgtacgccttctgcagagtgaaggaccccaactctggactgcccaaatttgtcctcatcaactggacaggcgagggcgtgaacgatgtgcggaagggagcctgtgccagccacgtcagcaccatggccagcttcctgaagggggcccatgtgaccatcaacgcacgggccgaggaggatgtggagcctgagtgcatcatggagaaggtggccaaggcttcaggtgccaactacagctttcacaaggagagtggccgcttccaggacgtgggaccccaggccccagtgggctctgtgtaccagaagaccaatgccgtgtctgagattaaaagggttggtaaagacagcttctgggccaaagcagagaaggaggaggagaaccgtcggctggaggaaaagcggcgggccgaggaggcacagcggcagctggagcaggagcgccgggagcgtgagctgcgtgaggctgcacgccgggagcagcgctatcaggagcagggtggcgaggccagcccccagaggacgtgggagcagcagcaagaagtggtttcaaggaaccgaaatgagcaggagtctgccgtgcacccgagggagattttcaagcagaaggagagggccatgtccaccacctccatctccagtcctcagcctggcaagctgaggagccccttcctgcagaagcagctcacccaaccagagacccactttggcagagagccagctgctgccatctcaaggcccagggcagatctccctgctgaggagccggcgcccagcactcctccatgtctggtgcaggcagaagaggaggctgtgtatgaggaacctccagagcaggagaccttctacgagcagcccccactggtgcagcagcaaggtgctggctctgagcacattgaccaccacattcagggccaggggctcagtgggcaagggctctgtgcccgtgccctgtacgactaccaggcagccgacgacacagagatctcctttgaccccgagaacctcatcacgggcatcgaggtgatcgacgaaggctggtggcgtggctatgggccggatggccattttggcatgttccctgccaactacgtggagctcattgagtgaggctgagggcacatcttgcccttcccctctcagacatggcttccttattgctggaagaggaggcctgggagttgacattcagcactcttccaggaataggacccccagtgaggatgaggcctcagggctccctccggcttggcagactcagcctgtcaccccaaatgcagcaatggcctggtgattcccacacatccttcctgcatcccccgaccctcccagacagcttggctcttgcccctgacaggatactgagccaagccctgcctgtggccaagccctgagtggccactgccaagctgcggggaagggtcctgagcaggggcatctgggaggctctggctgccttctgcatttatttgccttttttctttttctcttgcttctaaggggtggtggccaccactgtttagaatgacccttgggaacagtgaacgtagagaattgtttttagcagagtttgtgaccaaagtcagagtggatcatggtggtttggcagcagggaatttttgagtgaatgggatcctntagatcaccgcgcag

SEQ ID NO: 37755 - DNA, 2601 bp, Homo sapiens
ggctggtaccggccggaagtcttacaggcgagggcgtgaacgatgtgcggaagggagcctgtgccagccacgtcagcaccatggccagcttcctgaagggggcccatgtgaccatcaacgcacgggccgaggaggatgtggagcctgagtgcatcatggagaaggtggccaaggcttcaggtgccaactacagctttcacaaggagagtggccgcttccaggacgtgggaccccaggccccagtgggctctgtgtaccagaagaccaatgccgtgtctgagattaaaagggttggtaaagacagcttctgggccaaagcagagaaggaggaggagaaccgtcggctggaggaaaagcggcgggccgaggaggcacagcggcagctggagcaggagcgccgggagcgtgagctgcgtgaggctgcacgccgggagcagcgctatcaggagcagggtggcgaggccagcccccagaggacgtgggagcagcagcaagaagtggtttcaaggaaccgaaatgagcaggagtctgccgtgcacccgagggagattttcaagcagaaggagagggccatgtccaccacctccatctccagtcctcagcctggcaagctgaggagccccttcctgcagaagcagctcacccaaccagagacccactttggcagagagccagctgctgccatctcaaggcccagggcagatctccctgctgaggagccggcgcccagcactcctccatgtctggtgcaggcagaagaggaggctgtgtatgaggaacctccagagcaggagaccttctacgagcagcccccactggtgcagcagcaaggtgctggctctgagcacattgaccaccacattcagggccaggggctcagtgggcaagggctctgtgcccgtgccctgtacgactaccaggcagccgacgacacagagatctcctttgaccccgagaacctcatcacgggcatcgaggtgatcgacgaaggctggtggcgtggctatgggccggatggccattttggcatgttccctgccaactacgtggagctcattgagtgaggctgagggcacatcttgcccttcccctctcagacatggcttccttattgctggaagaggaggcctgggagttgacattcagcactcttccaggaataggacccccagtgaggatgaggcctcagggctccctccggcttggcagactcagcctgtcaccccaaatgcagcaatggcctggtgattcccacacatccttcctgcatcccccgaccctcccagacagcttggctcttgcccctgacaggatactgagccaagccctgcctgtggccaagccctgagtggccactgccaagctgcggggaagggtcctgagcaggggcatctgggaggctctggctgccttctgcatttatttgccttttttctttttctcttgcttctaaggggtggtggccaccactgtttagaatgacccttgggaacagtgaacgtagagaattgtttttagcagagtttgtgaccaaagtcagagtggatcatggtggtttggcagcagggaatttgtcttgttggagcctgctctgtgctccccactccatttctctgtccctctgcctgggctatgggaagtggggatgcagatggccaagctcccaccctgggtattcaaaaacggcagacacaacatgttcctccacgcggctcactcgatgcctgcaggccccagtgtgtgcctcaactgattctgacttcaggaaaagtaacacagagtggccttggcctgttgtcttcccctattttctgtcccagctcatccgtgtctctgaagaacaaatatgcttttggaccacgaaaaaaaaaaacaaaaccaaaaatctccgcaggcaacccatataatgcagtacgaggacacaaacaggcacagagaagagcgacaacatgggccacaaaagaggaacccaggaaccaaacatgaacagagaaaaccagagggacaaaacaagcagcagcacacacaaatagagaggaaccgaaacaacaagacacgaaatacacagccgcggatatacaccccgtagcaacaaacatggacttccccggagagagcattcacgcagtactatcgtcgctcgaacacagacatacagaagaatgcaacaaagacaagacaagacaagacgaagaccacgaaagcaaccaagaagctcagaacaagcccgcacagactccgacaacaccagagaacacaaaaacacaacacagagacataaacataaacagtgcaatgaaacaacaactagctatcacttatgcagcagagggaagggcagaggggagactgaaaaagaagagaggcaaagcaggcgggagaagcggtgcggcggtgggcgcagggagagggagagttggcagtggatatacgagaggagaagtgacgaagatagagagaggaagagggagagctagcagacaacacggagaggaaagaaagcgaagtgagaaagaggaaggagagagtcgcgaggaaggggtgaggggggaagagagagaggaccgggcaggcggcggaggcggcgagagagtgagagaa

SEQ ID NO: 37756 - DNA, 3296 bp, Homo sapiens
aggtttgtagcggtgtgatcgtcacttagcactcatttattcgtgtattcatacatttatgcatgtttctttcacagatcaaactgttgagggtccacaaacaggctgaagacctcgtctggagggagactgcagtgaacccaagatcgttcaaataagcgcatcgacataacaagatttagaaaagaataagcacggtgctgtgagagcagctagcgggggctggactgggtccctgcggccaggcttccaagtcgagctgccgtttgggtgggaccagaagacgggctagtctgcgccccaggatccctccctgaggacaaacagaaggccgggtcctcccttctcccgcttgtccttcggcattcgcgggacctgcatgctagaccagctggccggacagctcgctaggacccgcgggtgcggctggcccctgccatttccgcttcctgccgtggggcggggtttccggatgtcggaggcgaggcttgtcggctgtcaaaggggcggcccggccgggcccggaagctacagcagcggcgcggagactgcggggcgggccatggcggcgaacctgagccggaacgggccagcgctgcaagaggcctacgtgcgggtggtcaccgagaagtccccgaccgactgggctctctttacctatgaaggcaacagcaatgacatccgcgtggctggcacaggggagggtggcctggaggagatggtggaggagctcaacagcgggaaggtgatgtacgccttctgcagagtgaaggaccccaactctggactgcccaaatttgtcctcatcaactggacaggcgagggcgtgaacgatgtgcggaagggagcctgtgccagccacgtcagcaccatggccagcttcctgaagggggcccatgtgaccatcaacgcacgggccgaggaggatgtggagcctgagtgcatcatggagaaggtggccaaggcttcaggtgccaactacagctttcacaaggagagtggccgcttccaggacgtgggaccccaggccccagtgggctctgtgtaccagaagaccaatgccgtgtctgagattaaaagggttggtaaagacagcttctgggccaaagcagagaaggaggaggagaaccgtcggctggaggaaaagcggcgggccgaggaggcacagcggcagctggagcaggagcgccgggagcgtgagctgcgtgaggctgcacgccgggagcagcgctatcaggagcagggtggcgaggccagcccccagaggacgtgggagcagcagcaagaagtggtttcaaggaaccgaaatgagcaggagtctgccgtgcacccgagggagattttcaagcagaaggagagggccatgtccaccacctccatctccagtcctcagcctgatctccctgctgaggagccggcgcccagcactcctccatgtctggtgcaggcagaagaggaggctgtgtatgaggaacctccagagcaggagaccttctacgagcagcccccactggtgcagcagcaaggtgctggctctgagcacattgaccaccacattcagggccaggggctcagtgggcaagggctctgtgcccgtgccctgtacgactaccaggcagccgacgacacagagatctcctttgaccccgagaacctcatcacgggcatcgaggtgatcgacgaaggctggtggcgtggctatgggccggatggccattttggcatgttccctgccaactacgtggagctcattgagtgaggctgagggcacatcttgcccttcccctctcagacatggcttccttattgctggaagaggaggcctgggagttgacattcagcactcttccaggaataggacccccagtgaggatgaggcctcagggctccctccggcttggcagactcagcctgtcaccccaaatgcagcaatggcctggtgattcccacacatccttcctgcatcccccgaccctcccagacagcttggctcttgcccctgacaggatactgagccaagccctgcctgtggccaagccctgagtggccactgccaagctgcggggaagggtcctgagcaggggcatctgggaggctctggctgccttctgcatttatttgccttttttctttttctcttgcttctaaggggtggtggccaccactgtttagaatgacccttgggaacagtgaacgtagagaattgtttttagcagagtttgtgaccaaagtcagagtggatcatggtggtttggcagcagggaatttgtcttgttggagcctgctctgtgctccccactccatttctctgtccctctgcctgggctatgggaagtggggatgcagatggccaagctcccaccctgggtattcaaaaacggcagacacaacatgttcctccacgcggctcactcgatgcctgcaggccccagtgtgtgcctcaactgattctgacttcaggaaaagtaacacagagtggccttggcctgttgtcttcccctattttctgtcccagctcatccgtgtctctgaagaacaaatatgcttttggaccacgaaaaaaaaaaacaaaaccaaaaatctccgcaggcaacccatataatgcagtacgaggacacaaacaggcacagagaagagcgacaacatgggccacaaaagaggaacccaggaaccaaacatgaacagagaaaaccagagggacaaaacaagcagcagcacacacaaatagagaggaaccgaaacaacaagacacgaaatacacagccgcggatatacaccccgtagcaacaaacatggacttccccggagagagcattcacgcagtactatcgtcgctcgaacacagacatacagaagaatgcaacaaagacaagacaagacaagacgaagaccacgaaagcaaccaagaagctcagaacaagcccgcacagactccgacaacaccagagaacacaaaaacacaacacagagacataaacataaacagtgcaatgaaacaacaactagctatcacttatgcagcagagggaagggcagaggggagactgaaaaagaagagaggcaaagcaggcgggagaagcggtgcggcggtgggcgcagggagagggagagttggcagtggatatacgagaggagaagtgacgaagatagagagaggaagagggagagctagcagacaacacggagaggaaagaaagcgaagtgagaaagaggaaggagagagtcgcgaggaaggggtgaggggggaagagagagaggaccgggcaggcggcggaggcggcgagagagtgagagaa

SEQ ID NO: 37757 - DNA, 2092 bp, Homo sapiens
aggtttgtagcggtgtgatcgtcacttagcactcatttattcgtgtattcatacatttatgcatgtttctttcacagatcaaactgttgagggtccacaaacaggctgaagacctcgtctggagggagactgcagtgaacccaagatcgttcaaataagcgcatcgacataacaagatttagaaaagaataagcacggtgctgtgagagcagctagcgggggctggactgggtccctgcggccaggcttccaagtcgagctgccgtttgggtgggaccagaagacgggctagtctgcgccccaggatccctccctgaggacaaacagaaggccgggtcctcccttctcccgcttgtccttcggcattcgcgggacctgcatgctagaccagctggccggacagctcgctaggacccgcgggtgcggctggcccctgccatttccgcttcctgccgtggggcggggtttccggatgtcggaggcgaggcttgtcggctgtcaaaggggcggcccggccgggcccggaagctacagcagcggcgcggagactgcggggcgggccatggcggcgaacctgagccggaacgggccagcgctgcaagaggcctacgtgcgggtggtcaccgagaagtccccgaccgactgggctctctttacctatgaaggcaacagcaatgacatccgcgtggctggcacaggggagggtggcctggaggagatggtggaggagctcaacagcgggaaggtgatgtacgccttctgcagagtgaaggaccccaactctggactgcccaaatttgtcctcatcaactggacaggcgagggcgtgaacgatgtgcggaagggagcctgtgccagccacgtcagcaccatggccagcttcctgaagggggcccatgtgaccatcaacgcacgggccgaggaggatgtggagcctgagtgcatcatggagaaggtggccaaggcttcaggtgccaactacagctttcacaaggagagtggccgcttccaggacgtgggaccccaggccccagtgggctctgtgtaccagaagaccaatgccgtgtctgagattaaaagggttggtaaagacagcttctgggccaaagcagagaaggaggaggagaaccgtcggctggaggaaaagcggcgggccgaggaggcacagcggcagctggagcaggagcgccgggagcgtgagctgcgtgaggctgcacgccgggagcagcgctatcaggagcagggtggcgaggccagcccccagaggacgtgggagcagcagcaagaagtggtttcaaggaaccgaaatgagcaggagtctgccgtgcacccgagggagattttcaagcagaaggagagggccatgtccaccacctccatctccagtcctcagcctggcaagctgaggagccccttcctgcagaagcagctcacccaaccagagacccactttggcagagagccagctgctgccatctcaaggcccagggcagatctccctgctgaggagccggcgcccagcactcctccatgtctggtgcaggcagaagaggaggctgtgtatgaggaacctccagagcaggagaccttctacgagcagcccccactggtgcagcagcaaggtgctggctctgagcacattgaccaccacattcagggccaggggctcagtgggcaagggctctgtgcccgtgccctgtacgactaccaggcagccgacgacacagagatctcctttgaccccgagaacctcatcacgggcatcgaggtgatcgacgaaggctggtggcgtggctatgggccggatggccattttggcatgttccctgccaactacgtggagctcattgagtgaggctgagggcacatcttgcccttcccctctcagacatggcttccttattgctggaagaggaggcctgggagttgacattcagcactcttccaggaataggacccccagtgaggatgaggcctcagggctccctccggcttggcagactcagcctgtcaccccaaatgcagcaatggcctggtgattcccaccaccccttagaagcagagaaaaagaaaaaggcaaataaatgcagaa

SEQ ID NO: 37758 - DNA, 2832 bp, Homo sapiens
  misc_feature (44)..(44): n is a, c, g, or t
  misc_feature (106)..(106): n is a, c, g, or t
  misc_feature (126)..(126): n is a, c, g, or t
  misc_feature (129)..(129): n is a, c, g, or t
  misc_feature (132)..(132): n is a, c, g, or t
  misc_feature (138)..(141): n is a, c, g, or t
  misc_feature (144)..(145): n is a, c, g, or t
  misc_feature (147)..(148): n is a, c, g, or t
  misc_feature (152)..(152): n is a, c, g, or t
  misc_feature (155)..(156): n is a, c, g, or t
  misc_feature (158)..(158): n is a, c, g, or t
  misc_feature (161)..(162): n is a, c, g, or t
  misc_feature (164)..(165): n is a, c, g, or t
  misc_feature (168)..(168): n is a, c, g, or t
  misc_feature (180)..(182): n is a, c, g, or t
  misc_feature (185)..(186): n is a, c, g, or t
  misc_feature (188)..(188): n is a, c, g, or t
  misc_feature (195)..(195): n is a, c, g, or t
  misc_feature (213)..(213): n is a, c, g, or t
  misc_feature (226)..(226): n is a, c, g, or t
  misc_feature (254)..(254): n is a, c, g, or t
  misc_feature (261)..(261): n is a, c, g, or t
  misc_feature (276)..(276): n is a, c, g, or t
  misc_feature (278)..(278): n is a, c, g, or t
  misc_feature (285)..(286): n is a, c, g, or t
  misc_feature (294)..(294): n is a, c, g, or t
  misc_feature (315)..(315): n is a, c, g, or t
  misc_feature (330)..(332): n is a, c, g, or t
  misc_feature (355)..(357): n is a, c, g, or t
  misc_feature (360)..(360): n is a, c, g, or t
  misc_feature (363)..(363): n is a, c, g, or t
  misc_feature (396)..(396): n is a, c, g, or t
  misc_feature (399)..(399): n is a, c, g, or t
  misc_feature (405)..(405): n is a, c, g, or t
  misc_feature (412)..(412): n is a, c, g, or t
  misc_feature (459)..(459): n is a, c, g, or t
  misc_feature (506)..(506): n is a, c, g, or t
ccatttcttctaaccttatccttaacttccatctcttcaatatncctacttatctttttttcaccgataattcccctacctacttttctctctttacctattaatncaacagcaattacatcctcnttnctngcacannnnatnntnncctntannanatnntnnatnagctcaacagcnnnaanntnatttacnccttcttcataattaagnaccccaactcttnacttcccaaatttttcctcatcaacttnacatgcnatggcttaaacaatntncggaatnnaacctttnccatccacgtcaacaccattnccatcttccttaagnnngcccattttaccatcaactcacnnnccnatnattatttttatccttaattcatcatttataaanttnccaatncttcatnttccaactacatctttcacaattatattttcctcttccattacattngaccccaaaccccatttttctctttttaccaaaaaaccaattccttntcttatattaaaattttttttaaaaacaacttctgggccaaatcagagaaggaggaggagaaccgtcggctggaggaaaagcggcgggccgaggaggcacagcggcagctggagcaggagcgccgggagcgtgagctgcgtgaggctgcacgccgggagcagcgctatcaggagcagggtggcgaggccagcccccagaggacgtgggagcagcagcaagaagtggtttcaaggaaccgaaatgagcaggagtctgccgtgcacccgagggagattttcaagcagaaggagagggccatgtccaccacctccatctccagtcctcagcctggcaagctgaggagccccttcctgcagaagcagctcacccaaccagagacccactttggcagagagccagctgctgccatctcaaggcccagggcagatctccctgctgaggagccggcgcccagcactcctccatgtctggtgcaggcagaagaggaggctgtgtatgaggaacctccagagcaggagaccttctacgagcagcccccactggtgcagcagcaaggtgctggctctgagcacattgaccaccacattcagggccaggggctcagtgggcaagggctctgtgcccgtgccctgtacgactaccaggcagccgacgacacagagatctcctttgaccccgagaacctcatcacgggcatcgaggtgatcgacgaaggctggtggcgtggctatgggccggatggccattttggcatgttccctgccaactacgtggagctcattgagtgaggctgagggcacatcttgcccttcccctctcagacatggcttccttattgctggaagaggaggcctgggagttgacattcagcactcttccaggaataggacccccagtgaggatgaggcctcagggctccctccggcttggcagactcagcctgtcaccccaaatgcagcaatggcctggtgattcccacacatccttcctgcatcccccgaccctcccagacagcttggctcttgcccctgacaggatactgagccaagccctgcctgtggccaagccctgagtggccactgccaagctgcggggaagggtcctgagcaggggcatctgggaggctctggctgccttctgcatttatttgccttttttctttttctcttgcttctaaggggtggtggccaccactgtttagaatgacccttgggaacagtgaacgtagagaattgtttttagcagagtttgtgaccaaagtcagagtggatcatggtggtttggcagcagggaatttgtcttgttggagcctgctctgtgctccccactccatttctctgtccctctgcctgggctatgggaagtggggatgcagatggccaagctcccaccctgggtattcaaaaacggcagacacaacatgttcctccacgcggctcactcgatgcctgcaggccccagtgtgtgcctcaactgattctgacttcaggaaaagtaacacagagtggccttggcctgttgtcttcccctattttctgtcccagctcatccgtgtctctgaagaacaaatatgcttttggaccacgaaaaaaaaaaacaaaaccaaaaatctccgcaggcaacccatataatgcagtacgaggacacaaacaggcacagagaagagcgacaacatgggccacaaaagaggaacccaggaaccaaacatgaacagagaaaaccagagggacaaaacaagcagcagcacacacaaatagagaggaaccgaaacaacaagacacgaaatacacagccgcggatatacaccccgtagcaacaaacatggacttccccggagagagcattcacgcagtactatcgtcgctcgaacacagacatacagaagaatgcaacaaagacaagacaagacaagacgaagaccacgaaagcaaccaagaagctcagaacaagcccgcacagactccgacaacaccagagaacacaaaaacacaacacagagacataaacataaacagtgcaatgaaacaacaactagctatcacttatgcagcagagggaagggcagaggggagactgaaaaagaagagaggcaaagcaggcgggagaagcggtgcggcggtgggcgcagggagagggagagttggcagtggatatacgagaggagaagtgacgaagatagagagaggaagagggagagctagcagacaacacggagaggaaagaaagcgaagtgagaaagaggaaggagagagtcgcgaggaaggggtgaggggggaagagagagaggaccgggcaggcggcggaggcggcgagagagtgagagaa

SEQ ID NO: 37759 - DNA, 2292 bp, Homo sapiens
ggctcccacttggttgcaagtgtagacaccgccttgctctggaaaagcggcgggccgaggaggcacagcggcagctggagcaggagcgccgggagcgtgagctgcgtgaggctgcacgccgggagcagcgctatcaggagcagggtggcgaggccagcccccagaggacgtgggagcagcagcaagaagtggtttcaaggaaccgaaatgagcaggagtctgccgtgcacccgagggagattttcaagcagaaggagagggccatgtccaccacctccatctccagtcctcagcctggcaagctgaggagccccttcctgcagaagcagctcacccaaccagagacccactttggcagagagccagctgctgccatctcaaggcccagggcagatctccctgctgaggagccggcgcccagcactcctccatgtctggtgcaggcagaagaggaggctgtgtatgaggaacctccagagcaggagaccttctacgagcagcccccactggtgcagcagcaaggtgctggctctgagcacattgaccaccacattcagggccaggggctcagtgggcaagggctctgtgcccgtgccctgtacgactaccaggcagccgacgacacagagatctcctttgaccccgagaacctcatcacgggcatcgaggtgatcgacgaaggctggtggcgtggctatgggccggatggccattttggcatgttccctgccaactacgtggagctcattgagtgaggctgagggcacatcttgcccttcccctctcagacatggcttccttattgctggaagaggaggcctgggagttgacattcagcactcttccaggaataggacccccagtgaggatgaggcctcagggctccctccggcttggcagactcagcctgtcaccccaaatgcagcaatggcctggtgattcccacacatccttcctgcatcccccgaccctcccagacagcttggctcttgcccctgacaggatactgagccaagccctgcctgtggccaagccctgagtggccactgccaagctgcggggaagggtcctgagcaggggcatctgggaggctctggctgccttctgcatttatttgccttttttctttttctcttgcttctaaggggtggtggccaccactgtttagaatgacccttgggaacagtgaacgtagagaattgtttttagcagagtttgtgaccaaagtcagagtggatcatggtggtttggcagcagggaatttgtcttgttggagcctgctctgtgctccccactccatttctctgtccctctgcctgggctatgggaagtggggatgcagatggccaagctcccaccctgggtattcaaaaacggcagacacaacatgttcctccacgcggctcactcgatgcctgcaggccccagtgtgtgcctcaactgattctgacttcaggaaaagtaacacagagtggccttggcctgttgtcttcccctattttctgtcccagctcatccgtgtctctgaagaacaaatatgcttttggaccacgaaaaaaaaaaacaaaaccaaaaatctccgcaggcaacccatataatgcagtacgaggacacaaacaggcacagagaagagcgacaacatgggccacaaaagaggaacccaggaaccaaacatgaacagagaaaaccagagggacaaaacaagcagcagcacacacaaatagagaggaaccgaaacaacaagacacgaaatacacagccgcggatatacaccccgtagcaacaaacatggacttccccggagagagcattcacgcagtactatcgtcgctcgaacacagacatacagaagaatgcaacaaagacaagacaagacaagacgaagaccacgaaagcaaccaagaagctcagaacaagcccgcacagactccgacaacaccagagaacacaaaaacacaacacagagacataaacataaacagtgcaatgaaacaacaactagctatcacttatgcagcagagggaagggcagaggggagactgaaaaagaagagaggcaaagcaggcgggagaagcggtgcggcggtgggcgcagggagagggagagttggcagtggatatacgagaggagaagtgacgaagatagagagaggaagagggagagctagcagacaacacggagaggaaagaaagcgaagtgagaaagaggaaggagagagtcgcgaggaaggggtgaggggggaagagagagaggaccgggcaggcggcggaggcggcgagagagtgagagaa

SEQ ID NO: 37760 - DNA, 2375 bp, Homo sapiens
cggaccgcgtgggctttttatctgatctgagattaaaagggttggtaaagacagcttctgggccaaagcagagaaggaggaggagaaccgtcggctggaggaaaagcggcgggccgaggaggcacagcggcagctggagcaggagcgccgggagcgtgagctgcgtgaggctgcacgccgggagcagcgctatcaggagcagggtggcgaggccagcccccagaggacgtgggagcagcagcaagaagtggtttcaaggaaccgaaatgagcaggggtcaacatgtgcttccctccaggagtctgccgtgcacccgagggagattttcaagcagaaggagagggccatgtccaccacctccatctccagtcctcagcctggcaagctgaggagccccttcctgcagaagcagctcacccaaccagagacccactttggcagagagccagctgctgccatctcaaggcccagggcagatctccctgctgaggagccggcgcccagcactcctccatgtctggtgcaggcagaagaggaggctgtgtatgaggaacctccagagcaggagaccttctacgagcagcccccactggtgcagcagcaaggtgctggctctgagcacattgaccaccacattcagggccaggggctcagtgggcaagggctctgtgcccgtgccctgtacgactaccaggcagccgacgacacagagatctcctttgaccccgagaacctcatcacgggcatcgaggtgatcgacgaaggctggtggcgtggctatgggccggatggccattttggcatgttccctgccaactacgtggagctcattgagtgaggctgagggcacatcttgcccttcccctctcagacatggcttccttattgctggaagaggaggcctgggagttgacattcagcactcttccaggaataggacccccagtgaggatgaggcctcagggctccctccggcttggcagactcagcctgtcaccccaaatgcagcaatggcctggtgattcccacacatccttcctgcatcccccgaccctcccagacagcttggctcttgcccctgacaggatactgagccaagccctgcctgtggccaagccctgagtggccactgccaagctgcggggaagggtcctgagcaggggcatctgggaggctctggctgccttctgcatttatttgccttttttctttttctcttgcttctaaggggtggtggccaccactgtttagaatgacccttgggaacagtgaacgtagagaattgtttttagcagagtttgtgaccaaagtcagagtggatcatggtggtttggcagcagggaatttgtcttgttggagcctgctctgtgctccccactccatttctctgtccctctgcctgggctatgggaagtggggatgcagatggccaagctcccaccctgggtattcaaaaacggcagacacaacatgttcctccacgcggctcactcgatgcctgcaggccccagtgtgtgcctcaactgattctgacttcaggaaaagtaacacagagtggccttggcctgttgtcttcccctattttctgtcccagctcatccgtgtctctgaagaacaaatatgcttttggaccacgaaaaaaaaaaacaaaaccaaaaatctccgcaggcaacccatataatgcagtacgaggacacaaacaggcacagagaagagcgacaacatgggccacaaaagaggaacccaggaaccaaacatgaacagagaaaaccagagggacaaaacaagcagcagcacacacaaatagagaggaaccgaaacaacaagacacgaaatacacagccgcggatatacaccccgtagcaacaaacatggacttccccggagagagcattcacgcagtactatcgtcgctcgaacacagacatacagaagaatgcaacaaagacaagacaagacaagacgaagaccacgaaagcaaccaagaagctcagaacaagcccgcacagactccgacaacaccagagaacacaaaaacacaacacagagacataaacataaacagtgcaatgaaacaacaactagctatcacttatgcagcagagggaagggcagaggggagactgaaaaagaagagaggcaaagcaggcgggagaagcggtgcggcggtgggcgcagggagagggagagttggcagtggatatacgagaggagaagtgacgaagatagagagaggaagagggagagctagcagacaacacggagaggaaagaaagcgaagtgagaaagaggaaggagagagtcgcgaggaaggggtgaggggggaagagagagaggaccgggcaggcggcggaggcggcgagagagtgagagaa

SEQ ID NO: 37761 - DNA, 1688 bp, Homo sapiens
  misc_feature (1536)..(1536): n is a, c, g, or t
  misc_feature (1661)..(1661): n is a, c, g, or t
aggtttgtagcggtgtgatcgtcacttagcactcatttattcgtgtattcatacatttatgcatgtttctttcacagatcaaactgttgagggtccacaaacaggctgaagacctcgtctggagggagactgcagtgaacccaagatcgttcaaataagcgcatcgacataacaagatttagaaaagaataagcacggtgctgtgagagcagctagcgggggctggactgggtccctgcggccaggcttccaagtcgagctgccgtttgggtgggaccagaagacgggctagtctgcgccccaggatccctccctgaggacaaacagaaggccgggtcctcccttctcccgcttgtccttcggcattcgcgggacctgcatgctagaccagctggccggacagctcgctaggacccgcgggtgcggctggcccctgccatttccgcttcctgccgtggggcggggtttccggatgtcggaggcgaggcttgtcggctgtcaaaggggcggcccggccgggcccggaagctacagcagcggcgcggagactgcggggcgggccatggcggcgaacctgagccggaacgggccagcgctgcaagaggcctacgtgcgggtggtcaccgagaagtccccgaccgactgggctctctttacctatgaaggcaacagcaatgacatccgcgtggctggcacaggggagggtggcctggaggagatggtggaggagctcaacagcgggaaggtgatgtacgccttctgcagagtgaaggaccccaactctggactgcccaaatttgtcctcatcaactggacaggcgagggcgtgaacgatgtgcggaagggagcctgtgccagccacgtcagcaccatggccagcttcctgaagggggcccatgtgaccatcaacgcacgggccgaggaggatgtggagcctgagtgcatcatggagaaggtggccaaggcttcaggtgccaactacagctttcacaaggagagtggccgcttccaggacgtgggaccccaggccccagtgggctctgtgtaccagaagaccaatgccgtgtctgagattaaaagggttggtaaagacagcttctgggccaaagcagagaaggaggaggagaaccgtcggctggaggaaaagcggcgggccgaggaggcacagcggcagctggagcaggagcgccgggagcgtgagctgcgtgaggctgcacgccgggagcagcgctatcaggagcagggtggcgaggccagcccccagaggacgtgggagcagcagcaagaagtggtttcaaggaaccgaaatgagcaggagtctgccgtgcacccgagggagattttcaagcagaaggagagggccatgtccaccacctccatctccagtcctcagcctggcaagctgaggagccccttcctgcagaagcagctcacccaaccagagacccactttggcagagagccagctgctgccatctcaaggcccagggcagagatctcctgtgaggagcgggccgatctcctgttggggggcgnaagggggggtttgacccccgcggggtttttgggccccgtgtggagggtggtgtggctacacactgcgggcggggggtgcgccgcttatgagcggagatttgcccaccggcggcagggggcggcangggtgtctctcttctcgatgtataggc

SEQ ID NO: 37762 - DNA, 1652 bp, Homo sapiens
atatgagtctagcaagccggagagagcctgaggcctcatcctcaccggggcagtttatgggccggatggccattttggcatgttccctgccaactacgtggagctcattgagtgaggctgagggcacatcttgcccttcccctctcagacatggcttccttattgctggaagaggaggcctgggagttgacattcagcactcttccaggaataggacccccagtgaggatgaggcctcagggctccctccggcttggcagactcagcctgtcaccccaaatgcagcaatggcctggtgattcccacacatccttcctgcatcccccgaccctcccagacagcttggctcttgcccctgacaggatactgagccaagccctgcctgtggccaagccctgagtggccactgccaagctgcggggaagggtcctgagcaggggcatctgggaggctctggctgccttctgcatttatttgccttttttctttttctcttgcttctaaggggtggtggccaccactgtttagaatgacccttgggaacagtgaacgtagagaattgtttttagcagagtttgtgaccaaagtcagagtggatcatggtggtttggcagcagggaatttgtcttgttggagcctgctctgtgctccccactccatttctctgtccctctgcctgggctatgggaagtggggatgcagatggccaagctcccaccctgggtattcaaaaacggcagacacaacatgttcctccacgcggctcactcgatgcctgcaggccccagtgtgtgcctcaactgattctgacttcaggaaaagtaacacagagtggccttggcctgttgtcttcccctattttctgtcccagctcatccgtgtctctgaagaacaaatatgcttttggaccacgaaaaaaaaaaacaaaaccaaaaatctccgcaggcaacccatataatgcagtacgaggacacaaacaggcacagagaagagcgacaacatgggccacaaaagaggaacccaggaaccaaacatgaacagagaaaaccagagggacaaaacaagcagcagcacacacaaatagagaggaaccgaaacaacaagacacgaaatacacagccgcggatatacaccccgtagcaacaaacatggacttccccggagagagcattcacgcagtactatcgtcgctcgaacacagacatacagaagaatgcaacaaagacaagacaagacaagacgaagaccacgaaagcaaccaagaagctcagaacaagcccgcacagactccgacaacaccagagaacacaaaaacacaacacagagacataaacataaacagtgcaatgaaacaacaactagctatcacttatgcagcagagggaagggcagaggggagactgaaaaagaagagaggcaaagcaggcgggagaagcggtgcggcggtgggcgcagggagagggagagttggcagtggatatacgagaggagaagtgacgaagatagagagaggaagagggagagctagcagacaacacggagaggaaagaaagcgaagtgagaaagaggaaggagagagtcgcgaggaaggggtgaggggggaagagagagaggaccgggcaggcggcggaggcggcgagagagtgagagaa

SEQ ID NO: 37763 - DNA, 1497 bp, Homo sapiens
actgcatcagaaaggccattgctgcatttggttgacattcagcactcttccaggaataggacccccagtgaggatgaggcctcagggctccctccggcttggcagactcagcctgtcaccccaaatgcagcaatggcctggtgattcccacacatccttcctgcatcccccgaccctcccagacagcttggctcttgcccctgacaggatactgagccaagccctgcctgtggccaagccctgagtggccactgccaagctgcggggaagggtcctgagcaggggcatctgggaggctctggctgccttctgcatttatttgccttttttctttttctcttgcttctaaggggtggtggccaccactgtttagaatgacccttgggaacagtgaacgtagagaattgtttttagcagagtttgtgaccaaagtcagagtggatcatggtggtttggcagcagggaatttgtcttgttggagcctgctctgtgctccccactccatttctctgtccctctgcctgggctatgggaagtggggatgcagatggccaagctcccaccctgggtattcaaaaacggcagacacaacatgttcctccacgcggctcactcgatgcctgcaggccccagtgtgtgcctcaactgattctgacttcaggaaaagtaacacagagtggccttggcctgttgtcttcccctattttctgtcccagctcatccgtgtctctgaagaacaaatatgcttttggaccacgaaaaaaaaaaacaaaaccaaaaatctccgcaggcaacccatataatgcagtacgaggacacaaacaggcacagagaagagcgacaacatgggccacaaaagaggaacccaggaaccaaacatgaacagagaaaaccagagggacaaaacaagcagcagcacacacaaatagagaggaaccgaaacaacaagacacgaaatacacagccgcggatatacaccccgtagcaacaaacatggacttccccggagagagcattcacgcagtactatcgtcgctcgaacacagacatacagaagaatgcaacaaagacaagacaagacaagacgaagaccacgaaagcaaccaagaagctcagaacaagcccgcacagactccgacaacaccagagaacacaaaaacacaacacagagacataaacataaacagtgcaatgaaacaacaactagctatcacttatgcagcagagggaagggcagaggggagactgaaaaagaagagaggcaaagcaggcgggagaagcggtgcggcggtgggcgcagggagagggagagttggcagtggatatacgagaggagaagtgacgaagatagagagaggaagagggagagctagcagacaacacggagaggaaagaaagcgaagtgagaaagaggaaggagagagtcgcgaggaaggggtgaggggggaagagagagaggaccgggcaggcggcggaggcggcgagagagtgagagaa

SEQ ID NO: 37764 - DNA, 1468 bp, Homo sapiens
gctggtaccgaccggagtgtaaggatccaggacccccagtgaggatgaggcctcagggctccctccggcttggcagactcagcctgtcaccccaaatgcagcaatggcctggtgattcccacacatccttcctgcatcccccgaccctcccagacagcttggctcttgcccctgacaggatactgagccaagccctgcctgtggccaagccctgagtggccactgccaagctgcggggaagggtcctgagcaggggcatctgggaggctctggctgccttctgcatttatttgccttttttctttttctcttgcttctaaggggtggtggccaccactgtttagaatgacccttgggaacagtgaacgtagagaattgtttttagcagagtttgtgaccaaagtcagagtggatcatggtggtttggcagcagggaatttgtcttgttggagcctgctctgtgctccccactccatttctctgtccctctgcctgggctatgggaagtggggatgcagatggccaagctcccaccctgggtattcaaaaacggcagacacaacatgttcctccacgcggctcactcgatgcctgcaggccccagtgtgtgcctcaactgattctgacttcaggaaaagtaacacagagtggccttggcctgttgtcttcccctattttctgtcccagctcatccgtgtctctgaagaacaaatatgcttttggaccacgaaaaaaaaaaacaaaaccaaaaatctccgcaggcaacccatataatgcagtacgaggacacaaacaggcacagagaagagcgacaacatgggccacaaaagaggaacccaggaaccaaacatgaacagagaaaaccagagggacaaaacaagcagcagcacacacaaatagagaggaaccgaaacaacaagacacgaaatacacagccgcggatatacaccccgtagcaacaaacatggacttccccggagagagcattcacgcagtactatcgtcgctcgaacacagacatacagaagaatgcaacaaagacaagacaagacaagacgaagaccacgaaagcaaccaagaagctcagaacaagcccgcacagactccgacaacaccagagaacacaaaaacacaacacagagacataaacataaacagtgcaatgaaacaacaactagctatcacttatgcagcagagggaagggcagaggggagactgaaaaagaagagaggcaaagcaggcgggagaagcggtgcggcggtgggcgcagggagagggagagttggcagtggatatacgagaggagaagtgacgaagatagagagaggaagagggagagctagcagacaacacggagaggaaagaaagcgaagtgagaaagaggaaggagagagtcgcgaggaaggggtgaggggggaagagagagaggaccgggcaggcggcggaggcggcgagagagtgagagaa

SEQ ID NO: 37765 - DNA, 1162 bp, Homo sapiens
aggtttgtagcggtgtgatcgtcacttagcactcatttattcgtgtattcatacatttatgcatgtttctttcacagatcaaactgttgagggtccacaaacaggctgaagacctcgtctggagggagactgcagtgaacccaagatcgttcaaataagcgcatcgacataacaagatttagaaaagaataagcacggtgctgtgagagcagctagcgggggctggactgggtccctgcggccaggcttccaagtcgagctgccgtttgggtgggaccagaagacgggctagtctgcgccccaggatccctccctgaggacaaacagaaggccgggtcctcccttctcccgcttgtccttcggcattcgcgggacctgcatgctagaccagctggccggacagctcgctaggacccgcgggtgcggctggcccctgccatttccgcttcctgccgtggggcggggtttccggatgtcggaggcgaggcttgtcggctgtcaaaggggcggcccggccgggcccggaagctacagcagcggcgcggagactgcggggcgggccatggcggcgaacctgagccggaacgggccagcgctgcaagaggcctacgtgcgggtggtcaccgagaagtccccgaccgactgagggtggcctggaggagatggtggaggagctcaacagcgggaaggtgatgtacgccttctgcagagtgaaggaccccaactctggactgcccaaatttgtcctcatcaactggacaggcgagggcgtgaacgatgtgcggaagggagcctgtgccagccacgtcagcaccatggccagcttcctgaagggggcccatgtgaccatcaacgcacgggccgaggaggatgtggagcctgagtgcatcatggagaaggtggccaaggcttcaggtgccaactacagctttcacaaggagagtggccgcttccaggacgtgggaccccaggccccagtgggctctgtgtaccagaagaccaatgccgtgtctgagattaaaagggttggtaaagacagcttctgggccaaagcagagatggtcacactgaggctcgggtaagttaagccacaaggctaatgatcgactggctctggtgcccgtctttggccatgtgcctaaaactcagtcctgggcagggg

SEQ ID NO: 37766 - DNA, 1514 bp, Homo sapiens
gtggaaatgaccctgtttttatttccagaattacctctgggtttagagaagtggtttttaaacgagtgtgggtaaaaaaaattacctgaggtacttgtcagaatcgcagacttctaggtcccacccagctctcatcaatcagtttagtgagggtggtgcccaggactctgattttaaacatacccctagaaagattctgatacaggtagaggtgagaagccctggtttagaagcagctcggcctcccttcatggtgggaccagggccagcagggaatgtcagggccacccctgaccttcactgtgactctgctgcagagagggtggcctggaggagatggtggaggagctcaacagcgggaaggtgatgtacgccttctgcagagtgaaggaccccaactctggactgcccaaatttgtcctcatcaactggacaggcgagggcgtgaacgatgtgcggaagggagcctgtgccagccacgtcagcaccatggccagcttcctgaagggggcccatgtgaccatcaacgcacgggccgaggaggatgtggagcctgagtgcatcatggagaaggtggccaaggcttcaggtgccaactacagctttcacaaggagagtggccgcttccaggacgtgggaccccaggccccagtgtgcctcaactgattctgacttcaggaaaagtaacacagagtggccttggcctgttgtcttcccctattttctgtcccagctcatccgtgtctctgaagaacaaatatgcttttggaccacgaaaaaaaaaaacaaaaccaaaaatctccgcaggcaacccatataatgcagtacgaggacacaaacaggcacagagaagagcgacaacatgggccacaaaagaggaacccaggaaccaaacatgaacagagaaaaccagagggacaaaacaagcagcagcacacacaaatagagaggaaccgaaacaacaagacacgaaatacacagccgcggatatacaccccgtagcaacaaacatggacttccccggagagagcattcacgcagtactatcgtcgctcgaacacagacatacagaagaatgcaacaaagacaagacaagacaagacgaagaccacgaaagcaaccaagaagctcagaacaagcccgcacagactccgacaacaccagagaacacaaaaacacaacacagagacataaacataaacagtgcaatgaaacaacaactagctatcacttatgcagcagagggaagggcagaggggagactgaaaaagaagagaggcaaagcaggcgggagaagcggtgcggcggtgggcgcagggagagggagagttggcagtggatatacgagaggagaagtgacgaagatagagagaggaagagggagagctagcagacaacacggagaggaaagaaagcgaagtgagaaagaggaaggagagagtcgcgaggaaggggtgaggggggaagagagagaggaccgggcaggcggcggaggcggcgagagagtgagagaa

SEQ ID NO: 37767 - DNA, 1205 bp, Homo sapiens
aggtttgtagcggtgtgatcgtcacttagcactcatttattcgtgtattcatacatttatgcatgtttctttcacagatcaaactgttgagggtccacaaacaggctgaagacctcgtctggagggagactgcagtgaacccaagatcgttcaaataagcgcatcgacataacaagatttagaaaagaataagcacggtgctgtgagagcagctagcgggggctggactgggtccctgcggccaggcttccaagtcgagctgccgtttgggtgggaccagaagacgggctagtctgcgccccaggatccctccctgaggacaaacagaaggccgggtcctcccttctcccgcttgtccttcggcattcgcgggacctgcatgctagaccagctggccggacagctcgctaggacccgcgggtgcggctggcccctgccatttccgcttcctgccgtggggcggggtttccggatgtcggaggcgaggcttgtcggctgtcaaaggggcggcccggccgggcccggaagctacagcagcggcgcggagactgcggggcgggccatggcggcgaacctgagccggaacgggccagcgctgcaagaggcctacgtgcgggtggtcaccgagaagtccccgaccgactggtgggcggcgagacgggccagggtcgggccagggctgcctcagggggctctctttacctatgaaggcaacagcaatgacatccgcgtggctggcacaggggagggtggcctggaggagatggtggaggagctcaacagcgggaaggtgatgtacgccttctgcagagtgaaggaccccaactctggactgcccaaatttgtcctcatcaactgggtatgtggagcctgtttcatctaggtgtgacccaggaaaccccattgtcttctttcctgttttgacttgacttcaggaacaaagtgttttactggcatgacttagtagatcaatagaacagctctgagctggtgaatgagcagaatagttgacagattcattgtggcccaaagaataactgtggctttgctatgcagaattcaccttccaagcctagagttcttcctgcaaaatggattaaaagcagtcacagggagtccttgctccgtgctcttgagggtggttgttctgatggagtagagagcctgagggagtgtttaggagcctgggagtacagggacagggc

SEQ ID NO: 37768 - DNA, 337 bp, Homo sapiens
atgcctgcaggccccagtgtgtgcctcaactgattctgacttcaggaaaagtaacacagagtggccttggcctgttgtcttcccctattttctgtcccagctcatccgtgtctctgaagaacaaatatgcttttggaccacgaaattcccagtttggtctacacaggctcgcagctctcacctgtcctgctgtagcctgaatgctcccatgtgggaatagcaccccaccacctgcccagtgtctgcctctgctccgtgtctggggtgagcaccctcaccctgagactgtggctgatgatgatcagccaccaggaagaggctaaatgttaagatggga

SEQ ID NO: 37769 - DNA, 3392 bp, Homo sapiens
aggtttgtagcggtgtgatcgtcacttagcactcatttattcgtgtattcatacatttatgcatgtttctttcacagatcaaactgttgagggtccacaaacaggctgaagacctcgtctggagggagactgcagtgaacccaagatcgttcaaataagcgcatcgacataacaagatttagaaaagaataagcacggtgctgtgagagcagctagcgggggctggactgggtccctgcggccaggcttccaagtcgagctgccgtttgggtgggaccagaagacgggctagtctgcgccccaggatccctccctgaggacaaacagaaggccgggtcctcccttctcccgcttgtccttcggcattcgcgggacctgcatgctagaccagctggccggacagctcgctaggacccgcgggtgcggctggcccctgccatttccgcttcctgccgtggggcggggtttccggatgtcggaggcgaggcttgtcggctgtcaaaggggcggcccggccgggcccggaagctacagcagcggcgcggagactgcggggcgggccatggcggcgaacctgagccggaacgggccagcgctgcaagaggcctacgtgcgggtggtcaccgagaagtccccgaccgactgggctctctttacctatgaaggcaacagcaatgacatccgcgtggctggcacaggggagggtggcctggaggagatggtggaggagctcaacagcgggaaggtgatgtacgccttctgcagagtgaaggaccccaactctggactgcccaaatttgtcctcatcaactggacaggcgagggcgtgaacgatgtgcggaagggagcctgtgccagccacgtcagcaccatggccagcttcctgaagggggcccatgtgaccatcaacgcacgggccgaggaggatgtggagcctgagtgcatcatggagaaggtggccaaggcttcaggtgccaactacagctttcacaaggagagtggccgcttccaggacgtgggaccccaggccccagtgggctctgtgtaccagaagaccaatgccgtgtctgagattaaaagggttggtaaagacagcttctgggccaaagcagagaaggaggaggagaaccgtcggctggaggaaaagcggcgggccgaggaggcacagcggcagctggagcaggagcgccgggagcgtgagctgcgtgaggctgcacgccgggagcagcgctatcaggagcagggtggcgaggccagcccccagaggacgtgggagcagcagcaagaagtggtttcaaggaaccgaaatgagcaggagtctgccgtgcacccgagggagattttcaagcagaaggagagggccatgtccaccacctccatctccagtcctcagcctggcaagctgaggagccccttcctgcagaagcagctcacccaaccagagacccactttggcagagagccagctgctgccatctcaaggcccagggcagatctccctgctgaggagccggcgcccagcactcctccatgtctggtgcaggcagaagaggaggctgtgtatgaggaacctccagagcaggagaccttctacgagcagcccccactggtgcagcagcaaggtgctggctctgagcacattgaccaccacattcagggccaggggctcagtgggcaagggctctgtgcccgtgccctgtacgactaccaggcagccgacgacacagagatctcctttgaccccgagaacctcatcacgggcatcgaggtgatcgacgaaggctggtggcgtggctatgggccggatggccattttggcatgttccctgccaactacgtggagctcattgagtgaggctgagggcacatcttgcccttcccctctcagacatggcttccttattgctggaagaggaggcctgggagttgacattcagcactcttccaggaataggacccccagtgaggatgaggcctcagggctccctccggcttggcagactcagcctgtcaccccaaatgcagcaatggcctggtgattcccacacatccttcctgcatcccccgaccctcccagacagcttggctcttgcccctgacaggatactgagccaagccctgcctgtggccaagccctgagtggccactgccaagctgcggggaagggtcctgagcaggggcatctgggaggctctggctgccttctgcatttatttgccttttttctttttctcttgcttctaaggggtggtggccaccactgtttagaatgacccttgggaacagtgaacgtagagaattgtttttagcagagtttgtgaccaaagtcagagtggatcatggtggtttggcagcagggaatttgtcttgttggagcctgctctgtgctccccactccatttctctgtccctctgcctgggctatgggaagtggggatgcagatggccaagctcccaccctgggtattcaaaaacggcagacacaacatgttcctccacgcggctcactcgatgcctgcaggccccagtgtgtgcctcaactgattctgacttcaggaaaagtaacacagagtggccttggcctgttgtcttcccctattttctgtcccagctcatccgtgtctctgaagaacaaatatgcttttggaccacgaaaaaaaaaaacaaaaccaaaaatctccgcaggcaacccatataatgcagtacgaggacacaaacaggcacagagaagagcgacaacatgggccacaaaagaggaacccaggaaccaaacatgaacagagaaaaccagagggacaaaacaagcagcagcacacacaaatagagaggaaccgaaacaacaagacacgaaatacacagccgcggatatacaccccgtagcaacaaacatggacttccccggagagagcattcacgcagtactatcgtcgctcgaacacagacatacagaagaatgcaacaaagacaagacaagacaagacgaagaccacgaaagcaaccaagaagctcagaacaagcccgcacagactccgacaacaccagagaacacaaaaacacaacacagagacataaacataaacagtgcaatgaaacaacaactagctatcacttatgcagcagagggaagggcagaggggagactgaaaaagaagagaggcaaagcaggcgggagaagcggtgcggcggtgggcgcagggagagggagagttggcagtggatatacgagaggagaagtgacgaagatagagagaggaagagggagagctagcagacaacacggagaggaaagaaagcgaagtgagaaagaggaaggagagagtcgcgaggaaggggtgaggggggaagagagagaggaccgggcaggcggcggaggcggcgagagagtgagagaa

SEQ ID NO: 37770 - DNA, 3120 bp, Homo sapiens
aggtttgtagcggtgtgatcgtcacttagcactcatttattcgtgtattcatacatttatgcatgtttctttcacagatcaaactgttgagggtccacaaacaggctgaagacctcgtctggagggagactgcagtgaacccaagatcgttcaaataagcgcatcgacataacaagatttagaaaagaataagcacggtgctgtgagagcagctagcgggggctggactgggtccctgcggccaggcttccaagtcgagctgccgtttgggtgggaccagaagacgggctagtctgcgccccaggatccctccctgaggacaaacagaaggccgggtcctcccttctcccgcttgtccttcggcattcgcgggacctgcatgctagaccagctggccggacagctcgctaggacccgcgggtgcggctggcccctgccatttccgcttcctgccgtggggcggggtttccggatgtcggaggcgaggcttgtcggctgtcaaaggggcggcccggccgggcccggaagctacagcagcggcgcggagactgcggggcgggccatggcggcgaacctgagccggaacgggccagcgctgcaagaggcctacgtgcgggtggtcaccgagaagtccccgaccgactgggctctctttacctatgaaggcaacagcaatgacatccgcgtggctggcacaggggagggtggcctggaggagatggtggaggagctcaacagcgggaaggtgatgtacgccttctgcagagtgaaggaccccaactctggactgcccaaatttgtcctcatcaactggacaggcgagggcgtgaacgatgtgcggaagggagcctgtgccagccacgtcagcaccatggccagcttcctgaagggggcccatgtgaccatcaacgcacgggccgaggaggatgtggagcctgagtgcatcatggagaaggtggccaaggcttcaggtgccaactacagctttcacaaggagagtggccgcttccaggacgtgggaccccaggccccagtgggctctgtgtaccagaagaccaatgccgtgtctgagattaaaagggttggtaaagacagcttctgggccaaagcagagaaggaggaggagaaccgtcggctggaggaaaagcggcgggccgaggaggcacagcggcagctggagcaggagcgccgggagcgtgagctgcgtgaggctgcacgccgggagcagcgctatcaggagcagggtggcgaggccagcccccagaggacgtgggagcagcagcaagaagtggtttcaaggaaccgaaatgagcaggagtctgccgtgcacccgagggagattttcaagcagaaggagagggccatgtccaccacctccatctccagtcctcagcctggcaagctgaggagccccttcctgcagaagcagctcacccaaccagagacccactttggcagagagccagctgctgccatctcaaggcccagggcagatctccctgctgaggagccggcgcccagcactcctccatgtctggtgcaggcagaagaggaggctgtgtatgaggaacctccagagcaggagaccttctacgagcagcccccactggtgcagcagcaaggtgctggctctgagcacattgaccaccacattcagggccaggggctcagtgggcaagggctctgtgcccgtgccctgtacgactaccaggcagccgacgacacagagatctcctttgaccccgagaacctcatcacgggcatcgaggtgatcgacgaaggctggtggcgtggctatgggccggatggccattttggcatgttccctgccaactacgtggagctcattgagtgaggctgagggcacatcttgcccttcccctctcagacatggcttccttattgctggaagaggaggcctgggagttgacattcagcactcttccaggaataggacccccagtgaggatgaggcctcagggctccctccggcttggcagactcagcctgtcaccccaaatgcagcaatggcctggtgattcccacacatccttcctgcatcccccgaccctcccagacagcttggctcttgcccctgacaggatactgagccaagccctgcctgtggccaagccctgagtggccactgccaagctgcggggaagggtcctgagcaggggcatctgggaggctctggctgccttctgcatttatttgccttttttctttttctcttgcttctaaggggtggtggccaccactgtttagaatgacccttgggaacagtgaacgtagagaattgtttttagcagagtttgtgaccaaagtcagagtggatcatggtggtttggcagcagggaatttgtcttgttggagcctgctctgtgctccccactccatttctctgtccctctgcctgggctatgggaagtggggatgcagatggccaagctcccaccctgggtattcaaaaacggcagacacaacatgttcctccacgcggctcactcgatgcctgcaggccccagtgtgtgcctcaactgattctgacttcaggaaaagtaacacagagtggccttggcctgttgtcttcccctattttctgtcccagctcatccgtgtctctgaagaacaaatatgcttttggaccacgaaaaaaaaaaaaaaaaaaaaaaaaaaaaaaaaaaaaaaaaaagaaaaaaaaaaaaagaagaaaaaaaaaaaagaagaagaacaaaacaacagaaaaaacaacgaggcgcggcggcggcgcgcgcggccaacatacgatcctccgccacggaggcggcagcccaaagaacacgagcgccccacgccgaaagatatcaagacgacaagcagggagcccaccacacggaggacgggcggcgggggctagatgcaccagaacgacagacgagcggagcggcgggggcgtagccggaatacaaaccgacgggcacggacggaggacgggagaggcagacaaagaggacggcgacaacgagtgagtcgaggaaaaacacgaatgaggaggacaaacgagccacccacagtgcccgtgagggggggagggcggacggagacaacaaagagagcagcgcagggcgacgcccgaag

SEQ ID NO: 37771 - DNA, 3437 bp, Homo sapiens
aggtttgtagcggtgtgatcgtcacttagcactcatttattcgtgtattcatacatttatgcatgtttctttcacagatcaaactgttgagggtccacaaacaggctgaagacctcgtctggagggagactgcagtgaacccaagatcgttcaaataagcgcatcgacataacaagatttagaaaagaataagcacggtgctgtgagagcagctagcgggggctggactgggtccctgcggccaggcttccaagtcgagctgccgtttgggtgggaccagaagacgggctagtctgcgccccaggatccctccctgaggacaaacagaaggccgggtcctcccttctcccgcttgtccttcggcattcgcgggacctgcatgctagaccagctggccggacagctcgctaggacccgcgggtgcggctggcccctgccatttccgcttcctgccgtggggcggggtttccggatgtcggaggcgaggcttgtcggctgtcaaaggggcggcccggccgggcccggaagctacagcagcggcgcggagactgcggggcgggccatggcggcgaacctgagccggaacgggccagcgctgcaagaggcctacgtgcgggtggtcaccgagaagtccccgaccgactggtgggcggcgagacgggccagggtcgggccagggctgcctcagggggctctctttacctatgaaggcaacagcaatgacatccgcgtggctggcacaggggagggtggcctggaggagatggtggaggagctcaacagcgggaaggtgatgtacgccttctgcagagtgaaggaccccaactctggactgcccaaatttgtcctcatcaactggacaggcgagggcgtgaacgatgtgcggaagggagcctgtgccagccacgtcagcaccatggccagcttcctgaagggggcccatgtgaccatcaacgcacgggccgaggaggatgtggagcctgagtgcatcatggagaaggtggccaaggcttcaggtgccaactacagctttcacaaggagagtggccgcttccaggacgtgggaccccaggccccagtgggctctgtgtaccagaagaccaatgccgtgtctgagattaaaagggttggtaaagacagcttctgggccaaagcagagaaggaggaggagaaccgtcggctggaggaaaagcggcgggccgaggaggcacagcggcagctggagcaggagcgccgggagcgtgagctgcgtgaggctgcacgccgggagcagcgctatcaggagcagggtggcgaggccagcccccagaggacgtgggagcagcagcaagaagtggtttcaaggaaccgaaatgagcaggagtctgccgtgcacccgagggagattttcaagcagaaggagagggccatgtccaccacctccatctccagtcctcagcctggcaagctgaggagccccttcctgcagaagcagctcacccaaccagagacccactttggcagagagccagctgctgccatctcaaggcccagggcagatctccctgctgaggagccggcgcccagcactcctccatgtctggtgcaggcagaagaggaggctgtgtatgaggaacctccagagcaggagaccttctacgagcagcccccactggtgcagcagcaaggtgctggctctgagcacattgaccaccacattcagggccaggggctcagtgggcaagggctctgtgcccgtgccctgtacgactaccaggcagccgacgacacagagatctcctttgaccccgagaacctcatcacgggcatcgaggtgatcgacgaaggctggtggcgtggctatgggccggatggccattttggcatgttccctgccaactacgtggagctcattgagtgaggctgagggcacatcttgcccttcccctctcagacatggcttccttattgctggaagaggaggcctgggagttgacattcagcactcttccaggaataggacccccagtgaggatgaggcctcagggctccctccggcttggcagactcagcctgtcaccccaaatgcagcaatggcctggtgattcccacacatccttcctgcatcccccgaccctcccagacagcttggctcttgcccctgacaggatactgagccaagccctgcctgtggccaagccctgagtggccactgccaagctgcggggaagggtcctgagcaggggcatctgggaggctctggctgccttctgcatttatttgccttttttctttttctcttgcttctaaggggtggtggccaccactgtttagaatgacccttgggaacagtgaacgtagagaattgtttttagcagagtttgtgaccaaagtcagagtggatcatggtggtttggcagcagggaatttgtcttgttggagcctgctctgtgctccccactccatttctctgtccctctgcctgggctatgggaagtggggatgcagatggccaagctcccaccctgggtattcaaaaacggcagacacaacatgttcctccacgcggctcactcgatgcctgcaggccccagtgtgtgcctcaactgattctgacttcaggaaaagtaacacagagtggccttggcctgttgtcttcccctattttctgtcccagctcatccgtgtctctgaagaacaaatatgcttttggaccacgaaaaaaaaaaacaaaaccaaaaatctccgcaggcaacccatataatgcagtacgaggacacaaacaggcacagagaagagcgacaacatgggccacaaaagaggaacccaggaaccaaacatgaacagagaaaaccagagggacaaaacaagcagcagcacacacaaatagagaggaaccgaaacaacaagacacgaaatacacagccgcggatatacaccccgtagcaacaaacatggacttccccggagagagcattcacgcagtactatcgtcgctcgaacacagacatacagaagaatgcaacaaagacaagacaagacaagacgaagaccacgaaagcaaccaagaagctcagaacaagcccgcacagactccgacaacaccagagaacacaaaaacacaacacagagacataaacataaacagtgcaatgaaacaacaactagctatcacttatgcagcagagggaagggcagaggggagactgaaaaagaagagaggcaaagcaggcgggagaagcggtgcggcggtgggcgcagggagagggagagttggcagtggatatacgagaggagaagtgacgaagatagagagaggaagagggagagctagcagacaacacggagaggaaagaaagcgaagtgagaaagaggaaggagagagtcgcgaggaaggggtgaggggggaagagagagaggaccgggcaggcggcggaggcggcgagagagtgagagaa

SEQ ID NO: 37772 - DNA, 2722 bp, Homo sapiens
  misc_feature (3)..(3): n is a, c, g, or t
ganaattaggctaggtacgaggctgggtgttagggtggcctggaggagatggtggaggagctcaacagcgggaaggtgatgtacgccttctgcagagtgaaggaccccaactctggactgcccaaatttgtcctcatcaactggacaggcgagggcgtgaacgatgtgcggaagggagcctgtgccagccacgtcagcaccatggccagcttcctgaagggggcccatgtgaccatcaacgcacgggccgaggaggatgtggagcctgagtgcatcatggagaaggtggccaaggcttcaggtgccaactacagctttcacaaggagagtggccgcttccaggacgtgggaccccaggccccagtgggctctgtgtaccagaagaccaatgccgtgtctgagattaaaagggttggtaaagacagcttctgggccaaagcagagaaggaggaggagaaccgtcggctggaggaaaagcggcgggccgaggaggcacagcggcagctggagcaggagcgccgggagcgtgagctgcgtgaggctgcacgccgggagcagcgctatcaggagcagggtggcgaggccagcccccagaggacgtgggagcagcagcaagaagtggtttcaaggaaccgaaatgagcaggagtctgccgtgcacccgagggagattttcaagcagaaggagagggccatgtccaccacctccatctccagtcctcagcctggcaagctgaggagccccttcctgcagaagcagctcacccaaccagagacccactttggcagagagccagctgctgccatctcaaggcccagggcagatctccctgctgaggagccggcgcccagcactcctccatgtctggtgcaggcagaagaggaggctgtgtatgaggaacctccagagcaggagaccttctacgagcagcccccactggtgcagcagcaaggtgctggctctgagcacattgaccaccacattcagggccaggggctcagtgggcaagggctctgtgcccgtgccctgtacgactaccaggcagccgacgacacagagatctcctttgaccccgagaacctcatcacgggcatcgaggtgatcgacgaaggctggtggcgtggctatgggccggatggccattttggcatgttccctgccaactacgtggagctcattgagtgaggctgagggcacatcttgcccttcccctctcagacatggcttccttattgctggaagaggaggcctgggagttgacattcagcactcttccaggaataggacccccagtgaggatgaggcctcagggctccctccggcttggcagactcagcctgtcaccccaaatgcagcaatggcctggtgattcccacacatccttcctgcatcccccgaccctcccagacagcttggctcttgcccctgacaggatactgagccaagccctgcctgtggccaagccctgagtggccactgccaagctgcggggaagggtcctgagcaggggcatctgggaggctctggctgccttctgcatttatttgccttttttctttttctcttgcttctaaggggtggtggccaccactgtttagaatgacccttgggaacagtgaacgtagagaattgtttttagcagagtttgtgaccaaagtcagagtggatcatggtggtttggcagcagggaatttgtcttgttggagcctgctctgtgctccccactccatttctctgtccctctgcctgggctatgggaagtggggatgcagatggccaagctcccaccctgggtattcaaaaacggcagacacaacatgttcctccacgcggctcactcgatgcctgcaggccccagtgtgtgcctcaactgattctgacttcaggaaaagtaacacagagtggccttggcctgttgtcttcccctattttctgtcccagctcatccgtgtctctgaagaacaaatatgcttttggaccacgaaaaaaaaaaacaaaaccaaaaatctccgcaggcaacccatataatgcagtacgaggacacaaacaggcacagagaagagcgacaacatgggccacaaaagaggaacccaggaaccaaacatgaacagagaaaaccagagggacaaaacaagcagcagcacacacaaatagagaggaaccgaaacaacaagacacgaaatacacagccgcggatatacaccccgtagcaacaaacatggacttccccggagagagcattcacgcagtactatcgtcgctcgaacacagacatacagaagaatgcaacaaagacaagacaagacaagacgaagaccacgaaagcaaccaagaagctcagaacaagcccgcacagactccgacaacaccagagaacacaaaaacacaacacagagacataaacataaacagtgcaatgaaacaacaactagctatcacttatgcagcagagggaagggcagaggggagactgaaaaagaagagaggcaaagcaggcgggagaagcggtgcggcggtgggcgcagggagagggagagttggcagtggatatacgagaggagaagtgacgaagatagagagaggaagagggagagctagcagacaacacggagaggaaagaaagcgaagtgagaaagaggaaggagagagtcgcgaggaaggggtgaggggggaagagagagaggaccgggcaggcggcggaggcggcgagagagtgagagaa

SEQ ID NO: 37773 - DNA, 3205 bp, Homo sapiens
aggtttgtagcggtgtgatcgtcacttagcactcatttattcgtgtattcatacatttatgcatgtttctttcacagatcaaactgttgagggtccacaaacaggctgaagacctcgtctggagggagactgcagtgaacccaagatcgttcaaataagcgcatcgacataacaagatttagaaaagaataagcacggtgctgtgagagcagctagcgggggctggactgggtccctgcggccaggcttccaagtcgagctgccgtttgggtgggaccagaagacgggctagtctgcgccccaggatccctccctgaggacaaacagaaggccgggtcctcccttctcccgcttgtccttcggcattcgcgggacctgcatgctagaccagctggccggacagctcgctaggacccgcgggtgcggctggcccctgccatttccgcttcctgccgtggggcggggtttccggatgtcggaggcgaggcttgtcggctgtcaaaggggcggcccggccgggcccggaagctacagcagcggcgcggagactgcggggcgggccatggcggcgaacctgagccggaacgggccagcgctgcaagaggcctacgtgcgggtggtcaccgagaagtccccgaccgactgggctctctttacctatgaaggcaacaccacgtcagcaccatggccagcttcctgaagggggcccatgtgaccatcaacgcacgggccgaggaggatgtggagcctgagtgcatcatggagaaggtggccaaggcttcaggtgccaactacagctttcacaaggagagtggccgcttccaggacgtgggaccccaggccccagtgggctctgtgtaccagaagaccaatgccgtgtctgagattaaaagggttggtaaagacagcttctgggccaaagcagagaaggaggaggagaaccgtcggctggaggaaaagcggcgggccgaggaggcacagcggcagctggagcaggagcgccgggagcgtgagctgcgtgaggctgcacgccgggagcagcgctatcaggagcagggtggcgaggccagcccccagaggacgtgggagcagcagcaagaagtggtttcaaggaaccgaaatgagcaggagtctgccgtgcacccgagggagattttcaagcagaaggagagggccatgtccaccacctccatctccagtcctcagcctggcaagctgaggagccccttcctgcagaagcagctcacccaaccagagacccactttggcagagagccagctgctgccatctcaaggcccagggcagatctccctgctgaggagccggcgcccagcactcctccatgtctggtgcaggcagaagaggaggctgtgtatgaggaacctccagagcaggagaccttctacgagcagcccccactggtgcagcagcaaggtgctggctctgagcacattgaccaccacattcagggccaggggctcagtgggcaagggctctgtgcccgtgccctgtacgactaccaggcagccgacgacacagagatctcctttgaccccgagaacctcatcacgggcatcgaggtgatcgacgaaggctggtggcgtggctatgggccggatggccattttggcatgttccctgccaactacgtggagctcattgagtgaggctgagggcacatcttgcccttcccctctcagacatggcttccttattgctggaagaggaggcctgggagttgacattcagcactcttccaggaataggacccccagtgaggatgaggcctcagggctccctccggcttggcagactcagcctgtcaccccaaatgcagcaatggcctggtgattcccacacatccttcctgcatcccccgaccctcccagacagcttggctcttgcccctgacaggatactgagccaagccctgcctgtggccaagccctgagtggccactgccaagctgcggggaagggtcctgagcaggggcatctgggaggctctggctgccttctgcatttatttgccttttttctttttctcttgcttctaaggggtggtggccaccactgtttagaatgacccttgggaacagtgaacgtagagaattgtttttagcagagtttgtgaccaaagtcagagtggatcatggtggtttggcagcagggaatttgtcttgttggagcctgctctgtgctccccactccatttctctgtccctctgcctgggctatgggaagtggggatgcagatggccaagctcccaccctgggtattcaaaaacggcagacacaacatgttcctccacgcggctcactcgatgcctgcaggccccagtgtgtgcctcaactgattctgacttcaggaaaagtaacacagagtggccttggcctgttgtcttcccctattttctgtcccagctcatccgtgtctctgaagaacaaatatgcttttggaccacgaaaaaaaaaaacaaaaccaaaaatctccgcaggcaacccatataatgcagtacgaggacacaaacaggcacagagaagagcgacaacatgggccacaaaagaggaacccaggaaccaaacatgaacagagaaaaccagagggacaaaacaagcagcagcacacacaaatagagaggaaccgaaacaacaagacacgaaatacacagccgcggatatacaccccgtagcaacaaacatggacttccccggagagagcattcacgcagtactatcgtcgctcgaacacagacatacagaagaatgcaacaaagacaagacaagacaagacgaagaccacgaaagcaaccaagaagctcagaacaagcccgcacagactccgacaacaccagagaacacaaaaacacaacacagagacataaacataaacagtgcaatgaaacaacaactagctatcacttatgcagcagagggaagggcagaggggagactgaaaaagaagagaggcaaagcaggcgggagaagcggtgcggcggtgggcgcagggagagggagagttggcagtggatatacgagaggagaagtgacgaagatagagagaggaagagggagagctagcagacaacacggagaggaaagaaagcgaagtgagaaagaggaaggagagagtcgcgaggaaggggtgaggggggaagagagagaggaccgggcaggcggcggaggcggcgagagagtgagagaa

SEQ ID NO: 37774 - DNA, 2557 bp, Homo sapiens
ctaagtacaggccggtgttaatcggccgaagggcaccatcgcagcttcctgaagggggcccatgtgaccatcaacgcacgggccgaggaggatgtggagcctgagtgcatcatggagaaggtggccaaggcttcaggtgccaactacagctttcacaaggagagtggccgcttccaggacgtgggaccccaggccccagtgggctctgtgtaccagaagaccaatgccgtgtctgagattaaaagggttggtaaagacagcttctgggccaaagcagagaaggaggaggagaaccgtcggctggaggaaaagcggcgggccgaggaggcacagcggcagctggagcaggagcgccgggagcgtgagctgcgtgaggctgcacgccgggagcagcgctatcaggagcagggtggcgaggccagcccccagaggacgtgggagcagcagcaagaagtggtttcaaggaaccgaaatgagcaggagtctgccgtgcacccgagggagattttcaagcagaaggagagggccatgtccaccacctccatctccagtcctcagcctggcaagctgaggagccccttcctgcagaagcagctcacccaaccagagacccactttggcagagagccagctgctgccatctcaaggcccagggcagatctccctgctgaggagccggcgcccagcactcctccatgtctggtgcaggcagaagaggaggctgtgtatgaggaacctccagagcaggagaccttctacgagcagcccccactggtgcagcagcaaggtgctggctctgagcacattgaccaccacattcagggccaggggctcagtgggcaagggctctgtgcccgtgccctgtacgactaccaggcagccgacgacacagagatctcctttgaccccgagaacctcatcacgggcatcgaggtgatcgacgaaggctggtggcgtggctatgggccggatggccattttggcatgttccctgccaactacgtggagctcattgagtgaggctgagggcacatcttgcccttcccctctcagacatggcttccttattgctggaagaggaggcctgggagttgacattcagcactcttccaggaataggacccccagtgaggatgaggcctcagggctccctccggcttggcagactcagcctgtcaccccaaatgcagcaatggcctggtgattcccacacatccttcctgcatcccccgaccctcccagacagcttggctcttgcccctgacaggatactgagccaagccctgcctgtggccaagccctgagtggccactgccaagctgcggggaagggtcctgagcaggggcatctgggaggctctggctgccttctgcatttatttgccttttttctttttctcttgcttctaaggggtggtggccaccactgtttagaatgacccttgggaacagtgaacgtagagaattgtttttagcagagtttgtgaccaaagtcagagtggatcatggtggtttggcagcagggaatttgtcttgttggagcctgctctgtgctccccactccatttctctgtccctctgcctgggctatgggaagtggggatgcagatggccaagctcccaccctgggtattcaaaaacggcagacacaacatgttcctccacgcggctcactcgatgcctgcaggccccagtgtgtgcctcaactgattctgacttcaggaaaagtaacacagagtggccttggcctgttgtcttcccctattttctgtcccagctcatccgtgtctctgaagaacaaatatgcttttggaccacgaaaaaaaaaaacaaaaccaaaaatctccgcaggcaacccatataatgcagtacgaggacacaaacaggcacagagaagagcgacaacatgggccacaaaagaggaacccaggaaccaaacatgaacagagaaaaccagagggacaaaacaagcagcagcacacacaaatagagaggaaccgaaacaacaagacacgaaatacacagccgcggatatacaccccgtagcaacaaacatggacttccccggagagagcattcacgcagtactatcgtcgctcgaacacagacatacagaagaatgcaacaaagacaagacaagacaagacgaagaccacgaaagcaaccaagaagctcagaacaagcccgcacagactccgacaacaccagagaacacaaaaacacaacacagagacataaacataaacagtgcaatgaaacaacaactagctatcacttatgcagcagagggaagggcagaggggagactgaaaaagaagagaggcaaagcaggcgggagaagcggtgcggcggtgggcgcagggagagggagagttggcagtggatatacgagaggagaagtgacgaagatagagagaggaagagggagagctagcagacaacacggagaggaaagaaagcgaagtgagaaagaggaaggagagagtcgcgaggaaggggtgaggggggaagagagagaggaccgggcaggcggcggaggcggcgagagagtgagagaa

SEQ ID NO: 37775 - DNA, 2422 bp, Homo sapiens
aggtttgtagcggtgtgatcgtcacttagcactcatttattcgtgtattcatacatttatgcatgtttctttcacagatcaaactgttgagggtccacaaacaggctgaagacctcgtctggagggagactgcagtgaacccaagatcgttcaaataagcgcatcgacataacaagatttagaaaagaataagcacggtgctgtgagagcagctagcgggggctggactgggtccctgcggccaggcttccaagtcgagctgccgtttgggtgggaccagaagacgggctagtctgcgccccaggatccctccctgaggacaaacagaaggccgggtcctcccttctcccgcttgtccttcggcattcgcgggacctgcatgctagaccagctggccggacagctcgctaggacccgcgggtgcggctggcccctgccatttccgcttcctgccgtggggcggggtttccggatgtcggaggcgaggcttgtcggctgtcaaaggggcggcccggccgggcccggaagctacagcagcggcgcggagactgcggggcgggccatggcggcgaacctgagccggaacgggccagcgctgcaagaggcctacgtgcgggtggtcaccgagaagtccccgaccgactgggctctctttacctatgaaggcaacagcaatgacatccgcgtggctggcacaggggagggtggcctggaggagatggtggaggagctcaacagcgggaaggtgatgtacgccttctgcagagtgaaggaccccaactctggactgcccaaatttgtcctcatcaactggacaggcgagggcgtgaacgatgtgcggaagggagcctgtgccagccacgtcagcaccatggccagcttcctgaagggggcccatgtgaccatcaacgcacgggccgaggaggatgtggagcctgagtgcatcatggagaaggtggccaaggcttcaggtgccaactacagctttcacaaggagagtggccgcttccaggacgtgggaccccaggccccagtgggctctgtgtaccagaagaccaatgccgtgtctgagattaaaagggttggtaaagacagcttctgggccaaagcagagaaggaggaggagaaccgtcggctggaggaaaagcggcgggccgaggaggcacagcggcagctggagcaggagcgccgggagcgtgagctgcgtgaggctgcacgccgggagcagcgctatcaggagcagggtggcgaggccagcccccagaggacgtgggagcagcagcaagaagtggtttcaaggaaccgaaatgagcaggagtctgccgtgcacccgagggagattttcaagcagaaggagagggccatgtccaccacctccatctccagtcctcagcctggcaagctgaggagccccttcctgcagaagcagctcacccaaccagagacccactttggcagagagccagctgctgccatctcaaggcccagggcagatctccctgctgaggagccggcgcccagcactcctccatgtctggtgcaggcagaagaggaggctgtgtatgaggaacctccagagcaggagaccttctacgagcagcccccactggtgcagcagcaaggtgctggctctgagcacattgaccaccacattcagggccaggggctcagtgggcaagggctctgtgcccgtgccctgtacgactaccaggcagccgacgacacagagatctcctttgaccccgagaacctcatcacgggcatcgaggtgatcgacgaaggctggtggcgtggctatgggccggatggccattttggcatgttccctgccaactacgtggagctcattgagtgaggctgagggcacatcttgcccttcccctctcagacatggcttccttattgctggaagaggaggcctgggagttgacattcagcactcttccaggaataggacccccagtgaggatgaggcctcagggctccctccggcttggcagactcagcctgtcaccccaaatgcagcaatggcctggtgattcccacacatccttcctgcatcccccgaccctcccagacagcttggctcttgcccctgacaggatactgagccaagccctgcctgtggccaagccctgagtggccactgccaagctgcggggaagggtcctgagcaggggcatctgggaggctctggctgccttctgcatttatttgccttttttctttttctcttgcttctaaggggtggtggccctgttatattgccctgggaccgtggcgtgcgattggttgacgaggtggccagcgcggtgctacggggtggcggggattgtggggggggtgggccccccctttttctcgggtggtggtgagggaccccctgttcgggacgtgtccggaaaagggcgatcgggggggt

SEQ ID NO: 37776 - DNA, 2448 bp, Homo sapiens
tagctagtacgaggctgcgtgttgaatctggccgaggcagctttcacaaggagagtggccgcttccaggacgtgggaccccaggccccagtgggctctgtgtaccagaagaccaatgccgtgtctgagattaaaagggttggtaaagacagcttctgggccaaagcagagaaggaggaggagaaccgtcggctggaggaaaagcggcgggccgaggaggcacagcggcagctggagcaggagcgccgggagcgtgagctgcgtgaggctgcacgccgggagcagcgctatcaggagcagggtggcgaggccagcccccagaggacgtgggagcagcagcaagaagtggtttcaaggaaccgaaatgagcaggagtctgccgtgcacccgagggagattttcaagcagaaggagagggccatgtccaccacctccatctccagtcctcagcctggcaagctgaggagccccttcctgcagaagcagctcacccaaccagagacccactttggcagagagccagctgctgccatctcaaggcccagggcagatctccctgctgaggagccggcgcccagcactcctccatgtctggtgcaggcagaagaggaggctgtgtatgaggaacctccagagcaggagaccttctacgagcagcccccactggtgcagcagcaaggtgctggctctgagcacattgaccaccacattcagggccaggggctcagtgggcaagggctctgtgcccgtgccctgtacgactaccaggcagccgacgacacagagatctcctttgaccccgagaacctcatcacgggcatcgaggtgatcgacgaaggctggtggcgtggctatgggccggatggccattttggcatgttccctgccaactacgtggagctcattgagtgaggctgagggcacatcttgcccttcccctctcagacatggcttccttattgctggaagaggaggcctgggagttgacattcagcactcttccaggaataggacccccagtgaggatgaggcctcagggctccctccggcttggcagactcagcctgtcaccccaaatgcagcaatggcctggtgattcccacacatccttcctgcatcccccgaccctcccagacagcttggctcttgcccctgacaggatactgagccaagccctgcctgtggccaagccctgagtggccactgccaagctgcggggaagggtcctgagcaggggcatctgggaggctctggctgccttctgcatttatttgccttttttctttttctcttgcttctaaggggtggtggccaccactgtttagaatgacccttgggaacagtgaacgtagagaattgtttttagcagagtttgtgaccaaagtcagagtggatcatggtggtttggcagcagggaatttgtcttgttggagcctgctctgtgctccccactccatttctctgtccctctgcctgggctatgggaagtggggatgcagatggccaagctcccaccctgggtattcaaaaacggcagacacaacatgttcctccacgcggctcactcgatgcctgcaggccccagtgtgtgcctcaactgattctgacttcaggaaaagtaacacagagtggccttggcctgttgtcttcccctattttctgtcccagctcatccgtgtctctgaagaacaaatatgcttttggaccacgaaaaaaaaaaacaaaaccaaaaatctccgcaggcaacccatataatgcagtacgaggacacaaacaggcacagagaagagcgacaacatgggccacaaaagaggaacccaggaaccaaacatgaacagagaaaaccagagggacaaaacaagcagcagcacacacaaatagagaggaaccgaaacaacaagacacgaaatacacagccgcggatatacaccccgtagcaacaaacatggacttccccggagagagcattcacgcagtactatcgtcgctcgaacacagacatacagaagaatgcaacaaagacaagacaagacaagacgaagaccacgaaagcaaccaagaagctcagaacaagcccgcacagactccgacaacaccagagaacacaaaaacacaacacagagacataaacataaacagtgcaatgaaacaacaactagctatcacttatgcagcagagggaagggcagaggggagactgaaaaagaagagaggcaaagcaggcgggagaagcggtgcggcggtgggcgcagggagagggagagttggcagtggatatacgagaggagaagtgacgaagatagagagaggaagagggagagctagcagacaacacggagaggaaagaaagcgaagtgagaaagaggaaggagagagtcgcgaggaaggggtgaggggggaagagagagaggaccgggcaggcggcggaggcggcgagagagtgagagaa

SEQ ID NO: 37777 - DNA, 2390 bp, Homo sapiens
  misc_feature (101)..(102): n is a, c, g, or t
actaaggatcccgaggatgctgcacaggacgtggaccaggccagtggctctgtgacaaagacaatgccggttgagataaaagggtggaaagacagttctgnncaaagcagagaaggaggaggagaaccgtcggctggaggaaaagcggcgggccgaggaggcacagcggcagctggagcaggagcgccgggagcgtgagctgcgtgaggctgcacgccgggagcagcgctatcaggagcagggtggcgaggccagcccccagaggacgtgggagcagcagcaagaagtggtttcaaggaaccgaaatgagcaggagtctgccgtgcacccgagggagattttcaagcagaaggagagggccatgtccaccacctccatctccagtcctcagcctggcaagctgaggagccccttcctgcagaagcagctcacccaaccagagacccactttggcagagagccagctgctgccatctcaaggcccagggcagatctccctgctgaggagccggcgcccagcactcctccatgtctggtgcaggcagaagaggaggctgtgtatgaggaacctccagagcaggagaccttctacgagcagcccccactggtgcagcagcaaggtgctggctctgagcacattgaccaccacattcagggccaggggctcagtgggcaagggctctgtgcccgtgccctgtacgactaccaggcagccgacgacacagagatctcctttgaccccgagaacctcatcacgggcatcgaggtgatcgacgaaggctggtggcgtggctatgggccggatggccattttggcatgttccctgccaactacgtggagctcattgagtgaggctgagggcacatcttgcccttcccctctcagacatggcttccttattgctggaagaggaggcctgggagttgacattcagcactcttccaggaataggacccccagtgaggatgaggcctcagggctccctccggcttggcagactcagcctgtcaccccaaatgcagcaatggcctggtgattcccacacatccttcctgcatcccccgaccctcccagacagcttggctcttgcccctgacaggatactgagccaagccctgcctgtggccaagccctgagtggccactgccaagctgcggggaagggtcctgagcaggggcatctgggaggctctggctgccttctgcatttatttgccttttttctttttctcttgcttctaaggggtggtggccaccactgtttagaatgacccttgggaacagtgaacgtagagaattgtttttagcagagtttgtgaccaaagtcagagtggatcatggtggtttggcagcagggaatttgtcttgttggagcctgctctgtgctccccactccatttctctgtccctctgcctgggctatgggaagtggggatgcagatggccaagctcccaccctgggtattcaaaaacggcagacacaacatgttcctccacgcggctcactcgatgcctgcaggccccagtgtgtgcctcaactgattctgacttcaggaaaagtaacacagagtggccttggcctgttgtcttcccctattttctgtcccagctcatccgtgtctctgaagaacaaatatgcttttggaccacgaaaaaaaaaaacaaaaccaaaaatctccgcaggcaacccatataatgcagtacgaggacacaaacaggcacagagaagagcgacaacatgggccacaaaagaggaacccaggaaccaaacatgaacagagaaaaccagagggacaaaacaagcagcagcacacacaaatagagaggaaccgaaacaacaagacacgaaatacacagccgcggatatacaccccgtagcaacaaacatggacttccccggagagagcattcacgcagtactatcgtcgctcgaacacagacatacagaagaatgcaacaaagacaagacaagacaagacgaagaccacgaaagcaaccaagaagctcagaacaagcccgcacagactccgacaacaccagagaacacaaaaacacaacacagagacataaacataaacagtgcaatgaaacaacaactagctatcacttatgcagcagagggaagggcagaggggagactgaaaaagaagagaggcaaagcaggcgggagaagcggtgcggcggtgggcgcagggagagggagagttggcagtggatatacgagaggagaagtgacgaagatagagagaggaagagggagagctagcagacaacacggagaggaaagaaagcgaagtgagaaagaggaaggagagagtcgcgaggaaggggtgaggggggaagagagagaggaccgggcaggcggcggaggcggcgagagagtgagagaa

SEQ ID NO: 37778 - DNA, 2380 bp, Homo sapiens
aggtttgtagcggtgtgatcgtcacttagcactcatttattcgtgtattcatacatttatgcatgtttctttcacagatcaaactgttgagggtccacaaacaggctgaagacctcgtctggagggagactgcagtgaacccaagatcgttcaaataagcgcatcgacataacaagatttagaaaagaataagcacggtgctgtgagagcagctagcgggggctggactgggtccctgcggccaggcttccaagtcgagctgccgtttgggtgggaccagaagacgggctagtctgcgccccaggatccctccctgaggacaaacagaaggccgggtcctcccttctcccgcttgtccttcggcattcgcgggacctgcatgctagaccagctggccggacagctcgctaggacccgcgggtgcggctggcccctgccatttccgcttcctgccgtggggcggggtttccggatgtcggaggcgaggcttgtcggctgtcaaaggggcggcccggccgggcccggaagctacagcagcggcgcggagactgcggggcgggccatggcggcgaacctgagccggaacgggccagcgctgcaagaggcctacgtgcgggtggtcaccgagaagtccccgaccgactgggctctctttacctatgaaggcaacagcaatgacatccgcgtggctggcacaggggagggtggcctggaggagatggtggaggagctcaacagcgggaaggtgatgtacgccttctgcagagtgaaggaccccaactctggactgcccaaatttgtcctcatcaactggacaggcgagggcgtgaacgatgtgcggaagggagcctgtgccagccacgtcagcaccatggccagcttcctgaagggggcccatgtgaccatcaacgcacgggccgaggaggatgtggagcctgagtgcatcatggagaaggtggccaaggcttcaggtgccaactacagctttcacaaggagagtggccgcttccaggacgtgggaccccaggccccagtgggctctgtgtaccagaagaccaatgccgtgtctgagattaaaagggttggtaaagacagcttctgggccaaagcagagaaggaggaggagaaccgtcggctggaggaaaagcggcgggccgaggaggcacagcggcagctggagcaggagcgccgggagcgtgagctgcgtgaggctgcacgccgggagcagcgctatcaggagcagggtggcgaggccagcccccagaggggaacagtgaacgtagagaattgtttttagcagagtttgtgaccaaagtcagagtggatcatggtggtttggcagcagggaatttgtcttgttggagcctgctctgtgctccccactccatttctctgtccctctgcctgggctatgggaagtggggatgcagatggccaagctcccaccctgggtattcaaaaacggcagacacaacatgttcctccacgcggctcactcgatgcctgcaggccccagtgtgtgcctcaactgattctgacttcaggaaaagtaacacagagtggccttggcctgttgtcttcccctattttctgtcccagctcatccgtgtctctgaagaacaaatatgcttttggaccacgaaaaaaaaaaacaaaaccaaaaatctccgcaggcaacccatataatgcagtacgaggacacaaacaggcacagagaagagcgacaacatgggccacaaaagaggaacccaggaaccaaacatgaacagagaaaaccagagggacaaaacaagcagcagcacacacaaatagagaggaaccgaaacaacaagacacgaaatacacagccgcggatatacaccccgtagcaacaaacatggacttccccggagagagcattcacgcagtactatcgtcgctcgaacacagacatacagaagaatgcaacaaagacaagacaagacaagacgaagaccacgaaagcaaccaagaagctcagaacaagcccgcacagactccgacaacaccagagaacacaaaaacacaacacagagacataaacataaacagtgcaatgaaacaacaactagctatcacttatgcagcagagggaagggcagaggggagactgaaaaagaagagaggcaaagcaggcgggagaagcggtgcggcggtgggcgcagggagagggagagttggcagtggatatacgagaggagaagtgacgaagatagagagaggaagagggagagctagcagacaacacggagaggaaagaaagcgaagtgagaaagaggaaggagagagtcgcgaggaaggggtgaggggggaagagagagaggaccgggcaggcggcggaggcggcgagagagtgagagaa

SEQ ID NO: 37779 - DNA, 1331 bp, Homo sapiens
aggtttgtagcggtgtgatcgtcacttagcactcatttattcgtgtattcatacatttatgcatgtttctttcacagatcaaactgttgagggtccacaaacaggctgaagacctcgtctggagggagactgcagtgaacccaagatcgttcaaataagcgcatcgacataacaagatttagaaaagaataagcacggtgctgtgagagcagctagcgggggctggactgggtccctgcggccaggcttccaagtcgagctgccgtttgggtgggaccagaagacgggctagtctgcgccccaggatccctccctgaggacaaacagaaggccgggtcctcccttctcccgcttgtccttcggcattcgcgggacctgcatgctagaccagctggccggacagctcgctaggacccgcgggtgcggctggcccctgccatttccgcttcctgccgtggggcggggtttccggatgtcggaggcgaggcttgtcggctgtcaaaggggcggcccggccgggcccggaagctacagcagcggcgcggagactgcggggcgggccatggcggcgaacctgagccggaacgggccagcgctgcaagaggcctacgtgcgggtggtcaccgagaagtccccgaccgactgggctctctttacctatgaaggcaacagcaatgacatccgcgtggctggcacaggggagggtggcctggaggagatggtggaggagctcaacagcgggaaggtgatgtacgccttctgcagagtgaaggaccccaactctggactgcccaaatttgtcctcatcaactggacaggcgagggcgtgaacgatgtgcggaagggagcctgtgccagccacgtcagcaccatggccagcttcctgaagggggcccatgtgaccatcaacgcacgggccgaggaggatgtggagcctgagtgcatcatggagaaggtggccaaggcttcaggtgccaactacagctttcacaaggagagtggccgcttccaggacgtgggaccccaggccccagtgggctctgtgtaccagaagaccaatgccgtgtctgagattaaaagggttggtaaagacagcttctgggccaaagcagaggtgagtgctgccccggggcatgctgggcacgtgggagtgttctgcttgctgtggctcatctttcctcacaagtgagctcatgcagcatccactctccttggtgcccattacagatggtcacactgaggctcgggtaagttaagccacaaggctaatgatcgactggctctggtgcccgtctttggccatgtgcctaaaactcagtcctgggcagggg

SEQ ID NO: 37780 - DNA, 1896 bp, Homo sapiens
aggtttgtagcggtgtgatcgtcacttagcactcatttattcgtgtattcatacatttatgcatgtttctttcacagatcaaactgttgagggtccacaaacaggctgaagacctcgtctggagggagactgcagtgaacccaagatcgttcaaataagcgcatcgacataacaagatttagaaaagaataagcacggtgctgtgagagcagctagcgggggctggactgggtccctgcggccaggcttccaagtcgagctgccgtttgggtgggaccagaagacgggctagtctgcgccccaggatccctccctgaggacaaacagaaggccgggtcctcccttctcccgcttgtccttcggcattcgcgggacctgcatgctagaccagctggccggacagctcgctaggacccgcgggtgcggctggcccctgccatttccgcttcctgccgtggggcggggtttccggatgtcggaggcgaggcttgtcggctgtcaaaggggcggcccggccgggcccggaagctacagcagcggcgcggagactgcggggcgggccatggcggcgaacctgagccggaacgggccagcgctgcaagaggcctacgtgcgggtggtcaccgagaagtccccgaccgactgggctctctttacctatgaaggcaacagcaatgacatccgcgtggctggcacaggggagggtggcctggaggagatggtggaggagctcaacagcgggaaggtgatgtacgccttctgcagagtgaaggaccccaactctggactgcccaaatttgtcctcatcaactggacaggcgagggcgtgaacgatgtgcggaagggagcctgtgccagccacgtcagcaccatggccagcttcctgaagggggcccatgtgaccatcaacgcacgggccgaggaggatgtggagcctgagtgcatcatggagaaggtggccaaggcttcaggtgccaactacagctttcacaaggagagtggccgcttccaggacgtgggaccccaggccccagtgtgcctcaactgattctgacttcaggaaaagtaacacagagtggccttggcctgttgtcttcccctattttctgtcccagctcatccgtgtctctgaagaacaaatatgcttttggaccacgaaaaaaaaaaacaaaaccaaaaatctccgcaggcaacccatataatgcagtacgaggacacaaacaggcacagagaagagcgacaacatgggccacaaaagaggaacccaggaaccaaacatgaacagagaaaaccagagggacaaaacaagcagcagcacacacaaatagagaggaaccgaaacaacaagacacgaaatacacagccgcggatatacaccccgtagcaacaaacatggacttccccggagagagcattcacgcagtactatcgtcgctcgaacacagacatacagaagaatgcaacaaagacaagacaagacaagacgaagaccacgaaagcaaccaagaagctcagaacaagcccgcacagactccgacaacaccagagaacacaaaaacacaacacagagacataaacataaacagtgcaatgaaacaacaactagctatcacttatgcagcagagggaagggcagaggggagactgaaaaagaagagaggcaaagcaggcgggagaagcggtgcggcggtgggcgcagggagagggagagttggcagtggatatacgagaggagaagtgacgaagatagagagaggaagagggagagctagcagacaacacggagaggaaagaaagcgaagtgagaaagaggaaggagagagtcgcgaggaaggggtgaggggggaagagagagaggaccgggcaggcggcggaggcggcgagagagtgagagaa

SEQ ID NO: 37781 - DNA, 1049 bp, Homo sapiens
aggtttgtagcggtgtgatcgtcacttagcactcatttattcgtgtattcatacatttatgcatgtttctttcacagatcaaactgttgagggtccacaaacaggctgaagacctcgtctggagggagactgcagtgaacccaagatcgttcaaataagcgcatcgacataacaagatttagaaaagaataagcacggtgctgtgagagcagctagcgggggctggactgggtccctgcggccaggcttccaagtcgagctgccgtttgggtgggaccagaagacgggctagtctgcgccccaggatccctccctgaggacaaacagaaggccgggtcctcccttctcccgcttgtccttcggcattcgcgggacctgcatgctagaccagctggccggacagctcgctaggacccgcgggtgcggctggcccctgccatttccgcttcctgccgtggggcggggtttccggatgtcggaggcgaggcttgtcggctgtcaaaggggcggcccggccgggcccggaagctacagcagcggcgcggagactgcggggcgggccatggcggcgaacctgagccggaacgggccagcgctgcaagaggcctacgtgcgggtggtcaccgagaagtccccgaccgactggtgggcggcgagacgggccagggtcgggccagggctgcctcaggggtgggtctgtctggggcgagcgggggactcggggggagcgggacgcgaggcggagcggtgcccaggcaggtggcctggggcttacctgtctgcccctccacaccgcagcaggagtgctgtctcaccctcgtgaccccttgccccgccgatcgtggacaggttaaacccggcttggggggacccagtgagtccccgcccctccccctgtcgctcgccacccactgtgggcttcgcgggcttccatgttggatcctcggcctggtcgtgcttgctagcttcgccaggttcttctttccagtcctgggacttccctggagaaggggttcctgcacagccctctctgagaaggcggacagcgc

SEQ ID NO: 37782 - DNA, 540 bp, Homo sapiens
tcctttggtgcctgtgggctggccttccacctgggtccaggtctctaatgagtgctgtcccctacagggctctgtgtaccagaagaccaatgccgtgtctgagattaaaagggttggtaaagacagcttctgggccaaagcagaggtgagtgctgccccggggcatgctgggcacgtgggagtgttctgcttgctgtggctcatctttcctcacaagtgagctcatgcagcatccactctccttggtgcccattacagatggtcacactgaggctcgggtaagttaagccacaaggctaatgatcgactggctctggtgcccgtctttggccatgtgcctaaaactcagtcctgggcaggggattaggctgaagtggcagcatagggctgagcgggcagtggctctccctgcagaaggaggaggagaaccgtcggctggaggaaaagcggcgggccgaggaggcacagcggcagctggagcaggagcgccgggagcgtgagctgcgtgaggctgcacgccgggagcagcgctatcaggag

SEQ ID NO: 37783 - DNA, 326 bp, Homo sapiens
ttcaggtatgccacaacacatcttggaatttcctctccctcttcagacatgaatctacagggaacgctgtacttgtttatactgatacttatttgacaagtgtcattcacatattagaaaatcatagaattctaggattgcaaagctctttaaatgccatttggttctgcattcttttaatgtttgtgtgctttataaaatagtgctatataaaatgaacttataagtctaaataagactattctttatcaacaaagaatgtcatctttgccaaactacctgaccagcatgaaataaagaacatgtgctaccatgctcccctgaaa

SEQ ID NO: 37784 - DNA, 483 bp, Homo sapiens
cctcccacctcagcctcccaagtaactgggactacaggcacgtgccaccatgccaggctaattttttttttttctgggctcaaggtatcctcccacctcagtttcccaaagtgctgggattacaggcgtgagccactgcatgtggcccagatacttcatttgtattgccttcaggtgacttggcgatgagtccagaaatagaagcatagcttcaggaaaacaacaagtagaacttttaacgtttctgtccaaagtcagccatgtagaggtaaataaaaacaaacccatagggaaggggtgaagtggcttacaaaagaaaaaaaatattttaataggcccatcaaggaaaagaactatgaaggaaggtaaaatataaacttattcatacaaacaaatgccaaataaagtcagttgccagcataactgcactacaaaaaatgtgaaagggaccaggcacagtggttcacccctgtaatcccagca

SEQ ID NO: 37785 - DNA, 1176 bp, Homo sapiens
cggggccgcgcggctgcctgggaggctccgggccagccgcggtccagagcgcgcgaggttcggggagctcggccaggctgctggtacctgcgtccgcccggcgagcaggacaggctgctttggtttgtgacctccaggcaggacggccatcctctccagaatgaagatcttcttgccagtgctgctggctgcccttctgggtgtggagcgagccagctcgctgatgtgcttctcctgcttgaaccagaagagcaatctgtactgcctgaagccgaccatctgctccgaccaggacaactactgcgtgactgtgtctgctagtgccggcattgggaatctcgtgacatttggccacagcctgagcaagacctgttccccggcctgccccatcccagaaggcgtcaatgttggtgtggcttccatgggcatcagctgctgccagagctttctgtgcaatttcagtgcggccgatggcgggctgcgggcaagcgtcaccctgctgggtgccgggctgctgctgagcctgctgccggccctgctgcggtttggcccctgaccgcccagaccctgtcccccgatcccccagctcaggaaggaaagcccagccctttctggatcccacagtgtatgggagcccctgactcctcacgtgcctgatctgtgcccttggtcccaggtcaggcccaccccctgcacctccacctgccccagcccctgcctctgccccaagtggggccagctgccctcacttctggggtggatgatgtgaccttccttgggggactgcggaagggacgagggttccctggagtcttacggtccaacatcaggaccaagtcccatggacatgctgacagggtccccagggagaccgtgtcagtagggatgtgtgcctggctgtgtacgtgggtgtgcagtgcacgtgagagcacgtggcggcttctgggggccatgtttggggagggaggtgtgccagcagcctggagagcctcagtccctgtagccccctgccctggcacagctgcatgcacttcaagggcagcctttgggggttggggtttctgccacttccgggtctaggccctgccccaaatccagccagtcctgccccagcccacccccacattggagccctcctgctgctttggtgcctcaaataaatacagatgtccccca

SEQ ID NO: 37786 - DNA, 324 bp, Homo sapiens
  misc_feature (24)..(24): n is a, c, g, or t
aattcggcacgaggagggcagctngccccacttggggcagaggcaggggctggggcagtgtgcagtgcacgtgagagcacgtggcggcttctgggggccatgtttggggagggaggtgtgccagcagcctggagagcctcagtccctgtagccccctgccctggcacagctgcatgcacttcaagggcagcctttgggggttggggtttctgccacttccgggtctaggccctgccccaaatccagccagtcctgccccagcccacccccacattggagccctcctgctgctttggtgcctcaaataaatacagatgtccccca

SEQ ID NO: 37787 - DNA, 287 bp, Homo sapiens
gcggccgcctactactactactactactgctcgaattcaagcttctaacgatgtacggggacatgtttggggagggaggtgtgccagcagcctggagagcctcagtccctgtagccccctgccctggcacagctgcatgcacttcaagggcagcctttgggggttggggtttctgccacttccgggtctaggccctgccccaaatccagccagtcctgccccagcccacccccacattggagccctcctgctgctttggtgcctcaaataaatacagatgtccccca

SEQ ID NO: 37788 - DNA, 1159 bp, Homo sapiens
  misc_feature (6)..(6): n is a, c, g, or t
  misc_feature (24)..(24): n is a, c, g, or t
cagcanctactggtatgcatcgcnctctgtaacgcgcgaggttcggggagctcggccaggctgctggtacctgcgtccgcccggcgagcaggacaggctgctttggtttgtgacctccaggcaggacggccatcctctccagaatgaagatcttcttgccagtgctgctggctgcccttctgggtgtggagcgagccagctcgctgatgtgcttctcctgcttgaaccagaagagcaatctgtactgcctgaagccgaccatctgctccgaccaggacaactactgcgtgactgtgtctgctagtgccggcattgggaatctcgtgacatttggccacagcctgagcaagacctgttccccggcctgccccatcccagaaggcgtcaatgttggtgtggcttccatgggcatcagctgctgccagagctttctgtgcaatttcagtgcggccgatggcgggctgcgggcaagcgtcaccctgctgggtgccgggctgctgctgagcctgctgccggccctgctgcggtttggcccctgaccgcccagaccctgtcccccgatcccccagctcaggaaggaaagcccagccctttctggatcccacagtgtatgggagcccctgactcctcacgtgcctgatctgtgcccttggtcccaggtcaggcccaccccctgcacctccacctgccccagcccctgcctctgccccaagtggggccagctgccctcacttctggggtggatgatgtgaccttccttgggggactgcggaagggacgagggttccctggagtcttacggtccaacatcaggaccaagtcccatggacatgctgacagggtccccagggagaccgtgtcagtagggatgtgtgcctggctgtgtacgtgggtgtgcagtgcacgtgagagcacgtggcggcttctgggggccatgtttggggagggaggtgtgccagcagcctggagagcctcagtccctgtagccccctgccctggcacagctgcatgcacttcaagggcagcctttgggggttggggtttctgccacttccgggtctaggccctgccccaaatccagccagtcctgccccagcccacccccacattggagccctcctgctgctttggtgcctcaaataaatacagatgtccccca

SEQ ID NO: 37789 - DNA, 1294 bp, Homo sapiens
  misc_feature (1188)..(1188): n is a, c, g, or t
cggggccgcgcggctgcctgggaggctccgggccagccgcggtccagagcgcgcgaggttcggggagctcggccaggctgctggtacctgcgtccgcccggcgagcaggacaggctgctttggtttgtgacctccaggcaggacggccatcctctccagaatgaagatcttcttgccagtgctgctggctgcccttctgggtgtggagcgagccagctcgctgatgtgcttctcctgcttgaaccagaagagcaatctgtactgcctgaagccgaccatctgctccgaccaggacaactactgcgtgactgtgtctgctagtgccggcattgggaatctcgtgacatttggccacagcctgagcaagacctgttccccggcctgccccatcccagaaggcgtcaatgttggtgtggcttccatgggcatcagctgctgccagagctttctgtgcaatttcagtgcggccgatggcgggctgcgggcaagcgtcaccctgctgggtgccgggctgctgctgagcctgctgccggccctgctgcggtttggcccctgaccgcccagaccctgtcccccgatcccccagctcaggaaggaaagcccagccctttctggatcccacagtgtatgggagcccctgactcctcacgtgcctgatctgtgcccttggtcccaggtcaggcccaccccctgcacctccacctgccccagcccctgcctctgccccaagtggggccagctgccctcacttctggggtggatgatgtgaccttccttgggggactgcggaagggacgagggttccctggagtcttacggtccaacatcaggaccaagtcccatggacatgctgacagggtccccagggagaccgtgtcagtagggatgtgtgcctggctgtgtacgtgggtgtgcagtgcacgtgagagcacgtggcggcttctgggggccatgtttggggagggaggtgtgccagcagcctggagagcctcagtccctgtagccccctgccctggcacagctgcatgcacttcaagggcagcctttgggggttggggtttctgccacttccgggtctaggccctgccccaaatccagccagtcctgccccagcccacccccacattggagccctcctgctgctttggtgcctcaaataaatacagatgtcccccaaaaaaaaaaaanaaaccggggcatattcggggggcacaagagttaaaggggccggccatagttccggcaccattctgcaagggaatcggcccaatgggaaatgaacgacgaaaaaaag

SEQ ID NO: 37790 - DNA, 2017 bp, Homo sapiens
cggggccgcgcggctgcctgggaggctccgggccagccgcggtccagagcgcgcgaggttcggggagctcggccaggctgctggtacctgcgtccgcccggcgagcaggacaggctgctttggtttgtgacctccaggcaggacggccatcctctccagaatgaagatcttcttgccagtgctgctggctgcccttctgggtgtggagcgagccagctcgctgatgtgcttctcctgcttgaaccagaagagcaatctgtactgcctgaagccgaccatctgctccgaccaggacaactactgcgtgactgtgtctgctagtgccggcattgggaatctcgtgacatttggccacagcctgagcaagacctgttccccggcctgccccatcccagaaggcgtcaatgttggtgtggcttccatgggcatcagctgctgccagagctttctgtgcaatttcagtgcggccgatggcgggctgcgggcaagcgtcaccctgctgggtgccgggctgctgctgagcctgctgccggccctgctgcggtttggcccctgaccgcccagaccctgtcccccgatcccccagctcaggaaggaaagcccagccctttctggatcccacagtgtatgggagcccctgactcctcacgtgcctgatctgtgcccttggtcccaggtcaggcccaccccctgcacctccacctgccccagcccctgcctctgccccaagtggggccagctgccctcacttctggggtggatgatgtgaccttccttgggggactgcggaagggacgagggttccctggagtcttacggtccaacatcaggaccaagtcccatggacatgctgacagggtccccagggagaccgtgtcagtagggatgtgtgcctggctgtgtacgtgggtgtgcagtgcacgtgagagcacgtggcggcttctgggggccatgtttggggagggaggtgtgccagcagcctggagagcctcagtccctgtagccccctgccctggcacagctgcatgcacttcaagggcagcctttgggggttggggtttctgccacttccgggtctaggccctgccccaaatccagccagtcctgccccagcccacccccacattggagccctcctgctgctttggtgcctcaaataaatacagatgtcccccagcttcctgctctgagtgtggctgccccttgcggggagaggcagagcaccccaggtttggagggtcctggggtcttctgtggtatggcccaggggggtggtgggggaggaggagtctcgtcccctgagccacagccagctgcttgcctgacctcagagggagcccctccccagtgctctgccctttcttctgccccaggttcagcaggtcaagtgagttcctcctcccacagcggaagcaggtgttggggggcatggaggaaagaaagcgggtgcaagaaggagcacgctcaggctggggcagcacccagggccgtaggacttgggaatggagggtgtctgtctggacccgctggtgcagagggtacaaaagctgggctggggcaggacagacgggccggagtgtagtgagtggcctgtgggaggggcagggggctcccacgcagaagctctgggcagcagccctgacccatccgtgcctggactgcagcgctgcccgcttcacccctggcaaacaggtggcagcctcctgacagaggaacgccggcccaggccgccgtgtctgcagttgggtgctgtgcgctgcccagagggctctttgggctggagagagaaaacaagaacagacacccagtggaggtggctttgctggagggacagacagttgatcatagtggagctggtgagaggaagctgcacccaaaagccatggccgggaacctggatctgactgcagggaaacagaagcgtggtgggcgctgggcgatgatggaatttctaacaaatgctttgtttctgctaaaaaaaaaaaaaaagaaaaaaaaaaaaacaaaaaaaaaaaaa

SEQ ID NO: 37791 - DNA, 1300 bp, Homo sapiens
cggggccgcgcggctgcctgggaggctccgggccagccgcggtccagagcgcgcgaggttcggggagctcggccaggctgctggtacctgcgtccgcccggcgagcaggacaggctgctttggtttgtgacctccaggcaggacggccatcctctccagaatgaagatcttcttgccagtgctgctggctgcccttctgggtgtggagcgagccagctcgctgatgtgcttctcctgcttgaaccagaagagcaatctgtactgcctgaagccgaccatctgctccgaccaggacaactactgcgtgactgtgtctgctagtgccggcattgggaatctcgtgacatttggccacagcctgagcaagacctgttccccggcctgccccatcccagaaggcgtcaatgttggtgtggcttccatgggcatcagctgctgccagagctttctgtgcaatttcagtgcggccgatggcgggctgcgggcaagcgtcaccctgctgggtgccgggctgctgctgagcctgctgccggccctgctgcggtttggcccctgaccgcccagaccctgtcccccgatcccccagctcaggaaggaaagcccagccctttctggatcccacagtgtatgggagcccctgactcctcacgtgcctgatctgtgcccttggtcccaggtcaggcccaccccctgcacctccacctgccccagcccctgcctctgccccaagtggggccagctgccctcacttctggggtggatgatgtgaccttccttgggggactgcggaagggacgagggttccctggagtcttacggtccaacatcaggaccaagtcccatggacatgctgacagggtccccagggagaccgtgtcagtagggatgtgtgcctggctgtgtacgtgggtgtgcagtgcacgtgagagcacgtggcggcttctgggggccatgtttggggagggaggtgtgccagcagcctggagagcctcagtccctgtagccccctgccctggcacagctgcatgcacttcaagggcgtggcagcgctgcccacgaagtggcatatggacacccccagtgctgccggcctcgcttccggtacaaaagtctcagcaggaaaccaaccttaatggcttgttggtggataagacggcatcaacttgtacatttgcccattgagagaactcccaggagcaactgtcctctctccagtacacgcggcacgttgctaagaaggcagatttcaggatattcacattcatgcattacgtatctcacacttcgtgggcagcgggta

SEQ ID NO: 37792 - DNA, 1128 bp, Homo sapiens
cggggccgcgcggctgcctgggaggctccgggccagccgcggtccagagcgcgcgaggttcggggagctcggccaggctgctggtacctgcgtccgcccggcgagcaggacaggctgctttggtttgtgacctccaggcaggacggccatcctctccagaatgaagatcttcttgccagtgctgctggctgcccttctgggtgtggagcgagccagctcgctgatgtgcttctcctgcttgaaccagaagagcaatctgtactgcctgaagccgaccatctgctccgaccaggacaactactgcgtgactgtgtctgctagtgccggcattgggaatctcgtgacatttggccacagcctgagcaagacctgttccccggcctgccccatcccagaaggcgtcaatgttggtgtggcttccatgggcatcagctgctgccagagctttctgtgcaatttcagtgcggccgatggcgggctgcgggcaagcgtcaccctgctgggtgccgggctgctgctgagcctgctgccggccctgctgcggtttggcccctgaccgcccagaccctgtcccccgatcccccagctcaggaaggaaagcccagccctttctggatcccacagtgtatgggagcccctgactcctcacgtgcctgatctgtgcccttggtcccaggtcaggcccaccccctgcacctccacctgccccagcccctgcctctgccccaagtggggccagctgccctcacttctggggtggatgatgtgaccttccttgggggactgcggaagggacgagggttccctggagtcttacggtccaacatcaggaccaagtcccatggacatgctgacagggtccccagggagaccgtgtcagtagggatgtgtgcctggctgtgtacgtgggtgtgcagtgcacgtgagagcacgtggcggcttctgggggccatgtttggggagggaggtgtgccagcagcctggagagcctcagtccctgtagccccctgccctggcacagctgcatgcacttcaagggcacttcgtgggcagcacgaagtggctgcccaaagtgctgggattacaggcgtgagccaccacacccagcctccccccagctcctatcca

SEQ ID NO: 37793 - DNA, 1159 bp, Homo sapiens
  misc_feature (9)..(10): n is a, c, g, or t
  misc_feature (27)..(27): n is a, c, g, or t
aataaggcnnggtacgaggctgggtgntgatcggccgagggggagctcggccaggctgctggtacctgcgtccgcccggcgagcagagcaggacaggctgctttggtttgtgacctccaggcaggacggccatcctctccagaatgaagatcttcttgccagtgctgctggctgcccttctgggtgtggagcgagccagctcgctgatgtgcttctcctgcttgaaccagaagagcaatctgtactgcctgaagccgaccatctgctccgaccaggacaactactgcgtgactgtgtctgctagtgccggcattgggaatctcgtgacatttggccacagcctgagcaagacctgttccccggcctgccccatcccagaaggcgtcaatgttggtgtggcttccatgggcatcagctgctgccagagctttctgtgcaatttcagtgcggccgatggcgggctgcgggcaagcgtcaccctgctgggtgccgggctgctgctgagcctgctgccggccctgctgcggtttggcccctgaccgcccagaccctgtcccccgatcccccagctcaggaaggaaagcccagccctttctggatcccacagtgtatgggagcccctgactcctcacgtgcctgatctgtgcccttggtcccaggtcaggcccaccccctgcacctccacctgccccagcccctgcctctgccccaagtggggccagctgccctcacttctggggtggatgatgtgaccttccttgggggactgcggaagggacgagggttccctggagtcttacggtccaacatcaggaccaagtcccatggacatgctgacagggtccccagggagaccgtgtcagtagggatgtgtgcctggctgtgtacgtgggtgtgcagtgcacgtgagagcacgtggcggcttctgggggccatgtttggggagggaggtgtgccagcagcctggagagcctcagtccctgtagccccctgccctggcacagctgcatgcacttcaagggcagcctttgggggttggggtttctgccacttccgggtctaggccctgccccaaatccagccagtcctgccccagcccacccccacattggagccctcctgctgctttggtgcctcaaataaatacagatgtccccca

SEQ ID NO: 37794 - DNA, 1119 bp, Homo sapiens
ctggaacccgcccccgcttcttgtttaggcactggtggtgcttgcgagcaggacaggctgctttggtttgtgacctccaggcaggacggccatcctctccagaatgaagatcttcttgccagtgctgctggctgcccttctgggtgtggagcgagccagctcgctgatgtgcttctcctgcttgaaccagaagagcaatctgtactgcctgaagccgaccatctgctccgaccaggacaactactgcgtgactgtgtctgctagtgccggcattgggaatctcgtgacatttggccacagcctgagcaagacctgttccccggcctgccccatcccagaaggcgtcaatgttggtgtggcttccatgggcatcagctgctgccagagctttctgtgcaatttcagtgcggccgatggcgggctgcgggcaagcgtcaccctgctgggtgccgggctgctgctgagcctgctgccggccctgctgcggtttggcccctgaccgcccagaccctgtcccccgatcccccagctcaggaaggaaagcccagccctttctggatcccacagtgtatgggagcccctgactcctcacgtgcctgatctgtgcccttggtcccaggtcaggcccaccccctgcacctccacctgccccagcccctgcctctgccccaagtggggccagctgccctcacttctggggtggatgatgtgaccttccttgggggactgcggaagggacgagggttccctggagtcttacggtccaacatcaggaccaagtcccatggacatgctgacagggtccccagggagaccgtgtcagtagggatgtgtgcctggctgtgtacgtgggtgtgcagtgcacgtgagagcacgtggcggcttctgggggccatgtttggggagggaggtgtgccagcagcctggagagcctcagtccctgtagccccctgccctggcacagctgcatgcacttcaagggcagcctttgggggttggggtttctgccacttccgggtctaggccctgccccaaatccagccagtcctgccccagcccacccccacattggagccctcctgctgctttggtgcctcaaataaatacagatgtccccca

SEQ ID NO: 37795 - DNA, 1051 bp, Homo sapiens
  misc_feature (9)..(10): n is a, c, g, or t
  misc_feature (27)..(27): n is a, c, g, or t
aataaggcnnggtacgaggctgggtgntgatcggccgagggatcttcttgccagtgctgctggctgcccttctgggtgtggagcgagccagctcgctgatgtgcttctcctgcttgaaccagaagagcaatctgtactgcctgaagccgaccatctgctccgaccaggacaactactgcgtgactgtgtctgctagtgccggcattgggaatctcgtgacatttggccacagcctgagcaagacctgttccccggcctgccccatcccagaaggcgtcaatgttggtgtggcttccatgggcatcagctgctgccagagctttctgtgcaatttcagtgcggccgatggcgggctgcgggcaagcgtcaccctgctgggtgccgggctgctgctgagcctgctgccggccctgctgcggtttggcccctgaccgcccagaccctgtcccccgatcccccagctcaggaaggaaagcccagccctttctggatcccacagtgtatgggagcccctgactcctcacgtgcctgatctgtgcccttggtcccaggtcaggcccaccccctgcacctccacctgccccagcccctgcctctgccccaagtggggccagctgccctcacttctggggtggatgatgtgaccttccttgggggactgcggaagggacgagggttccctggagtcttacggtccaacatcaggaccaagtcccatggacatgctgacagggtccccagggagaccgtgtcagtagggatgtgtgcctggctgtgtacgtgggtgtgcagtgcacgtgagagcacgtggcggcttctgggggccatgtttggggagggaggtgtgccagcagcctggagagcctcagtccctgtagccccctgccctggcacagctgcatgcacttcaagggcagcctttgggggttggggtttctgccacttccgggtctaggccctgccccaaatccagccagtcctgccccagcccacccccacattggagccctcctgctgctttggtgcctcaaataaatacagatgtccccca

SEQ ID NO: 37796 - DNA, 1141 bp, Homo sapiens
cggggccgcgcggctgcctgggaggctccgggccagccgcggtccagagcgcgcgaggttcggggagctcggccaggctgctggtacctgcgtccgcccggcgagcaggacaggctgctttggtttgtgacctccaggcaggacggccatcctctccagaatgaagatcttcttgccagtgctgctggctgcccttctgggtgtggagcgagaagagcaatctgtactgcctgaagccgaccatctgctccgaccaggacaactactgcgtgactgtgtctgctagtgccggcattgggaatctcgtgacatttggccacagcctgagcaagacctgttccccggcctgccccatcccagaaggcgtcaatgttggtgtggcttccatgggcatcagctgctgccagagctttctgtgcaatttcagtgcggccgatggcgggctgcgggcaagcgtcaccctgctgggtgccgggctgctgctgagcctgctgccggccctgctgcggtttggcccctgaccgcccagaccctgtcccccgatcccccagctcaggaaggaaagcccagccctttctggatcccacagtgtatgggagcccctgactcctcacgtgcctgatctgtgcccttggtcccaggtcaggcccaccccctgcacctccacctgccccagcccctgcctctgccccaagtggggccagctgccctcacttctggggtggatgatgtgaccttccttgggggactgcggaagggacgagggttccctggagtcttacggtccaacatcaggaccaagtcccatggacatgctgacagggtccccagggagaccgtgtcagtagggatgtgtgcctggctgtgtacgtgggtgtgcagtgcacgtgagagcacgtggcggcttctgggggccatgtttggggagggaggtgtgccagcagcctggagagcctcagtccctgtagccccctgccctggcacagctgcatgcacttcaagggcagcctttgggggttggggtttctgccacttccgggtctaggccctgccccaaatccagccagtcctgccccagcccacccccacattggagccctcctgctgctttggtgcctcaaataaatacagatgtccccca

SEQ ID NO: 37797 - DNA, 1146 bp, Homo sapiens
cggggccgcgcggctgcctgggaggctccgggccagccgcggtccagagcgcgcgaggttcggggagctcggccaggctgctggtacctgcgtccgcccggcgagcaggacaggctgctttggtttgtgacctccaggcaggacggccatcctctccagaatgaagatcttcttgccagtgctgctggctgcccttctgggtgtggagcgagccagctcgctgatgtgcttctcctgcttgaaccagaagagcaatctgtactgcctgaagccgaccatctgctccgaccaggacaactactgcgtgactgtgtctgctagtgccggcattgggaatctcgtgacatttggccacagcctgagcaagacctgttccccggcctgccccatcccagaaggcgtcaatgttggtgtggcttccatgggcatcagctgctgccagagctttctgtgcaatttcagtgcggccgatggcgggctgcgggcaagcgtcaccctgctgggtgccgggctgctgctgagcctgctgccggccctgctgcggtttggcccctgaccgcccagaccctgtccccccctttctggatcccacagtgtatgggagcccctgactcctcacgtgcctgatctgtgcccttggtcccaggtcaggcccaccccctgcacctccacctgccccagcccctgcctctgccccaagtggggccagctgccctcacttctggggtggatgatgtgaccttccttgggggactgcggaagggacgagggttccctggagtcttacggtccaacatcaggaccaagtcccatggacatgctgacagggtccccagggagaccgtgtcagtagggatgtgtgcctggctgtgtacgtgggtgtgcagtgcacgtgagagcacgtggcggcttctgggggccatgtttggggagggaggtgtgccagcagcctggagagcctcagtccctgtagccccctgccctggcacagctgcatgcacttcaagggcagcctttgggggttggggtttctgccacttccgggtctaggccctgccccaaatccagccagtcctgccccagcccacccccacattggagccctcctgctgctttggtgcctcaaataaatacagatgtccccca

SEQ ID NO: 37798 - DNA, 748 bp, Homo sapiens
cggggccgcgcggctgcctgggaggctccgggccagccgcggtccagagcgcgcgaggttcggggagctcggccaggctgctggtacctgcgtccgcccggcgagcaggacaggctgctttggtttgtgacctccaggcaggacggccatcctctccagaatgaagatcttcttgccagtgctgctggctgcccttctgggtgtggagcgagccagctcgctgatgtgcttctcctgcttgaaccagaagagcaatctgtactgcctgaagccgaccatctgctccgaccaggacaactactgcgtgactgtgtctgctagtgccggcattgggaatctcgtgacatttggccacagcctgagcaagacctgttccccggcctgccccatcccagaaggcgtcaatgttggtgtggcttccatgggcatcagctgctgccagagctttctgtgcaatttcagtgcggccgatggcgggctgcgggcaagcgtcaccctgctgggtgccgggctgctgctgagcctgctgccggccctgctgcggtttggcccctgaccgcccagaccctgtcccccgatcccccagctcaggaaggaaagcccagccctttctggatcccacagtgtatgggagcccctgactcctcacgtgcctgatctgtgcccttggtcccaggtcaggcccaccccccccacattggagccctcctgctgctttggtgcctcaaataaatacagatgtccccca

SEQ ID NO: 37799 - DNA, 1075 bp, Homo sapiens
  misc_feature (9)..(10): n is a, c, g, or t
  misc_feature (27)..(27): n is a, c, g, or t
  misc_feature (894)..(894): n is a, c, g, or t
aataaggcnnggtacgaggctgggtgntgatcggccgagggggagctcggccaggctgctggtacctgcgtccgcccggcgagcagagcaggacaggctgctttggtttgtgacctccaggcaggacggccatcctctccagaatgaagatcttcttgccagtgctgctggctgcccttctgggtgtggagcgagccagctcgctgatgtgcttctcctgcttgaaccagaagagcaatctgtactgcctgaagccgaccatctgctccgaccaggacaactactgcgtgactgtgtctgctagtgccggcattgggaatctcgtgacatttggccacagcctgagcaagacctgttccccggcctgccccatcccagaaggcgtcaatgttggtgtggcttccatgggcatcagctgctgccagagctttctgtgcaatttcagtgcggccgatggcgggctgcgggcaagcgtcaccctgctgggtgccgggctgctgctgagcctgctgccggccctgctgcggtttggcccctgaccgcccagaccctgtcccccgatcccccagctcaggaaggaaagcccagccctttctggatcccacagtgtatgggagcccctgactcctcacgtgcctgatctgtgcccttggtcccaggtcaggcccaccccctgcacctccacctgccccagcccctgcctctgccccaagtggggccagctgccctcacttctggggtggatgatgtgaccttccttgggggactgcggaagggacgagggttccctggagtcttacggtccaacatcaggaccaagtcccatggacatgctgacagggtccccagggagaccgtgtcagtagggatgtgtgcctggctgtgtacgtgggngccttaagccgtggggtctggggcactgggagcagggtcacaacctgaagctaatcgtacctgcggaaaggtggctaggcactggggtggttgctccgtggcgccaaaagtgcgccctggcgggggggataaatccaaaaaaaaaagttgggggtgcgcacggctacaacgagccattcga

SEQ ID NO: 37800 - DNA, 587 bp, Homo sapiens
  misc_feature (43)..(43): n is a, c, g, or t
aggccggtccgtctgtcagctcagagcaggaccggcttcaggncctgactcggtctcctcttgacccgccccggaggcttgtggtgggctctgtgtttgcagctctcctgaacagagctagatgagggtgggaggccacttcgtgggcagcctgcccacgaagtggggtggatgatgtgaccttccttgggggactgcggaagggacgagggttccctggagtcttacggtccaacatcaggaccaagtcccatggacatgctgacagggtccccagggagaccgtgtcagtagggatgtgtgcctggctgtgtacgtgggtgtgcagtgcacgtgagagcacgtggcggcttctgggggccatgtttggggagggaggtgtgccagcagcctggagagcctcagtccctgtagccccctgccctggcacagctgcatgcacttcaagggcagcctttgggggttggggtttctgccacttccgggtctaggccctgccccaaatccagccagtcctgccccagcccacccccacattggagccctcctgctgctttggtgcctcaaataaatacagatgtccccca

SEQ ID NO: 37801 - DNA, 1474 bp, Homo sapiens
cggggccgcgcggctgcctgggaggctccgggccagccgcggtccagagcgcgcgaggttcggggagctcggccaggctgctggtacctgcgtccgcccggcgagcaggacaggctgctttggtttgtgacctccaggcaggacggccatcctctccagaatgaagatcttcttgccagtgctgctggctgcccttctgggtgtggagcgagccagctcgctgatgtgcttctcctgcttgaaccagaagagcaatctgtactgcctgaagccgaccatctgctccgaccaggacaactactgcgtgactgtgtctgctagtgccggcattgggaatctcgtgacatttggccacagcctgagcaagacctgttccccggcctgccccatcccagaaggcgtcaatgttggtgtggcttccatgggcatcagctgctgccagagctttctgtgcaatttcagtgcggccgatggcgggctgcgggcaagcgtcaccctgctgggtgccgggctgctgctgagcctgctgccggccctgctgcggtttggcccctgaccgcccagaccctgtccccccccacattggagccctcctgctgctttggtgcctcaaataaatacagatgtcccccagcttcctgctctgagtgtggctgccccttgcggggagaggcagagcaccccaggtttggagggtcctggggtcttctgtggtatggcccaggggggtggtgggggaggaggagtctcgtcccctgagccacagccagctgcttgcctgacctcagagggagcccctccccagtgctctgccctttcttctgccccaggttcagcaggtcaagtgagttcctcctcccacagcggaagcaggtgttggggggcatggaggaaagaaagcgggtgcaagaaggagcacgctcaggctggggcagcacccagggccgtaggacttgggaatggagggtgtctgtctggacccgctggtgcagagggtacaaaagctgggctggggcaggacagacgggccggagtgtagtgagtggcctgtgggaggggcagggggctcccacgcagaagctctgggcagcagccctgacccatccgtgcctggactgcagcgctgcccgcttcacccctggcaaacaggtggcagcctcctgacagaggaacgccggcccaggccgccgtgtctgcagttgggtgctgtgcgctgcccagagggctctttgggctggagagagaaaacaagaacagacacccagtggaggtggctttgctggagggacagacagttgatcatagtggagctggtgagaggaagctgcacccaaaagccatggccgggaacctggatctgactgcagggaaacagaagcgtggtgggcgctgggcgatgatggaatttctaacaaatgctttgtttctgctaaaaaaaaaaaaaaagaaaaaaaaaaaaacaaaaaaaaaaaaa

SEQ ID NO: 37802 - DNA, 732 bp, Homo sapiens
cggggccgcgcggctgcctgggaggctccgggccagccgcggtccagagcgcgcgaggttcggggagctcggccaggctgctggtacctgcgtccgcccggcgagcaggacaggctgctttggtttgtgacctccaggcaggacggccatcctctccagaatgaagatcttcttgccagtgctgctggctgcccttctgggtgtggagcgagccagctcgctgatgtgcttctcctgcttgaaccagaagagcaatctgtactgcctgaagccgaccatctgctccgaccaggacaactactgcgtgactgtgtctgctagtgccggcattgggaatctcgtgacatttggccacagcctgagcaagacctgttccccggcctgccccatcccagaaggcgtcaatgttggtgtggcttccatgggcatcagctgctgccagagctttctgtgcaatttcagtgcggccgatggcgggctgcgggcaagcgtcaccctgctgggtgccgggctgctgctgagcctgctgccggccctgctgcggtttggcccctgaccgcccagaccctgtcccctggcagcagctgatgcccatggaagccacaccaacattgacgccttctgggatggggcaggccggggaacaggtcttgctcaggctgtggccaaatgtcacgagattcccaatgccggcactagcagacacagtcaccacttcacccaggggatcct

SEQ ID NO: 37803 - DNA, 947 bp, Homo sapiens
cggggccgcgcggctgcctgggaggctccgggccagccgcggtccagagcgcgcgaggttcggggagctcggccaggctgctggtacctgcgtccgcccggcgagcaggacaggctgctttggtttgtgacctccaggcaggacggccatcctctccagaatgaagatcttcttgccagtgctgctggctgcccttctgggtgtggagcgagtcagctgctgccagagctttctgtgcaatttcagtgcggccgatggcgggctgcgggcaagcgtcaccctgctgggtgccgggctgctgctgagcctgctgccggccctgctgcggtttggcccctgaccgcccagaccctgtcccccgatcccccagctcaggaaggaaagcccagccctttctggatcccacagtgtatgggagcccctgactcctcacgtgcctgatctgtgcccttggtcccaggtcaggcccaccccctgcacctccacctgccccagcccctgcctctgccccaagtggggccagctgccctcacttctggggtggatgatgtgaccttccttgggggactgcggaagggacgagggttccctggagtcttacggtccaacatcaggaccaagtcccatggacatgctgacagggtccccagggagaccgtgtcagtagggatgtgtgcctggctgtgtacgtgggtgtgcagtgcacgtgagagcacgtggcggcttctgggggccatgtttggggagggaggtgtgccagcagcctggagagcctcagtccctgtagccccctgccctggcacagctgcatgcacttcaagggcagcctttgggggttggggtttctgccacttccgggtctaggccctgccccaaatccagccagtcctgccccagcccacaggcacccaattgagctctgtgattgggctaatatacagatgccc

SEQ ID NO: 37804 - DNA, 373 bp, Homo sapiens
cgtactagaggatccatggaccaggcaggacaagtcccatggacatgctgacagggtccccagggagaccgtgtcagtagggatgtgtgcctggctgtgtacgtgggtgtgcagtgcacgtgagagcacgtggcggcttctgggggccatgtttggggagggaggtgtgccagcagcctggagagcctcagtccctgtagccccctgccctggcacagctgcatgcacttcaagggcagcctttgggggttggggtttctgccacttccgggtctaggccctgccccaaatccagccagtcctgccccagcccacccccacattggagccctcctgctgctttggtgcctcaaataaatacagatgtccccca

SEQ ID NO: 37805 - DNA, 536 bp, Homo sapiens
cggggccgcgcggctgcctgggaggctccgggccagccgcggtccagagcgcgcgaggttcggggagctcggccaggctgctggtacctgcgtccgcccggcgagcaggacaggctgctttggtttgtgacctccaggcaggacggccatcctctccagaatgaagatcttcttgccagtgctgctggctgcccttctgggtgtggagcgagccagctcgctgatgtgcttctcctgcttgaaccagaagagcaatctgtactgcctgaagccgaccatctgctccgaccaggacaactactgcgtgactgtgtctgctagtgccggcattggtggctttgctggagggacagacagttgatcatagtggagctggtgagaggaagctgcacccaaaagccatggccgggaacctggatctgactgcagggaaacagaagcgtggtgggcgctgggcgatgatggaatttctaacaaatgctttgtttctgctaaaaaaaaaaaaaaagaaaaaaaaaaaaacaaaaaaaaaaaaa

SEQ ID NO: 37806 - DNA, 518 bp, Homo sapiens
  misc_feature (43)..(43): n is a, c, g, or t
aggccggtccgtctgtcagctcagagcaggaccggcttcaggncctgactcggtctcctcttgacccgccccggaggcttgtggtgggctctgtgtttgcagctctcctgaacagagctagatgagggtgggaggccacttcgtgggcagcctgcccacgaagtggggtggatgatgtgaccttccttgggggactgcggaagggacgagggttccctggagtcttacggtccaacatcaggaccaagtcccatggacatgctgacagggtccccagggagaccgtgtcagtagggatgtgtgcctggctgtgtacgtgggtgtgcagtgcacgtgagagcacgtggcggcttctgggggccatgtttggggagggaggtgtgccagcagcctggagagcctcagtccctgtagccccctgccctggcacagctgcatgcacttcaagggcgtggcagcgctgcccacgaagtggccgaatcttccttcaggatatcaagaaaccagactgtgatgac

SEQ ID NO: 37807 - DNA, 1216 bp, Homo sapiens
cggggccgcgcggctgcctgggaggctccgggccagccgcggtccagagcgcgcgaggttcggggagctcggccaggctgctggtacctgcgtccgcccggcgagcaggacaggctgctttggtttgtgacctccaggcaggacggccatcctctccagaatgaagatcttcttgccagtgctgctggctgcccttctgggtgtggagcgagccagctcgctgatgtgcttctcctgcttgaaccagaagagcaatctgtactgcctgaagccgaccatctgctccgaccaggacaactactgcgtgactgtgtctgctagtgccggcattgggaatctcgtgacatttggccacagcctgagcaagacctgttccccggcctgccccatcccagaaggcgtcaatgttggtgtggcttccatgggcatcagctgctgccagagctttctgtgcaatttcagtgcggccgatggcgggctgcgggcaagcgtcaccctgctgggtgccgggctgctgctgagcctgctgccggccctgctgcggtttggcccctgaccgcccagaccctgtcccccgatcccccagctcaggaaggaaagcccagccctttctggatcccacagtgtatgggagcccctgactcctcacgtgcctgatctgtgcccttggtcccaggtcaggcccaccccctgcacctccacctgccccagcccctgcctctgccccaagtggggccagctgccctcacttctggggtggatgatgtgaccttccttgggggactgcggaagggacgagggttccctggagtcttacggtccaacatcaggaccaagtcccatggacatgctgacagggtccccagggagaccgtgtcagtagggatgtgtgcctggctgtgtacgtgggtgtgcagtgcacgtgagagcacgtggcggcttctgggggccatgtttggggagggaggtgtgccagcagcctggagagcctcagtccctgtagccccctgccctggcacagctgcatgcacttcaagggcagcctttgggggttggggtttctgccacttccgggtctaggccctgccccaaatccagccagtcctgccccagcccacccccacattggagccctcctgctgctttggtgcctcaaataaatacagatgtcccccaaaaaaaaaaaaagaaaaaaaaaaaaacaaaaaaaaaaaaa

SEQ ID NO: 37808 - DNA, 1153 bp, Homo sapiens
cggggccgcgcggctgcctgggaggctccgggccagccgcggtccagagcgcgcgaggttcggggagctcggccaggctgctggtacctgcgtccgcccggcgagcaggacaggctgctttggtttgtgacctccaggcaggacggccatcctctccagaatgaagatcttcttgccagtgctgctggctgcccttctgggtgtggagcgagccagctcgctgatgtgcttctcctgcttgaaccagaagagcaatctgtactgcctgaagccgaccatctgctccgaccaggacaactactgcgtgactgtgtctgctagtgccggcattgggaatctcgtgacatttggccacagcctgagcaagacctgttccccggcctgccccatcccagaaggcgtcaatgttggtgtggcttccatgggcatcagctgctgccagagctttctgtgcaatttcagtgcggccgatggcgggctgcgggcaagcgtcaccctgctgggtgccgggctgctgctgagcctgctgccggccctgctgcggtttggcccctgaccgcccagaccctgtcccccgatcccccagctcaggaaggaaagcccagccctttctggatcccacagtgtatgggagcccctgactcctcacgtgcctgatctgtgcccttggtcccaggtcaggcccaccccctgcacctccacctgccccagcccctgcctctgccccaagtggggccagctgccctcacttctggggtggatgatgtgaccttccttgggggactgcggaagggacgagggttccctggagtcttacggtccaacatcaggaccaagtcccatggacatgctgacagggtccccagggagaccgtgtcagtagggatgtgtgcctggctgtgtacgtgggtgtgcagtgcacgtgagagcacgtggcggcttctgggggccatgtttggggagggaggtgtgccagcagcctggagagcctcagtccctgtagccccctgccctggcacagctgcatgcacttcaagggcagcctttgggggttggggtttctgccacttccgggtctaggccctgccccaaatccagccagtcctgccccagcccacccccacagagagagcgtcccccacagagagagcgt

SEQ ID NO: 37809 - DNA, 1275 bp, Homo sapiens
  misc_feature (6)..(6): n is a, c, g, or t
  misc_feature (24)..(24): n is a, c, g, or t
cagcanctactggtatgcatcgcnctctgtaacgcgcgaggttcggggagctcggccaggctgctggtacctgcgtccgcccggcgggtctcactctgttgcccaggctgcagtgcagtggcatgatcatagttcacttcagtcttgaactccctggctcaagagatcctcccacctcagcctcccaagtagctgaccacagagcaggacaggctgctttggtttgtgacctccaggcaggacggccatcctctccagaatgaagatcttcttgccagtgctgctggctgcccttctgggtgtggagcgagccagctcgctgatgtgcttctcctgcttgaaccagaagagcaatctgtactgcctgaagccgaccatctgctccgaccaggacaactactgcgtgactgtgtctgctagtgccggcattgggaatctcgtgacatttggccacagcctgagcaagacctgttccccggcctgccccatcccagaaggcgtcaatgttggtgtggcttccatgggcatcagctgctgccagagctttctgtgcaatttcagtgcggccgatggcgggctgcgggcaagcgtcaccctgctgggtgccgggctgctgctgagcctgctgccggccctgctgcggtttggcccctgaccgcccagaccctgtcccccgatcccccagctcaggaaggaaagcccagccctttctggatcccacagtgtatgggagcccctgactcctcacgtgcctgatctgtgcccttggtcccaggtcaggcccaccccctgcacctccacctgccccagcccctgcctctgccccaagtggggccagctgccctcacttctggggtggatgatgtgaccttccttgggggactgcggaagggacgagggttccctggagtcttacggtccaacatcaggaccaagtcccatggacatgctgacagggtccccagggagaccgtgtcagtagggatgtgtgcctggctgtgtacgtgggtgtgcagtgcacgtgagagcacgtggcggcttctgggggccatgtttggggagggaggtgtgccagcagcctggagagcctcagtccctgtagccccctgccctggcacagctgcatgcacttcaagggcagcctttgggggttggggtttctgccacttccgggtctaggccctgccccaaatccagccagtcctgccccagcccacccccacattggagccctcctgctgctttggtgcctcaaataaatacagatgtccccca

SEQ ID NO: 37810 - DNA, 995 bp, Homo sapiens
ctctctagggacgactggagtgagcactggcctgggagtctgaagattgtgtcttcatacatagatcatcactttctatatggcgactttggtcagtcatgtagtgtttacgggccttatgtccctaatgtgtgagtaattgaaggcaattggaatctcgtgacatttggccacagcctgagcaagacctgttccccggcctgccccatcccagaaggcgtcaatgttggtgtggcttccatgggcatcagctgctgccagagctttctgtgcaatttcagtgcggccgatggcgggctgcgggcaagcgtcaccctgctgggtgccgggctgctgctgagcctgctgccggccctgctgcggtttggcccctgaccgcccagaccctgtcccccgatcccccagctcaggaaggaaagcccagccctttctggatcccacagtgtatgggagcccctgactcctcacgtgcctgatctgtgcccttggtcccaggtcaggcccaccccctgcacctccacctgccccagcccctgcctctgccccaagtggggccagctgccctcacttctggggtggatgatgtgaccttccttgggggactgcggaagggacgagggttccctggagtcttacggtccaacatcaggaccaagtcccatggacatgctgacagggtccccagggagaccgtgtcagtagggatgtgtgcctggctgtgtacgtgggtgtgcagtgcacgtgagagcacgtggcggcttctgggggccatgtttggggagggaggtgtgccagcagcctggagagcctcagtccctgtagccccctgccctggcacagctgcatgcacttcaagggcagcctttgggggttggggtttctgccacttccgggtctaggccctgccccaaatccagccagtcctgccccagcccacccccacattggagccctcctgctgctttggtgcctcaaataaatacagatgtccccca

SEQ ID NO: 37811 - DNA, 1042 bp, Homo sapiens
gggtcgggagcccgcaggctgctggtactgcgtcgccggcgagcaggacaggctgctttggtttgtgacctccaggcaggacggccatcctctccagaatgaagatcttcttgccagtgctgctggctgcccttctgggtgtggagcgagccagctcgctgatgtgcttctcctgcttgaaccagaagagcaatctgtactgcctgaagccgaccatctgctccgaccaggacaactactgcgtgactgtgtctgctagtgccggcattgggaatctcgtgacatttggccacagcctgagcaagacctgttccccggcctgccccatcccagaaggcgtcaatgttggtgtggcttccatgggcatcagctgctgccagagctttctgtgcaatttcagtgcggccgatggcgggctgcgggcaagcgtcaccctgctggcgatcccccagctcaggaaggaaagcccagccctttctggatcccacagtgtatgggagcccctgactcctcacgtgcctgatctgtgcccttggtcccaggtcaggcccaccccctgcacctccacctgccccagcccctgcctctgccccaagtggggccagctgccctcacttctggggtggatgatgtgaccttccttgggggactgcggaagggacgagggttccctggagtcttacggtccaacatcaggaccaagtcccatggacatgctgacagggtccccagggagaccgtgtcagtagggatgtgtgcctggctgtgtacgtgggtgtgcagtgcacgtgagagcacgtggcggcttctgggggccatgtttggggagggaggtgtgccagcagcctggagagcctcagtccctgtagccccctgccctggcacagctgcatgcacttcaagggcagcctttgggggttggggtttctgccacttccgggtctaggccctgccccaaatccagccagtcctgccccagcccacccccacattggagccctcctgctgctttggtgcctcaaataaatacagatgtccccca

SEQ ID NO: 37812 - DNA, 690 bp, Homo sapiens
cggggccgcgcggctgcctgggaggctccgggccagccgcggtccagagcgcgcgaggttcggggagctcggccaggctgctggtacctgcgtccgcccggcgagcaggacaggctgctttggtttgtgacctccaggcaggacggccatcctctccagaatgaagatcttcttgccagtgctgctggctgcccttctgggtgtggagcgagccagctcgctgatgtgcttctcctgcttgaaccagaagagcaatctgtactgcctgaagccgaccatctgctccgaccaggacaactactgcgtgactgtgtctgctagtgccggcattgggaatctcgtgacatttggccacagcctgagcaagacctgttccccggcctgccccatcccagaaggcgtcaatgttggtgtggcttccatgggcatcagctgctgccagagctttctgtgcaatttcagtgcggccgatggcgggctgcgggcaagcgtcaccctgctgggtgccgggctgctgctgagcctgctgccggccctgctgcggtttggcccctgaccgcccagaccctgtccccctgccacttccgggtctaggccctgccccaaatccagccagtcctgccccagcccacccccacattggagccctcctgctgctttggtgcctcaaataaatacagatgtccccca

SEQ ID NO: 37813 - DNA, 629 bp, Homo sapiens
cggggccgcgcggctgcctgggaggctccgggccagccgcggtccagagcgcgcgaggttcggggagctcggccaggctgctggtacctgcgtccgcccggcgagcaggacaggctgctttggtttgtgacctccaggcaggacggccatcctctccagaatgaagatcttcttgccagtgctgctggctgcccttctgggtgtggagcgagccagctcgctgatgtgcttctcctgcttgaaccagaagagcaatctgtactgcctgaagccgaccatctgctccgaccaggacaactactgcgtgactgtgtctgctagtgccggcattgggaatctcgtgacatttggccacagcctgagcaagacctgttccccggcctgccccatcccagaaggcgtcaatgttggtgtggcttccatgggcatcagctgctgccagagctttctgtgcaatttcagtgcggccgatggcgggctgcgggcaagcgtcaccctgctgggtgccgggctgctgctgagcctgctgccggccctgctgcggtttggcccctgaccgcccagaccctgtccccgcctcctcaaaaagcaccagcacgaattcccttagcaccagcacgaattccctt

SEQ ID NO: 37814 - DNA, 711 bp, Homo sapiens
  misc_feature (43)..(43): n is a, c, g, or t
aggccggtccgtctgtcagctcagagcaggaccggcttcaggncctgactcggtctcctcttgacccgccccggaggcttgtggtgggctctgtgtttgcagctctcctgaacagagctagatgagggtgggaggccacttcgtgggcagcctgcccacgaagtggggtggatgatgtgaccttccttgggggactgcggaagggacgagggttccctggagtcttacggtccaacatcaggaccaagtcccatggacatgctgacagggtccccagggagaccgtgtcagtagggatgtgtgcctggctgtgtacgtgggtgtgcagtgcacgtgagagcacgtggcggcttctgggggccatgtttggggagggaggtgtgccagcagcctggagagcctcagtccctgtagccccctgccctggcacagctgcatgcacttcaagggcgtggcagcgctgcccacgaagtggcatatggacacccccagtgctgccggcctcgcttccggtacaaaagtctcagcaggaaaccaaccttaatggcttgttggtggataagacggcatcaacttgtacatttgcccattgagagaactcccaggagcaactgtcctctctccagtacacgcggcacgttgctaagaaggcagatttcaggatattcacattcatgcattacgtatctcacacttcgtgggcagcgggta

SEQ ID NO: 37815 - DNA, 207 bp, Homo sapiens
gtggctttgctggagggacagacagttgatcatagtggagctggtgagaggaagctgcacccaaaagccatggccgggaacctggatctgactgcagggaaacagaagcgtggtgggcgctgggcgatgatggaatttctaacaaatgctttgtttctgctaaagctaacttgcgcttccatctctggcatctcctccacttcccag

SEQ ID NO: 37816 - DNA, 447 bp, Homo sapiens
aatctaaatatattctattttttaaagagaaaacaggattggtattaacacagtatagtgtggttgtttataaagtaaaacctgtagagaacagtatgactcctgtgggaaaagaagaatacacctttattctggcatttaaagaagaaagccatccaggactggcgccgcggctcatacctgcaaccccagcagtttgagaggccgaagagggccaattgcttgagtccaggaatttgagaccagcctgggcaacatggagataccccgtctctacataaaatacaaaattttggtgggcgtgatggcaggtgcctgtaatcccagctatttgggagctaaggtgagaggactgctttagcaatggaagacaaggttgcagtgagtggagatcatgccactgcactccagggcaggtgacagaatgagaccctatctcaaaaaata

SEQ ID NO: 37817 - DNA, 370 bp, Homo sapiens
aaatcctttttcccccatagttttatgattttttttttactttagatgttgttatcatagattctagctttccttatataatacaaatatatattattgattctaagtcaaatttttttagaattttaatatctgacagttgggatgtgacttagaaataagtggtgtcttaaattagatgatatgcagtgtgatgtgaatatataaaatatgtgatgtcagtgaatatatgtgtatatatacatgcacgtgcatacattgattgggagctggcctactattagatagatttgaaattggtattcacgagtagactagtttcctaaagtgtatgggattatcatagatctgctgttggacccctgtatgt

SEQ ID NO: 37818 - DNA, 1275 bp, Homo sapiens
  misc_feature (23)..(23): n is a, c, g, or t
ggctcgagtgcctggcgggctcnggcttccgcgtccgcccctgctccggcttcgcccgcagctccgcgcccgcgggcaaccaagcccccagcgaagcccgcacagctccgggtgccaggacggggggccatgccgtgccggagggaggaggaagaggaagccggcgaggaggcggagggggaggaagaggaggacgacagcttcctcctgctgcagcagtcggtgacgctgggcagctcgggcgaggtggaccggctggtggcccagatcggcgagacgctgcagctggacgcggcgcaggacagcccggcctcgccgtgcgcgcccccgggggtgccgctgcgggccccggggcccctggctgcggcggtgccggcggacaaggcccggcccccggcggtgccgctgctgctgccgcccgcttcggctgagacggtgggcccggcgccctctggggccctgcgctgcgccctaggggaccgcggccgcgtgcgcggacgcgctgcgccctactgcgtggcggaggtcgccgcaggccccagcgcgctgccggggccgtgccggcgaggatggctcagggacgcggtcacctcccgccgcttgcagcagcgccgatggacccaagccggggcacgcgccggcgacgacgacccgcatcggctcctccagcagctcgtgctctcgggaaacctcatcaaggaagccgtgcggagactccaacgagccgtcgccgcggttgcagccacgggccccgcaagcgcccctgggcccgggggaggccgcagcggacctgaccgcattgccctgcagccctcaggctccttgctctgacgcaggcctcctggaggaggaagtggaggccgctgcgtagacccaacagcgtccagttcctactaactctgagctgaagccgacgtcgccagcctgggagcgaccactttggctgcggggaggcgcgtggggagagatctcaaccagagaagttaccagccgcggcgaggccgtcggagaaaacttaagcgtggagaaatgtatgcgccagggtgcttccgtggggcatgagaatttcccgggccatccaagcccaaggacctgggataaactgggagaactatggcagctacttgcatcgacttgtacctcacttagcccttgggggcgtcgtgagcttggattgtttaaggagggctcaggggtaggaatcgcgatggctttataacaatacttgaaaactaacgacacgcatacgcccagtacgcacatacgcccagatat

SEQ ID NO: 37819 - DNA, 1212 bp, Homo sapiens
  misc_feature (23)..(23): n is a, c, g, or t
ggctcgagtgcctggcgggctcnggcttccgcgtccgcccctgctccggcttcgcccgcagctccgcgcccgcgggcaaccaagcccccagcgaagcccgcacagctccgggtgccaggacggggggccatgccgtgccggagggaggaggaagaggaagccggcgaggaggcggagggggaggaagaggaggacgacagcttcctcctgctgcagcagtcggtgacgctgggcagctcgggcgaggtggaccggctggtggcccagatcggcgagacgctgcagctggacgcggcgcaggacagcccggcctcgccgtgcgcgcccccgggggtgccgctgcgggccccggggcccctggctgcggcggtgccggcggacaaggcccggcccccggcggtgccgctgctgctgccgcccgcttcggctgagacggtgggcccggcgccctctggggccctgcgctgcgccctaggggaccgcggccgcgtgcgcggacgcgctgcgccctactgcgtggcggaggtcgccgcaggccccagcgcgctgccggggccgtgccggcgaggatggctcagggacgcggtcacctcccgccgcttgcagcagcgccgatggacccaagccggggcacgcgccggcgacgacgacccgcatcggctcctccagcagctcgtgctctcgggaaacctcatcaaggaagccgtgcggagactccaacgagccgtcgccgcggttgcagccacgggccccgcaagcgcccctgggcccgggggaggccgcagcggacctgaccgcattgccctgcagccctcaggctccttgctctgacgcaggcctcctggaggaggaagtggaggccgctgcgtagacccaacagcgtccagttcctactaactctgagctgaagccgacgtcgccagcctgggagcgaccactttggctgcggggaggcgcgtggggagagatctcaaccagagaagttaccagccgcggcgaggccgtcggagaaaacttaagcgtggagaaatgtatgcgccagggtgcttccgtggggcatgagaatttcccgggccatccaagcccaaggacctgggataaactgggagatcacgagctggctcaatcactagtgatattcgcgccgcctgcagatcgacatatgagagctcccaacgcgtgaatgcatagcttgatattaataggcaccaa

SEQ ID NO: 37820 - DNA, 2441 bp, Homo sapiens
  misc_feature (23)..(23): n is a, c, g, or t
ggctcgagtgcctggcgggctcnggcttccgcgtccgcccctgctccggcttcgcccgcagctccgcgcccgcgggcaaccaagcccccagcgaagcccgcacagctccgggtgccaggacggggggccatgccgtgccggagggaggaggaagaggaagccggcgaggaggcggagggggaggaagaggaggacgacagcttcctcctgctgcagcagtcggtgacgctgggcagctcgggcgaggtggaccggctggtggcccagatcggcgagacgctgcagctggacgcggcgcaggacagcccggcctcgccgtgcgcgcccccgggggtgccgctgcgggccccggggcccctggctgcggcggtgccggcggacaaggcccggcccccggcggtgccgctgctgctgccgcccgcttcggctgagacggtgggcccggcgccctctggggccctgcgctgcgccctaggggaccgcggccgcgtgcgcggacgcgctgcgccctactgcgtggcggaggtcgccgcaggccccagcgcgctgccggggccgtgccggcgaggatggctcagggacgcggtcacctcccgccgcttgcagcagcgccgatggacccaagccggggcacgcgccggcgacgacgacccgcatcggctcctccagcagctcgtgctctcgggaaacctcatcaaggaagccgtgcggagactccaacgagccgtcgccgcggttgcagccacgggccccgcaagcgcccctgggcccgggggaggccgcagcggacctgaccgcattgccctgcagccctcaggctccttgctctgacgcaggcctcctggaggaggaagtggaggccgctgcgtagacccaacagcgtccagttcctactaactctgagctgaagccgacgtcgccagcctgggagcgaccactttggctgcggggaggcgcgtggggagagatctcaaccagagaagttaccagccgcggcgaggccgtcggagaaaacttaagcgtggagaaatgtatgcgccagggtgcttccgtggggcatgagaatttcccgggccatccaagcccaaggacctgggataaactgggagaactatggcagctacttgcatcgacttgtacctcacttagcccttgggggcgtcgtgagcttggattgtttaaggagggctcaggggtaggaatcgcgatggctttataacaatacttgaaaactaacgacacgcatacattttcttattttctggtggaggagcttagtaagtggtgctacaattgctgtgcaaagaaattccagaggggagaagaatgtaaaagtttggtggtgggtggcttggcattgcccctttttcccaccgattcggtggctggtgaaggtgggagatgtgaactccaattaagggactggagagaggtgaagaattttgcaggtgggagatttggatttgaatgtggacttgtaaatgacttgaccttgccatctgtgttcaaggtcacggtttgctgtggggttcctgggagagcttactcaccccggagtcttttctttctcttgctccaagaagagccctgttggtgctttaccaccgcttggagtctcccgaggacacaaacaggcagagagggacgtgtagggagagttctttcctgttttctgtgctttcctttttacaggactcccggaaggccactcatggccatgccaggagctttctcagaaacagtcataaacgatctcttgagtctctttcttgtcctcccagctgagctttcttattccaccctttctggtgtctataggaatgcatgagagaccctggacgtttttctgctctcttctggccctccatggagccatgggcctcggcctcggcggctcctcaccctcacaatttatttcctcctcccgtgccagcccttcttttgtgtctgaaaccggttttaaaatgtgactctcccagagaagaagccgctggctgtatgaaacttgacggcgcttttgtaaggtgccacccccaaactttaaggtagctaaaccaatttttaaaagattcaatggcttgttcatcctccagatgtagctattgatgtacacttcgcaacggagtgtctgaaattgtggtggtcctgatttataggatttcataattaaaatgtctgctgaataaaaaaaaaaaaaaaaaaaaaaaaaaaaaaaaaaaaaaaaaaaaaaaaaaaaaaaaaaaaaaaaaaaaaaaaaaaaaacgaagcgcgggggcgcgcgcgaggccaccaagagaagagaagcgccccgatgagaaaccccagcagggggaggggcggggaggcacaaatgggaggagaaaaggaaggggccacgagggggtcccacagggaaaccccgggggacgaaaacagagggggggggtccgcaagacaaaggc

SEQ ID NO: 37821 - DNA, 2187 bp, Homo sapiens
  misc_feature (23)..(23): n is a, c, g, or t
ggctcgagtgcctggcgggctcnggcttccgcgtccgcccctgctccggcttcgcccgcagctccgcgcccgcgggcaaccaagcccccagcgaagcccgcacagctccgggtgccaggacggggggccatgccgtgccggagggaggaggaagaggaagccggcgaggaggcggagggggaggaagaggaggacgacagcttcctcctgctgcagcagtcggtgacgctgggcagctcgggcgaggtggaccggctggtggcccagatcggcgagacgctgcagctggacgcggcgcaggacagcccggcctcgccgtgcgcgcccccgggggtgccgctgcgggccccggggcccctggctgcggcggtgccggcggacaaggcccggcccccggcggtgccgctgctgctgccgcccgcttcggctgagacggtgggcccggcgccctctggggccctgcgctgcgccctaggggaccgcggccgcgtgcgcggacgcgctgcgccctactgcgtggcggaggtcgccgcaggccccagcgcgctgccggggccgtgccggcgaggatggctcagggacgcggtcacctcccgccgcttgcagcagcgccgatggacccaagccggggcacgcgccggcgacgacgacccgcatcggctcctccagcagctcgtgctctcgggaaacctcatcaaggaagccgtgcggagactccaacgagccgtcgccgcggttgcagccacgggccccgcaagcgcccctgggcccgggggaggccgcagcggacctgaccgcattgccctgcagccctcaggctccttgctctgacgcaggcctcctggaggaggaagtggaggccgctgcgtagacccaacagcgtccagttcctactaactctgagctgaagccgacgtcgccagcctgggagcgaccactttggctgcggggaggcgcgtggggagagatctcaaccagagaagttaccagccgcggcgaggccgtcggagaaaacttaagcgtggagaaatgtatgcgccagggtgcttccgtggggcatgagaatttcccgggccatccaagcccaaggacctgggataaactgggagaactatggcagctacttgcatcgacttgtacctcacttagcccttgggggcgtcgtgagcttggattgtttaaggagggctcaggggtaggaatcgcgatggctttataacaatacttgaaaactaacgacacgcatacattttcttattttctggtggaggagcttagtaagtggtgctacaattgctgtgcaaagaaattccagaggggagaagaatgtaaaagtttggtggtgggtggcttggcattgcccctttttcccaccgattcggtggctggtgaaggtgggagatgtgaactccaattaagggactggagagaggtgaagaattttgcaggtgggagatttggatttgaatgtggacttgtaaatgacttgaccttgccatctgtgttcaaggtcacggtttgctgtggggttcctgggagagcttactcaccccggagtcttttctttctcttgctccaagaagagccctgttggtgctttaccaccgcttggagtctcccgaggacacaaacaggcagagagggacgtgtagggagagttctttcctgttttctgtgctttcctttttacaggactcccggaaggccactcatggccatgccaggagctttctcagaaacagtcataaacgatctcttgagtctctttcttgtcctcccagctgagctttcttattccaccctttctggtgtctataggaatgcatgagagaccctggacgtttttctgctctcttctggccctccatggagccatgggcctcggcctcggcggctcctcaccctcacaatttatttcctcctcccgtgccagcccttcttttgtgtctgaaaccggttttaaaatgtgactctcccagagaagaagccgctggctgtatgaaacttgacggcgcttttgtaaggtgccacccccaaactttaaggtagctaaaccaatttttaaaagattcaatggcttgttcatcctccagatgtagctattgatgtacacttcgcaacggagtgtctgaaattgtggtggtcctgatttataggatttcataattaaaatgtctgctgaataaa

SEQ ID NO: 37822 - DNA, 2232 bp, Homo sapiens
  misc_feature (23)..(23): n is a, c, g, or t
ggctcgagtgcctggcgggctcnggcttccgcgtccgcccctgctccggcttcgcccgcagctccgcgcccgcgggcaaccaagcccccagcgaagcccgcacagctccgggtgccaggacggggggccatgccgtgccggagggaggaggaagaggaagccggcgaggaggcggagggggaggaagaggaggacgacagcttcctcctgctgcagcagtcggtgacgctgggcagctcgggcgaggtggaccggctggtggcccagatcggcgagacgctgcagctggacgcggcgcaggacagcccggcctcgccgtgcgcgcccccgggggtgccgctgcgggccccggggcccctggctgcggcggtgccggcggacaaggcccggcccccggcggtgccgctgctgctgccgcccgcttcggctgagacggtgggcccggcgccctctggggccctgcgctgcgccctaggggaccgcggccgcgtgcgcggacgcgctgcgccctactgcgtggcggaggtcgccgcaggccccagcgcgctgccggggccgtgccggcgaggatggctcagggacgcggtcacctcccgccgcttgcagcagcgccgatggacccaagccggggcacgcgccggcgacgacgacccgcatcggctcctccagcagctcgtgctctcgggaaacctcatcaaggaagccgtgcggagactccaacgagccgtcgccgcggttgcagccacgggccccgcaagcgcccctgggcccgggggaggccgcagcggacctgaccgcattgccctgcagccctcaggctccttgctctgacgcaggcctcctggaggaggaagtggaggccgctgcgtagacccaacagcgtccagttcctactaactctgagctgaagccgacgtcgccagcctgggagcgaccactttggctgcggggaggcgcgtggggagagatctcaaccagagaagttaccagccgcggcgaggccgtcggagaaaacttaagcgtggagaaatgtatgcgccagggtgcttccgtggggcatgagaatttcccgggccatccaagcccaaggacctgggataaactgggagaactatggcagctacttgcatcgacttgtacctcacttagcccttgggggcgtcgtgagcttggattgtttaaggagggctcaggggtaggaatcgcgatggctttataacaatacttgaaaactaacgacacgcatacattttcttattttctggtggaggagcttagtaagtggtgctacaattgctgtgcaaagaaattccagaggggagaagaatgtaaaagtttggtggtgggtggcttggcattgcccctttttcccaccgattcggtggctggtgaaggtgggagatgtgaactccaattaagggactggagagaggtgaagaattttgcaggtgggagatttggatttgaatgtggacttgtaaatgacttgaccttgccatctgtgttcaaggtcacggtttgctgtggggttcctgggagagcttactcaccccggagtcttttctttctcttgctccaagaagagccctgttggtgctttaccaccgcttggagtctcccgaggacacaaacaggcagagagggacgtgtagggagagttctttcctgttttctgtgctttcctttttacaggactcccggaaggccactcatggccatgccaggagctttctcagaaacagtcataaacgatctcttgagtctctttcttgtcctcccagctgagctttcttattccaccctttctggtgtctataggaatgcatgagagaccctggacgtttttctgctctcttctggccctccatggagccatgggcctcggcctcggcggctcctcaccctcacaatttatttcctcctcccgtgccagcccttcttttgtgtctgaaaccggttttaaaatgtgactctcccagagaagaagccgctggctgtatgaaacttgacggcgcttttgtaaggtgccacccccaaactttaaggtagctaaaccaatttttaaaagattcaatggcttgttcatcctccagatgtagctattgatgtacacttcgcaacggagtgtctgaaattgtggtggtcctgatttataggatttcataattaaaatgtctgctgaataaatttggcttttgttttggaaataaaaaatacatatcggggatcctc

SEQ ID NO: 37823 - DNA, 496 bp, Homo sapiens
taagcagtgaagtcattgggtcctgggcttttgcttgctaggagacttatgattacacttgatcttagccaaaaggctgagaagtgataggagacttattattacagcttcaatctcattatttgttattagtctgttcaggtttcagatttgttcatggttgcatttcttggtattagttatgtctcctttttcacttctgattttatctggatcttttctcttttttttcttcatctggctaaagctttgtctattttgtttattttttcaaaaaaacaacttttcatttcattgatcttttgtatttttttggtctgtttccatttaacttatttctgctctgacctttattctttcttttcttttgagtatatacctagcaggattgctggatcacgtggtagttcttagttttgtgaggaactcccatactgttctccacagtggctgtactaatttacattcccaccaacagtgtacaggaagtgctagg

SEQ ID NO: 37824 - DNA, 589 bp, Homo sapiens
taagcagtgaagtcattgggtcctgggcttttgcttgctaggagacttatgattacacttgatcttagccaaaaggctgagaagtgataggagacttattattacagcttcaatctcattatttgttattagtctgttcaggtttcagatttgttcatggttgcatttcttggtattagttatgtctcctttttcacttctgattttatctggatcttttctcttttttttcttcatctggctaaagctttgtctattttgtttattttttcaaaaaaacaacttttcatttcattgatcttttgtatttttttggtctgtttccatttaacttatttctgctctgacctttattctttcttttcttctactaattttgggtttggtttgctcttgcttttctatgtttctggctggcctcacaggacacagactactaattttgggtttggttttctcttgcttttctagttctttaagatgcatcattaggttatttattagatgtttttccactttttgacgtaggtgtttattcctataaactctcttagtactgctttcattgtatgacatacgttttgatatg

SEQ ID NO: 37825 - DNA, 1449 bp, Homo sapiens
ggctggagtgcagtagtgtgaccataactcactggagcctctacctcctgggcttcaagcagtcctcttaccgcacctcctgagcagctgggaccacagacatgcaccccacgcctggctaattttttaatttttttgtagagatagggtctcactatgttgctcaagctgctctcgaactcctgggctcaagcaatcctccctccttggcctcccaaactgctgggattacaggtgtcagccaatgtgcctggccaaggatgtgccttttgttactcaaactaaggtacttgggagccaggtcagaccctgcctttgagtagcccttaaagcaatcgtgaggggattctgcaaagtggtgtgtcatcatggttagtcttgaggaaaaagcccagaggatggacaacagagaaggtgggagattgctcagggggctgggaagggcaggctgtgctcatgcatgtgtgcgtgtgtgtgtgtgtgtgtgtgtgtgtgtttgtgtgcgcctgcgtgcagggggagggtggcacagccagggtcatgacccccctcacagcagaaatgggggacacattgggcaggtgtccttagggataacatcaaggtagcccaaaccctgctttgaggtggagcagggagaccaccccctcgcagggccacctgtacctgatggtgactgcgtctgcaggcaggatagcctccctgtccccactagggaagagctgaggaatacaggagcttggaagtggaaccacaaccaattgagagtatatgtgccattggaagaagagcaatagaagatttgcaacatgaactaagatcaagaaatgctaacaaagtaattgttcaaagaacacagtagatggaatacataaaatggatacagctagagaacaagtagagaaggtggaaagtcagattagggaactactctggaagtaaaataggaactttaaaggaactattaagagagatgggagagaataagggctggtgtccagatagcagactcaaggagaagggatatgtttagtggtggttagggattgtctgaggaagcaggtggttggggttctctggactgggaagtggtccacagagggccccatggcatgttgagcttatctgtattctcaccatggaccacacaaaagccaagcaaaacacatcagacttccccacagtggaactggcacaagataacagtgcacccaatttatccaaattgtcactttattgtgcagttgtaataaaaaatatttttaagcatgtaagtttcagaagttttaacacacagaggtccgtactgaaaacagttttggtcaagatactaagagaaataaattcaagatgtgctataagatgtatgagagtaaggagaactcagtactaggtgaggtctgttgtgtaaattgtgtgtgtgtgtgtgtacacacacaccagtcaagt

SEQ ID NO: 37826 - DNA, 419 bp, Homo sapiens
ttttttttttttgagatggagtctcactctgtcgtccaggctggagtgcagtggcacgatcttgactcactgcaacctccgcctcccaagcgattcccctgcctcaacctcctgagtagctgggattatggccgcccacatccatgcccagctaatttttatatttttagtagagacggggttttaccatgttggccaggctggtttcgaatgcctgacctcaagtgatccgcccacctcggcctctcaaagtgccaggattacaggggtgagccaccgtgcccggcctcacttaatatttcttaagtcctgcagtcctcacaatgactcaaaagtaggtactactgttattttatctttttatgttttgaaacagggtctcactctgtcgccctggctatagtacacaggcacgatca

SEQ ID NO: 37827 - DNA, 1176 bp, Homo sapiens
gttattcactttttaccttcctatccaggtgcactgccaaaatgctctgctttttcagactgtggctgcttctcccccacccccaagagccaaataacttaggggcagcttttaatttttttttgtaaaaagtactgttgacttgggatttttaaggtaaaaattttggtacaggagctattctgtgtgccatgatggacagaactggaattgctattttgtgatttgggacagttgaggattccttcctagaacattattatgtagattgtttgtggcatggccttgatccccatcctcacatacatcaagaatgttgttccttgcacttgacggccacattcccatgtttgttatctattactgcattataacccctatcaaaactttgtggcttaaagtaataccagtttattagtttttactctggaggttggctgggcttagctacatggttctacagctgactgttcattcctggggtcactcatgcagctgtattgaggtgggaactcaacttggctgggaagagctggtaggcatagtgcacatgtgcggaaatggtattagctaaggcacttcggttctctttgtgttctcttattttccacaaggctacattggaccccttcatagcatggtggtctcagggttccagggtgaaggcatagaactggtacggtgtcacttctgtggattcttttggtcaggcaagtccagatttaatgagagggaaaatagacttcagctcttgatgggaggagtatgcaggatgggagacatgatggcagaggtgggacaggcaggcaaggttgctgagtccccttgctgcctcctcaggcccacttgggcctgcttttcccaaatggcagctcctctggacatgccattccttctcccacctgcctgattcttcatatgttgggtgtccctgtttttctggtgctatttcctgactgctgttcagctgccactgtcctgcaaagcctgcctttttaaatgcctcaccattccttcatttgtttcttaaatatgggaagtgaaagtgccacctgaggccgggcacagtggctcacgcctgtaatcccagcattttgggaggctggggcaggcagattgcttgagccaaggagtttgagaccagcctgaggaacatggtgaaaccccgtctgtacc

SEQ ID NO: 37828 - DNA, 3543 bp, Homo sapiens
  misc_feature (1574)..(1574): n is a, c, g, or t
  misc_feature (1986)..(1986): n is a, c, g, or t
  misc_feature (2346)..(2346): n is a, c, g, or t
gccggggatgggggcgactggaagggggtgcccgtggcttcctttgggcctttccttccaactagcgcctgcaggtggacccgggttgacttccctcacctccctcgggcggccgacctttggatggcggacctcagccgccccagggttgcgaggcgacgggcgcgctggcccaggccaccaggcgggctccatcagggctttgggtggtgagttgggggcgccggatttggctcatttcaacgctggccggaggtcacgaggatggaggtgaggtgtttgtgaaccgatccttgtcctccgcctcggggagctcctggtctgtgggttgggggaaccaagtagagactcggactgagcattcactgtcacaggcggcttaaacaagtaatgtcccagcttcccgatggggagatcagtgagggcctggcagactttcccagggacacagagagaaagggaggcgacagctagcgaataggagacttccagaggtgatgggatttgggtgggaggagaggcaagagagggcattccaggagaatgtatgggcaaaggcacagggatgaaaacgagcacagctgttgggggctgagcctgggagctcagccatgtgactgcccatggggtggtggagtctggagaaatttgcaacctgtcccctacatgttctgcctcacggagcagggctctgaaagagggagatggttcttgcaggggcatgattggcagagagattttgtttggggctacacaggtcttgctaacttaggtttgttctgggcttggtgagccttagggcaaagtctctagagctgagagggggctgtctctggtgaatgggcccctgaaagagggtcttaggtttagcaaaccccttggagagttagtggggtcccaggaggggagttctagagagagaccttgggctctgtggctgtttctttaaccgtttcctgagtggccacctccaagcaagttccccaagtcacctcccctctctgggcatctctttctagcacctttctctagagatgaaataataggactaagtagtgacctcccttgaggatgctccttgttctagtttagagcatcccccctttcttctccctcttccttttcctttcctcccctatccctctgcctccctgtccctatccccaccccttgccccccacagcatttcctttacaggctgcacttccttccctgctgccagccaggagtttcggaaggtttcctggaggaagtgtgatacagcaggtttgacagcagctttgggcttaatctgattgggggagggcgttaattgcctccctcccacccattgggaaagtgtccaagtcttaagcaagtatatggattgactgtgctctgtgctgggtccctcctggaaactccatccaggagggagtgaggagattatgggagaagacgtgaacacttagtgcccaatgactgactcaaaatgtatgcagcgggatgcagagcagcgatttttggaaaggcttcccagaaggggtgggatgtgagaaggtagcaggacttagaggagctgatagtgctgccantttaggggcactggaagcagagggggcggctagagatgatctcctgcatgaggctgggagtgtaggaggcaggtcaacctgtgagcagccaaaggtggtgggagggaggtttgtagctgactggcacaaagccttgaatgccaggcaaagatctgtaggaggctactgaatagtcatcagtaggacagggacagcatggccaggagactgctgttttctgaggattattcatagttctgggatttcagggcagaagatggggctaggagtgggatgaggggattggaggtagagcaggagggggaaacttccatcttagcaggttggctctgggcagcaaaaaggaatcaccatttctgtgccagggatgaggggcccatactggtgagcagggagccctggagttagcccnaggactctggcctgatctgaagccaggcttgaccctcgtctgctgccagaggcctcagtctccccactgtgggggcttctgtcctagcttcacaataaggaatggaatacattatagttagggtttcatgaacaaaattcaggtagtaactgctatcttattgataattaaggtgtttccctaggcctacatctttggagggatatgtagcccttatccccattataaaagattatcagttgagcagattgctaattcttctgttttgtagtctaagaactttggtttggccggcgcggtggctcatgcctgtaatcccagcacttggggaggccgaggcgggtggatcacctgaggtcnggagttcgagaccagcctggccaacatggtgaaaccgtgtctctagtaaaaatacaaaaattagccaggcatggtggtgcacgcctgtaatcccagttactagggaagctgaggcaggagaatagttcgaacttgggtggaggaggttgtagttagctgagatcgtgccactgcactccagcctgggcaacagagtgaaactccatctcaaaaaaaaaaaaaaaaagaactttggtttgcagaggccagtgattgctgtcttcccctccaaccccccaccccccatttcaaaggcttcccagaaacaagggcagagaagcctggagccttccatttctgtgaccctagtcttttaccaccctctcaagccccagattctctctgccctaacctttatatacaaacaaggcagctttgccctctgctctggtttctgctctgaattattcatactttgctgcactgacttctctggaactgtaagcagacttttgggagattgtctgggaccagggacaggggttaggctggagcccggttagggagaagactcctcctttgaggcccctatgttctagttgttttctcctctccctctgcttccttgttttcctggaggtctttagtgctggaccacagtctcccactccatgtcccattgtctcaggggaggtagtgcctctttcagtcaccattttaaccaactacatctgaatgtggtcctcattggcatgtggccacctctgaaatcttaaactctagtatttctctctgaccacagtctaactaatgctttatgtgctctgacctcaaggagacctctagttctcagacacctccattttctccatctcatgaattgcctcttccgtgttctttctgaactccatgccctcaaccactttgccactttgcctgtgtgtcacccgagctgccaggaagggtctccagtctcagccatcccttcatcacttatagaaacccctctcctcattcccatcagttcccctttctattccatgggaggagtattccaaactggactactctccccaggccctttgctcatgtagagggtggttggggtgtgtgtgggggaggtggaaccacccccatgttttcccgaggcggagcttgcagtgagccgagatcgcaccactgccctccagcctgggcgacagagcgagactccatctc

SEQ ID NO: 37829 - DNA, 494 bp, Homo sapiens
tatccagctgcactcccaagttgtgttctgctcaagggaccccaggccactgtgagtccagggcaaaggaccacctgagagtactccacggaatggaaaaaaatcacttcaaccataaattcacaaaaagccaggccatgctgccctcaaaatgtaggcaagaacttggaagggctgaaaaggcttttaattcatttttaaactagattaatgtaatatgaagctggaatttcctctctaagattctgcagcccttttctcaccaccctagtagtttccagtccagacaggtcaccatggcagcatgggattaattatttctgtctttcccgttgttttctcaggagcaggcaatgccctcagccatgaacattaaagaagttcagctacacctcccttttcaccacctacaagggtcccataaaaattcactgagagcagaccacccctcgtttttatactgatacacgttccaccattaaaatcctacatta

SEQ ID NO: 37830 - DNA, 232 bp, Homo sapiens
ccatgctgccatggtgacctgtctggactggaaactactagcatgggattaattatttctgtctttcccgttgttttctcaggagcaggcaatgccctcagccatgaacattaaagaagttcagctacacctcccttttcaccacctacaagggtcccataaaaattcactgagagcagaccacccctcgtttttatactgatacacgttccaccattaaaatcctacatta

SEQ ID NO: 37831 - DNA, 297 bp, Homo sapiens
tcctatgacttaaaagtctagaggaggggcagcttcaagtggtgagaggccatcgccagggtgatggtggcaggaattgcaaataaacaggagaagcaagttcctgcctgttcttcctgccttctggtctccctcgagtgccccctatcggcagagtctaacagacctagctggcaaagcacagaagtggttttcagagtctcagcccagcatcacagaactgagtctagaagagagggtttggaattgagagacaatagcttgataactatcacattttcatagaaaatgttattt

SEQ ID NO: 37832 - DNA, 826 bp, Homo sapiens
gcagcgggttgtgtccctggccttttagacctaagcagagagggaatttcaagtcaggtggcgcctgtacagtctatggaataggtagttaatgaggtctggagttgatgttgccttcctctccttctctgatcactttcatgtcactcacccatcccagatgccatggtgttctcaatgccccagttctggggtttcctgccccactccacctttcctttcctgatcctcaagaaaactgacttcttttcctaagccccccgtctccactttgtgaggggcattctgagcatggaggctaatcaatatgttctcagtatccaatggaagcctaacgtgccacctcttccaagggcagtgcattttaactcagacccaacgccccaaccaaatgaaagatctctaatctggaattttcaacaatggggctggtgggtcagggtgcaccagatctcaggaggtttatccagaagactttcaagtgccccaagaggctgagtggtccgccaagtgcctgcatgtgtgcagtcaggaagcttgagtctgggttctgcctggggcaagtcactacaactcccagagcctcatttctgctattcgtaaaatggagaagacacctcctatgatatcaagtcactgacttgttcccaggtgctaaaaaatgaaattacattgcttagccttgaaactgtgcaacctttcaactgctgatgaaaacaacctcagcaagatgaaaatttctccattttcctgaaactattctgcatcataaaattcattgcaggtggtacctttaaaaataaaagacttgtaaaaaatgtttttg

SEQ ID NO: 37833 - DNA, 1097 bp, Homo sapiens
taataattttgtataaagctggaagcccaatgggctgtactccagtgcaaagttgagtgggaagcagactgcctcatagagaggcagcagagaagcctgtgttctcactgatgtcggtggaaagaagcaatccatcttaagcatttgtaaccactgtccaggttacagaccattggaacggctaattatctttcttttgcaaggaggggaggatgcttacatataaacctatctgtgttggcctcctttcacctttttattttcctctctgtctcttctccctcttttttcctctttttcctctcctggggtaagtatggtacctatatattgatgagagactaattttacctggaagataaaactagtatgcatcaaataacatacagatgtatatagatctgcaagaaataattgatagtgtctgttatagtggagattttaacatacttcagtaatttattaggtcagacacacaaaaaaatcagtaaagacttatttttgagtagcagaattaacaagctcaactcaaagattgtacccaatatgaaagcacactcatttcaagcatgcatggaatatttatggagtttgccttgtgctaggccataaaggctaggcttaagaaatttcaaaaggctagtgtcgtataggcattggcaagaggatttcagcggtgggactaactagaaacccaaagaccttaaactccatatagcatgatggaaagtagagggaggagttggtgtgagggaagtgaggggttagtgggagaacaagctggagagttggtagaaccaggagctgcttcacaggaagcagagagcaatagaaagttcctaggctttgaagaatgataaacttgggaatgcctggtctcatgacttactagatgtgtgataggataaattgcttaaattttcttattcatttattaagtatggacagtattacctgtctcacagacttaaagaattgaacaacatttattaagttgttaatatagcactttggatggaaaatcttggcttctgtgatgataagtagggtcccattaaggaaagctcttgtggacactcaacagtacaaccagtagg

SEQ ID NO: 37834 - DNA, 755 bp, Homo sapiens
agcaggtcctgagtgtcaggaattcagattctctgccccactcctgctggataggaggacacttccactagaacctgggcctggcccctttccagttttctgctgggagtccggattctggtgctttgctccgaagcagtgcccgtgggcctccgggcctggctcatcatcacagcttctctgctcagtgaggagaccatcattgtgctgcttttctgatgccttccatttgcctttttctccacttgggaaaaacaaaaaaagctagtatgctacatcctgaaaagttgttaatccttcaccaccacatacattgaaaaatcagttcctgccgggaagtaccactaaaggcatattgtaaactttttttctaattggaaaggtaaacttttttcccccataactatttttcgtgtgaaggaagtaactgacctcttgagtcagagatggcactcgagtttttccccatgggtcttgcctgctacactcctggccaccctttctgtggggcttgaccaaatggaccacactggccagcctgacaaacccaccagaaccaaaagaaaagctggatgtgggaaagggctgaagaactccacgtgtctaaagggcaaagagatcctgggttgagaagaggagtttcagatttccaatggagaaagagaggcggaggttgcagtgagccgagatcgtaacactgcactcgagcctgatgacagtgagaccctgtctccgaaaaaaaaaaaaaaaaaaaa

SEQ ID NO: 37835 - DNA, 468 bp, Homo sapiens
tgattttttcatagcaaacaaaaaagtattaataattagcttggatatagaagaaataaaatgggtgcttacactattctaaaaatgaaagatattttaataatattaggctttaaaagcaaagaaaacaattacaaaaatgcatgcaaataaagaggacagaaaattagaaaattagtatgaaccaccctatggtactgaagtcagagatattaacatggaataattttttaaaatatatgctgagaattgtatgtgtgcacatgaattagcataacatgcatatatttcctagctgtatacactgagagaggctgcaaagtgtgaggccccagtaacagtgagcacacttaatgtccagattttggtttctaaacatcatctttcaaaaaacaataactagaatgccttggagagttcattgattccagggcaggtgcagagaatctgggacaccttgtgtaccag

SEQ ID NO: 37836 - DNA, 389 bp, Homo sapiens
tttaagtctttaatccattgtgagttgagttttgtatttgttgtgagataggatgtaattgcatttttttgcatgtcagtatctagttctcccagcactacttattgaaattactgttcttttcacattgtgttcttggcatctttgtcaaaaatcaattgaccataaaatgggtagattgatttctgggttctttattctgttccattggtctgtgtttttttgctagtgtcatgcagttttggttattactgctttgttttttaaattttttattttgctaaaaaattttttttagaaatggtcttactctgtcacccaggctggagtgcagtggcatgaccatggctcactgtagcctgggcacaagcgatcctctcacctcagcc

SEQ ID NO: 37837 - DNA, 188 bp, Homo sapiens
ggtcagcctggaacccctgccccgtgaacaccagccagcttcatgctgaggacccctcagtccaacccagaggcccatgctgaggtcccggcatgggggactgtggggtgcagccgccgcttggagtggaggtgaatgggaccccacacgtttcctcctcgttctctggatgcctgtaaccatcacag

SEQ ID NO: 37838 - DNA, 432 bp, Homo sapiens
ccagtccttgaactctgacctctacacctcactttcagaacggcacgggagcctgtactaaccagaaactttgcctaggtagtaatacagagctctgtgtcaattgtggaaatccttcaccttttagaattattttcttgtggtaaatatttgtacaattccttttgattttcatcagtgaaaggcacagggtcttgatgtgcctttgagagatccttttccacatattaatgacttcctcatctgcttcctgccaagttttgtactttgggttagaaagaggtcaagacatggatggttagatgaattccttgttacccgagctttgtgtattaatttctcactactccactctggctctagttagtcttttaaagtcagtttgcaacatggtgacaattttgacaggaaagtcaaatttagctaacaacc

SEQ ID NO: 37839 - DNA, 323 bp, Homo sapiens
gtgtctgcgcttctgagatgcaggatgtaatttcccattgcaactcagtatgcatagtagttaagatccttcttattaggtaaatgatatggggcaaggtacttcctctctctgattcttatttctaaaatgagtgtgaaagtatccatttgcaaggattgttaggattcagcgataatacacgaaaagcacccttaacgctgtgctcaattaaatatattgatagtatatattagaatttattatctggggccggacgcggtggcttacgcctgtaatcccaacactttgggaggccaaggtgggcagatcacttgagttca

SEQ ID NO: 37840 - DNA, 223 bp, Homo sapiens
aacaatattagtgagagcctgaattgatttaaccagtttttagagcaatttgacagtatgtcaaaggtgcccttgcgtaggacccagtaattccactcccacagaaacccttgcacacacgaatgggagagaggagcacaggacttgtttataagagccaaaagctgaaagcagattcagtgctcataagcacgagatgggtaagtgtggtatagttgcatcg

SEQ ID NO: 37841 - DNA, 402 bp, Homo sapiens
  misc_feature (175)..(175): n is a, c, g, or t
  misc_feature (315)..(315): n is a, c, g, or t
tcacaccacccagtcagggttcccactcacccactccctaccctgcctcgcttacacacacacactctcccagccaacctggaagtcaagagtggcccaggcatgttgtgtgtattcgtgtgtgtgagtgtgtgtgtgtgcatacgcctgtatgttgtctctgttttggatcgcnagtagaatgcagtatgtaaataagatggttattaccgcaatgttcatcaagctgacccgaaaaaacattaatagcctgatgaatatgcatgtgaatttgttaattaagttaattattctgctgaaaatgcattcgtcttnccaaggacattttcccaatgatttttacatgctctagccattagtcatgctatattttatcagggaaatgagtttgcttaagttgta

SEQ ID NO: 37842 - DNA, 461 bp, Homo sapiens
ttctgtatttttttctttttttgggttaataagcaaaatggaagaagactagcaaaagggtgtgtgcggaggtggggggatgtgtgtgtgaaagagatgttaaataggagtgacatattatgaagcacatatgtacgagttcacataaaaaaatttaattctgtttaccacatactaacacagccaaatgtatgaacaacctgtttttttttcctttgtaccaggaaacttccccacacatagtgattgaacacttttggcattaaccagagttcaattaaagaaaattctctcatttcatccacttctatctcctttgccctaaaaaagaaagctgaatgttaaactactgagtagaaagaaaagccttttagttatcaagaattgtatggttaagtgatttaaatgttttattactttgtgagtagccaagtactaaactgtattttgaaaacaactga

SEQ ID NO: 37843 - DNA, 351 bp, Homo sapiens
taatatgtaatttttgaactaaagttacgttttaaaattgaatagaaaaagaattataaaatgttaagtttaataatttttatataaatataaaagtgtgaaaattattctgatattactcattttgaaaagaacaagaagtaatgagaattttcaaacactgctcctagaagtataaattaatataattctttggcttagtatggcattatctgatgaagatgaaggagcacatcttaagactcagtacaggtactcttaccagaaaatgtatacacacacatgaatatcactgtgttttcatagctaaagttgagaagtttctcaaatgtctatcagtgataaaataga

SEQ ID NO: 37844 - DNA, 229 bp, Homo sapiens
aaaaaatatatatatatatatatatatatatatatatttcactgagccattactacagggaaagttcctgtagagctgagcagtcaagacgtgtgacttcaccaaggaccagcacagagttcaaggctgccttccggctgtttgactgaacaggtgatggcaaggtccttccagcccctgtgggggcgtgatgagggccctgggccagaaccccaccaatgccacggcg

SEQ ID NO: 37845 - DNA, 215 bp, Homo sapiens
gattctttcacttcttgaaagaaataaaataaattaatccattctttcattgtatatttgttttaaatttcagtattgatggttgtctctgtaattccaaaattctagtgggggcattatattataggaccacaataaatatttgttgaattaattaatctgagccactgtatgggtctgataggacacctaactcagtggaattatggttatgc

SEQ ID NO: 37846 - DNA, 436 bp, Homo sapiens
ctgtaatttagtataaagttcctatttcttttcaataattattatataataacaaacgtggatcttctgagaagaaaattattttagaagttttgcaaaatatttagggtttgtttgttgtcattgaaacatgagctttgaaccaaatcttcatttgtctcttagttctgtttttcatgtgaatttgagggagataataaaattttgtgagtcagttcgtctcacaacatttttctgaggattaaatgaagtgaagcagccaactagtaaatggcaaatacttggcaaaaattatttttaaaaccccaggtgttccttctgatctgtgtcttatgttagttttgatctactttattattgtcttaaagtcttttgggtgctaaaattatgtacttctctaagatattttatgaaatgttcctagattaaaaaaaaa

SEQ ID NO: 37847 - DNA, 89 bp, Homo sapiens
gtgaagacagtgcaggagagaggaagggtttgagactttggtggtggacaacctggggtttgaatcccagctctactccttactgacta

SEQ ID NO: 37848 - DNA, 391 bp, Homo sapiens
tctgcttatttttcatttcatctgctcttctttttccagtttcttaaagtggttaagaatgttacttaagtactgcttgagcaacattccacaaatttcgatatgttttcaatttttattcagctcaaaatactttctaattttctactttttagaagtctgttatttagtttccaaatatttggggattcctattagtctttgttattgattcccaatttaattttcagtcagagaacatactcttctgaaaggaaaataaaatcttggcacttcaaattcactatgccaaaagggaaaaattaaccttggaagctgagtcatgaaaaaaagcaaaacgcttgctttttcttttgttcttaaactgatagctatagctagaaggccacat

SEQ ID NO: 37849 - DNA, 557 bp, Homo sapiens
gcagagtggggatcccaaaaatatcattctaagttgctaaatcaagagaagaggttaagatatatcacataaaattgtaaagaaaatgactagaataatttaaaaatagatgtaaagcttgcagttcaccagaacaattattaaacaccagaaatctgtatagtaaagatgaaaagaataaaagaagaaacattatagcagacagtgtcacataggaagagataggatgaggaaaaatgtgtataattggatgcaaattgataaattcatctcttaaaataattcagtttgggggaatgtttaaaaatggtgcagggattctgatatgcctgccccctttgagaatcaggttgtggtgagttactgataacttagtgtttattatttaagagcagaaaaagagagaaccctgtccttcaggaatatctggttcaaccagactgacctagggacggatctccttcacttactttgacctgttactgactatttgatacatgcaagaattactcagcctccaacaatttctctcctgtgaaatccatgtaaatgcagat

SEQ ID NO: 37850 - DNA, 1795 bp, Homo sapiens
aaagcctgcgagcgccagccgagatcgcagcccaacccatggccgggtctcctagccgcgccgcgggccggcgactgcagcttcccctgctgtgcctcttcctccagggcgccactgccgtcctctttgctgtctttgtccgctacaaccacaaaaccgacgctgccctctggcaccggagcaaccacagtaacgcggacaatgaattttactttcgctacccaagcttccaggacgtgcatgccatggtcttcgtgggctttggcttcctcatggtcttcctgcagcgttacggcttcagcagcgtgggcttcaccttcctcctggccgcctttgccctgcagtggtccacactggtccagggctttctccactccttccacggtggccacatccatgttggcgtggagagcatgatcaatgctgacttttgtgcgggggccgtgctcatctcctttggtgccgtcctgggcaagaccgggcctacccagctgctgctcatggccctgctggaggtggtgctgtttggcatcaatgagtttgtgctccttcatctcctgggggtgagagatgccggaggctccatgactatccacacctttggtgcctacttcgggctcgtcctttcgcgggttctgtacaggccccagctggagaagagcaagcaccgccagggctccgtctaccattcagacctcttcgccatgattgggaccatcttcctgtggatcttctggcctagcttcaatgctgcactcacagcgctgggggctgggcagcatcggacggccctcaacacatactactccctggctgccagcacccttggcacctttgccttgtcagcccttgtaggggaagatgggaggcttgacatggtccacatccaaaatgcagcgctggctggaggggttgtggtggggacctcaagtgaaatgatgctgacaccctttggggctctggcagctggcttcttggctgggactgtctccacgctggggtacaagttcttcacgcccatccttgaatcaaaattcaaagtccaagacacatgtggagtccacaacctccatgggatgccgggggtcctgggggccctcctgggggtccttgtggctggacttgccacccatgaagcttacggagatggcctggagagtgtgtttccactcatagccgagggccagcgcagtgccacgtcacaggccatgcaccagctcttcgggctgtttgtcacactgatgtttgcctctgtgggcgggggccttggagggctcctgctgaagctaccctttctggactcccccccagactcccagcactacgaggaccaagttcactggcaggtgcctggcgagcatgaggataaagcccagagacctctgagggtggaggaggcagacactcaggcctaacccactgccagcccctgagaggacacgctccttttcgaagatgctgactggctgctactaggaagttctttttgagctcccattcctccagctgcaagaagggagccatgagccagaaggaggcccctttccacaggcagcgtctccacagggagaggggcaacaggaggctgggaaatggtggggagtggggccgtaactgggtacaatagggggaacctcaccagatgcccaacccgactgccctaccagcctgcacatgggtagaagaggccaaattgaggcacccaagtgatccactggccccacgtcacacagttacagtgaagcccaagccaggcctggttgagggtgataaacgccactgtctctaagggttc

SEQ ID NO: 37851 - DNA, 1756 bp, Homo sapiens
aaagcctgcgagcgccagccgagatcgcagcccaacccatggccgggtctcctagccgcgccgcgggccggcgactgcagcttcccctgctgtgcctcttcctccagggcgccactgccgtcctctttgctgtctttgtccgctacaaccacaaaaccgacgctgccctctggcaccggagcaaccacagtaacgcggacaatgaattttactttcgctacccaagcttccaggacgtgcatgccatggtcttcgtgggctttggcttcctcatggtcttcctgcagcgttacggcttcagcagcgtgggcttcaccttcctcctggccgcctttgccctgcagtggtccacactggtccagggctttctccactccttccacggtggccacatccatgttggcgtggagagcatgatcaatgctgacttttgtgcgggggccgtgctcatctcctttggtgccgtcctgggcaagaccgggcctacccagctgctgctcatggccctgctggaggtggtgctgtttggcatcaatgagtttgtgctccttcatctcctgggggtgagagatgccggaggctccatgactatccacacctttggtgcctacttcgggctcgtcctttcgcgggttctgtacaggccccagctggagaagagcaagcaccgccagggctccgtctaccattcagacctcttcgccatgattgggaccatcttcctgtggatcttctggcctagcttcaatgctgcactcacagcgctgggggctgggcagcatcggacggccctcaacacatactactccctggctgccagcacccttggcacctttgccttgtcagcccttgtaggggaagatgggaggcttgacatggtccacatccaaaatgcagcgctggctggaggggttgtggtggggacctcaagtgaaatgatgctgacaccctttggggctctggcagctggcttcttggctgggactgtctccacgctggggtacaagttcttcacgcccatccttgaatcaaaattcaaagtccaagacacatgtggagtccacaacctccatgggatgccgggggtcctgggggccctcctgggggtccttgtggctggacttgccacccatgaagcttacggagatggcctggagagtgtgtttccactcatagccgagggccagcgcagtgccacgtcacaggccatgcaccagctcttcgggctgtttgtcacactgatgtttgcctctgtgggcgggggccttggagactcccagcactacgaggaccaagttcactggcaggtgcctggcgagcatgaggataaagcccagagacctctgagggtggaggaggcagacactcaggcctaacccactgccagcccctgagaggacacgctccttttcgaagatgctgactggctgctactaggaagttctttttgagctcccattcctccagctgcaagaagggagccatgagccagaaggaggcccctttccacaggcagcgtctccacagggagaggggcaacaggaggctgggaaatggtggggagtggggccgtaactgggtacaatagggggaacctcaccagatgcccaacccgactgccctaccagcctgcacatgggtagaagaggccaaattgaggcacccaagtgatccactggccccacgtcacacagttacagtgaagcccaagccaggcctggttgagggtgataaacgccactgtctctaagggttc

SEQ ID NO: 37852 - DNA, 923 bp, Homo sapiens
aaagcctgcgagcgccagccgagatcgcagcccaacccatggccgggtctcctagccgcgccgcgggccggcgactgcagcttcccctgctgtgcctcttcctccagggcgccactgccgtcctctttgctgtctttgtccgctacaaccacaaaaccgacgctgccctctggcaccggagcaaccacagtaacgcggacaatgaattttactttcgctacccaaaagagtctcactctgttgcccaggctggagtgcaacggcgcaatctcggctcactgcaaccttcacctcccaggttcaagcgattcacccccctcagcctcccgagaagctgggattacaggcacccaccaaaacacctagataagttttgtatttttagtagagatgaggtttcgccatgttggccaggctggtcttgaattcctgacctcaggtgatccacccacctcggcctcccaatgtgctgggattacaggtgtgagccactgcacctggccctattaccctactttctgtatgcagagctcatcagcaggctatccccacctcaccctgttctagacccaacaaaatgaagctcaaaatgctaaggatatagagagtgaggtggaaacttggacttgggtgtgaagcaccagagcccccacccaccctaggcagaaggggctacagctcctccctccccatatttcatccacagccctggctagaaaagaaggatagagagttgggagggaacagtccagagtctgacagaactaagctgttgcgtaagggtctgacctggctgcttgccatgaacccctgacttgcttctcctcgaagcctccttattacaaagctttccctggagtccagcctcttgcccctgtgctgcaatggtaggctctccttggacatacagcatttcatccctg

SEQ ID NO: 37853 - DNA, 2436 bp, Homo sapiens
gagagtgccccgcccacagttccgacgaaaaatggcggggtctcctgagttggtggtccttgaccctccatgggacaaggagctcgcggctggcacagagagccaggccttggtctccgccactccccgagaagactttcgggtgcgctgcacctcgaagcgggctgtgaccgaaatgctacaactgtgcggccgcttcgtgcaaaagctcggggacgctctgccggaggagattcgggagcccgctctgcgagatgcgcagtggacttttgaatcagctgtgcaagagaatatcagcattaatgggcaagcatggcaggaagcttcagataattgttttatggattctgacatcaaagtacttgaagatcagtttgatgaaatcatagtagatatagccacaaaacgtaagcagtatcccagaaagatcctggaatgtgtcatcaaaaccataaaagcaaaacaagaaattctgaagcagtaccaccctgttgtacatccactggacctaaaatatgaccctgatccagcccctcatatggaaaatttgaaatgcagaggggaaacagtagcaaaggagatcagtgaagccatgaagtccttgcctgcattaattgaacaaggagagggattttcccaagttctcaggatgcagcctgttatccacctccagaggattcaccaagaagtcttttccagttgtcataggaaaccagatgctaaacctgagaactttataacacagatagaaaccacaccaacagagactgcttccaggaaaacctctgacgtggtactgaaaagaaagcaaactaaagactgcccccagagaaaatggtatccattgcggccaaagaaaattaatcttgatacatgagctctttctgtttattttgggagttgaaaataggcaccatcaacatttagattacagcctaattaatacctagataagacttcatttgaaataagaaataactcttttactagtgattcatttatacagatatagtatctctgtgcggggatatgatataatattgtatttccttactgttttatctattgtaaataaaaagcattttaaaaagtattgacacaaagcccatcagtgggcattaaaaatattaaaagtgcagacttttactgtccttaagtgccatcaactctcagctcccttgtagcttttgtgggatttaacaagtaacaaattctgttgtgtttccctggtatacatctttctaggaaaaaaaaaaaaagagagagagctgtataatgatttttcgtttacatgctgaaaagtaattatcagttctgcacagcagcagatgcagggtttttttttaaagatgtagtttgatttatcaaattaatgtgctgatgataatactggctttgactttgttactccatgttcagctaatttaggtttgtgagattaactttaggattttttgttgtgtaagacaatgataactattatttgtgcaacattactctttgaaataaaaattggcatgtagccaatgtttcctgcccacactcacttttttctatagaccattaacataatttgacttggaactaatggtttctttttagggtttcttatttatttctttacaaatcattccagttcaaaatatatatcagattaatacactgaaaaaaaagtgtcattgtgttattgaactattttacatttgaagatgtttatatatcaggtatataatcactgggagaagtctgagaaaacgatattggctttacttctaacatttaactatagtttcttatagctcttattgtgtgtcttacattatacagtgtaggcagggccatcaaacttaccaactgtttccccttttgatgactctgataccttcattcatttttcaaaggaatttactgatcatgaggttggaaaatctgtatttctcttgcttattatgtattaataatcataaatgtctagattcaccagaagtcaccagaaggtctgtctcagtgaagaaaacttataaagccactttgttgcattttgtgtttcagtgttacagtttgagatctgtatatttgtacacagctatgtgtttttcattgaaataatgtacaaagactgatcttgatgctgtgtatttttatgagttgtcttaggcattcctgagctcagcttcagttggatggtgggtcagcaccctgcgtttctgaacatactagacttcagtttaaaactgttttgaggctgtataatatgttgctgtttttacagtgctaatgtttttatagtattaaaattctgtatgatttgtttcacttcagaggtccccaaacaaaagagttattgttaattctattagattatataagctacttgcattttgattatataagaacatggtccctcccttttaagagaggtatattgtgctacat

SEQ ID NO: 37854 - DNA, 775 bp, Homo sapiens
gagagtgccccgcccacagttccgacgaaaaatggcggggtctcctgagttggtggtccttgaccctccatgggacaaggagctcgcggctggcacagagagccaggccttggtctccgccactccccgagaagactttcgggtgcgctgcacctcgaagcgggctgtgaccgaaatgctacaactgtgcggccgcttcgtgcaaaagctcggggacgctctgccggaggagattcgggagcccgctctgcgagatgcgcagtggacttttgaatcagctgtgcaagagaatatcagcattaatgggcaagcatggcaggaagcttcagataattgttttatggattctgacatcaaagtacttgaagatcagtttgatgaaatcatagtagatatagccacaaaacgtaagcagtatcccagaaagatcctggaatgtgtcatcaaaaccataaaagcaaaacaagaaattctgaagcagtaccaccctgttgtacatccactggacctaaaatatgaccctgatccaggagccaagcctggtggactagctctaggggcagtctaggagagaaggggatcggggaaccttcatcccttctgcctctggtgaactgcgcaagatgaagaggatgaagctgggtgacccagagcccgccctccctctctcggcagtcatctccaaggccggagtagactggactggagggcctctgagaggacacagccaggaagcacactctccctgtgctcttcacccaccatgaagagacag

SEQ ID NO: 37855 - DNA, 698 bp, Homo sapiens
gagagtgccccgcccacagttccgacgaaaaatggcggggtctcctgagttggtggtccttgaccctccatgggacaaggagctcgcggctggcacagagagccaggccttggtctccgccactccccgagaagactttcgggtgcgctgcacctcgaagcgggctgtgaccgaaatgctacaactgtgcggccgcttcgtgcaaaagctcggggacgctctgccggaggagattcgggagcccgctctgcgagatgcgcagtggacttttgaatcagctgtgcaagagaatatcagcattaatgggcaagcatggcaggaagcttcagataattgttttatggattctgacatcaaagtacttgaagatcagtttgatgaaatcatagtagatatagccacaaaacgtaagcagtatcccagaaagatcctggaatgtgtcatcaaaaccataaaagcaaaacaagaaattctgaagcagtaccaccctgttgtacatccactggacctaaaatatgaccctgatccagttctcaacgggaatgctttcaacttttccccattcaacatgatgttggctgtggatttgtcatatatggtttttattacttcgagcccagcccccgatatggaattcctcgtaatccctcggggaaactccctcttcggatattcaccgtgccctgtatcacttgcct

SEQ ID NO: 37856 - DNA, 1586 bp, Homo sapiens
gagagtgccccgcccacagttccgacgaaaaatggcggggtctcctgagttggtggtccttgaccctccatgggacaaggagctcgcggctggcacagagagccaggccttggtctccgccactccccgagaagactttcgggtgcgctgcacctcgaagcgggctgtgaccgaaatgctacaactgtgcggccgcttcgtgcaaaagctcggggacgctctgccggaggagattcgggagcccgctctgcgagatgcgcagtggacttttgaatcagctgtgcaagagaatatcagcattaatgggcaagcatggcaggaagcttcagataattgttttatggattctgacatcaaagtacttgaagatcagtttgatgaaatcatagtagatatagccacaaaacgtaagcagtatcccagaaagatcctggaatgtgtcatcaaaaccataaaagcaaaacaagaaattctgaagcagtaccaccctgttgtacatccactggacctaaaatatgaccctgatccagcccctcatatggaaaatttgaaatgcagaggggaaacagtagcaaaggagatcagtgaagccatgaagtccttgcctgcattaattgaacaaggagagggattttcccaagttctcaggatgcagcctgttatccacctccagaggattcaccaagaagtcttttccagttgtcataggaaaccagatgctaaacctgagaactttataacacagatagaaaccacaccaacagagactgcttccaggaaaacctctgacgtggtactgaaaagaaagcaaactaaagactgcccccagagaaaatggtatccattgcggccaaagaaaattaatcttgatacatgagctctttctgtttattttgggagttgaaaataggcaccatcaacatttagattacagcctaattaatacctagataagacttcatttgaaataagaaataactcttttactagtgattcatttatacagatatagtatctctgtgcggggatatgatataatattgtatttccttactgttttatctattgtaaataaaaagcattttaaaaagtattgacacaaagcccatcagtgggcattaaaaatattaaaagtgcagacttttactgtccttaagtgccatcaactctcagctcccttgtagcttttgtgggatttaacaagtaacaaattctgttgtgtttccctggtatacatctttctaggaaaaaaaaaaaaagagagagagctgtataatgatttttcgtttacatgctgaaaagtaattatcagttctgcacagcagcagatgcagggtttttttttaaagatgtagtttgatttatcaaattaatgtgctgatgggagaagactggatcagtcccatcaaaccactcattgtgtgacacgtcttggactgccgtttttataaccagcaagaggtcaatgtatagaaatccgctgatgggagaagatgcgcgcatcttctcccatcaggatggctactatcaacatcaaacaataatatgttttggtgaggacgtggaaaaattggaacccttgtgct

SEQ ID NO: 37857 - DNA, 2382 bp, Homo sapiens
gagagtgccccgcccacagttccgacgaaaaatggcggggtctcctgagttggtggtccttgaccctccatgggacaaggagctcgcggctggcacagagagccaggccttggtctccgccactccccgagaagactttcgggtgcgctgcacctcgaagcgggctgtgaccgaaatgctacaactgtgcggccgcttcgtgcaaaagctcggggacgctctgccggaggagattcgggagcccgctctgcgagatgcgcagtggacttttgaatcagctgtgcaagagaatatcagcattaatgggcaagcatggcaggaagcttcagataattgttttatggattctgacatcaaagtacttgaagatcagtttgatgaaatcatagtagatatagccacaaaacgtaagcagtatcccagaaagatcctggaatgtgtcatcaaaaccataaaagcaaaacaagaaattctgaagcagtaccaccctgttgtacatccactggacctaaaatatgaccctgatccagcccctcatatggaaaatttgaaatgcagaggggaaacagtagcaaaggagatcagtgaagccatgaagtccttgcctgcattaattgaacaaggagagggattttcccaagttctcaggatgcagcctgttatccacctccagaggattcaccaagaagtcttttccagttgtcataggaaaccagatgctaaacctgagaactttataacacagatagaaaccacaccaacagagactgcttccaggaaaacctctgacgtggtactgaaaagaaagcaaactaaagactgcccccagagaaaatggtatccattgcggccaaagaaaattaatcttgatacatgagctctttctgtttattttgggagttgttcatttgaaataagaaataactcttttactagtgattcatttatacagatatagtatctctgtgcggggatatgatataatattgtatttccttactgttttatctattgtaaataaaaagcattttaaaaagtattgacacaaagcccatcagtgggcattaaaaatattaaaagtgcagacttttactgtccttaagtgccatcaactctcagctcccttgtagcttttgtgggatttaacaagtaacaaattctgttgtgtttccctggtatacatctttctaggaaaaaaaaaaaaagagagagagctgtataatgatttttcgtttacatgctgaaaagtaattatcagttctgcacagcagcagatgcagggtttttttttaaagatgtagtttgatttatcaaattaatgtgctgatgataatactggctttgactttgttactccatgttcagctaatttaggtttgtgagattaactttaggattttttgttgtgtaagacaatgataactattatttgtgcaacattactctttgaaataaaaattggcatgtagccaatgtttcctgcccacactcacttttttctatagaccattaacataatttgacttggaactaatggtttctttttagggtttcttatttatttctttacaaatcattccagttcaaaatatatatcagattaatacactgaaaaaaaagtgtcattgtgttattgaactattttacatttgaagatgtttatatatcaggtatataatcactgggagaagtctgagaaaacgatattggctttacttctaacatttaactatagtttcttatagctcttattgtgtgtcttacattatacagtgtaggcagggccatcaaacttaccaactgtttccccttttgatgactctgataccttcattcatttttcaaaggaatttactgatcatgaggttggaaaatctgtatttctcttgcttattatgtattaataatcataaatgtctagattcaccagaagtcaccagaaggtctgtctcagtgaagaaaacttataaagccactttgttgcattttgtgtttcagtgttacagtttgagatctgtatatttgtacacagctatgtgtttttcattgaaataatgtacaaagactgatcttgatgctgtgtatttttatgagttgtcttaggcattcctgagctcagcttcagttggatggtgggtcagcaccctgcgtttctgaacatactagacttcagtttaaaactgttttgaggctgtataatatgttgctgtttttacagtgctaatgtttttatagtattaaaattctgtatgatttgtttcacttcagaggtccccaaacaaaagagttattgttaattctattagattatataagctacttgcattttgattatataagaacatggtccctcccttttaagagaggtatattgtgctacat

SEQ ID NO: 37858 - DNA, 2521 bp, Homo sapiens
gagagtgccccgcccacagttccgacgaaaaatggcggggtctcctgagttggtggtccttgaccctccatgggacaaggagctcgcggctggcacagagagccaggccttggtctccgccactccccgagaagactttcgggtgcgctgcacctcgaagcgggctgtgaccgaaatgctacaactgtgcggccgcttcgtgcaaaagctcggggacgctctgccggaggagattcgggagcccgctctgcgagatgcgcagtggacttttgaatcagctgtgcaagagaatatcagcattaatgggcaagcatggcaggaagcttcagataattgttttatggattctgacatcaaagtacttgaagatcagtttgatgaaatcatagtagatatagccacaaaacgtaagcagtatcccagaaagatcctggaatgtgtcatcaaaaccataaaagcaaaacaagaaattctgaagcagtaccaccctgttgtacatccactggacctaaaatatgaccctgatccagttctcaacgggaatgctttcaacttttccccattcaacatgatgttggctgtggatttgtcatatatggtttttattacttcgagcccctcatatggaaaatttgaaatgcagaggggaaacagtagcaaaggagatcagtgaagccatgaagtccttgcctgcattaattgaacaaggagagggattttcccaagttctcaggatgcagcctgttatccacctccagaggattcaccaagaagtcttttccagttgtcataggaaaccagatgctaaacctgagaactttataacacagatagaaaccacaccaacagagactgcttccaggaaaacctctgacgtggtactgaaaagaaagcaaactaaagactgcccccagagaaaatggtatccattgcggccaaagaaaattaatcttgatacatgagctctttctgtttattttgggagttgaaaataggcaccatcaacatttagattacagcctaattaatacctagataagacttcatttgaaataagaaataactcttttactagtgattcatttatacagatatagtatctctgtgcggggatatgatataatattgtatttccttactgttttatctattgtaaataaaaagcattttaaaaagtattgacacaaagcccatcagtgggcattaaaaatattaaaagtgcagacttttactgtccttaagtgccatcaactctcagctcccttgtagcttttgtgggatttaacaagtaacaaattctgttgtgtttccctggtatacatctttctaggaaaaaaaaaaaaagagagagagctgtataatgatttttcgtttacatgctgaaaagtaattatcagttctgcacagcagcagatgcagggtttttttttaaagatgtagtttgatttatcaaattaatgtgctgatgataatactggctttgactttgttactccatgttcagctaatttaggtttgtgagattaactttaggattttttgttgtgtaagacaatgataactattatttgtgcaacattactctttgaaataaaaattggcatgtagccaatgtttcctgcccacactcacttttttctatagaccattaacataatttgacttggaactaatggtttctttttagggtttcttatttatttctttacaaatcattccagttcaaaatatatatcagattaatacactgaaaaaaaagtgtcattgtgttattgaactattttacatttgaagatgtttatatatcaggtatataatcactgggagaagtctgagaaaacgatattggctttacttctaacatttaactatagtttcttatagctcttattgtgtgtcttacattatacagtgtaggcagggccatcaaacttaccaactgtttccccttttgatgactctgataccttcattcatttttcaaaggaatttactgatcatgaggttggaaaatctgtatttctcttgcttattatgtattaataatcataaatgtctagattcaccagaagtcaccagaaggtctgtctcagtgaagaaaacttataaagccactttgttgcattttgtgtttcagtgttacagtttgagatctgtatatttgtacacagctatgtgtttttcattgaaataatgtacaaagactgatcttgatgctgtgtatttttatgagttgtcttaggcattcctgagctcagcttcagttggatggtgggtcagcaccctgcgtttctgaacatactagacttcagtttaaaactgttttgaggctgtataatatgttgctgtttttacagtgctaatgtttttatagtattaaaattctgtatgatttgtttcacttcagaggtccccaaacaaaagagttattgttaattctattagattatataagctacttgcattttgattatataagaacatggtccctcccttttaagagaggtatattgtgctacat

SEQ ID NO: 37859 - DNA, 2196 bp, Homo sapiens
cttgactactgtgaatttattgcagacttttgaatcagctgtgcaagagaatatcagcattaatgggcaagcatggcaggaagcttcagataattgttttatggattctgacatcaaagtacttgaagatcagtttgatgaaatcatagtagatatagccacaaaacgtaagcagtatcccagaaagatcctggaatgtgtcatcaaaaccataaaagcaaaacaagaaattctgaagcagtaccaccctgttgtacatccactggacctaaaatatgaccctgatccagcccctcatatggaaaatttgaaatgcagaggggaaacagtagcaaaggagatcagtgaagccatgaagtccttgcctgcattaattgaacaaggagagggattttcccaagttctcaggatgcagcctgttatccacctccagaggattcaccaagaagtcttttccagttgtcataggaaaccagatgctaaacctgagaactttataacacagatagaaaccacaccaacagagactgcttccaggaaaacctctgacgtggtactgaaaagaaagcaaactaaagactgcccccagagaaaatggtatccattgcggccaaagaaaattaatcttgatacatgagctctttctgtttattttgggagttgaaaataggcaccatcaacatttagattacagcctaattaatacctagataagacttcatttgaaataagaaataactcttttactagtgattcatttatacagatatagtatctctgtgcggggatatgatataatattgtatttccttactgttttatctattgtaaataaaaagcattttaaaaagtattgacacaaagcccatcagtgggcattaaaaatattaaaagtgcagacttttactgtccttaagtgccatcaactctcagctcccttgtagcttttgtgggatttaacaagtaacaaattctgttgtgtttccctggtatacatctttctaggaaaaaaaaaaaaagagagagagctgtataatgatttttcgtttacatgctgaaaagtaattatcagttctgcacagcagcagatgcagggtttttttttaaagatgtagtttgatttatcaaattaatgtgctgatgataatactggctttgactttgttactccatgttcagctaatttaggtttgtgagattaactttaggattttttgttgtgtaagacaatgataactattatttgtgcaacattactctttgaaataaaaattggcatgtagccaatgtttcctgcccacactcacttttttctatagaccattaacataatttgacttggaactaatggtttctttttagggtttcttatttatttctttacaaatcattccagttcaaaatatatatcagattaatacactgaaaaaaaagtgtcattgtgttattgaactattttacatttgaagatgtttatatatcaggtatataatcactgggagaagtctgagaaaacgatattggctttacttctaacatttaactatagtttcttatagctcttattgtgtgtcttacattatacagtgtaggcagggccatcaaacttaccaactgtttccccttttgatgactctgataccttcattcatttttcaaaggaatttactgatcatgaggttggaaaatctgtatttctcttgcttattatgtattaataatcataaatgtctagattcaccagaagtcaccagaaggtctgtctcagtgaagaaaacttataaagccactttgttgcattttgtgtttcagtgttacagtttgagatctgtatatttgtacacagctatgtgtttttcattgaaataatgtacaaagactgatcttgatgctgtgtatttttatgagttgtcttaggcattcctgagctcagcttcagttggatggtgggtcagcaccctgcgtttctgaacatactagacttcagtttaaaactgttttgaggctgtataatatgttgctgtttttacagtgctaatgtttttatagtattaaaattctgtatgatttgtttcacttcagaggtccccaaacaaaagagttattgttaattctattagattatataagctacttgcattttgattatataagaacatggtccctcccttttaagagaggtatattgtgctacat

SEQ ID NO: 37860 - DNA, 2357 bp, Homo sapiens
gagagtgccccgcccacagttccgacgaaaaatggcggggtctcctgagttggtggtccttgaccctccatgggacaaggagctcgcggctggcacagagagccaggccttggtctccgccactccccgagaagactttcgggtgcgctgcacctcgaagcgggctgtgaccgaaatgctacaactgtgcggccgcttcgtgcaaaagctcggggacgctctgccggaggagattcgggagcccgctctgcgagatgcgcagtggattctgacatcaaagtacttgaagatcagtttgatgaaatcatagtagatatagccacaaaacgtaagcagtatcccagaaagatcctggaatgtgtcatcaaaaccataaaagcaaaacaagaaattctgaagcagtaccaccctgttgtacatccactggacctaaaatatgaccctgatccagcccctcatatggaaaatttgaaatgcagaggggaaacagtagcaaaggagatcagtgaagccatgaagtccttgcctgcattaattgaacaaggagagggattttcccaagttctcaggatgcagcctgttatccacctccagaggattcaccaagaagtcttttccagttgtcataggaaaccagatgctaaacctgagaactttataacacagatagaaaccacaccaacagagactgcttccaggaaaacctctgacgtggtactgaaaagaaagcaaactaaagactgcccccagagaaaatggtatccattgcggccaaagaaaattaatcttgatacatgagctctttctgtttattttgggagttgaaaataggcaccatcaacatttagattacagcctaattaatacctagataagacttcatttgaaataagaaataactcttttactagtgattcatttatacagatatagtatctctgtgcggggatatgatataatattgtatttccttactgttttatctattgtaaataaaaagcattttaaaaagtattgacacaaagcccatcagtgggcattaaaaatattaaaagtgcagacttttactgtccttaagtgccatcaactctcagctcccttgtagcttttgtgggatttaacaagtaacaaattctgttgtgtttccctggtatacatctttctaggaaaaaaaaaaaaagagagagagctgtataatgatttttcgtttacatgctgaaaagtaattatcagttctgcacagcagcagatgcagggtttttttttaaagatgtagtttgatttatcaaattaatgtgctgatgataatactggctttgactttgttactccatgttcagctaatttaggtttgtgagattaactttaggattttttgttgtgtaagacaatgataactattatttgtgcaacattactctttgaaataaaaattggcatgtagccaatgtttcctgcccacactcacttttttctatagaccattaacataatttgacttggaactaatggtttctttttagggtttcttatttatttctttacaaatcattccagttcaaaatatatatcagattaatacactgaaaaaaaagtgtcattgtgttattgaactattttacatttgaagatgtttatatatcaggtatataatcactgggagaagtctgagaaaacgatattggctttacttctaacatttaactatagtttcttatagctcttattgtgtgtcttacattatacagtgtaggcagggccatcaaacttaccaactgtttccccttttgatgactctgataccttcattcatttttcaaaggaatttactgatcatgaggttggaaaatctgtatttctcttgcttattatgtattaataatcataaatgtctagattcaccagaagtcaccagaaggtctgtctcagtgaagaaaacttataaagccactttgttgcattttgtgtttcagtgttacagtttgagatctgtatatttgtacacagctatgtgtttttcattgaaataatgtacaaagactgatcttgatgctgtgtatttttatgagttgtcttaggcattcctgagctcagcttcagttggatggtgggtcagcaccctgcgtttctgaacatactagacttcagtttaaaactgttttgaggctgtataatatgttgctgtttttacagtgctaatgtttttatagtattaaaattctgtatgatttgtttcacttcagaggtccccaaacaaaagagttattgttaattctattagattatataagctacttgcattttgattatataagaacatggtccctcccttttaagagaggtatattgtgctacat

SEQ ID NO: 37861 - DNA, 2601 bp, Homo sapiens
gagagtgccccgcccacagttccgacgaaaaatggcggggtctcctgagttggtggtccttgaccctccatgggacaaggagctcgcggctggcacagagagccaggccttggtctccgccactccccgagaagactttcgggtgcgctgcacctcgaagcgggctgtgaccgaaatgctacaactgtgcggccgcttcgtgcaaaagctcggggacgctctgccggaggagattcgggagcccgctctgcgagatgcgcagtgggtacgggaccagttagccagttctttactcatcatcctcttacccaacacccaggatcttaggattcagaaagatcccacgccaggccttggcagaattaacggtgccccaggctactgtagaaccagttcgagaaacgctagaggagaaagaaatagatgctaatgtcagctgggtcttattaattacttagaccagcgctgtccagtgaaaatacaagacttttgaatcagctgtgcaagagaatatcagcattaatgggcaagcatggcaggaagcttcagataattgttttatggattctgacatcaaagtacttgaagatcagtttgatgaaatcatagtagatatagccacaaaacgtaagcagtatcccagaaagatcctggaatgtgtcatcaaaaccataaaagcaaaacaagaaattctgcccctcatatggaaaatttgaaatgcagaggggaaacagtagcaaaggagatcagtgaagccatgaagtccttgcctgcattaattgaacaaggagagggattttcccaagttctcaggatgcagcctgttatccacctccagaggattcaccaagaagtcttttccagttgtcataggaaaccagatgctaaacctgagaactttataacacagatagaaaccacaccaacagagactgcttccaggaaaacctctgacgtggtactgaaaagaaagcaaactaaagactgcccccagagaaaatggtatccattgcggccaaagaaaattaatcttgatacatgagctctttctgtttattttgggagttgaaaataggcaccatcaacatttagattacagcctaattaatacctagataagacttcatttgaaataagaaataactcttttactagtgattcatttatacagatatagtatctctgtgcggggatatgatataatattgtatttccttactgttttatctattgtaaataaaaagcattttaaaaagtattgacacaaagcccatcagtgggcattaaaaatattaaaagtgcagacttttactgtccttaagtgccatcaactctcagctcccttgtagcttttgtgggatttaacaagtaacaaattctgttgtgtttccctggtatacatctttctaggaaaaaaaaaaaaagagagagagctgtataatgatttttcgtttacatgctgaaaagtaattatcagttctgcacagcagcagatgcagggtttttttttaaagatgtagtttgatttatcaaattaatgtgctgatgataatactggctttgactttgttactccatgttcagctaatttaggtttgtgagattaactttaggattttttgttgtgtaagacaatgataactattatttgtgcaacattactctttgaaataaaaattggcatgtagccaatgtttcctgcccacactcacttttttctatagaccattaacataatttgacttggaactaatggtttctttttagggtttcttatttatttctttacaaatcattccagttcaaaatatatatcagattaatacactgaaaaaaaagtgtcattgtgttattgaactattttacatttgaagatgtttatatatcaggtatataatcactgggagaagtctgagaaaacgatattggctttacttctaacatttaactatagtttcttatagctcttattgtgtgtcttacattatacagtgtaggcagggccatcaaacttaccaactgtttccccttttgatgactctgataccttcattcatttttcaaaggaatttactgatcatgaggttggaaaatctgtatttctcttgcttattatgtattaataatcataaatgtctagattcaccagaagtcaccagaaggtctgtctcagtgaagaaaacttataaagccactttgttgcattttgtgtttcagtgttacagtttgagatctgtatatttgtacacagctatgtgtttttcattgaaataatgtacaaagactgatcttgatgctgtgtatttttatgagttgtcttaggcattcctgagctcagcttcagttggatggtgggtcagcaccctgcgtttctgaacatactagacttcagtttaaaactgttttgaggctgtataatatgttgctgtttttacagtgctaatgtttttatagtattaaaattctgtatgatttgtttcacttcagaggtccccaaacaaaagagttattgttaattctattagattatataagctacttgcattttgattatataagaacatggtccctcccttttaagagaggtatattgtgctacat

SEQ ID NO: 37862 - DNA, 2030 bp, Homo sapiens
tttcttgagaagtcttgctttgttgcccaggctggagggcagtggtgtgatctcagctcatgccctccagcctgggcaacaaagcaagacttctcaagaaaaaaaaaaaaaattagagtactgcatccatctttgtctgtttgtgtttcaacctgagattaatgttgaatattactgtttgtttgtttgaagtccttgcctgcattaattgaacaaggagagggattttcccaagttctcaggatgcagcctgttatccacctccagaggattcaccaagaagtcttttccagttgtcataggaaaccagatgctaaacctgagaactttataacacagatagaaaccacaccaacagagactgcttccaggaaaacctctgacgtggtactgaaaagaaagcaaactaaagactgcccccagagaaaatggtatccattgcggccaaagaaaattaatcttgatacatgagctctttctgtttattttgggagttgaaaataggcaccatcaacatttagattacagcctaattaatacctagataagacttcatttgaaataagaaataactcttttactagtgattcatttatacagatatagtatctctgtgcggggatatgatataatattgtatttccttactgttttatctattgtaaataaaaagcattttaaaaagtattgacacaaagcccatcagtgggcattaaaaatattaaaagtgcagacttttactgtccttaagtgccatcaactctcagctcccttgtagcttttgtgggatttaacaagtaacaaattctgttgtgtttccctggtatacatctttctaggaaaaaaaaaaaaagagagagagctgtataatgatttttcgtttacatgctgaaaagtaattatcagttctgcacagcagcagatgcagggtttttttttaaagatgtagtttgatttatcaaattaatgtgctgatgataatactggctttgactttgttactccatgttcagctaatttaggtttgtgagattaactttaggattttttgttgtgtaagacaatgataactattatttgtgcaacattactctttgaaataaaaattggcatgtagccaatgtttcctgcccacactcacttttttctatagaccattaacataatttgacttggaactaatggtttctttttagggtttcttatttatttctttacaaatcattccagttcaaaatatatatcagattaatacactgaaaaaaaagtgtcattgtgttattgaactattttacatttgaagatgtttatatatcaggtatataatcactgggagaagtctgagaaaacgatattggctttacttctaacatttaactatagtttcttatagctcttattgtgtgtcttacattatacagtgtaggcagggccatcaaacttaccaactgtttccccttttgatgactctgataccttcattcatttttcaaaggaatttactgatcatgaggttggaaaatctgtatttctcttgcttattatgtattaataatcataaatgtctagattcaccagaagtcaccagaaggtctgtctcagtgaagaaaacttataaagccactttgttgcattttgtgtttcagtgttacagtttgagatctgtatatttgtacacagctatgtgtttttcattgaaataatgtacaaagactgatcttgatgctgtgtatttttatgagttgtcttaggcattcctgagctcagcttcagttggatggtgggtcagcaccctgcgtttctgaacatactagacttcagtttaaaactgttttgaggctgtataatatgttgctgtttttacagtgctaatgtttttatagtattaaaattctgtatgatttgtttcacttcagaggtccccaaacaaaagagttattgttaattctattagattatataagctacttgcattttgattatataagaacatggtccctcccttttaagagaggtatattgtgctacat

SEQ ID NO: 37863 - DNA, 1541 bp, Homo sapiens
gagagtgccccgcccacagttccgacgaaaaatggcggggtctcctgagttggtggtccttgaccctccatgggacaaggagctcgcggctggcacagagagccaggccttggtctccgccactccccgagaagactttcgggtgcgctgcacctcgaagcgggctgtgaccgaaatgctacaactgtgcggccgcttcgtgcaaaagctcggggacgctctgccggaggagattcgggagcccgctctgcgagatgcgcagtggacttttgaatcagctgtgcaagagaatatcagcattaatgggcaagcatggcaggaagcttcagataattgttttatggattctgacatcaaagtacttgaagatcagtttgatgaaatcatagtagatatagccacaaaacgtaagcagtatcccagaaagatcctggaatgtgtcatcaaaaccataaaagcaaaacaagaaattctgaagcagtaccaccctgttgtacatccactggacctaaaatatgaccctgatccagcccctcatatggaaaatttgaaatgcagaggggaaacagtagcaaaggagatcagtgaagccatgaagtccttgcctgcattaattgaacaaggagagggattttcccaagttctcaggatgcagcctgttatccacctccagaggattcaccaagaagtcttttccagttgtcataggaaaccagatgctaaacctgagaactttataacacagatagaaaccacaccaacagagactgcttccaggaaaacctctgacgtggtactgaaaagaaagcaaactaaagactgcccccagagaaaatggtatccattgcggccaaagaaaattaatcttgatacatgagctctttctgtttattttgggagttgaaaataggcaccatcaacatttagattacagcctaattaatacctagataagacttcatttgaaataagaaataactcttttactagtgattcatttatacagatatagtatctctgtgcggggatatgatataatattgtatttccttactgttttatctattgtaaataaaaagcattttaaaaagtattgacacaaagcccatcagtgggcattaaaaatattaaaagtgcagacttttactgtccttaagtgccatcaactctcagctcccttgtagcttttgtgggatttaacaagtaacaaattctgttgtgtttccctggtatacatctttctaggaaaaaaaaaaaaagagagagagctgtataatgatttttcgtttacatgctgaaaagtaattatcagttctgcacagcagcagatgcagggtttttttttaaagatgtagtttgatttatcaaattaatgtgctgatgataatactggctttgactttgttactccatgttcagctaatttaggtttgtgagattaactttaggattttttgttgtgtaagacaatgataactattatttgtgcaacattactctttgaaataaaaattggcatgtagccaatgtttcctgcccac

SEQ ID NO: 37864 - DNA, 698 bp, Homo sapiens
gagagtgccccgcccacagttccgacgaaaaatggcggggtctcctgagttggtggtccttgaccctccatgggacaaggagctcgcggctggcacagagagccaggccttggtctccgccactccccgagaagactttcgggtgcgctgcacctcgaagcgggctgtgaccgaaatgctacaactgtgcggccgcttcgtgcaaaagctcggggacgctctgccggaggagattcgggagcccgctctgcgagatgcgcagtggacttttgaatcagctgtgcaagagaatatcagcattaatgggcaagcatggcaggaagcttcagataattgttttatggattctgacatcaaagtacttgaagatcagtttgatgaaatcatagtagatatagccacaaaacgtaagcagtatcccagaaagatcctggaatgtgtcatcaaaaccataaaagcaaaacaagaaattctggtaagatgatttgcctttaaaatgttatagtatattttaccacaataaaaacattaaacatataaggctctacgtggagataagtgacattttgttgtctttttctttcctgcctcaattagtattgtttgtctcttgtaagactttactcttctaagttgtactatgacatagtatagtcatactatactgtgttttgaacacactggttcaaaaatgaaaa

SEQ ID NO: 37865 - DNA, 1011 bp, Homo sapiens
gagagtgccccgcccacagttccgacgaaaaatggcggggtctcctgagttggtggtccttgaccctccatgggacaaggagctcgcggctggcacagagagccaggccttggtctccgccactccccgagaagactttcgggtgcgctgcacctcgaagcgggctgtgaccgaaatgctacaactgtgcggccgcttcgtgcaaaagctcggggacgctctgccggaggagattcgggagcccgctctgcgagatgcgcagtggacttttgaatcagctgtgcaagagaatatcagcattaatgggcaagcatggcaggaagcttcagataattgttttatggattctgacatcaaagtacttgaagatcagtttgatgaaatcatagtagatatagccacaaaacgtaagcagtatcccagaaagatcctggaatgtgtcatcaaaaccataaaagcaaaacaagaaattctgaagcagtaccaccctgttgtacatccactggacctaaaatatgaccctgatccagcccctcatatggaaaatttgaaatgcagaggggaaacagtagcaaaggagatcagtgaagccatgaagtccttgcctgcattaattgaacaaggagagggattttcccaagttctcaggatgcagcctgttatccacctccagaggattcaccaagaagtcttttccagttgtcataggaaaccagatgctaaacctgagaactttataacacagatagaaaccacaccaacagagactgcttccaggaaaacctctgacgtggtactgaaaagaaagcaaactaaagactgcccccagagaaaatggtatccattgcggccaaagaaaattaatcttgatacatgagctctttctgtttattttgggagttgtaccttgggccaccacaattctcaatacacgacacatataacctacaataaactcattggcaaaaaaataccttttcaaacaacacataacgaaatcccgtcgggagc

SEQ ID NO: 37866 - DNA, 2656 bp, Homo sapiens
gagagtgccccgcccacagttccgacgaaaaatggcggggtctcctgagttggtggtccttgaccctccatgggacaaggagctcgcggctggcacagagagccaggccttggtctccgccactccccgagaagactttcgggtgcgctgcacctcgaagcgggctgtgaccgaaatgctacaactgtgcggccgcttcgtgcaaaagctcggggacgctctgccggaggagattcgggagcccgctctgcgagatgcgcagtgggtacgggaccagttagccagttctttactcatcatcctcttacccaacacccaggatcttaggattcagaaagatcccacgccaggccttggcagaattaacggtgccccaggctactgtagaaccagttcgagaaacgctagaggagaaagaaatagatgctaatgtcagctgggtcttattaattacttagaccagcgctgtccagtgaaaatacaagacttttgaatcagctgtgcaagagaatatcagcattaatgggcaagcatggcaggaagcttcagataattgttttatggattctgacatcaaagtacttgaagatcagtttgatgaaatcatagtagatatagccacaaaacgtaagcagtatcccagaaagatcctggaatgtgtcatcaaaaccataaaagcaaaacaagaaattctgaagcagtaccaccctgttgtacatccactggacctaaaatatgaccctgatccagcccctcatatggaaaatttgaaatgcagaggggaaacagtagcaaaggagatcagtgaagccatgaagtccttgcctgcattaattgaacaaggagagggattttcccaagttctcaggatgcagcctgttatccacctccagaggattcaccaagaagtcttttccagttgtcataggaaaccagatgctaaacctgagaactttataacacagatagaaaccacaccaacagagactgcttccaggaaaacctctgacgtggtactgaaaagaaagcaaactaaagactgcccccagagaaaatggtatccattgcggccaaagaaaattaatcttgatacatgagctctttctgtttattttgggagttgaaaataggcaccatcaacatttagattacagcctaattaatacctagataagacttcatttgaaataagaaataactcttttactagtgattcatttatacagatatagtatctctgtgcggggatatgatataatattgtatttccttactgttttatctattgtaaataaaaagcattttaaaaagtattgacacaaagcccatcagtgggcattaaaaatattaaaagtgcagacttttactgtccttaagtgccatcaactctcagctcccttgtagcttttgtgggatttaacaagtaacaaattctgttgtgtttccctggtatacatctttctaggaaaaaaaaaaaaagagagagagctgtataatgatttttcgtttacatgctgaaaagtaattatcagttctgcacagcagcagatgcagggtttttttttaaagatgtagtttgatttatcaaattaatgtgctgatgataatactggctttgactttgttactccatgttcagctaatttaggtttgtgagattaactttaggattttttgttgtgtaagacaatgataactattatttgtgcaacattactctttgaaataaaaattggcatgtagccaatgtttcctgcccacactcacttttttctatagaccattaacataatttgacttggaactaatggtttctttttagggtttcttatttatttctttacaaatcattccagttcaaaatatatatcagattaatacactgaaaaaaaagtgtcattgtgttattgaactattttacatttgaagatgtttatatatcaggtatataatcactgggagaagtctgagaaaacgatattggctttacttctaacatttaactatagtttcttatagctcttattgtgtgtcttacattatacagtgtaggcagggccatcaaacttaccaactgtttccccttttgatgactctgataccttcattcatttttcaaaggaatttactgatcatgaggttggaaaatctgtatttctcttgcttattatgtattaataatcataaatgtctagattcaccagaagtcaccagaaggtctgtctcagtgaagaaaacttataaagccactttgttgcattttgtgtttcagtgttacagtttgagatctgtatatttgtacacagctatgtgtttttcattgaaataatgtacaaagactgatcttgatgctgtgtatttttatgagttgtcttaggcattcctgagctcagcttcagttggatggtgggtcagcaccctgcgtttctgaacatactagacttcagtttaaaactgttttgaggctgtataatatgttgctgtttttacagtgctaatgtttttatagtattaaaattctgtatgatttgtttcacttcagaggtccccaaacaaaagagttattgttaattctattagattatataagctacttgcattttgattatataagaacatggtccctcccttttaagagaggtatattgtgctacat

SEQ ID NO: 37867 - DNA, 2368 bp, Homo sapiens
gagagtgccccgcccacagttccgacgaaaaatggcggggtctcctgagttggtggtccttgaccctccatgggacaaggagctcgcggctggcacagagagccaggccttggtctccgccactccccgagaagactttcgggtgcgctgcacctcgaagcgggctgtgaccgaaatgctacaactgtgcggccgcttcgtgcaaaagctcggggacgctctgccggaggagattcgggagcccgctctgcgagatgcgcagtggacttttgaatcagctgtgcaagagaatatcagcattaatgggcaagcatggcaggaagcttcagataattgttttatggattctgacatcaaagtacttgaagatcagtttgatgaaatcatagtagatatagccacaaaacgtaagcagtatcccagaaagatcctggaatgtgtcatcaaaaccataaaagcaaaacaagaaattctgaagcagtaccaccctgttgtacatccactggacctaaaatatgaccctgatccagtccttgcctgcattaattgaacaaggagagggattttcccaagttctcaggatgcagcctgttatccacctccagaggattcaccaagaagtcttttccagttgtcataggaaaccagatgctaaacctgagaactttataacacagatagaaaccacaccaacagagactgcttccaggaaaacctctgacgtggtactgaaaagaaagcaaactaaagactgcccccagagaaaatggtatccattgcggccaaagaaaattaatcttgatacatgagctctttctgtttattttgggagttgaaaataggcaccatcaacatttagattacagcctaattaatacctagataagacttcatttgaaataagaaataactcttttactagtgattcatttatacagatatagtatctctgtgcggggatatgatataatattgtatttccttactgttttatctattgtaaataaaaagcattttaaaaagtattgacacaaagcccatcagtgggcattaaaaatattaaaagtgcagacttttactgtccttaagtgccatcaactctcagctcccttgtagcttttgtgggatttaacaagtaacaaattctgttgtgtttccctggtatacatctttctaggaaaaaaaaaaaaagagagagagctgtataatgatttttcgtttacatgctgaaaagtaattatcagttctgcacagcagcagatgcagggtttttttttaaagatgtagtttgatttatcaaattaatgtgctgatgataatactggctttgactttgttactccatgttcagctaatttaggtttgtgagattaactttaggattttttgttgtgtaagacaatgataactattatttgtgcaacattactctttgaaataaaaattggcatgtagccaatgtttcctgcccacactcacttttttctatagaccattaacataatttgacttggaactaatggtttctttttagggtttcttatttatttctttacaaatcattccagttcaaaatatatatcagattaatacactgaaaaaaaagtgtcattgtgttattgaactattttacatttgaagatgtttatatatcaggtatataatcactgggagaagtctgagaaaacgatattggctttacttctaacatttaactatagtttcttatagctcttattgtgtgtcttacattatacagtgtaggcagggccatcaaacttaccaactgtttccccttttgatgactctgataccttcattcatttttcaaaggaatttactgatcatgaggttggaaaatctgtatttctcttgcttattatgtattaataatcataaatgtctagattcaccagaagtcaccagaaggtctgtctcagtgaagaaaacttataaagccactttgttgcattttgtgtttcagtgttacagtttgagatctgtatatttgtacacagctatgtgtttttcattgaaataatgtacaaagactgatcttgatgctgtgtatttttatgagttgtcttaggcattcctgagctcagcttcagttggatggtgggtcagcaccctgcgtttctgaacatactagacttcagtttaaaactgttttgaggctgtataatatgttgctgtttttacagtgctaatgtttttatagtattaaaattctgtatgatttgtttcacttcagaggtccccaaacaaaagagttattgttaattctattagattatataagctacttgcattttgattatataagaacatggtccctcccttttaagagaggtatattgtgctacat

SEQ ID NO: 37868 - DNA, 2313 bp, Homo sapiens
gagagtgccccgcccacagttccgacgaaaaatggcggggtctcctgagttggtggtccttgaccctccatgggacaaggagctcgcggctggcacagagagccaggccttggtctccgccactccccgagaagactttcgggtgcgctgcacctcgaagcgggctgtgaccgaaatgctacaactgtgcggccgcttcgtgcaaaagctcggggacgctctgccggaggagattcgggagcccgctctgcgagatgcgcagtggacttttgaatcagctgtgcaagagaatatcagcattaatgggcaagcatggcaggaagcttcagataattgttttatggattctgacatcaaagtacttgaagatcagtttgatgaaatcatagtagatatagccacaaaacgtaagcagtatcccagaaagatcctggaatgtgtcatcaaaaccataaaagcaaaacaagaaattctgtccttgcctgcattaattgaacaaggagagggattttcccaagttctcaggatgcagcctgttatccacctccagaggattcaccaagaagtcttttccagttgtcataggaaaccagatgctaaacctgagaactttataacacagatagaaaccacaccaacagagactgcttccaggaaaacctctgacgtggtactgaaaagaaagcaaactaaagactgcccccagagaaaatggtatccattgcggccaaagaaaattaatcttgatacatgagctctttctgtttattttgggagttgaaaataggcaccatcaacatttagattacagcctaattaatacctagataagacttcatttgaaataagaaataactcttttactagtgattcatttatacagatatagtatctctgtgcggggatatgatataatattgtatttccttactgttttatctattgtaaataaaaagcattttaaaaagtattgacacaaagcccatcagtgggcattaaaaatattaaaagtgcagacttttactgtccttaagtgccatcaactctcagctcccttgtagcttttgtgggatttaacaagtaacaaattctgttgtgtttccctggtatacatctttctaggaaaaaaaaaaaaagagagagagctgtataatgatttttcgtttacatgctgaaaagtaattatcagttctgcacagcagcagatgcagggtttttttttaaagatgtagtttgatttatcaaattaatgtgctgatgataatactggctttgactttgttactccatgttcagctaatttaggtttgtgagattaactttaggattttttgttgtgtaagacaatgataactattatttgtgcaacattactctttgaaataaaaattggcatgtagccaatgtttcctgcccacactcacttttttctatagaccattaacataatttgacttggaactaatggtttctttttagggtttcttatttatttctttacaaatcattccagttcaaaatatatatcagattaatacactgaaaaaaaagtgtcattgtgttattgaactattttacatttgaagatgtttatatatcaggtatataatcactgggagaagtctgagaaaacgatattggctttacttctaacatttaactatagtttcttatagctcttattgtgtgtcttacattatacagtgtaggcagggccatcaaacttaccaactgtttccccttttgatgactctgataccttcattcatttttcaaaggaatttactgatcatgaggttggaaaatctgtatttctcttgcttattatgtattaataatcataaatgtctagattcaccagaagtcaccagaaggtctgtctcagtgaagaaaacttataaagccactttgttgcattttgtgtttcagtgttacagtttgagatctgtatatttgtacacagctatgtgtttttcattgaaataatgtacaaagactgatcttgatgctgtgtatttttatgagttgtcttaggcattcctgagctcagcttcagttggatggtgggtcagcaccctgcgtttctgaacatactagacttcagtttaaaactgttttgaggctgtataatatgttgctgtttttacagtgctaatgtttttatagtattaaaattctgtatgatttgtttcacttcagaggtccccaaacaaaagagttattgttaattctattagattatataagctacttgcattttgattatataagaacatggtccctcccttttaagagaggtatattgtgctacat

SEQ ID NO: 37869 - DNA, 356 bp, Homo sapiens
cataatccctagtatcccggccttgaggcccagagcctcattttactggcccttaaatgctccaaaattacccacttttttcctttgtttccagtctctacccccctaacttcatcccctgtccaaaatattatgctaatcctaatcagtggaaagcagttttattaatttatttaaaatatttgaatggatggtaattacttgatgttacaaaaatagtttggtttcatattttactaaaatagtcacagaaacttcttttaggctcctatctttgaattcctttctgttgtgggtacgactggctggggctggtgttgcaggtagtaaaataatttaccaagacagtcgtaggt

SEQ ID NO: 37870 - DNA, 390 bp, Homo sapiens
gactccataaccagtttctgtaacaaagactcctctgggtctcctccagtctcatattgccatcaacctaaagaaagctgacagtccactccttttttcatcatggaaggtagccgagttatataaagacttggaatcaggatattaaggtttgagtctgtttaccactcaccatttaatctggaaacaagtcatttaacctgctgatccttgttacatcatttgaaaacagaggagaggggatgtgtttgttgtgaggttattgtgtttaagtgagccagttgtgagctagcatagtggcctggtatatataaagtccttagtaagtctaagtgtagatgactagacagtaaaaatctgggtatgttgctaggtagctattacagggtg

SEQ ID NO: 37871 - DNA, 340 bp, Homo sapiens
caaaggatttatatgaagtacaagaattaaagtttagaattatagagtaggaccacgttaaagtaacttaaatgctaggatagggaatttgagctctatattactggaaattcatatttgtattcagtagttgtgctgcctctcacctgtcttctattctcagccccttgctgtttaaaatatagttcttggaccagcagcattggcatcacttgggaacttgttagaaatacagaatttcagatccctcttaggcttattgaatgatagtctgcattttagcaagattcccaagtgacttatgtacacagtaaagtttgagaaacactgctttgatcac

SEQ ID NO: 37872 - DNA, 456 bp, Homo sapiens
cacttatcatgctccacctcgtattattattaaattatgtgtgcatcgtttttgtaatgagactctaaatgccctgaaaaggaaatttacatatcttcatatataccatagacattaacagaatgatcgggacataacagcatttaataccagtgttgattaaagctctttttttaattagctgaaaaacctatgggccaagaattgtgtcagtacaggaatcagtattgagcaagtcagtctctgtctctgctgacacaggaacttacaggctgatgaggaagcatcaccatcgttgaagcagtacacctgatacttcacttgacttttttctttaaaaaataaaactcatttttaattggtcatttcatgttaaatctcagattgttcagagaaacaagaatcaagtagctaaactattgatttgaaaatgttgcctgggcaacacagcgagat

SEQ ID NO: 37873 - DNA, 823 bp, Homo sapiens
gggcgacagagtgagactcagtctcgctgaaaaaaacaacaacattgctttacagtgtgattccagttacagagaatattcacataggtgcataaataaatgaaaaaattattggttaatgtctctgtatgttgggattctcagtgattttatttttctactttttattttttataatttctccagtgtgttggtgttagctttatagattatatcaagtaaccttttgctgcaccaaaaaaccccccaaatctagtggattaaaacaaaaccatcttacaattttgtcagaactgtctaagctgatatttactgggctctctcctgaatgtggggtcagctggggggttggctaatagggtaccctaggatggtctcactcatctgtggtggttggcagaccgttgtccaagacactgcacttctcttccgggtggcttctcacgccttctgatgtgctagcttgggtttgttcacatggtggtctcttccagggatagtacaaggtacagctcacgtgcatgaggtgcaagttgatacagtttggatgtttgtcccctccaaatctgatgttgaaatttgatccccagtgctggaggttgggcctggtgggaggtctttgggacattggggcggatccctcttgaatggcttggtgtgtcctcatggtaaccagtgaggtcttgctttatgagtccccaggagagctgattcttaaaaagagcctagcacctcccttccgtcttgccctccatcctctcgctgtcatctatacacaacagctccccttccccttctgccttgagcggaagcttcctgaagc

SEQ ID NO: 37874 - DNA, 631 bp, Homo sapiens
ctacgaggatctcgtttggatgcggctatgtcgggagactggtaacggaaattcgtctagcatctgctagtttaaagttgagagaaatgtacagagacctgttttgggtgatagggtaatgcccgtgttctgaagatacgggccttttcaggaacatgaaaattagttgtagtcatgcttgatgtgtacctttttccttcctacttctgcttggtttagaaataagttctgtctagcactttgatccattccagcccaaagtgagatgagaataattcgttttatgtctgaagaaacatgcttggttgtacagaggaaggaacagtaaaattggagataagagacctgaatatctctattttattttatttttagacaaaatctcgctctgtagcccagagtggaggttgggcctggtgggaggtctttgggacattggggcggatccctcttgaatggcttggtgtgtcctcatggtaaccagtgaggtcttgctttatgagtccccaggagagctgattcttaaaaagagcctagcacctcccttccgtcttgccctccatcctctcgctgtcatctatacacaacagctccccttccccttctgccttgagcggaagcttcctgaagc

SEQ ID NO: 37875 - DNA, 650 bp, Homo sapiens
aggagtcctgagttgatatggaggcatgattaccacccctagagaagcctgtagctgatagactgtgccattcagaaacttcccaagctaatgaaaagtgggcaggcccttcccagaagaacaaaccacaggagcgctcaaaaacatgctttaaaaaatgcaggtgattatccccgtgtaagatgaaagggcttgcagggggagtggccactgagatactccaggaagcatcctagagttggtgagtctgaagcaagacagggcaagacctagaagtgagctgagggtctgctttctcaagtgaggtctgggtgcaggctgagaaacagattggtttagcaggagcaaatatgcattctgcccaaaggagctttgtatatgaatagaacctcgggatggtagaaccaagaaggcctccaagagaatctgatctagtctttctcttgaccgcttcctcctttgttgaatgtaaaaaatcacatgcctttttactgatattaaattgttaagaattactcataaaatagctttccaagctattgctgttactaatacaattagtaattactaattcttaaacccgaaggcaaataacttcacatactgcctcatatttcaactcaatttctctgtaacaaaaaaagtaaaaa

SEQ ID NO: 37876 - DNA, 3178 bp, Homo sapiens
ggcacgagatgacaccaagcaaagcctacttagtttagatctccagaaattggctggtggaaaaaaatcaaacatgaagattgcagttttgttttgtttttttctgcttatcatttttcaaactgactttggaaaaaatgaagaaattcctaggaagcaaaggaggaagatctaccacagaaggttgaggaaaagttcaacctcacacaagcacagatcaaacagacagcttggaattcagcaaacaacagtttttacaccagtagcaagacttcctattgttaactttgattatagcatggaggaaaagtttgaatccttttcaagttttcctggagtagaatcaagttataatgtgttaccaggaaagaagggacactgtttggtaaagggcataaccatgtacaacaaagctgtgtggtcgcctgagccctgcactacctgcctctgctcagatggaagagttctttgtgatgaaaccatgtgccatccccagaggtgcccccaaacagttatacctgaaggggaatgctgcccggtctgctccgctactgtctcctattctctactcagtggtatagcattaaatgatagaaatgaattttctggtgattcttcagaacaaagagaacctaccaatttacttcataagcaactgccacctcctcaggtgggaatggaccgaatagtaagaaaagaagcacttcaatctgaggaggatgaagaagtgaaagaagaagatacagagcaaaagagagagacccctgaatctagaaatcaggggcaactttacagtgagggggacagcagaggaggagacagaaagcagaggcctggagaggagaggaggctggcacaccagcaacaacgccaaggaagggaggaggaggaggatgaggaggaggagggtgaggagggtgaggaggatgaggaggacgaggaggacccggtaagaggagatatgttccgaatgccctctcgatccccgcttcctgctcctcccagaggcacactgcgcctgccaagcgggtgctctctgtcctacaggaccatcagctgcatcaacgccatgcttacccagataccaccgctgacagcaccacagataacaagtctggagctcactggcaattccatcgcctccatcccagatgaagcatttaatggattaccaaatttggaaaggcttgatctgagtaaaaataatatcacttcttcaggcataggtccaaaagcattcaagcttctgaagaagttaatgcgtttgaatatggatggaaataatttgatacagattccttcacaattgccatctacattagaagaacttaaagtcaatgagaacaatcttcaggctatcgatgaagaaagtttatcagacttaaatcagttggtcaccttagaattggaaggaaacaatctcagtgaagccaatgtcaatcctttagctttcaaacctttgaagagcctagcctacttgcgtctgggaaaaaataaatttagaattataccgcagggtcttcctggttctattgaggaattatacctagaaaataaccaaattgaagaaataactgaaatttgtttcaatcataccagaaagatcaatgtcattgtactacgttataacaaaattgaagaaaataggattgctcctttagcctggataaatcaagaaaatctagaatccattgatctctcctacaacaagctctatcacgtcccgtcctatctacccaagtccttgctgcacctagtactccttgggaaccagattgaacggatccctggctatgtgtttggccacatggaaccaggcctggaatacttgtacctgtcatttaacaaacttgctgatgatggcatggaccgtgtctccttctatggggcatatcattctctgagagaattatttctggatcacaatgacttaaaatctataccacctgggatacaagaaatgaaagcactacattttctgaggctgaacaacaacaagatacggaacattcttccagaagaaatttgcaatgctgaagaggatgatgactcaaatctggaacatcttcatcttgaaaacaattatattaaaattagagaaataccatcttacacattttcatgcataagatcatactcaagtatcgttcttaaaccacaaaacatcaagtaattccaagttttcctttgctgtttataaactttactcatgtatttgtagtagctgcatttgtcattaataagagagacataatcctcctgttatactcagtatcattatatgctagtcaacctgattcactaacacacagatgaacaaccaaaatatacctaaaaggtatagtctctaggagttttattaatagtaaaggtaaaatctctcagtttcctacctctagaaagaggccatctcactagaataggatattatgcatactgagctagaccagaagagtctggaacaaaataaacacagcctttataatcaacttgaatactggtgttagctgagaactctgtaagtccctttaaaaattatgtatcttttggttcaagattaagaagcataatgacaacaaaaaaagcaggcagaatttatgaataagtgttgtttattattaaaacaataatttgttaatttcttataaggtcctgtgctataattactggtataaatataactgaatattggggtagctttcatttcttccattaattacatgtgtaaaattaaaacactactgtaatgttaatttcctggttttgaaaatcatattatggttatgtacattgttaacattaaggaaagctggcagaagggtgtgcataaattctatactctttttgaaacttttctataattctaaaattattttttaaagttaaacagtatattaagattaccttcactattcctcactcaagattaagacattttttgaaaagcagtagagtttgcttaaaatacaaattaattattcttgactataaccttgtaaaggtaaatctaatgtataaatttttgaaaaattttgcaccactggtcatagcatctatctcctttgccttaatttactgaaatacatcattttattcggttcaattgaaataaagctatgtctttactatgtattggccctaccaaaatcatatattaaaattttctaacataatgatt

SEQ ID NO: 37877 - DNA, 2229 bp, Homo sapiens
ctagaggtggagtgttatgaagtaatggtaggtctcttgtctgaagaataccagaaaatcatttctatcatttaatgctataccactgagtagagaataggagacagtagcggatcaaacagacagcttggaattcagcaaacaacagtttttacaccagtagcaagacttcctattgttaactttgattatagcatggaggaaaagtttgaatccttttcaagttttcctggagtagaatcaagttataatgtgttaccaggaaagaagggacactgtttggtaaagggcataaccatgtacaacaaagctgtgtggtcgcctgagccctgcactacctgcctctgctcagatggaagagttctttgtgatgaaaccatgtgccatccccagaggtgcccccaaacagttatacctgaaggggaatgctgcccggtctgctccgctactgtctcctattctctactcagtggtatagcattaaatgatagaaatgaattttctggtgattcttcagaacaaagagaacctaccaatttacttcataagcaactgccacctcctcaggtgggaatggaccgaatagtaagaaaagaagcacttcaatctgaggaggatgaagaagtgaaagaagaagatacagagcaaaagagagagacccctgaatctagaaatcaggggcaactttacagtgagggggacagcagaggaggagacagaaagcagaggcctggagaggagaggaggctggcacaccagcaacaacgccaaggaagggaggaggaggaggatgaggaggaggagggtgaggagggtgaggaggatgaggaggacgaggaggacccggtaagaggagatatgttccgaatgccctctcgatccccgcttcctgctcctcccagaggcacactgcgcctgccaagcgggtgctctctgtcctacaggaccatcagctgcatcaacgccatgcttacccagataccaccgctgacagcaccacagataacaagtctggagctcactggcaattccatcgcctccatcccagatgaagcatttaatggattaccaaatttggaaaggcttgatctgagtaaaaataatatcacttcttcaggcataggtccaaaagcattcaagcttctgaagaagttaatgcgtttgaatatggatggaaataatttgatacagattccttcacaattgccatctacattagaagaacttaaagtcaatgagaacaatcttcaggctatcgatgaagaaagtttatcagacttaaatcagttggtcaccttagaattggaaggaaacaatctcagtgaagccaatgtcaatcctttagctttcaaacctttgaagagcctagcctacttgcgtctgggaaaaaataaatttagaattataccgcagggtcttcctggttctattgaggaattatacctagaaaataaccaaattgaagaaataactgaaatttgtttcaatcataccagaaagatcaatgtcattgtactacgttataacaaaattgaagaaaataggattgctcctttagcctggataaatcaagaaaatctagaatccattgatctctcctacaacaagctctatcacgtcccgtcctatctacccaagtccttgctgcacctagtactccttgggaaccagattgaacggatccctggctatgtgtttggccacatggaaccaggcctggaatacttgtacctgtcatttaacaaacttgctgatgatggcatggaccgtgtctccttctatggggcatatcattctctgagagaattatttctggatcacaatgacttaaaatctataccacctgggatacaagaaatgaaagcactacattttctgaggctgaacaacaacaagatacggtaaattttggctttttcaagtatctgtttaaattttggttggcaaaatatatgataaaacaaccatgacatgatctctgggatttacgttaagggaaaaaaaaatggtgctaaggggttggattaaacaagattggcaaatgttagtaattaccaaaggtggatgacaggtatgtgaggattcattataagcttttcctacttttgcacatgtttataaatttccatagttaaaacatcttttggtcaggtgcagtggctcacgcccttatttgcgatatgcttgaggtggccagtttgaatggcgaccatggtccacgtccataag

SEQ ID NO: 37878 - DNA, 550 bp, Homo sapiens
ctagaggtggagtgttatgaagtaatggtaggtctcttgtctgaagaataccagaaaatcatttctatcatttaatgctataccactgagtagagaataggagacagtagcggatcaaacagacagcttggaattcagcaaacaacagtttttacaccagtagcaagacttcctattgttaactttgattatagcatggaggaaaagtttgaatccttttcaagttttcctggagtagaatcaagttataatgtgttaccaggaaagaagggacactgtttggtaaagggcataaccatgtacaacaaagctgtgtggtcgcctgagccctgcactacctgcctctgctcagatggaagagttctttgtgatgaaaccatgtgccatccccagaggtgcccccaaacagttatacctgaaggggaatgctgcccggtctgctccgctactggtacagagatttagctaagcaaaatatcagtgtgtgattaatctttaacttccatttgtttttgttactaattttagattaaaattatgatacattaaa

SEQ ID NO: 37879 - DNA, 441 bp, Homo sapiens
tctctgtcctacaggaccatcagctgcatcaacgccatgcttacccagataccaccgctgacagcaccacagataacaagtctggagctcactggtaagagatgttgacttctgctttattttgtgctttaaaagtaaatgactcttagcagctgggcacggtggctcacgcctataatctcagcactttgaaaggctgaggtggccagatcacctgaggtcaggggtttgagaccagcctggacaatatggtgaaaccccatctctaccaaaaatacaaaaattagccgggcgtggtggggcatgcctgtaatcccagctactcagaaggccgaggcaggagaatcgtttgaatccaggaggcggaggttgcagtgagctgagattgagccactgttctctagcctgggcacttgagcgagactccatctcaaaaaaaaa

SEQ ID NO: 37880 - DNA, 3075 bp, Homo sapiens
ctagaggtggagtgttatgaagtaatggtaggtctcttgtctgaagaataccagaaaatcatttctatcatttaatgctataccactgagtagagaataggagacagtagcggatcaaacagacagcttggaattcagcaaacaacagtttttacaccagtagcaagacttcctattgttaactttgattatagcatggaggaaaagtttgaatccttttcaagttttcctggagtagaatcaagttataatgtgttaccaggaaagaagggacactgtttggtaaagggcataaccatgtacaacaaagctgtgtggtcgcctgagccctgcactacctgcctctgctcagatggaagagttctttgtgatgaaaccatgtgccatccccagaggtgcccccaaacagttatacctgaaggggaatgctgcccggtctgctccgctactgtctcctattctctactcagtggtatagcattaaatgatagaaatgaattttctggtgattcttcagaacaaagagaacctaccaatttacttcataagcaactgccacctcctcaggtgggaatggaccgaatagtaagaaaagaagcacttcaatctgaggaggatgaagaagtgaaagaagaagatacagagcaaaagagagagacccctgaatctagaaatcaggggcaactttacagtgagggggacagcagaggaggagacagaaagcagaggcctggagaggagaggaggctggcacaccagcaacaacgccaaggaagggaggaggaggaggatgaggaggaggagggtgaggagggtgaggaggatgaggaggacgaggaggacccggtaagaggagatatgttccgaatgccctctcgatccccgcttcctgctcctcccagaggcacactgcgcctgccaagcgggtgctctctgtcctacaggaccatcagctgcatcaacgccatgcttacccagataccaccgctgacagcaccacagataacaagtctggagctcactggcaattccatcgcctccatcccagatgaagcatttaatggattaccaaatttggaaaggcttgatctgagtaaaaataatatcacttcttcaggcataggtccaaaagcattcaagcttctgaagaagttaatgcgtttgaatatggatggaaataatttgatacagattccttcacaattgccatctacattagaagaacttaaagtcaatgagaacaatcttcaggctatcgatgaagaaagtttatcagacttaaatcagttggtcaccttagaattggaaggaaacaatctcagtgaagccaatgtcaatcctttagctttcaaacctttgaagagcctagcctacttgcgtctgggaaaaaataaatttagaattataccgcagggtcttcctggttctattgaggaattatacctagaaaataaccaaattgaagaaataactgaaatttgtttcaatcataccagaaagatcaatgtcattgtactacgttataacaaaattgaagaaaataggattgctcctttagcctggataaatcaagaaaatctagaatccattgatctctcctacaacaagctctatcacgtcccgtcctatctacccaagtccttgctgcacctagtactccttgggaaccagattgaacggatccctggctatgtgtttggccacatggaaccaggcctggaatacttgtacctgtcatttaacaaacttgctgatgatggcatggaccgtgtctccttctatggggcatatcattctctgagagaattatttctggatcacaatgacttaaaatctataccacctgggatacaagaaatgaaagcactacattttctgaggctgaacaacaacaagatacggaacattcttccagaagaaatttgcaatgctgaagaggatgatgactcaaatctggaacatcttcatcttgaaaacaattatattaaaattagagaaataccatcttacacattttcatgcataagatcatactcaagtatcgttcttaaaccacaaaacatcaagtaattccaagttttcctttgctgtttataaactttactcatgtatttgtagtagctgcatttgtcattaataagagagacataatcctcctgttatactcagtatcattatatgctagtcaacctgattcactaacacacagatgaacaaccaaaatatacctaaaaggtatagtctctaggagttttattaatagtaaaggtaaaatctctcagtttcctacctctagaaagaggccatctcactagaataggatattatgcatactgagctagaccagaagagtctggaacaaaataaacacagcctttataatcaacttgaatactggtgttagctgagaactctgtaagtccctttaaaaattatgtatcttttggttcaagattaagaagcataatgacaacaaaaaaagcaggcagaatttatgaataagtgttgtttattattaaaacaataatttgttaatttcttataaggtcctgtgctataattactggtataaatataactgaatattggggtagctttcatttcttccattaattacatgtgtaaaattaaaacactactgtaatgttaatttcctggttttgaaaatcatattatggttatgtacattgttaacattaaggaaagctggcagaagggtgtgcataaattctatactctttttgaaacttttctataattctaaaattattttttaaagttaaacagtatattaagattaccttcactattcctcactcaagattaagacattttttgaaaagcagtagagtttgcttaaaatacaaattaattattcttgactataaccttgtaaaggtaaatctaatgtataaatttttgaaaaattttgcaccactggtcatagcatctatctcctttgccttaatttactgaaatacatcattttattcggttcaattgaaataaagctatgtctttactatgtattggccctaccaaaatcatatattaaaattttctaacataatgatt

SEQ ID NO: 37881 - DNA, 407 bp, Homo sapiens
gacacgagcgttccaaggcaggagcagaactccatgttggccattataaagacaagattccttttcccccgctttttatagcctctctgggtaagatgtgtctggaaggaggtgtgggccaggaaagagcatatgtctgatgcctgggattccaggacagaaagtacagccgactccaagctcttgggatgggattggagggtctcaaaaccttgccagctttggagtcagagagaaaagagtcccaaccccagatttatcatttgctaacaaatgtgaccttgggcaaatcagctcacctctctggccctcaacagagataatcctgggacctatttcacagtcatggagaggattaaatgggaagaggaataaaaggagtttggagaagtgcccaggacatagta

SEQ ID NO: 37882 - DNA, 539 bp, Homo sapiens
  misc_feature (19)..(19): n is a, c, g, or t
  misc_feature (444)..(444): n is a, c, g, or t
  misc_feature (465)..(465): n is a, c, g, or t
  misc_feature (477)..(477): n is a, c, g, or t
  misc_feature (514)..(514): n is a, c, g, or t
ttttttttttaagagggangggggctgtcctcactatgttgcccacattggacttgaactcttgaggtcaagcaatcctcctgtctccccagaagctgggactacaggagcttcaaatgactcttgattgtattatatttccaatacatgctgcagtgcaaataaataaataaaaaaaattagctgaaactgaagtttctagaatacttagttggacctcccctttttacaggccaatcatggagctaaatggttactttgttacacagattgagggagtaaatctctgtgttaatgaatacactatcttatcggcttcaagaagagtaacctcaagcacaaaaagaaaagaattaagtctaactgaaggtaccatgattagcaaaaacactttggtttcaggaattgcaaagacagactggccattacaggaagtaaatggcntggaccaaaattgggtttttnaaaaaaaacccnttgggttttttttaaaccaaggggaaaaaaaaagggnttttaaagggggggaaaaaaaaagt

SEQ ID NO: 37883 - DNA, 330 bp, Homo sapiens
  misc_feature (12)..(12): n is a, c, g, or t
tcccccggtaanaggctgcgtgcttgtattaatgctgacaatgttaaactgtttacagaaagtaggaagctgtgggatgttcctcccactgtcacacacactgtcctgtcctacgtaacaagtgttgccttatttctcaataagtgaatataaattaaacaaaaaaaaatagttggaaatgactcctagccattttgtcagttttcatccatatctccaattgtatcatccagccaacccctgactcccatctctttattcatctgagttaccaaattatctagctattgtcacataagaaggttttctaaagacagggtaactcaaaag

SEQ ID NO: 37884 - DNA, 3169 bp, Homo sapiens
cgcccgggcaggtagcggccgctgaattctagaacgcccaccatgccccggcagctcagcgcggcggccgcgctcttcgcgtccctggccgtaattttgcacgatggcagtcaaatgagagcaaaagcatttccagaaaccagagattattctcaacctactgcagcagcaacagtacaggacataaaaaaacctgtccagcaaccagctaagcaagcacctcaccaaactttagcagcaagattcatggatggtcatatcacctttcaaacagcggccacagtaaaaattccaacaactaccccagcaactacaaaaaacactgcaaccaccagcccaattacctacaccctggtcacaacccaggccacacccaacaactcacacacagctcctccagttactgaagttacagtcggccctagcttagccccttattcactgccacccaccatcaccccaccagctcatacaactggaaccagttcatcaaccgtcagccacacaactgggaacaccactcaacccagtaaccagaccacccttccagcaactttatcgatagcactgcacaaaagcacaaccggtcagaagcctgttcaacccacccatgccccaggaacaacggcagctgcccacaataccacccgcacagctgcacctgcctccacggttcctgggcccacccttgcacctcagccatcgtcagtcaagactggaatttatcaggttctaaacggaagcagactctgtataaaagcagagatggggatacagctgattgttcaagacaaggagtcggttttttcacctcggagatacttcaacatcgaccccaacgcaacgcaagcctctgggaactgtggcacccgaaaatccaaccttctgttgaattttcagggcggatttgtgaatctcacatttaccaaggatgaagaatcatattatatcagtgaagtgggagcctatttgaccgtctcagatccagagacagtttaccaaggaatcaaacatgcggtggtgatgttccagacagcagtcgggcattccttcaagtgcgtgagtgaacagagcctccagttgtcagcccacctgcaggtgaaaacaaccgatgtccaacttcaagcctttgattttgaagatgaccactttggaaatgtggatgagtgctcgtctgactacacaattgtgcttcctgtgattggggccatcgtggttggtctctgccttatgggtatgggtgtctataaaatccgcctaaggtgtcaatcatctggataccagagaatctaattgttgcccggggggaatgaaaataatggaatttagagaactctttcatcccttccaggatggatgttgggaaattccctcagagtgtgggtccttcaaacaatgtaaaccaccatcttctattcaaatgaagtgagtcatgtgtgatttaagttcaggcagcacatcaatttctaaatactttttgtttattttatgaaagatatagtgagctgtttattttctagtttcctttagaatattttagccactcaaagtcaacatttgagatatgttgaattaacataatatatgtaaagtagaataagccttcaaattataaaccaagggtcaattgtaactaatactactgtgtgtgcattgaagattttattttacccttgatcttaacaaagcctttgctttgttatcaaatggactttcagtgcttttactatctgtgttttatggtttcatgtaacatacatattcctggtgtagcacttaactccttttccactttaaatttgtttttgttttttgagacggagtttcactcttgtcacccaggctggagtacagtggcacgatctcggcttatggcaacctccgcctcccgggttcaagtgattctcctgcttcagcttcccgagtagctgggattacaggcacacactaccacgcctggctaatttttgtatttttattatagacggggtttcaccatgttggccagactggtcttgaactcttgacctcaggtgatccacccacctcagcctcccaaagtgctgggattacaggcatgagccattgcgcccggccttaaatgttttttttaatcatcaaaaagaacaacatatctcaggttgtctaagtgtttttatgtaaaaccaacaaaaagaacaaatcagcttatattttttatcttgatgactcctgctccagaatcgctagactaagaattaggtggctacagatggtagaactaaacaataagcaagagacaataataatggcccttaattattaacaaagtgccagagtctaggctaagcactttatctatatctcatttcattctcacaacttataggtgaatgagtaaactgagacttaagggaactgaatcacttaaatgtcacctggctaactgatggcagagccagagcttgaattcatgttggtctgacatcaaggtctttggtcttctccctacaccaagttacctacaagaacaatgacaccacactctgcctgaaggctcacacctcataccagcatacgctcaccttacagggaaatgggtttatccaggatcatgagacattagggtagatgaaaggagagctttgcagataacaaaatagcctatccttaataaatcctccactctctggaaggagactgaggggctttgtaaaacattagtcagttgctcatttttatgggattgcttagctgggctgtaaagatgaaggcatcaaataaactcaaagtatttttaaatttttttgataatagagaaacttcgctaaccaactgttctttcttgagtgtatagccccatcttgtggtaacttgctgcttctgcacttcatatccatatttcctattgttcactttattctgtagagcagcctgccaagaattttatttctgctgttttttttgctgctaaagaaaggaactaagtcaggatgttaacagaaaagtccacataaccctagaattcttagtcaaggaataattcaagtcagcctagagaccatgttgactttcctcatgtgtttccttatgactcagtaagttggcaaggtcctgactttagtcttaataaaacattgaattgtagtaaaggtttttgtaataaaaacttactttggaaatatgtgca

SEQ ID NO: 37885 - DNA, 3360 bp, Homo sapiens
agcggaggcccgggccccggcggctgcgccgagtccccgcccctcccggctccgtaggggtaggagggggccggcggagtttccctccccgcccagcggccctgggcgggcttttcggctgcttctcataagcaggtggtttcgtttctccggcacaggtaggtttctctggcaccgattcggggcctgcccggacttcgccgcacgctgcagaacctcgcccagcgcccaccatgccccggcagctcagcgcggcggccgcgctcttcgcgtccctggccgtaattttgcacgatggcagtcaaatgagagcaaaagcatttccagaaaccagagattattctcaacctactgcagcagcaacagtacaggacataaaaaaacctgtccagcaaccagctaagcaagcacctcaccaaactttagcagcaagattcatggatggtcatatcacctttcaaacagcggccacagtaaaaattccaacaactaccccagcaactacaaaaaacactgcaaccaccagcccaattacctacaccctggtcacaacccaggccacacccaacaactcacacacagctcctccagttactgaagttacagtcggccctagcttagccccttattcactgccacccaccatcaccccaccagctcatacaactggaaccagttcatcaaccgtcagccacacaactgggaacaccactcaacccagtaaccagaccacccttccagcaactttatcgatagcactgcacaaaagcacaaccggtcagaagcctgttcaacccacccatgccccaggaacaacggcagctgcccacaataccacccgcacagctgcacctgcctccacggttcctgggcccacccttgcacctcagccatcgtcagtcaagactggaatttatcaggttctaaacggaagcagactctgtataaaagcagagatggggatacagctgattgttcaagacaaggagtcggttttttcacctcggagatacttcaacatcgaccccaacgcaacgcaagcctctgggaactgtggcacccgaaaatccaaccttctgttgaattttcagggcggatttgtgaatctcacatttaccaaggatgaagaatcatattatatcagtgaagtgggagcctatttgaccgtctcagatccagagacagtttaccaaggaatcaaacatgcggtggtgatgttccagacagcagtcgggcattccttcaagtgcgtgagtgaacagagcctccagttgtcagcccacctgcaggtgaaaacaaccgatgtccaacttcaagcctttgattttgaagatgaccactttggaaatgtggatgagtgctcgtctgactacacaattgtgcttcctgtgattggggccatcgtggttggtctctgccttatgggtatgggtgtctataaaatccgcctaaggtgtcaatcatctggataccagagaatctaattgttgcccggggggaatgaaaataatggaatttagagaactctttcatcccttccaggatggatgttgggaaattccctcagagtgtgggtccttcaaacaatgtaaaccaccatcttctattcaaatgaagtgagtcatgtgtgatttaagttcaggcagcacatcaatttctaaatactttttgtttattttatgaaagatatagtgagctgtttattttctagtttcctttagaatattttagccactcaaagtcaacatttgagatatgttgaattaacataatatatgtaaagtagaataagccttcaaattataaaccaagggtcaattgtaactaatactactgtgtgtgcattgaagattttattttacccttgatcttaacaaagcctttgctttgttatcaaatggactttcagtgcttttactatctgtgttttatggtttcatgtaacatacatattcctggtgtagcacttaactccttttccactttaaatttgtttttgttttttgagacggagtttcactcttgtcacccaggctggagtacagtggcacgatctcggcttatggcaacctccgcctcccgggttcaagtgattctcctgcttcagcttcccgagtagctgggattacaggcacacactaccacgcctggctaatttttgtatttttattatagacggggtttcaccatgttggccagactggtcttgaactcttgacctcaggtgatccacccacctcagcctcccaaagtgctgggattacaggcatgagccattgcgcccggccttaaatgttttttttaatcatcaaaaagaacaacatatctcaggttgtctaagtgtttttatgtaaaaccaacaaaaagaacaaatcagcttatattttttatcttgatgactcctgctccagaatcgctagactaagaattaggtggctacagatggtagaactaaacaataagcaagagacaataataatggcccttaattattaacaaagtgccagagtctaggctaagcactttatctatatctcatttcattctcacaacttataggtgaatgagtaaactgagacttaagggaactgaatcacttaaatgtcacctggctaactgatggcagagccagagcttgaattcatgttggtctgacatcaaggtctttggtcttctccctacaccaagttacctacaagaacaatgacaccacactctgcctgaaggctcacacctcataccagcatacgctcaccttacagggaaatgggtttatccaggatcatgagacattagggtagatgaaaggagagctttgcagataacaaaatagcctatccttaataaatcctccactctctggaaggagactgaggggctttgtaaaacattagtcagttgctcatttttatgggattgcttagctgggctgtaaagatgaaggcatcaaataaactcaaagtatttttaaatttttttgataatagagaaacttcgctaaccaactgttctttcttgagtgtatagccccatcttgtggtaacttgctgcttctgcacttcatatccatatttcctattgttcactttattctgtagagcagcctgccaagaattttatttctgctgttttttttgctgctaaagaaaggaactaagtcaggatgttaacagaaaagtccacataaccctagaattcttagtcaaggaataattcaagtcagcctagagaccatgttgactttcctcatgtgtttccttatgactcagtaagttggcaaggtcctgactttagtcttaataaaacattgaattgtagtaaaggtttttgtaataaaaacttactttggaaatatgtgca

SEQ ID NO: 37886 - DNA, 3425 bp, Homo sapiens
cggggagtcggcagcgcgagctcccagccagacctagcgcctctgggctgtgctcctgttgcttcccgcaaaccgcggtcctggcgaggcctgggcgtggagcgcggctgccgcagactccctgggaagacatggagtcagggtgcttaggggtttttaggctcctgctcgcctagtggctggctttctcccggctgagaagcgtctctgggttcccagaaaggtaggtttctctggcaccgattcggggcctgcccggacttcgccgcacgctgcagaacctcgcccagcgcccaccatgccccggcagctcagcgcggcggccgcgctcttcgcgtccctggccgtaattttgcacgatggcagtcaaatgagagcaaaagcatttccagaaaccagagattattctcaacctactgcagcagcaacagtacaggacataaaaaaacctgtccagcaaccagctaagcaagcacctcaccaaactttagcagcaagattcatggatggtcatatcacctttcaaacagcggccacagtaaaaattccaacaactaccccagcaactacaaaaaacactgcaaccaccagcccaattacctacaccctggtcacaacccaggccacacccaacaactcacacacagctcctccagttactgaagttacagtcggccctagcttagccccttattcactgccacccaccatcaccccaccagctcatacaactggaaccagttcatcaaccgtcagccacacaactgggaacaccactcaacccagtaaccagaccacccttccagcaactttatcgatagcactgcacaaaagcacaaccggtcagaagcctgttcaacccacccatgccccaggaacaacggcagctgcccacaataccacccgcacagctgcacctgcctccacggttcctgggcccacccttgcacctcagccatcgtcagtcaagactggaatttatcaggttctaaacggaagcagactctgtataaaagcagagatggggatacagctgattgttcaagacaaggagtcggttttttcacctcggagatacttcaacatcgaccccaacgcaacgcaagcctctgggaactgtggcacccgaaaatccaaccttctgttgaattttcagggcggatttgtgaatctcacatttaccaaggatgaagaatcatattatatcagtgaagtgggagcctatttgaccgtctcagatccagagacagtttaccaaggaatcaaacatgcggtggtgatgttccagacagcagtcgggcattccttcaagtgcgtgagtgaacagagcctccagttgtcagcccacctgcaggtgaaaacaaccgatgtccaacttcaagcctttgattttgaagatgaccactttggaaatgtggatgagtgctcgtctgactacacaattgtgcttcctgtgattggggccatcgtggttggtctctgccttatgggtatgggtgtctataaaatccgcctaaggtgtcaatcatctggataccagagaatctaattgttgcccggggggaatgaaaataatggaatttagagaactctttcatcccttccaggatggatgttgggaaattccctcagagtgtgggtccttcaaacaatgtaaaccaccatcttctattcaaatgaagtgagtcatgtgtgatttaagttcaggcagcacatcaatttctaaatactttttgtttattttatgaaagatatagtgagctgtttattttctagtttcctttagaatattttagccactcaaagtcaacatttgagatatgttgaattaacataatatatgtaaagtagaataagccttcaaattataaaccaagggtcaattgtaactaatactactgtgtgtgcattgaagattttattttacccttgatcttaacaaagcctttgctttgttatcaaatggactttcagtgcttttactatctgtgttttatggtttcatgtaacatacatattcctggtgtagcacttaactccttttccactttaaatttgtttttgttttttgagacggagtttcactcttgtcacccaggctggagtacagtggcacgatctcggcttatggcaacctccgcctcccgggttcaagtgattctcctgcttcagcttcccgagtagctgggattacaggcacacactaccacgcctggctaatttttgtatttttattatagacggggtttcaccatgttggccagactggtcttgaactcttgacctcaggtgatccacccacctcagcctcccaaagtgctgggattacaggcatgagccattgcgcccggccttaaatgttttttttaatcatcaaaaagaacaacatatctcaggttgtctaagtgtttttatgtaaaaccaacaaaaagaacaaatcagcttatattttttatcttgatgactcctgctccagaatcgctagactaagaattaggtggctacagatggtagaactaaacaataagcaagagacaataataatggcccttaattattaacaaagtgccagagtctaggctaagcactttatctatatctcatttcattctcacaacttataggtgaatgagtaaactgagacttaagggaactgaatcacttaaatgtcacctggctaactgatggcagagccagagcttgaattcatgttggtctgacatcaaggtctttggtcttctccctacaccaagttacctacaagaacaatgacaccacactctgcctgaaggctcacacctcataccagcatacgctcaccttacagggaaatgggtttatccaggatcatgagacattagggtagatgaaaggagagctttgcagataacaaaatagcctatccttaataaatcctccactctctggaaggagactgaggggctttgtaaaacattagtcagttgctcatttttatgggattgcttagctgggctgtaaagatgaaggcatcaaataaactcaaagtatttttaaatttttttgataatagagaaacttcgctaaccaactgttctttcttgagtgtatagccccatcttgtggtaacttgctgcttctgcacttcatatccatatttcctattgttcactttattctgtagagcagcctgccaagaattttatttctgctgttttttttgctgctaaagaaaggaactaagtcaggatgttaacagaaaagtccacataaccctagaattcttagtcaaggaataattcaagtcagcctagagaccatgttgactttcctcatgtgtttccttatgactcagtaagttggcaaggtcctgactttagtcttaataaaacattgaattgtagtaaaggtttttgtaataaaaacttactttggaaatatgtgca

SEQ ID NO: 37887 - DNA, 3466 bp, Homo sapiens
agcggaggcccgggccccggcggctgcgccgagtccccgcccctcccggctccgtaggggtaggagggggccggcggagtttccctccccgcccagcggccctgggcgggcttttcggctgcttctcataagcaggtggtttcgtttctccggcacaggtaggtttctctggcaccgattcggggcctgcccggacttcgccgcacgctgcagaacctcgcccagcgcccaccatgccccggcagctcagcgcggcggccgcgctcttcgcgtccctggccgtacagggctcatcagcacatggtaattaacaatgatggacatggcttcctggcactctctgcatgccaggcactgttcgcagtgctttaatccacaaaacagcttttaattttgcacgatggcagtcaaatgagagcaaaagcatttccagaaaccagagattattctcaacctactgcagcagcaacagtacaggacataaaaaaacctgtccagcaaccagctaagcaagcacctcaccaaactttagcagcaagattcatggatggtcatatcacctttcaaacagcggccacagtaaaaattccaacaactaccccagcaactacaaaaaacactgcaaccaccagcccaattacctacaccctggtcacaacccaggccacacccaacaactcacacacagctcctccagttactgaagttacagtcggccctagcttagccccttattcactgccacccaccatcaccccaccagctcatacaactggaaccagttcatcaaccgtcagccacacaactgggaacaccactcaacccagtaaccagaccacccttccagcaactttatcgatagcactgcacaaaagcacaaccggtcagaagcctgttcaacccacccatgccccaggaacaacggcagctgcccacaataccacccgcacagctgcacctgcctccacggttcctgggcccacccttgcacctcagccatcgtcagtcaagactggaatttatcaggttctaaacggaagcagactctgtataaaagcagagatggggatacagctgattgttcaagacaaggagtcggttttttcacctcggagatacttcaacatcgaccccaacgcaacgcaagcctctgggaactgtggcacccgaaaatccaaccttctgttgaattttcagggcggatttgtgaatctcacatttaccaaggatgaagaatcatattatatcagtgaagtgggagcctatttgaccgtctcagatccagagacagtttaccaaggaatcaaacatgcggtggtgatgttccagacagcagtcgggcattccttcaagtgcgtgagtgaacagagcctccagttgtcagcccacctgcaggtgaaaacaaccgatgtccaacttcaagcctttgattttgaagatgaccactttggaaatgtggatgagtgctcgtctgactacacaattgtgcttcctgtgattggggccatcgtggttggtctctgccttatgggtatgggtgtctataaaatccgcctaaggtgtcaatcatctggataccagagaatctaattgttgcccggggggaatgaaaataatggaatttagagaactctttcatcccttccaggatggatgttgggaaattccctcagagtgtgggtccttcaaacaatgtaaaccaccatcttctattcaaatgaagtgagtcatgtgtgatttaagttcaggcagcacatcaatttctaaatactttttgtttattttatgaaagatatagtgagctgtttattttctagtttcctttagaatattttagccactcaaagtcaacatttgagatatgttgaattaacataatatatgtaaagtagaataagccttcaaattataaaccaagggtcaattgtaactaatactactgtgtgtgcattgaagattttattttacccttgatcttaacaaagcctttgctttgttatcaaatggactttcagtgcttttactatctgtgttttatggtttcatgtaacatacatattcctggtgtagcacttaactccttttccactttaaatttgtttttgttttttgagacggagtttcactcttgtcacccaggctggagtacagtggcacgatctcggcttatggcaacctccgcctcccgggttcaagtgattctcctgcttcagcttcccgagtagctgggattacaggcacacactaccacgcctggctaatttttgtatttttattatagacggggtttcaccatgttggccagactggtcttgaactcttgacctcaggtgatccacccacctcagcctcccaaagtgctgggattacaggcatgagccattgcgcccggccttaaatgttttttttaatcatcaaaaagaacaacatatctcaggttgtctaagtgtttttatgtaaaaccaacaaaaagaacaaatcagcttatattttttatcttgatgactcctgctccagaatcgctagactaagaattaggtggctacagatggtagaactaaacaataagcaagagacaataataatggcccttaattattaacaaagtgccagagtctaggctaagcactttatctatatctcatttcattctcacaacttataggtgaatgagtaaactgagacttaagggaactgaatcacttaaatgtcacctggctaactgatggcagagccagagcttgaattcatgttggtctgacatcaaggtctttggtcttctccctacaccaagttacctacaagaacaatgacaccacactctgcctgaaggctcacacctcataccagcatacgctcaccttacagggaaatgggtttatccaggatcatgagacattagggtagatgaaaggagagctttgcagataacaaaatagcctatccttaataaatcctccactctctggaaggagactgaggggctttgtaaaacattagtcagttgctcatttttatgggattgcttagctgggctgtaaagatgaaggcatcaaataaactcaaagtatttttaaatttttttgataatagagaaacttcgctaaccaactgttctttcttgagtgtatagccccatcttgtggtaacttgctgcttctgcacttcatatccatatttcctattgttcactttattctgtagagcagcctgccaagaattttatttctgctgttttttttgctgctaaagaaaggaactaagtcaggatgttaacagaaaagtccacataaccctagaattcttagtcaaggaataattcaagtcagcctagagaccatgttgactttcctcatgtgtttccttatgactcagtaagttggcaaggtcctgactttagtcttaataaaacattgaattgtagtaaaggtttttgtaataaaaacttactttggaaatatgtgca

SEQ ID NO: 37888 - DNA, 3354 bp, Homo sapiens
cggggagtcggcagcgcgagctcccagccagacctagcgcctctgggctgtgctcctgttgcttcccgcaaaccgcggtcctggcgaggcctgggcgtggagcgcggctgccgcagactccctgggaagacatggagtcagggtgcttaggggtttttaggctcctgctcgcctagtggctggctttctcccggctgagaagcgtctctgggttcccagaaaggtaggtttctctggcaccgattcggggcctgcccggacttcgccgcacgctgcagaacctcgcccagcgcccaccatgccccggcagctcagcgcggcggccgcgctcttcgcgtccctggccgtaattttgcacgatggcagtcaaatgagagcaaaagcatttccagaaaccagagattattctcaacctactgcagcagcaacagtacaggacataaaaaaacctgtccagcaaccagctaagcaagcacctcaccaaactttagcagcaagattcatggatggtcatatcacctttcaaacagcggccacagtaaaaattccaacaactaccccagcaactacaaaaaacactgcaaccaccagcccaattacctacaccctggtcacaacccaggccacacccaacaactcacacacagctcctccagttactgaagttacagtcggccctagcttagccccttattcactgccacccaccatcaccccaccagctcatacaactggaaccagttcatcaaccgtcagccacacaactgggaacaccactcaacccagtaaccagaccacccttccagcaactttatcgatagcactgcacaaaagcacaaccggtcagaagcctgttcaacccacccaccacccttgcacctcagccatcgtcagtcaagactggaatttatcaggttctaaacggaagcagactctgtataaaagcagagatggggatacagctgattgttcaagacaaggagtcggttttttcacctcggagatacttcaacatcgaccccaacgcaacgcaagcctctgggaactgtggcacccgaaaatccaaccttctgttgaattttcagggcggatttgtgaatctcacatttaccaaggatgaagaatcatattatatcagtgaagtgggagcctatttgaccgtctcagatccagagacagtttaccaaggaatcaaacatgcggtggtgatgttccagacagcagtcgggcattccttcaagtgcgtgagtgaacagagcctccagttgtcagcccacctgcaggtgaaaacaaccgatgtccaacttcaagcctttgattttgaagatgaccactttggaaatgtggatgagtgctcgtctgactacacaattgtgcttcctgtgattggggccatcgtggttggtctctgccttatgggtatgggtgtctataaaatccgcctaaggtgtcaatcatctggataccagagaatctaattgttgcccggggggaatgaaaataatggaatttagagaactctttcatcccttccaggatggatgttgggaaattccctcagagtgtgggtccttcaaacaatgtaaaccaccatcttctattcaaatgaagtgagtcatgtgtgatttaagttcaggcagcacatcaatttctaaatactttttgtttattttatgaaagatatagtgagctgtttattttctagtttcctttagaatattttagccactcaaagtcaacatttgagatatgttgaattaacataatatatgtaaagtagaataagccttcaaattataaaccaagggtcaattgtaactaatactactgtgtgtgcattgaagattttattttacccttgatcttaacaaagcctttgctttgttatcaaatggactttcagtgcttttactatctgtgttttatggtttcatgtaacatacatattcctggtgtagcacttaactccttttccactttaaatttgtttttgttttttgagacggagtttcactcttgtcacccaggctggagtacagtggcacgatctcggcttatggcaacctccgcctcccgggttcaagtgattctcctgcttcagcttcccgagtagctgggattacaggcacacactaccacgcctggctaatttttgtatttttattatagacggggtttcaccatgttggccagactggtcttgaactcttgacctcaggtgatccacccacctcagcctcccaaagtgctgggattacaggcatgagccattgcgcccggccttaaatgttttttttaatcatcaaaaagaacaacatatctcaggttgtctaagtgtttttatgtaaaaccaacaaaaagaacaaatcagcttatattttttatcttgatgactcctgctccagaatcgctagactaagaattaggtggctacagatggtagaactaaacaataagcaagagacaataataatggcccttaattattaacaaagtgccagagtctaggctaagcactttatctatatctcatttcattctcacaacttataggtgaatgagtaaactgagacttaagggaactgaatcacttaaatgtcacctggctaactgatggcagagccagagcttgaattcatgttggtctgacatcaaggtctttggtcttctccctacaccaagttacctacaagaacaatgacaccacactctgcctgaaggctcacacctcataccagcatacgctcaccttacagggaaatgggtttatccaggatcatgagacattagggtagatgaaaggagagctttgcagataacaaaatagcctatccttaataaatcctccactctctggaaggagactgaggggctttgtaaaacattagtcagttgctcatttttatgggattgcttagctgggctgtaaagatgaaggcatcaaataaactcaaagtatttttaaatttttttgataatagagaaacttcgctaaccaactgttctttcttgagtgtatagccccatcttgtggtaacttgctgcttctgcacttcatatccatatttcctattgttcactttattctgtagagcagcctgccaagaattttatttctgctgttttttttgctgctaaagaaaggaactaagtcaggatgttaacagaaaagtccacataaccctagaattcttagtcaaggaataattcaagtcagcctagagaccatgttgactttcctcatgtgtttccttatgactcagtaagttggcaaggtcctgactttagtcttaataaaacattgaattgtagtaaaggtttttgtaataaaaacttactttggaaatatgtgca

SEQ ID NO: 37889 - DNA, 2437 bp, Homo sapiens
agcggaggcccgggccccggcggctgcgccgagtccccgcccctcccggctccgtaggggtaggagggggccggcggagtttccctccccgcccagcggccctgggcgggcttttcggctgcttctcataagcaggtggtttcgtttctccggcacaggtaggtttctctggcaccgattcggggcctgcccggacttcgccgcacgctgcagaacctcgcccagcgcccaccatgccccggcagctcagcgcggcggccgcgctcttcgcgtccctggccgtaattttgcacgatggcagtcaaatgagagcaaaagcatttccagaaaccagagattattctcaacctactgcagcagcaacagtacaggacataaaaaaacctgtccagcaaccagctaagcaagcacctcaccaaactttagcagcaagattcatggatggtcatatcacctttcaaacagcggccacagtaaaaattccaacaactaccccagcaactacaaaaaacactgcaaccaccagcccaattacctacaccctggtcacaacccaggccacacccaacaactcacacacagctcctccagttactgaagttacagtcggccctagcttagccccttattcactgccacccaccatcaccccaccagctcatacaactggaaccagttcatcaaccgtcagccacacaactgggaacaccactcaacccagtaaccagaccacccttccagcaactttatcgatagcactgcacaaaagcacaaccggtcagaagcctgttcaacccacccatgccccaggaacaacggcagctgcccacaataccacccgcacagctgcacctgcctccacggttcctgggcccacccttgcacctcagccatcgtcagtcaagactggaatttatcaggttctaaacggaagcagactctgtataaaagcagagatggggatacagctgattgttcaagacaaggagtcggttttttcacctcggagatacttcaacatcgaccccaacgcaacgcaagcctctgggaactgtggcacccgaaaatccaaccttctgttgaattttcagggcggatttgtgaatctcacatttaccaaggatgaagaatcatattatatcagtgaagtgggagcctatttgaccgtctcagatccagagacagtttaccaaggaatcaaacatgcggtggtgatgttccagacagcagtcgggcattccttcaagtgcgtgagtgaacagagcctccagttgtcagcccacctgcaggtgaaaacaaccgatgtccaacttcaagcctttgattttgaagatgaccactttggaaatgtggatgagtgctcgtctgactacacaattgtgcttcctgtgattggggccatcgtggttggtctctgccttatgggtatgggtgtctataaaatccgcctaaggtgtcaatcatctggataccagagaatctaattgttgcccggggggaatgaaaataatggaatttagagaactctttcatcccttccaggatggatgttgggaaattccctcagagtgtgggtccttcaaacaatgtaaaccaccatcttctattcaaatgaagtgagtcatgtgtgatttaagttcaggcagcacatcaatttctaaatactttttgtttattttatgaaagatatagtgagctgtttattttctagtttcctttagaatattttagccactcaaagtcaacatttgagatatgttgaattaacataatatatgtaaagtagaataagccttcaaattataaaccaagggtcaattgtaactaatactactgtgtgtgcattgaagattttattttacccttgatcttaacaaagcctttgctttgttatcaaatggagtttatccaggatcatgagacattagggtagatgaaaggagagctttgcagataacaaaatagcctatccttaataaatcctccactctctggaaggagactgaggggctttatgaaggcatcaaataaactcaaagtatttttaaatttttttgataatagagaaacttcgctaaccaactgttctttcttgagtgtatagccccatcttgtggtaacttgctgcttctgcacttcatatccatatttcctattgttcactttattctgtagagcagcctgccaagaattttatttctgctgttttttttgctgctaaagaaaggaactaagtcaggatgttaacagaaaagtccacataaccctagaattcttagtcaaggaataattcaagtcagcctagagaccatgttgactttcctcatgtgtttccttatgactcagtaagttggcaaggtcctgactttagtcttaataaaacattgaattgtagtaaaggtttttgtaataaaaacttactttggaaatatgtgca

SEQ ID NO: 37890 - DNA, 2874 bp, Homo sapiens
agcggaggcccgggccccggcggctgcgccgagtccccgcccctcccggctccgtaggggtaggagggggccggcggagtttccctccccgcccagcggccctgggcgggcttttcggctgcttctcataagcaggtggtttcgtttctccggcacaggtaggtttctctggcaccgattcggggcctgcccggacttcgccgcacgctgcagaacctcgcccagcgcccaccatgccccggcagctcagcgcggcggccgcgctcttcgcgtccctggccgtaattttgcacgatggcagtcaaatgagagcaaaagcatttccagaaaccagagattattctcaacctactgcagcagcaacagtacaggacataaaaaaacctgtccagcaaccagctaagcaagcacctcaccaaactttagcagcaagattcatggatggtcatatcacctttcaaacagcggccacagtaaaaattccaacaactaccccagcaactacaaaaaacactgcaaccaccagcccaattacctacaccctggtcacaacccaggccacacccaacaactcacacacagctcctccagttactgaagttacagtcggccctagcttagccccttattcactgccacccaccatcaccccaccagctcatacaactggaaccagttcatcaaccgtcagccacacaactgggaacaccactcaacccagtaaccagaccacccttccagcaactttatcgatagcactgcacaaaagcacaaccggtcagaagcctgttcaacccacccatgccccaggaacaacggcagctgcccacaataccacccgcacagctgcacctgcctccacggttcctgggcccacccttgcacctcagccatcgtcagtcaagactggaatttatcaggttctaaacggaagcagactctgtataaaagcagagatggggatacagctgattgttcaagacaaggagtcggttttttcacctcggagatacttcaacatcgaccccaacgcaacgcaagcctctgggaactgtggcacccgaaaatccaaccttctgttgaattttcagggcggatttgtgaatctcacatttaccaaggatgaagaatcatattatatcagtgaagtgggagcctatttgaccgtctcagatccagagacagtttaccaaggaatcaaacatgcggtggtgatgttccagacagcagtcgggcattccttcaagtgcgtgagtgaacagagcctccagttgtcagcccacctgcaggtgaaaacaaccgatgtccaacttcaagcctttgattttgaagatgaccactttggaaatgtggatgagtgctcgtctgactacacaattgtgcttcctgtgattggggccatcgtggttggtctctgccttatgggtatgggtgtctataaaatccgcctaaggtgtcaatcatctggataccagagaatctaattgttgcccggggggaatgaaaataatggaatttagagaactctttcatcccttccaggatggatgttgggaaattccctcagagtgtgggtccttcaaacaatgtaaaccaccatcttctattcaaatgaagtgagtcatgtgtgatttaagttcaggcagcacatcaatttctaaatactttttgtttattttatgaaagatatagtgagctgtttattttctagtttcctttagaatattttagccactcaaagtcaacatttgagatatgttgaattaacataatatatgtaaagtagaataagccttcaaattataaaccaagggtcaattgtaactaatactactgtgtgtgcattgaagattttattttacccttgatcttaacaaagcctttgctttgttatcaaatggactttcagtgcttttactatctgtgttttatggtttcatgtaacatacatattcctggtgtagcacttaactccttttccactttaaatttgtttttgttttttgagacggagtttcactcttgtcacccaggctggagtacagtggcacgatctcggcttatggcaacctccgcctcccgggttcaagtgattctcctgcttcagcttcccgagtagctgggattacaggcacacactaccacgcctggctaatttttgtatttttattatagacggggtttcaccatgttggccagactggtcttgaactcttgacctcaggtgatccacccacctcagcctcccaaagtgctgggattacaggcatgagccattgcgcccggccttaaatgttttttttaatcatcaaaaagaacaacatatctcaggttgtctaagtgtttttatgtaaaaccaacaaaaagaacaaatcagcttatattttttatcttgatgactcctgctccagaatcgttattaacaaagtgccagagtctaggctaagcactttatctatatctcatttcattctcacaacttataggtgaatgagtaaactgagacttaagggaactgaatcacttaaatgtcacctggctaactgatggcagagccagagcttgaattcatgttggtctgacatcaaggtctttggtcttctccctacaccaagttacctacaagaattttatttctgctgttttttttgctgctaaagaaaggaactaagtcaggatgttaacagaaaagtccacataaccctagaattcttagtcaaggaataattcaagtcagcctagagaccatgttgactttcctcatgtgtttccttatgactcagtaagttggcaaggtcctgactttagtcttaataaaacattgaattgtagtaaaggtttttgtaataaaaacttactttggaaatatgtgca

SEQ ID NO: 37891 - DNA, 786 bp, Homo sapiens
gtgtctcccttataccccaaacagagcagctgaaaaagtctccaaaccgcaccagggtgttttttcatggggagaaggtggcagaacccccagaaagcccctcggaaggaaggaaggccatttagctgtgcacaggcagcccggccacagctggagctcagcggttacatctcaggactcttatgcatctatctgtcaccttttcagagacagtttaccaaggaatcaaacatgcggtggtgatgttccagacagcagtcgggcattccttcaagtgcgtgagtgaacagagcctccagttgtcagcccacctgcaggtgaaaacaaccgatgtccaacttcaagcctttgattttgaagatgaccactttggaaatggtaagttaagggtcgatcaggttgcaaacatacactttagagaccccagggtagatccaaagtgttttctgtctgcagctgtcgaaggagcttttttctcatgagcttcctgggatggtgtgattccacatagctcacagggccaggctcctctggccacctcagaatcaggcacctgcacccacccagtcacgggtgtcccgcagcggggtgcactctcttcgactcacgcacattcttactcatttaaacactcacgcgctcaatcaaaaaacagaaataccacctggggctttcctttatggcctgggggggggaaattcagatatggttggagaacactttaaagaccctgagtattagtaatgggctgaataaagaattgagaataggttgtttcccccctgg

SEQ ID NO: 37892 - DNA, 499 bp, Homo sapiens
gtgatctgtatgaatcacagcagatcatgggggaggaggattggcatgcagtgctgttgaaaattgggcttgttgttagatcagaacaacctccatgtatatggttagaacgaatcaattaatggaatcctagtatttctgcaagtttggtgatttttaaaaactggaatagaagcattaattcagtgcttagttctagtattagaaaacccctttgatgtaatgccttgtattaaccctttgagcattgtaagatatacaatgggggacaaaagcctttcagatcatttatttagacttagaccggtaaagtatactctatatccaaatgtctaattatgctgtttttttaaaggggggggtaggaagagaaagtgtttccacgccgaacacttgcattttatatacaactcttaatttttcttcaagagggcttgatatatttattcccaaatattcactgccatctaagtaagtgtactgtttacagaaaaaaaaa

SEQ ID NO: 37893 - DNA, 416 bp, Homo sapiens
accctacctactcccctccttcataattcacagatatctcctctaataaatctctttcagacttaatgccatcttgccatctgttttgtagagaacctagattaacatggataactttttaaaaacaacctacagtttttcagaaaatgtcatacaatgcttgttatttttttagtgtaatcatagtttaaacacttttatatcgcttgagggatttctgggaatttgtatgttgatcttttatgtacaaggctcatgccatggagtgttgtacataatgagtgtttggttagattgaattatgtctactaggtcccagttgctgagatctacaatgtgtcaaaatatatatattacctattattaaacttgtaagagcaagcataaagccacattctgctagtaaataacaaatg

SEQ ID NO: 37894 - DNA, 377 bp, Homo sapiens
ttttttttttgagacagagtctcgctctgtttcccaggctggagtgcagtggcacgattatctcactgcaacctccgcctcccgggttcaaaggattcttgtgcctcagcctctcaagtagctgggactacaggtgcatgccaccatgcctggctaattcttttgtatttttagtagagatggggtttcaccattttggccaggctggtctcaaactcctgacctcgtgatccacccgcctcggcctcccaaagtgctgggtttacaggcgtgagccaccatggccagccaaaagccccttttcttaaacaaaaaatgaatatgatctttaaaagctgcttctttttaagcttatatcaaactttctattccatctg

SEQ ID NO: 37895 - DNA, 361 bp, Homo sapiens
tcagactgtcctacccaatggcctctcctcaatcctgtccttccatcttccttttaaatgttggcttttatccaggttccaatcttgccctcttggcttcttgcttcctatgtacttccttgtggatttcatccatcaaagtcattgattctaattagggctggaatcaaatgagagagagagaaatactggagatattttgaacagcagctactattgttttgaaactcagttttatggtctatgagggattaatgcttaggtgagttaacatggttgaaagatagggaaatccctatgtttactatttatttatttattagagacaagtctcaatctgtctcccaggctggagtgcagt

SEQ ID NO: 37896 - DNA, 298 bp, Homo sapiens
ggtcgacggctgtgaaatgttgtgcacctgttggtgaactgaagctgttgctactgttccctgatttcacaggccacacagctctgtggacaggagcgttctaggaaggacaggcagagcatcccagcctgccccagaagaacacaggccagatgcctcaggatattcctttgggcccagcagctactcccaaaccgtgatgtgctcactgttgccctggggatggctatatttccatatggtcattaacatcataagtcataagttccctgagtcaggtgctctgtcccattagtct

SEQ ID NO: 37897 - DNA, 346 bp, Homo sapiens
tggcagcttccgcttgtggatctatgcccgtctagctcagatgttcatgcctggtgagcattatctggggtatttctgagccagcctacagttggatcttctgctcagctcttaaaatctctgattaaaccagagaatcaaatgtagtttacatcgcttctttgagcggccactcttagcaccctcccctttctaccactgttgaagatacttcctctagcaattaaacacctgaaaaagatgatgtgtgtcttcagctagtgctcgctctctctctctctctctctctctctctctctctctctctctctctccctctctttgttgtatgctggaaattgcagtc

SEQ ID NO: 37898 - DNA, 342 bp, Homo sapiens
ctgccctccccacagccttccgcagctactttgagatcttcaatggtcctggtgaggtggatgcacagagcctgaagaatatcctgctcctaatgggcttctctgtgacgctggcccaggtggaggacgccctgatgagtgctgatgtcaatggagatggtcgtgtggacttcaaagacttcttggctgtgatgacagacaccaggcgcttcttctgctctgtggaacagaacgccctgtcggacatggctccccacaacccccacactctactctttgagatcctgtccctgctggtagagatgctggccttaccagaggcagtcttagaggaaatcacaa

SEQ ID NO: 37899 - DNA, 659 bp, Homo sapiens
ggtaagacctggctggcaactgttgtgatatgtttatattcacatatggttaatgtgtagtatgtgctttgttatggaaatcataatgaagtaataatgtccaccttaataagataataaaattcagataatatgattaaatattgagtttatgtgaacacaaagtttgagggtagccactggggaaacacatcctgaagagtggggtcactgctcccactcttaactggagaagttaagtcttcacttctgtagggcaaaatgaagatgcttaatagggttacattttccatacaaagccaatgcatatatttcaatgatttcattggttgccgcttgccaaattgcagcttaccaaatttcaaggatgattgctttaactttttgtaaggaggggtagtggtatcaaaaggatcctacctctggcacttctcagtgttttctaatgacttatagcccaagaacaaggaagagagttaatctttttgacatgcacacggaaggagcaattacatggtagcgtaaacacatttctcaatatgtttattgagtgaaagggttagatactttccctgatgaggggtgataggtaagtgccttataatttccttccagcctataataaaccgagtttgagagattttgccggattcttcaaa

SEQ ID NO: 37900 - DNA, 859 bp, Homo sapiens
ttttttttttgagacggagtcttgctctgtcgcccaggctggagtgcagtggtgcgatctcggctcactacaagctccgcctcccgggttcacgccattctcctgcctcagcctccagagtagctgggactacaggcgcccgccaccacgcctggctaatttttttgtatttttagtagagacggggtttcactgtgttagctaggacggtctcgatctcctgacctcatgatccgcctgcttaggcctcccaaagtgctgggattacaggtgtgagccaccgcgcccagccccaaccaggtccagtcttaggaatagttgttaacatcacttttgatatcagcatttactagatctacaagttagactcagtatgtccctgcttttcaaataactataaacaacaaccctaagggaagaatgccttggatgagtgtaattatttgagcgtaagcaaaatgactttatttaaaacagtaagagcctggtgacagtaactccataatagaaaagaaacgtgaaccgcagcaccccgagcgtgaccgaaaacaagtgtaacaactcgcatcgcctgacctgagcgtggggacccagagaaaagcactgtcttccctcccactgggttgcttcccagactttccttgaagcacccagggtgttctgttcttgaaaaaaagatggggttggcacttccttcgctaccctggtacagagttcacagagatgctaatctgatccaccctggaacatttcctccctcaataaaattctctctccaaagacaaagcaaacagtgatgcagactgcaagaaaaccaagatgccacccatggtcaagggcagggacaagagaatgtgcg

SEQ ID NO: 37901 - DNA, 735 bp, Homo sapiens
ttggtcataaaagctcgcctgcggatcacgccttctccttgtgtatttttagtagagacggggtttcactgtgttagctaggacggtctcgatctcctgacctcatgatccgcctgcttaggcctcccaaagtgctgggattacaggtgtgagccaccgcgcccagccccaaccaggtccagtcttaggaatagttgttaacatcacttttgatatcagcatttactagatctacaagttagactcagtatgtccctgcttttcaaataactataaacaacaaccctaagggaagaatgccttggatgagtgtaattatttgagcgtaagcaaaatgactttatttaaaacagtaagagcctggtgacagtaactccataatagaaaagaaacgtgaaccgcagcaccccgagcgtgaccgaaaacaagtgtaacaactcgcatcgcctgacctgagcgtggggacccagagaaaagcactgtcttccctcccactgggttgcttcccagactttccttgaagcacccagggtgttctgttcttgaaaaaaagatggggttggcacttccttcgctaccctggtacagagttcacagagatgctaatctgatccaccctggaacatttcctccctcaataaaattctctctccaaagacaaagcaaacagtgatgcagactgcaagaaaaccaagatgccacccatggtcaagggcagggacaagagaatgtgcg

SEQ ID NO: 37902 - DNA, 271 bp, Homo sapiens
aatttcagggtctatgctcaaagttcctcagcttttctagccagatttacatattactttagttttgttttatttttaatggacatgtaattgtacatatttgtgaagtacaatgtaatgtttcaatacatgtatacattgtttagaaatcaaatcgggggccgagcccggtggctcactcctgtaatcccagcattttgggaggccaaggcaggcagatcaggaggtcaagagattgagaccatcctggccaacatggtgaaaccccgtc

SEQ ID NO: 37903 - DNA, 977 bp, Homo sapiens
gccccagcaactacagtgctttacaggaagtgttcgatgcaaatttgtatattttagaccggaaactgctccttttttttttttttttcgcatttttgaactgggtgtctcctcctgtgtctggatccagaaagtgaaaaaaattcaattcaaaatagcaacaagtttttatagctttattgtgtgaattgtgatggcgcctggaagtttcatccttcctctagattttcccactcagataccaagagaccaaagtccattctgtgttctgacttctgttcttctactgtgccctcaccctcttcttaactagcctttcttacatgcaagacagaaagatacagtatgtggtttataaatgcatattctgaacttttatttctttaatcccatagtatcttatttctatctgattccttttattgttttccaaatcttctcttgagaatattttgtttgctatccatttgaagatgagattctcagaagggtgaatgcttcattagagggtaggtgagcttgcaaggtgaattctactttgaagaagtcatcagtgtctgaacttgagctatttagtctcaaattttgtcaacatagagaatgaagccattcagggatgaacttaactttgtccaggctcataatgtataaaagtggtatataaatccagaatgctgatatattagctatatgatctcagcaagtgaccatggttaatataaatgttatttcttcaaagtctaatcctttgaaaatttactctgtatagacttgcattgcaactccatttcaactagaatgtttactcagaatattctgttctttaaactattttagataacacattttaaaaccatatatagataatatagttctaccaagtgacagtctttcatcaattgcttatgttcttttgaaatgtactttatgagattttttaaaagatcttaaatatgaataaaaatataggacaatga

SEQ ID NO: 37904 - DNA, 434 bp, Homo sapiens
gtgatgtgggaggctccacggcctccctcggtatcttggaagatggggatgatggtgatatccacatcgcggggctcttaggaagatgaagctacgtcatgcagcaggtctcaagaaggccaatctcctctctttccctgccctgtagtcccatctctctcctgcccagagttgagtcacctgggccagtgtaccctgaggccctggccagccttgcctcttcccctcaagggtctcagactggtgccaacagtcacattgtcacaccaaagccaggagtgcggagagaggatgtggacagggtctagatacctgaagctggggacacatggcctgcacgtctctactaaaaaattaaaaattagctgagtgcggtggtacatacctgtggtcctagctactcaggaggctgagacaggaagatcatttggagc

SEQ ID NO: 37905 - DNA, 547 bp, Homo sapiens
gatgtggtctcactatgttgcccaggctggtctcaaactcctggcctcaagtcatcctgtggcctcggcctgccagagttttgggattacaggcatgagccaccgagcctggccaggaaagttatttctaacagcacaagactgtttgataactgccaataggtactgaggtacaaagttgggggaagtggagagaaatgaccactagaaggttgtttttaaaataggaataaaaatgatgatttcctggccgggcacagtggctcacgcctgtaatcccagcactttgggaggctgaggcaggtggatcacctggggtcaggagttcaagaccagcctggccaacatggtgaaaccctgtctctacaaaaaaaaaaaaaaaagttggctggggtggtggcgggcacctataatcccagctactcgggaggctgaagcaggagaatggcttgaacctggaaggcagaggttgcagtgagctatgatggcaccactgcacttcagcctgggtgacagagcaagactccaactcaaaaaaaaaaaaaaa

SEQ ID NO: 37906 - DNA, 197 bp, Homo sapiens
ctctggggggccggcacagactgcggacacgggctagggccctgcaccctgcccccgcctgcttctgccatgcgtccctgtgtgtctgcatgtggcggtgtcctggtgtgcgggctcctctgtgagcaccagagcgactccatccactgtctgtgtcatctgtgtctgtgcaaatgtaattacttgtgcatcagagc

SEQ ID NO: 37907 - DNA, 253 bp, Homo sapiens
ggagagcctgcaggcaaccagctctgggggctgctgggcctgaggaaagcatcccaagtcaaggggctgctggacccaatggggcactgcaagtctggaccagggaaggatccacattttagctttgaggttggaaggacacttgtgttgggaagaaaagctacttaaatgctcagttgagcagttctgaattattcctccactctgttccttcttgaggttgagccctgccttctggttatttgagatcaag

SEQ ID NO: 37908 - DNA, 725 bp, Homo sapiens
agggaatttggccctcgaggcaaggagattcgggcacgagactgggtataacaatggaaaccattaaaaaggaaataggcaaataaccgaagggaaaattactgtggaatttcaaatgttgtgaaggaaggagataaaaagtggaatatacagttttattattttgaggattcaagggaaaattccccaccctacctctctacttgtccttttcttcatttttaaaaaatcacttgatttttaatttttttttaaacagggtcttgctctgttatccagattggagtgtagtggcatgatcacagctcactgcaacctcaacttatcttgcctcagcctcccaagtacctgggacagtaggtgtgtaccactgggcatggctaagatttatataaataaaatatccttccacctccgtctccctagtcattttttaatattgtgttgcgagttgtgtaaatggtgccaggatacaatttctaatccccttactcactaaatcatctccttcctgattttcgtaaagtccacactgagcaaaccctgatgcaaaagctagtgagggccatataagaaccacataaagaacctacatttgtgatgaattttgtcatgaaggaggtgacttgtgtctggattgtgatcatgtaatcatgcctccttgtattaatcctgcaaccaatataccatgtgagcttagatagtgaggctcttactttatttga

SEQ ID NO: 37909 - DNA, 348 bp, Homo sapiens
aattatttcacaatgtatgcatcatgttatacaccttaaatataaataatttttatttgtcatttatatctcaataaggttgggaaggaaagaaactattagatccctaaaaactttgttctttactataagcattttggaataacttttttttgcagatcttactatatcaattcaataagtaaagaagaatgttgtttaatctactgggtataacaatggaaaccattaaaaaggaaataggcaaataaccgaagggaaaattactgtggaatttcaaatgttgtgaaggaaggagataaaaagtggaatatacagttttattattttgaggattcaagggaaaat

SEQ ID NO: 37910 - DNA, 1250 bp, Homo sapiens
  misc_feature (1)..(3): n is a, c, g, or t
nnnggtgtccctgctccgctcctctcagtgagtgaaagtggccgccgccgccgccggcccagcgcccgcagccgcctcagcgccgccgccatcttggggtcccaggagccgcggagggagcgagctaggagcgtccacgcccaacgcagtcaccgtcccacggcctcagagagcgaaccgcggctccaccgtcggcggggcgacccccccctccggaccccgcccgcaccccgccccccctccgccgccgtcgcggcggcggggccaggcggcccgagccgtgcagtcggaggtccttgtgcatgaagacagatttgttctatggcctcggagttgggtgccagggatgatggaggctgcactgagctggcaaagcccctctatcttcagtacttggagagggccctccggttggaccattttctgcgacaaacgtcagctatcttcaataggaatatttctagtgatgacagtgaagatggactggatgacagtaatccattattgccccagtctggggatcccttaatacaagttaaggaagaacctccaaattcattgcttggtgaaacttctggagcaggcagttctggaatgttaaacacatattctctgaatggagttctacagtcagaatcaaaatgtgataaggggaatttatataatttctctaagctgaagaaaagcagaaagtggctaaagagcattctgctaagtgatgaatccagcgaggctgattctcagagtgaagacgatgatgaagaagaactcaatctcagcagagaagaacttcacaacatgcttcgactacacaaatataagaaacttcaccaaaataagtatagtaaagacaaggagttgcagcaatatcagtactacagtgcaggcctgctctccacatatgaccctttctatgagcaacaacggcacctacttggacccaagaaaaagaaatttaaggaggaaaagaaacttaaagctaagttgaaaaaagtgaagaaaaaaagacgaagagatgaagaactttcctctgaagaatcccctcgtcgccatcaccaccagaccaaagtctttgccaagttttctcacgatgcacctccccctggcactaagaaaaagcacttatccattgagcagctgaatgctcgtcgcaggaaagtatggctcagcattgtgaaaaaggaactaccaaaggcaataagcagaaagcttcacgctcgtaacctgttctcaccatacccgcgcacgtc

SEQ ID NO: 37911 - DNA, 510 bp, Homo sapiens
cccatgttttattgcattttagtttgtattccctaagtttaattagtattcttaatgtttttcagttgaatttataaagcatgtcataaggggaactggagtgactatctttctgctgtttttgtcattgttttggatctaggaaaaaatgcttggattataaatgggattgcttcacagcaaaagatacatttctattttcacccttttcagagcattctgctaagtgatgaatccagcgaggctgattctcagagtgaagacgatgatgaagaagaactcaatctcagcagagaagaacttcacaacatgcttcgactacacaaatataagaaacttcaccaaaataagtatagtaaagacaaggaggtaagagtttcaggagaaacacttcaaactgaatattcaccctctgctttatagtcattaaagatacatcattttggctgggcgtggtggctcacacctataatcccagcactttgggaggacgaggcgggcggatcatga

SEQ ID NO: 37912 - DNA, 472 bp, Homo sapiens
gtgcagtttacctacagatacagaaaaggtcaataaacaagaacagaactgttaaccacaattgcaataagagggaggaagtggaatggaaggagtagggggcttctgctgtatctacatatatatctgaaggacataagagcaaattttttaaattttaaaaaggtagatggtgggtgtagaaacttccaggccgggtgcagtagctcacgcctgtagtcccagcactttgggagggctgggctggaggatcgcttgagcccaggaatttgagaccagcctaggcaacatagcgaccccatctctataaaatatagaacgattagctgggcacagtggtgtgtgcctgtggtcccagtggcatgtgcccatggtcccagctatttgggaggctgactcagaaggatcacttgggcccgggaagtcgagatggcagtgagctgtgattgtgccacttggcagactgggcaac

SEQ ID NO: 37913 - DNA, 141 bp, Homo sapiens
attaacatcagagacgagaacaaagaatcaggaattttatagaaattcatgcgggacacattttaagaacatcctacacctattcacatgtcttagtcttctcaggctactgtaacaaaatcccatagacttggtggttta

SEQ ID NO: 37914 - DNA, 361 bp, Homo sapiens
ataatgactgaataaaaccataaaaactgaaatcttaagaacaggggaaaaagatgattcctgactgcaagccacatggatgcagaggacccatttttttaaaaaaagtttgtttctctattcaagccttcttaagtttgatcattcttatgatcttctctttgcctcaaataaaaccaccattattgtgccttttatgactcttgattcctgttggcagtggtaggaataggaactataactactgtttcttcttagtttattttaaccttttcattaccctgagtcacagtcaaactatgacttagaaatagaaggttacaaatagaagggttttataaaaagacccaccaaaaaaaaa

SEQ ID NO: 37915 - DNA, 281 bp, Homo sapiens
gaggcgtgagcttagctgctgtgaccagaaggaccaaaaacattgttcatccaaaagataagatgaaggccaaaaaagaccatcatcatattgaacacacacacacacacacacacaggcgcgcgcgcgcgcgcaatccaaaatcattatattctggtctaataagaaatgttcagttctgtaacggacttaagatttgggatagagaaaggcaactaaaagttatcagtgcaacctcactgaaggtcaactaaagtaattagggctcttctgtttaaaaa

SEQ ID NO: 37916 - DNA, 331 bp, Homo sapiens
ttgtgacttgctttgaccaaaggaatggagcagaagtcatattcttctgagccaggcctcaagatgccttgcagcttctacctttagcccttagcctcttggaatgtgttactgcccttgaagcagctcagctagcttgctggaggatgagaccgcatgaagcaggaggaagctgtcccagctgggtcccctaggccaaccagctctaaggggagtcaagagatgactgcaaagagatgactgcagctccttgggcaaccctggggccaaccactgtcagaagaaccacacagccaaaaccagcccaaattcctggcccacaggtttgtga

SEQ ID NO: 37917 - DNA, 492 bp, Homo sapiens
gtacttagtgagatgaataggaaaaagtatgtctactcaatttttccagaagtctttgctgtcaacctttactaaattagtaggtttccttttattcctggttttctaaaagtttattttttaaacataaatggttttttacatttaaaaaatagtttatcagaattgactcatttcattgtattttccttcttaatctcctaatatagtgaattatattgagagatttttaaaatgtgaaacatctttgcattcctgggataaaccctatttgttcatcctatagttacacatttactgttggtgttatttagttaatattttacttgggttgttgtatttacttttataaagcatggacgtaaaacttgcctttcttgtatttccttgtttgtttttgtaataaaaatttctctaaacaataacctaggcagattttgttcttcattctgtttcctggaataataaatagaaatgtcttttcaaagggca

SEQ ID NO: 37918 - DNA, 478 bp, Homo sapiens
ccagtaatttcatatcttagaatctatcccaagcaaattgttagaagtatgaaccaagagctgactcattgctgagtaacttatcaatagcaaataaccaaatagaagatctgaaataaaccaaacagaagatctgaaaccacttaagtgtctctaggaagttgaataaaatgttacatccatatgatgaaacactgtacaatcataagttatgttttaaatgatgatattgggaaatattcaaaatctattatatggggaagtttacagtttactttgggggttgggttatggtgggattagatttgtggcttttttttctttaaaaacatttttatgtgggaaatacattagaaggacttctccaaatgttaagcagttatctctgggtaatgggttgatggataattttatcccttgtatacttcattgtaaaattattttacaacaatatatattccaaaataagaaaaaaaat

SEQ ID NO: 37919 - DNA, 786 bp, Homo sapiens
tgaatactttctgtgactcaaggtaatcagggcattccatatatttctaattttgaaatttgcataattgtgaaaattatttctccaactcttggacctatgagaatgttggaagggaaaactttcacgctgctgacctaaaatcataatgaaaacatgatctgaaggagataacatttcaaggcaagtgtagagagtgcgttaacattttttatgtcactgcagggtgttttctgggtcttgagccaatatgcacgtcttagtcctcatgaccaccaagttcaagctcctgtgcaatttgctgatcgtagatgactagttcctccgtaatgaggaggtgctgtgattctcaagcacggaggccagcacagatctggatctagggaggtgctgtggtccttaaaacacagagccaaaagccaaactgcagctgaaaagaattacagcatttcgctaatgtaatcagggatacgcagctgtgttcactgttctctagtcctttcatgttgctagaggggagaaaagatagtttttcctctacccatcataggttcatggccaaggccctgataacaaaaaaacagattaacaagcaaaaagcatacagttgggcacagcagcaggtgcctataatccctgttatagcaggtgcctataattccagttacttggaaggctgaggtgggaggatcccttgaggccagtagttggagactagcctgggcaacagtgaggcaccacctccccacactcacacacacacacactccagccccatttcttaaa

SEQ ID NO: 37920 - DNA, 290 bp, Homo sapiens
attgcagatctaccatatggctttgtgtttaataccattagcttcagctacctcagagcagtattatgtttcagccattctaatcactgtttggcccatagaaaaaaatttatgttgttttacaaattgatcgaactcccacagtaggaaaagacaaagatgatatgtaattctgatagtgcacaatatgtggcaatgataggataatattcaatatattagaaatatatttttttctgatcgaacattttcctctcctttcactaaaatataaacaaagtttaacaaag

SEQ ID NO: 37921 - DNA, 591 bp, Homo sapiens
aggacacgttcacaagctttcccttttcctaaggctgaactggagagaaggaataaacacacacacacacacacactcacagagacacacacaaaatagtgtgtctctctatatagtgcatatatatatatatatatatatacatatagtcacacaccgcttaacaatgtatcccttaacaacagggatacattctgggaaattcatcattagatttcatcgtcgtgtgaacaaacctgcatagtacagcctgctacacacctaggctagatggtacagcctattgctcctaggctacaaagctgtacaacatgttactgtactgaatactataggccattgtaacacaatggtattggtgtatctaaacatagaaaaattacagtaaaaatgttataaagattaaaaatggtccaccatgaatggagcttgcaggactggaagttgctctgggtgagtgagtgagtggagggagtatgaggcctaggacattactatacactactgtagactctaaaaaatgctgtacacttatgctacacattgattgaaaacttttctttcttcaataataaatttactctaacattt

SEQ ID NO: 37922 - DNA, 504 bp, Homo sapiens
cttgaaaatagacattctcttctttaaacaacataaactgaacaaactcagtctgttttggtgcctctgtgagtaccctcggttgctctgggctgctgtgcgatgctgaccgggacttcctcagaggcctcatcttctgcatccagtggactgcaagccactttacacttcctgggtgataaggtttggatttgtgtccccgcccaaatctcatgtggaatgtcattcctaatgttggaagaggggcctggtgggaggtgattggatcatgggggcagaattccctcttgcagttctcttggtagtgagttctcacaagatctggttgtttaaaagtatgtagcacctcctgctttcgctgtcttcctcctgctcccgccatgtaagacgtggcctcctttcccttcgccttccgccatgattgaaagtcttcagaggcctccccagccatgcttcatgtacagcctgtggaactgtgagccaattaaacctcttttcttcata

SEQ ID NO: 37923 - DNA, 334 bp, Homo sapiens
cagttcttacaggcaggcttcaaaattgaaaagccagaaacttaagcaaagaagaaaaatttaagttgaaagaactgttcatcaaattcaatgcaatacgaactctttgaggagttattttcaactgctgtgtttaaaaataccacttttcccacagttagtagttaggatttcatcataaaatactcccataaaaactatttaattttctagtacagggagggaggatttgatcccttgttaaacattttatgggaaagtctaaaagtgctttcaattatttatcgaattgaaatctaggccttggaaactgctggcatcacacacacacaca

SEQ ID NO: 37924 - DNA, 340 bp, Homo sapiens
tctcccctatgactgatctcagtccttgcctggccactcctgcctgtcctacaaacaccgaaaaccactgtccttttctcagccgtcatttagcagtcgggaagcgtgtgtcctgacgtatgggctgcagtcaaggcgggggccctgacaaacaggattcattcaccaggccctggcctgccagctccctcacgggcgtcacatggggccgaatgaaaagagcagggggtgcccgccagggaggcctatccaggggctttcttccccgcggcgccgttccctgggcctgccaagtcccacgagccagcacactggagaagcgttttcaaagcgaggcctt

SEQ ID NO: 37925 - DNA, 2118 bp, Homo sapiens
caagacttctctgcattttctgccaaaatctgtgtcagatttaagacacatgcttctgcaagcttccatgaaggttgtgcaaaaaagtttcaatccagagttgggttccagctttctgtagctgtaagcattggtggccacaccacctccttacaaagcaactagaacctgcggcatacattggagagatttttttaattttctggacatgaagtaaatttagagtgctttctaatttcaggtagaagacatgtccaccttctgattatttttggagaacattttgatttttttcatctctctctccccacccctaagattgtgcaaaaaaagcgtaccttgcctaattgaaataatttcattggattttgatcagaactgattatttggttttctgtgtgaagttttgaggtttcaaactttccttctggagaatgccttttgaaacaattttctctagctgcctgatgtcaactgcttagtaatcagtggatattgaaatattcaaaatgtacagagagtgggtagtggtgaatgttttcatgatgttgtacgtccagctggtgcagggctccagtaatgaacatggaccagtgaagcgatcatctcagtccacattggaacgatctgaacagcagatcagggctgcttctagtttggaggaactacttcgaattactcactctgaggactggaagctgtggagatgcaggctgaggctcaaaagttttaccagtatggactctcgctcagcatcccatcggtccactaggtttgcggcaactttctatgacattgaaacactaaaagttatagatgaagaatggcaaagaactcagtgcagccctagagaaacgtgcgtggaggtggccagtgagctggggaagagtaccaacacattcttcaagcccccttgtgtgaacgtgttccgatgtggtggctgttgcaatgaagagagccttatctgtatgaacaccagcacctcgtacatttccaaacagctctttgagatatcagtgcctttgacatcagtacctgaattagtgcctgttaaagttgccaatcatacaggttgtaagtgcttgccaacagccccccgccatccatactcaattatcagaagatccatccagatccctgaagaagatcgctgttcccattccaagaaactctgtcctattgacatgctatgggatagcaacaaatgtaaatgtgttttgcaggaggaaaatccacttgctggaacagaagaccactctcatctccaggaaccagctctctgtgggccacacatgatgtttgacgaagatcgttgcgagtgtgtctgtaaaacaccatgtcccaaagatctaatccagcaccccaaaaactgcagttgctttgagtgcaaagaaagtctggagacctgctgccagaagcacaagctatttcacccagacacctgcagctgtgaggacagatgcccctttcataccagaccatgtgcaagtggcaaaacagcatgtgcaaagcattgccgctttccaaaggagaaaagggctgcccaggggccccacagccgaaagaatccttgattcagcgttccaagttccccatccctgtcatttttaacagcatgctgctttgccaagttgctgtcactgtttttttcccaggtgttaaaaaaaaaatccattttacacagcaccacagtgaatccagaccaaccttccattcacaccagctaaggagtccctggttcattgatggatgtcttctagctgcagatgcctctgcgcaccaaggaatggagaggaggggacccatgtaatccttttgtttagttttgtttttgttttttggtgaatgagaaaggtgtgctggtcatggaatggcaggtgtcatatgactgattactcagagcagatgaggaaaactgtagtctctgagtcctttgctaatcgcaactcttgtgaattattctgattcttttttatgcagaatttgattcgtatgatcagtactgactttctgattactgtccagcttatagtcttccagtttaatgaactaccatctgatgtttcatatttaagtgtatttaaagaaaataaacaccattattcaagccatataatt

SEQ ID NO: 37926 - DNA, 980 bp, Homo sapiens
gaaggagatgggtgaatccaagttacttacggatgacataaaagatacaatcaacttggtgatccaatgccacactacaactatctgaccaacacgtttctgtttctctttagaccactctcatctccaggaaccagctctctgtgggccacacatgatgtttgacgaagatcgttgcgagtgtgtctgtaaaacaccatgtcccaaagatctaatccagcaccccaaaaactgcagttgctttgagtgcaaagaaagtctggagacctgctgccagaagcacaagctatttcacccagacacctgcagctgtgaggacagatgcccctttcataccagaccatgtgcaagtggcaaaacagcatgtgcaaagcattgccgctttccaaaggagaaaagggctgcccaggggccccacagccgaaagaatccttgattcagcgttccaagttccccatccctgtcatttttaacagcatgctgctttgccaagttgctgtcactgtttttttcccaggtgttaaaaaaaaaatccattttacacagcaccacagtgaatccagaccaaccttccattcacaccagctaaggagtccctggttcattgatggatgtcttctagctgcagatgcctctgcgcaccaaggaatggagaggaggggacccatgtaatccttttgtttagttttgtttttgttttttggtgaatgagaaaggtgtgctggtcatggaatggcaggtgtcatatgactgattactcagagcagatgaggaaaactgtagtctctgagtcctttgctaatcgcaactcttgtgaattattctgattcttttttatgcagaatttgattcgtatgatcagtactgactttctgattactgtccagcttatagtcttccagtttaatgaactaccatctgatgtttcatatttaagtgtatttaaagaaaataaacaccattattcaagccatataatt

SEQ ID NO: 37927 - DNA, 1024 bp, Homo sapiens
agctggtacggtcgggattttaggatgaagatccatccagatcctaaagaagatcgctgttcccattccaagaaactctgtcctattgacatgctatgggatagcaacaaatgtaaatgtgttttgcaggaggaaaatccacttgctggaacagaagaccactctcatctccaggaaccagctctctgtgggccacacatgatgtttgacgaagatcgttgcgagtgtgtctgtaaaacaccatgtcccaaagatctaatccagcaccccaaaaactgcagttgctttgagtgcaaagaaagtctggagacctgctgccagaagcacaagctatttcacccagacacctgcagctgtgaggacagatgcccctttcataccagaccatgtgcaagtggcaaaacagcatgtgcaaagcattgccgctttccaaaggagaaaagggctgcccaggggccccacagccgaaagaatccttgattcagcgttccaagttccccatccctgtcatttttaacagcatgctgctttgccaagttgctgtcactgtttttttcccaggtgttaaaaaaaaaatccattttacacagcaccacagtgaatccagaccaaccttccattcacaccagctaaggagtccctggttcattgatggatgtcttctagctgcagatgcctctgcgcaccaaggaatggagaggaggggacccatgtaatccttttgtttagttttgtttttgttttttggtgaatgagaaaggtgtgctggtcatggaatggcaggtgtcatatgactgattactcagagcagatgaggaaaactgtagtctctgagtcctttgctaatcgcaactcttgtgaattattctgattcttttttatgcagaatttgattcgtatgatcagtactgactttctgattactgtccagcttatagtcttccagtttaatgaactaccatctgatgtttcatatttaagtgtatttaaagaaaataaacaccattattcaagccatataatt

SEQ ID NO: 37928 - DNA, 2150 bp, Homo sapiens
  misc_feature (2120)..(2120): n is a, c, g, or t
caagacttctctgcattttctgccaaaatctgtgtcagatttaagacacatgcttctgcaagcttccatgaaggttgtgcaaaaaagtttcaatccagagttgggttccagctttctgtagctgtaagcattggtggccacaccacctccttacaaagcaactagaacctgcggcatacattggagagatttttttaattttctggacatgaagtaaatttagagtgctttctaatttcaggtagaagacatgtccaccttctgattatttttggagaacattttgatttttttcatctctctctccccacccctaagattgtgcaaaaaaagcgtaccttgcctaattgaaataatttcattggattttgatcagaactgattatttggttttctgtgtgaagttttgaggtttcaaactttccttctggagaatgccttttgaaacaattttctctagctgcctgatgtcaactgcttagtaatcagtggatattgaaatattcaaaatgtacagagagtgggtagtggtgaatgttttcatgatgttgtacgtccagctggtgcagggctccagtaatgaacatggaccagtgaagcgatcatctcagtccacattggaacgatctgaacagcagatcagggctgcttctagtttggaggaactacttcgaattactcactctgaggactggaagctgtggagatgcaggctgaggctcaaaagttttaccagtatggactctcgctcagcatcccatcggtccactaggtttgcggcaactttctatgacattgaaacactaaaagttatagatgaagaatggcaaagaactcagtgcagccctagagaaacgtgcgtggaggtggccagtgagctggggaagagtaccaacacattcttcaagcccccttgtgtgaacgtgttccgatgtggtggctgttgcaatgaagagagccttatctgtatgaacaccagcacctcgtacatttccaaacagctctttgagatatcagtgcctttgacatcagtacctgaattagtgcctgttaaagttgccaatcatacaggttgtaagtgcttgccaacagccccccgccatccatactcaattatcagaagatccatccagatccctgaagaagatcgctgttcccattccaagaaactctgtcctattgacatgctatgggatagcaacaaatgtaaatgtgttttgcaggaggaaaatccacttgctggaacagaagaccactctcatctccaggaaccagctctctgtgggccacacatgatgtttgacgaagatcgttgcgagtgtgtctgtaaaacaccatgtcccaaagatctaatccagcaccccaaaaactgcagttgctttgagtgcaaagaaagtctggagacctgctgccagaagcacaagctatttcacccagacacctgcagctgtgaggacagatgcccctttcataccagaccatgtgcaagtggcaaaacagcatgtgcaaagcattgccgctttccaaaggagaaaagggctgcccaggggccccacagccgaaagaatccttgattcagcgttccaagttccccatccctgtcatttttaacagcatgctgctttgccaagttgctgtcactgtttttttcccaggtgttaaaaaaaaaatccattttacacagcaccacagtgaatccagaccaaccttccattcacaccagctaaggagtccctggttcattgatggatgtcttctagctgcagatgcctctgcgcaccaaggaatggagaggaggggacccatgtaatccttttgtttagttttgtttttgttttttggtgaatgagaaaggtgtgctggtcatggaatggcaggtgtcatatgactgattactcagagcagatgaggaaaactgtagtctctgagtcctttgctaatcgcaactcttgtgaattattctgattcttttttatgcagaatttgattcgtatgatcagtactgactttctgattactgtccagcttatagtcttccagtttaatgaactaccatctgatgtttcatatttaagtgtatttaaagaaaataaacaccgatgcggccaccctttccctcntcccttcaccgcgcattcgtcccccccttc

SEQ ID NO: 37929 - DNA, 5118 bp, Homo sapiens
  misc_feature (2)..(2): n is a, c, g, or t
  misc_feature (4)..(7): n is a, c, g, or t
  misc_feature (10)..(12): n is a, c, g, or t
gnannnngcnnngaggacgagggggagggccagagctgcgcgtgctgctttgcccgagcccgagcccgagcccgagcccgagcccgagcccgagcccgagcccgaacgcaagcctgggagcgcggagcccggctagggactcctcctatttatggagcaggcacccaacatggctgagccccggggccccgtagaccatggagtccagattcgcttcatcacagagccagtgagtggtgcagagatgggcactctacgtcgaggtggacgacgcccagctaaggatgcaagagccagtacctacggggttgctgtgcgtgtgcagggaatcgctgggcagccctttgtggtgctcaacagtggggagaaaggcggtgactcctttggggtccaaatcaagggggccaatgaccaaggggcctcaggagctctgagctcagatttggaactccctgagaacccctactctcaggtcaagggatttcctgccccctcgcagagcagcacatctgatgaggagcctggggcctactggaatggaaagctactccgttcccactcccaggcctcactggcaggccctggcccagtggatcctagtaacagaagcaacagcatgctggagctagccccgaaagtggcttccccaggtagcaccattgacactgctcccctgtcttcagtggactcactcatcaacaagtttgacagtcaacttggaggccaggcccggggtcggactggccgccgaacacggatgctaccccctgaacagcgcaaacggagcaagagcctggacagccgcctcccacgggacacctttgaggaacgggagcgccagtccaccaaccactggacctctagcacaaaatatgacaaccatgtgggcacttcgaagcagccagcccagagccagaacctgagtcctctcagtggctttagccgttctcgtcagactcaggactgggtccttcagagttttgaggagccgcggaggagtgcacaggaccccaccatgctgcagttcaaatcaactccagacctccttcgagaccagcaggaggcagccccaccaggcagtgtggaccatatgaaggccaccatctatggcatcctgagggagggaagctcagaaagtgaaacctctgtgaggaggaaggttagtttggtgctggagaagatgcagcctctagtgatggtttcttctggttctactaaggccgtggcagggcagggtgagcttacccgaaaagtggaggagctacagcgaaagctggatgaagaggtgaagaagcggcagaagctagagccatcccaagttgggctggagcggcagctggaggagaaaacagaagagtgcagccgactgcaggagctgctggagaggaggaagggggaggcccagcagagcaacaaggagctccagaacatgaagcgcctcttggaccagggtgaagatttacgacatgggctggagacccaggtgatggagctgcagaacaagctgaaacatgtccagggtcctgagcctgctaaggaggtgttactgaaggacctgttagagacccgggaacttctggaagaggtcttggaggggaaacagcgagtagaggagcagctgaggctgcgggagcgggagttgacagccctgaagggggccctgaaagaggaggtagcctcccgtgaccaggaggtggaacatgtccggcagcagtaccagcgagacacagagcagctccgcaggagcatgcaagatgcaacccaggaccatgcagtgctggaggccgagaggcagaagatgtcagcccttgtgcgagggctgcagagggagctggaggagacttcagaggagacagggcattggcagagtatgttccagaagaacaaggaggatcttagagccaccaagcaggaactcctgcagctgcgaatggagaaggaggagatggaagaggagcttggagagaagatagaggtcttgcagagggaattagagcaggcccgagctagtgctggagatactcgccaggttgaggtgctcaagaaggagctgctccggacacaggaggagcttaaggaactgcaggcagaacggcagagccaggaggtggctgggcgacaccgggaccgggagttggagaagcagctggcggtcctgagggtcgaggctgatcgaggtcgggagctggaagaacagaacctccagctacaaaagaccctccagcaactgcgacaggactgtgaagaggcttccaaggctaagatggtggccgaggcagaggcaacagtgctggggcagcggcgggccgcagtggagacgacgcttcgggagacccaggaggaaaatgacgaattccgccggcgcatcctgggtttggagcagcagctgaaggagactcgaggtctggtggatggtggggaagcggtggaggcacgactacgggacaagctgcagcggctggaggcagagaaacagcagctggaggaggccctgaatgcgtcccaggaagaggaggggagtctggcagcagccaagcgggcactggaggcacgcctagaggaggctcagcgggggctggcccgcctggggcaggagcagcagacactgaaccgggccctggaggaggaagggaagcagcgggaggtgctccggcgaggcaaggctgagctggaggagcagaagcgtttgctggacaggactgtggaccgactgaacaaggagttggagaagatcggggaggactctaagcaagccctgcagcagctccaggcccagctggaggattataaggaaaaggcccggcgggaggtggcagatgcccagcgccaggccaaggattgggccagtgaggctgagaagacctctggaggactgagccgacttcaggatgagatccagaggctgcggcaggccctgcaggcatcccaggctgagcgggacacagcccggctggacaaagagctactggcccagcgactgcaggggctggagcaagaggcagagaacaagaagcgttcccaggacgacagggcccggcagctgaagggtctcgaggaaaaagtctcacggctggaaacagagttagatgaggagaagaacaccgtggagctgctaacagatcgggtgaatcgtggccgggaccaggtggatcagctgaggacagagctcatgcaggaaaggtctgctcggcaggacctggagtgtgacaaaatctccttggagagacagaacaaggacctgaagacccggttggccagctcagaaggcttccagaagcctagtgccagcctctctcagcttgagtcccagaatcagttgttgcaggagcggctacaggctgaagagagggagaagacagttctgcagtctaccaatcgaaaactggagcggaaagttaaagaactatccatccagattgaagacgagcggcagcatgtcaatgaccagaaagaccagctaagcctgagggtgaaggctttgaagcgtcaggtggatgaagcagaagaggaaattgagcgactggacggcctgaggaagaaggcccagcgtgaggtggaggagcagcatgaggtcaatgaacagctccaggcccggatcaagtctctggagaaggactcctggcgcaaagcttcccgctcagctgctgagtcagctctcaaaaacgaagggctgagctcagatgaggaattcgacagtgtctacgatccctcgtccattgcatcactgcttacggagagcaacctacagaccagctcctgttagctcgtggtcctcaaggactcagaaaccaggctcgaggcctatcccagcaagtgctgctctgctctgcccaccctgggttctgcattcctatgggtgacccaattattcagacctaagacagggaggggtcagagtgatggtgataaaaaaaaaaaaatcatcagcaataagctgatagatggactttccactgtaggagtggacgtttcaagccaactgagccttttcctcaagtgccgacacctccctcatctctcttatagtggaaggatggtcagcattaggctgatggggactgagaaggataggaagggatagaaattgccatgtgtataaagctttattctttagcccttaaccctaaggctcagggaaataccctatgttattgtgctccctggattcctgcaactcattttccttccactctggagcagggtgaggggaatgttatgggtaacagacatgcaggcatggctctacccatttctttgcacaagtatggggcccatgtggtagtccccatacccctccagttcctatatttttgtcttcttcctttcccctctttgccattcctaccttgcatttttcctgtcagtgccttagccaaggcaaggagataaggatgctcttcttgctttttatatctgcacattcatacctctccaaagaccagcttttccccagccagggccctcagccttccctgctgccccagtgattgattgagagagctgttggggtttctctgccaatgacccctgggagagggactttggtagggtcatgataaagtggcgggggtctggtcctgctcagggttttcatccttcctcctctccctcctctgtgactgtggatatggttataaggtggttgcacctgggagccctgacaactggctgcacaaattccaaaagtaaaggtgtcagtccctgtggccttccttggggcttctctgaccacatgtgcccaacttcaataagagaaccaagggaccctcattttctgaggtgcttggctctgattcagggctttgcaaggggttagaagctgactgtaaaaatgggaagaggcaacggaagacatttatttctcctttggattttggggagaaccaagccctggtagggaagaggtaagggggatgattcacctccatatttcctaagcaggttgtatagggagccggtggcaggaggaaggctgttttcacaaatgacttgtaatgtcgtgattaaaaaaattcctatattcttctgcaaatcaaacgttctttcccaatccaatccagccttggttttattttaaattaaatattaaaattacacatttatattgaaaaaaaaagt

SEQ ID NO: 37930 - DNA, 424 bp, Homo sapiens
tatgttgacttctgctctggtgtcatattacgggtgcatacagaacccacataccatgaaggccaccatctatgcatcctgagggagggaagctcagaaagtgaaacctctgtgaggaggaaggttagtttggtgctggagaagatgcagcctctagtgatggtttcttctggttctactaaggccgtggcagggcagggtgagcttacccgaaaagtggaggagctacagcgaaagctggatgaagaggtgaagaagcggcagaagctagagccatcccaagttgggctggagcggcagctggaggagaaaacagaagagtgcagccgactgcaggagctgctggagaggaggaagggggaggcccagcagagcaacaaggacgacgcagagcagaaggtcgacgcagggcagaaggtcgacg

SEQ ID NO: 37931 - DNA, 3413 bp, Homo sapiens
ttgatttgaagtgacctcttccctctgagccttctggtgtccaactctccccttctctaggaccatgcagtgctggaggccgagaggcagaagatgtcagcccttgtgcgagggctgcagagggagctggaggagacttcagaggagacagggcattggcagagtatgttccagaagaacaaggaggatcttagagccaccaagcaggaactcctgcagctgcgaatggagaaggaggagatggaagaggagcttggagagaagatagaggtcttgcagagggaattagagcaggcccgagctagtgctggagatactcgccaggttgaggtgctcaagaaggagctgctccggacacaggaggagcttaaggaactgcaggcagaacggcagagccaggaggtggctgggcgacaccgggaccgggagttggagaagcagctggcggtcctgagggtcgaggctgatcgaggtcgggagctggaagaacagaacctccagctacaaaagaccctccagcaactgcgacaggactgtgaagaggcttccaaggctaagatggtggccgaggcagaggcaacagtgctggggcagcggcgggccgcagtggagacgacgcttcgggagacccaggaggaaaatgacgaattccgccggcgcatcctgggtttggagcagcagctgaaggagactcgaggtctggtggatggtggggaagcggtggaggcacgactacgggacaagctgcagcggctggaggcagagaaacagcagctggaggaggccctgaatgcgtcccaggaagaggaggggagtctggcagcagccaagcgggcactggaggcacgcctagaggaggctcagcgggggctggcccgcctggggcaggagcagcagacactgaaccgggccctggaggaggaagggaagcagcgggaggtgctccggcgaggcaaggctgagctggaggagcagaagcgtttgctggacaggactgtggaccgactgaacaaggagttggagaagatcggggaggactctaagcaagccctgcagcagctccaggcccagctggaggattataaggaaaaggcccggcgggaggtggcagatgcccagcgccaggccaaggattgggccagtgaggctgagaagacctctggaggactgagccgacttcaggatgagatccagaggctgcggcaggccctgcaggcatcccaggctgagcgggacacagcccggctggacaaagagctactggcccagcgactgcaggggctggagcaagaggcagagaacaagaagcgttcccaggacgacagggcccggcagctgaagggtctcgaggaaaaagtctcacggctggaaacagagttagatgaggagaagaacaccgtggagctgctaacagatcgggtgaatcgtggccgggaccaggtggatcagctgaggacagagctcatgcaggaaaggtctgctcggcaggacctggagtgtgacaaaatctccttggagagacagaacaaggacctgaagacccggttggccagctcagaaggcttccagaagcctagtgccagcctctctcagcttgagtcccagaatcagttgttgcaggagcggctacaggctgaagagagggagaagacagttctgcagtctaccaatcgaaaactggagcggaaagttaaagaactatccatccagattgaagacgagcggcagcatgtcaatgaccagaaagaccagctaagcctgagggtgaaggctttgaagcgtcaggtggatgaagcagaagaggaaattgagcgactggacggcctgaggaagaaggcccagcgtgaggtggaggagcagcatgaggtcaatgaacagctccaggcccggatcaagtctctggagaaggactcctggcgcaaagcttcccgctcagctgctgagtcagctctcaaaaacgaagggctgagctcagatgaggaattcgacagtgtctacgatccctcgtccattgcatcactgcttacggagagcaacctacagaccagctcctgttagctcgtggtcctcaaggactcagaaaccaggctcgaggcctatcccagcaagtgctgctctgctctgcccaccctgggttctgcattcctatgggtgacccaattattcagacctaagacagggaggggtcagagtgatggtgataaaaaaaaaaaaatcatcagcaataagctgatagatggactttccactgtaggagtggacgtttcaagccaactgagccttttcctcaagtgccgacacctccctcatctctcttatagtggaaggatggtcagcattaggctgatggggactgagaaggataggaagggatagaaattgccatgtgtataaagctttattctttagcccttaaccctaaggctcagggaaataccctatgttattgtgctccctggattcctgcaactcattttccttccactctggagcagggtgaggggaatgttatgggtaacagacatgcaggcatggctctacccatttctttgcacaagtatggggcccatgtggtagtccccatacccctccagttcctatatttttgtcttcttcctttcccctctttgccattcctaccttgcatttttcctgtcagtgccttagccaaggcaaggagataaggatgctcttcttgctttttatatctgcacattcatacctctccaaagaccagcttttccccagccagggccctcagccttccctgctgccccagtgattgattgagagagctgttggggtttctctgccaatgacccctgggagagggactttggtagggtcatgataaagtggcgggggtctggtcctgctcagggttttcatccttcctcctctccctcctctgtgactgtggatatggttataaggtggttgcacctgggagccctgacaactggctgcacaaattccaaaagtaaaggtgtcagtccctgtggccttccttggggcttctctgaccacatgtgcccaacttcaataagagaaccaagggaccctcattttctgaggtgcttggctctgattcagggctttgcaaggggttagaagctgactgtaaaaatgggaagaggcaacggaagacatttatttctcctttggattttggggagaaccaagccctggtagggaagaggtaagggggatgattcacctccatatttcctaagcaggttgtatagggagccggtggcaggaggaaggctgttttcacaaatgacttgtaatgtcgtgattaaaaaaattcctatattcttctgcaaatcaaacgttctttcccaatccaatccagccttggttttattttaaattaaatattaaaattacacatttatattgaaaaaaaaagt

SEQ ID NO: 37932 - DNA, 5429 bp, Homo sapiens
  misc_feature (2)..(2): n is a, c, g, or t
  misc_feature (4)..(7): n is a, c, g, or t
  misc_feature (10)..(12): n is a, c, g, or t
gnannnngcnnngaggacgagggggagggccagagctgcgcgtgctgctttgcccgagcccgagcccgagcccgagcccgagcccgagcccgagcccgagcccgaacgcaagcctgggagcgcggagcccggctagggactcctcctatttatggagcaggcacccaacatggctgagccccggggccccgtagaccatggagtccagattcgcttcatcacagagccagtgagtggtgcagagatgggcactctacgtcgaggtggacgacgcccagctaaggatgcaagagccagtacctacggggttgctgtgcgtgtgcagggaatcgctgggcagccctttgtggtgctcaacagtggggagaaaggcggtgactcctttggggtccaaatcaagggggccaatgaccaaggggcctcaggagctctgagctcagatttggaactccctgagaacccctactctcaggtcaagggatttcctgccccctcgcagagcagcacatctgatgaggagcctggggcctactggaatggaaagctactccgttcccactcccaggcctcactggcaggccctggcccagtggatcctagtaacagaagcaacagcatgctggagctagccccgaaagtggcttccccaggtagcaccattgacactgctcccctgtcttcagtggactcactcatcaacaagtttgacagtcaacttggaggccaggcccggggtcggactggccgccgaacacggatgctaccccctgaacagcgcaaacggagcaagagcctggacagccgcctcccacgggacacctttgaggaacgggagcgccagtccaccaaccactggacctctagcacaaaatatgacaaccatgtgggcacttcgaagcagccagcccagagccagaacctgagtcctctcagtggctttagccgttctcgtcagactcaggactgggtccttcagagttttgaggagccgcggaggagtgcacaggaccccaccatgctgcagttcaaatcaactccagacctccttcgagaccagcaggaggcagccccaccaggcagtgtggaccatatgaaggccaccatctatggcatcctgagggagggaagctcagaaagtgaaacctctgtgaggaggaaggttagtttggtgctggagaagatgcagcctctagtgatggtttcttctggttctactaaggccgtggcagggcagggtgagcttacccgaaaagtggaggagctacagcgaaagctggatgaagaggtgaagaagcggcagaagctagagccatcccaagttgggctggagcggcagctggaggagaaaacagaagagtgcagccgactgcaggagctgctggagaggaggaagggggaggcccagcagagcaacaaggagctccagaacatgaagcgcctcttggaccagggtgaagatttacgacatgggctggagacccaggtgatggagctgcagaacaagctgaaacatgtccagggtcctgagcctgctaaggaggtgttactgaaggacctgttagagacccgggaacttctggaagaggtcttggaggggaaacagcgagtagaggagcagctgaggctgcgggagcgggagttgacagccctgaagggggccctgaaagaggaggtagcctcccgtgaccaggaggtggaacatgtccggcagcagtaccagcgagacacagagcagctccgcaggagcatgcaagatgcaacccaggaccatgcagtgctggaggccgagaggcagaagatgtcagcccttgtgcgagggctgcagagggagctggaggagacttcagaggagacagggcattggcagagtatgttccagaagaacaaggaggatcttagagccaccaagcaggaactcctgcagctgcgaatggagaaggaggagatggaagaggagcttggagagaagatagaggtcttgcagagggaattagagcaggcccgagctagtgctggagatactcgccaggttgaggtgctcaagaaggagctgctccggacacaggaggagcttaaggaactgcaggcagaacggcagagccaggaggtggctgggcgacaccgggaccgggagttggagaagcagctggcggtcctgagggtcgaggctgatcgaggtcgggagctggaagaacagaacctccagctacaaaagaccctccagcaactgcgacaggactgtgaagaggcttccaaggctaagatggtggccgaggcagaggcaacagtgctggggcagcggcgggccgcagtggagacgacgcttcgggagacccaggaggaaaatgacgaattccgccggcgcatcctgggtttggagcagcagctgaaggagactcgaggtctggtggatggtggggaagcggtggaggcacgactacgggacaagctgcagcggctggaggcagagaaacagcagctggaggaggccctgaatgcgtcccaggaagaggaggggagtctggcagcagccaagcgggcactggaggcacgcctagaggaggctcagcgggggctggcccgcctggggcaggagcagcagacactgaaccgggccctggaggaggaagggaagcagcgggaggtgctccggcgaggcaaggctgagctggaggagcagaagcgtttgctggacaggactgtggaccgactgaacaaggagttggagaagatcggggaggactctaagcaagccctgcagcagctccaggcccagctggaggattataaggaaaaggcccggcgggaggtggcagatgcccagcgccaggccaaggattgggccagtgaggctgagaagacctctggaggactgagccgacttcaggatgagatccagaggctgcggcaggccctgcaggcatcccaggctgagcgggacacagcccggctggacaaagagctactggcccagcgactgcaggggctggagcaagaggcagagaacaagaagcgttcccaggacgacagggcccggcagctgaagggtctcgaggaaaaagtctcacggctggaaacagagttagatgaggagaagaacaccgtggagctgctaacagatcgggtgaatcgtggccgggaccaggtggatcagctgaggacagagctcatgcaggaaaggtctgctcggcaggacctggagtgtgacaaaatctccttggagagacagaacaaggacctgaagacccggttggccagctcagaaggcttccagaagcctagtgccagcctctctcagcttgagtcccagaatcagttgttgcaggagcggctacaggctgaagagagggagaagacagttctgcagtctaccaatcgaaaactggagcggaaagttaaagaactatccatccagattgaagacgagcggcagcatgtcaatgaccagaaagaccagctaagcctgagggtgaaggctttgaagcgtcaggtggatgaagcagaagaggaaattgagcgactggacggcctgaggaagaaggcccagcgtgaggtggaggagcagcatgaggtcaatgaacagctccaggcccggatcaagtctctggagaaggactcctggtatgggctacccttttgcccttgctccatagggacactagagcagggagggaatggtctctcctgtgctggataaggaggagaatctctaacatggtactgtgtagtcacttgtttctggttggaagccagtatatttatttattagtatctcagccaccatcctgtacctccccaaatctgattagttggggattttgtgaataaactttaggccttagaagaattggggtttcctttgtacaaaaagggtggctgtcttaatatttctattttcccctccccaaccattattcttctctctgagtcaggcgcaaagcttcccgctcagctgctgagtcagctctcaaaaacgaagggctgagctcagatgaggaattcgacagtgtctacgatccctcgtccattgcatcactgcttacggagagcaacctacagaccagctcctgttagctcgtggtcctcaaggactcagaaaccaggctcgaggcctatcccagcaagtgctgctctgctctgcccaccctgggttctgcattcctatgggtgacccaattattcagacctaagacagggaggggtcagagtgatggtgataaaaaaaaaaaaatcatcagcaataagctgatagatggactttccactgtaggagtggacgtttcaagccaactgagccttttcctcaagtgccgacacctccctcatctctcttatagtggaaggatggtcagcattaggctgatggggactgagaaggataggaagggatagaaattgccatgtgtataaagctttattctttagcccttaaccctaaggctcagggaaataccctatgttattgtgctccctggattcctgcaactcattttccttccactctggagcagggtgaggggaatgttatgggtaacagacatgcaggcatggctctacccatttctttgcacaagtatggggcccatgtggtagtccccatacccctccagttcctatatttttgtcttcttcctttcccctctttgccattcctaccttgcatttttcctgtcagtgccttagccaaggcaaggagataaggatgctcttcttgctttttatatctgcacattcatacctctccaaagaccagcttttccccagccagggccctcagccttccctgctgccccagtgattgattgagagagctgttggggtttctctgccaatgacccctgggagagggactttggtagggtcatgataaagtggcgggggtctggtcctgctcagggttttcatccttcctcctctccctcctctgtgactgtggatatggttataaggtggttgcacctgggagccctgacaactggctgcacaaattccaaaagtaaaggtgtcagtccctgtggccttccttggggcttctctgaccacatgtgcccaacttcaataagagaaccaagggaccctcattttctgaggtgcttggctctgattcagggctttgcaaggggttagaagctgactgtaaaaatgggaagaggcaacggaagacatttatttctcctttggattttggggagaaccaagccctggtagggaagaggtaagggggatgattcacctccatatttcctaagcaggttgtatagggagccggtggcaggaggaaggctgttttcacaaatgacttgtaatgtcgtgattaaaaaaattcctatattcttctgcaaatcaaacgttctttcccaatccaatccagccttggttttattttaaattaaatattaaaattacacatttatattgaaaaaaaaagt

SEQ ID NO: 37933 - DNA, 2157 bp, Homo sapiens
gttctgtaagtattacacatgtgttaatacatttaatccctaagacaaccatgtgaggttaaggaacttgcccaaggccacatttttccagcggcaattataccttgtcaagattgttatgggggagggtcccaggccatggtagtagatgctattcagatgtgtggacttggtatcctgcccagctaagcctgagggtgaaggctttgaagcgtcaggtggatgaagcagaagaggaaattgagcgactggacggcctgaggaagaaggcccagcgtgaggtggaggagcagcatgaggtcaatgaacagctccaggcccggatcaagtctctggagaaggactcctggtatgggctacccttttgcccttgctccatagggacactagagcagggagggaatggtctctcctgtgctggataaggaggagaatctctaacatggtactgtgtagtcacttgtttctggttggaagccagtatatttatttattagtatctcagccaccatcctgtacctccccaaatctgattagttggggattttgtgaataaactttaggccttagaagaattggggtttcctttgtacaaaaagggtggctgtcttaatatttctattttcccctccccaaccattattcttctctctgagtcaggcgcaaagcttcccgctcagctgctgagtcagctctcaaaaacgaagggctgagctcagatgaggaattcgacagtgtctacgatccctcgtccattgcatcactgcttacggagagcaacctacagaccagctcctgttagctcgtggtcctcaaggactcagaaaccaggctcgaggcctatcccagcaagtgctgctctgctctgcccaccctgggttctgcattcctatgggtgacccaattattcagacctaagacagggaggggtcagagtgatggtgataaaaaaaaaaaaatcatcagcaataagctgatagatggactttccactgtaggagtggacgtttcaagccaactgagccttttcctcaagtgccgacacctccctcatctctcttatagtggaaggatggtcagcattaggctgatggggactgagaaggataggaagggatagaaattgccatgtgtataaagctttattctttagcccttaaccctaaggctcagggaaataccctatgttattgtgctccctggattcctgcaactcattttccttccactctggagcagggtgaggggaatgttatgggtaacagacatgcaggcatggctctacccatttctttgcacaagtatggggcccatgtggtagtccccatacccctccagttcctatatttttgtcttcttcctttcccctctttgccattcctaccttgcatttttcctgtcagtgccttagccaaggcaaggagataaggatgctcttcttgctttttatatctgcacattcatacctctccaaagaccagcttttccccagccagggccctcagccttccctgctgccccagtgattgattgagagagctgttggggtttctctgccaatgacccctgggagagggactttggtagggtcatgataaagtggcgggggtctggtcctgctcagggttttcatccttcctcctctccctcctctgtgactgtggatatggttataaggtggttgcacctgggagccctgacaactggctgcacaaattccaaaagtaaaggtgtcagtccctgtggccttccttggggcttctctgaccacatgtgcccaacttcaataagagaaccaagggaccctcattttctgaggtgcttggctctgattcagggctttgcaaggggttagaagctgactgtaaaaatgggaagaggcaacggaagacatttatttctcctttggattttggggagaaccaagccctggtagggaagaggtaagggggatgattcacctccatatttcctaagcaggttgtatagggagccggtggcaggaggaaggctgttttcacaaatgacttgtaatgtcgtgattaaaaaaattcctatattcttctgcaaatcaaacgttctttcccaatccaatccagccttggttttattttaaattaaatattaaaattacacatttatattgaaaaaaaaagt

SEQ ID NO: 37934 - DNA, 4262 bp, Homo sapiens
  misc_feature (2)..(2): n is a, c, g, or t
  misc_feature (4)..(7): n is a, c, g, or t
  misc_feature (10)..(12): n is a, c, g, or t
gnannnngcnnngaggacgagggggagggccagagctgcgcgtgctgctttgcccgagcccgagcccgagcccgagcccgagcccgagcccgagcccgagcccgaacgcaagcctgggagcgcggagcccggctagggactcctcctatttatggagcaggcacccaacatggctgagccccggggccccgtagaccatggagtccagattcgcttcatcacagagccagtgagtggtgcagagatgggcactctacgtcgaggtggacgacgcccagctaaggatgcaagagccagtacctacggggttgctgtgcgtgtgcagggaatcgctgggcagccctttgtggtgctcaacagtggggagaaaggcggtgactcctttggggtccaaatcaagggggccaatgaccaaggggcctcaggagctctgagctcagatttggaactccctgagaacccctactctcaggtcaagggatttcctgccccctcgcagagcagcacatctgatgaggagcctggggcctactggaatggaaagctactccgttcccactcccaggcctcactggcaggccctggcccagtggatcctagtaacagaagcaacagcatgctggagctagccccgaaagtggcttccccaggtagcaccattgacactgctcccctgtcttcagtggactcactcatcaacaagtttgacagtcaacttggaggccaggcccggggtcggactggccgccgaacacggatgctaccccctgaacagcgcaaacggagcaagagcctggacagccgcctcccacgggacacctttgaggaacgggagcgccagtccaccaaccactggacctctagcacaaaatatgacaaccatgtgggcacttcgaagcagccagcccagagccagaacctgagtcctctcagtggctttagccgttctcgtcagactcaggactgggtccttcagagttttgaggagccgcggaggagtgcacaggaccccaccatgctgcagttcaaatcaactccagacctccttcgagaccagcaggaggcagccccaccaggcagtgtggaccatatgaaggccaccatctatggcatcctgagggagggaagctcagaaagtgaaacctctgtgaggaggaaggttagtttggtgctggagaagatgcagcctctagtgatggtttcttctggttctactaaggccgtggcagggcagggtgagcttacccgaaaagtggaggagctacagcgaaagctggatgaagaggtgaagaagcggcagaagctagagccatcccaagttgggctggagcggcagctggaggagaaaacagaagagtgcagccgactgcaggagctgctggagaggaggaagggggaggcccagcagagcaacaaggagctccagaacatgaagcgcctcttggaccagggtgaagatttacgacatgggctggagacccaggtgatggagctgcagaacaagctgaaacatgtccagggtcctgagcctgctaaggaggtgttactgaaggacctgttagagacccgggaacttctggaagaggtcttggaggggaaacagcgagtagaggagcagctgaggctgcgggagcgggagttgacagccctgaagggggccctgaaagaggaggtagcctcccgtgaccaggaggtggaacatgtccggcagcagtaccagcgagacacagagcagctccgcaggagcatgcaagatgcaacccaggaccatgcagtgctggaggccgagaggcagaagatgtcagcccttgtgcgagggctgcagagggagctggaggagacttcagaggagacagggcattggcagagtatgttccagaagaacaaggaggatcttagagccaccaagcaggaactcctgcagctgcgaatggagaaggaggagatggaagaggagcttggagagaagatagaggtcttgcagagggaattagagcaggcccgagctagtgctggagatactcgccaggttgaggtgctcaagaaggagctgctccggacacaggaggagcttaaggaactgcaggcagaacggcagagccaggaggtggctgggcgacaccgggaccgggagttggagaagcagctggcggtcctgagggtcgaggctgatcgaggtcgggagctggaagaacagaacctccagctacaaaagaccctccagcaactgcgacaggactgtgaagaggcttccaaggctaagatggtggccgaggcagaggcaacagtgctggggcagcggcgggccgcagtggagacgacgcttcgggagacccaggaggaaaatgacgaattccgccggcgcatcctgggtttggagcagcagctgaaggagactcgaggtctggtggatggtggggaagcggtggaggcacgactacgggacaagctgcagcggctggaggcagagaaacagcagctggaggaggccctgaatgcgtcccaggaagaggaggggagtctggcagcagccaagcgggcactggaggcacgcctagaggaggctcagcgggggctggcccgcctggggcaggagcagcagacactgaaccgggccctggaggaggaagggaagcagcgggaggtgctccggcgaggcaaggctgagctggaggagcagaagcgtttgctggacaggactgtggaccgactgaacaaggagttggagaagatcggggaggactctaagcaagccctgcagcagctccaggcccagctggaggattataaggaaaaggcccggcgggaggtggcagatgcccagcgccaggccaaggattgggccagtgaggctgagaagacctctggaggactgagccgacttcaggatgagatccagaggctgcggcaggccctgcaggcatcccaggctgagcgggacacagcccggctggacaaagagctactggcccagcgactgcaggggctggagcaagaggcagagaacaagaagcgttcccaggacgacagggcccggcagctgaagggtctcgaggaaaaagtctcacggctggaaacagagttagatgaggagaagaacaccgtggagctgctaacagatcgggtgaatcgtggccgggaccaggtggatcagctgaggacagagctcatgcaggaaaggtctgctcggcaggacctggagtgtgacaaaatctccttggagagacagaacaaggacctgaagacccggttggccagctcagaaggcttccagaagcctagtgccagcctctctcagcttgagtcccagaatcagttgttgcaggagcggctacaggctgaagagagggagaagacagttctgcagtctaccaatcgaaaactggagcggaaagttaaagaactatccatccagattgaagacgagcggcagcatgtcaatgaccagaaagaccagctaagcctgagggtgaaggctttgaagcgtcaggtggatgaagcagaagaggaaattgagcgactggacggcctgaggaagaaggcccagcgtgaggtggaggagcagcatgaggtcaatgaacagctccaggcccggatcaagtctctggagaaggactcctggcgcaaagcttcccgctcagctgctgagtcagctctcaaaaacgaagggctgagctcagatgaggaattcgacagtgtctacgatccctcgtccattgcatcactgcttacggagagcaacctacagaccagctcctgttagctcgtggtcctcaaggactcagaaaccaggctcgaggcctatcccagcaagtgctgctctgctctgcccaccctgggttctgcattcctatgggtgacccaattattcagacctaagacagggaggggtcagagtgatggtgataaaaaaaaaaaaatcatcagcaataagctgatagatggactttccactgtaggagtggacgtttcaagccaactgagccttttcctcaagtgccgacacctccctcatctctcttatagtggaaggatggtcagcattaggctgatggggactgagaaggataggaagggatagaaattgccatgtgtataaagctttattctttagcccttaaccctaaggctcagggaaataccctatgttattgtgctccctggattacatttgaggtgaggggatgttatggtaacagacaatcagcatcacacaagtatgcccatgtggtagtccccatacccctccaattcctcatcct

SEQ ID NO: 37935 - DNA, 3480 bp, Homo sapiens
  misc_feature (2)..(2): n is a, c, g, or t
  misc_feature (4)..(7): n is a, c, g, or t
  misc_feature (10)..(12): n is a, c, g, or t
gnannnngcnnngaggacgagggggagggccagagctgcgcgtgctgctttgcccgagcccgagcccgagcccgagcccgagcccgagcccgagcccgagcccgaacgcaagcctgggagcgcggagcccggctagggactcctcctatttatggagcaggcacccaacatggctgagccccggggccccgtagaccatggagtccagattcgcttcatcacagagccagtgagtggtgcagagatgggcactctacgtcgaggtggacgacgcccagctaaggatgcaagagccagtacctacggggttgctgtgcgtgtgcagggaatcgctgggcagccctttgtggtgctcaacagtggggagaaaggcggtgactcctttggggtccaaatcaagggggccaatgaccaaggggcctcaggagctctgagctcagatttggaactccctgagaacccctactctcaggtcaagggatttcctgccccctcgcagagcagcacatctgatgaggagcctggggcctactggaatggaaagctactccgttcccactcccaggcctcactggcaggccctggcccagtggatcctagtaacagaagcaacagcatgctggagctagccccgaaagtggcttccccaggtagcaccattgacactgctcccctgtcttcagtggactcactcatcaacaagtttgacagtcaacttggaggccaggcccggggtcggactggccgccgaacacggatgctaccccctgaacagcgcaaacggagcaagagcctggacagccgcctcccacgggacacctttgaggaacgggagcgccagtccaccaaccactggacctctagcacaaaatatgacaaccatgtgggcacttcgaagcagccagcccagagccagaacctgagtcctctcagtggctttagccgttctcgtcagactcaggactgggtccttcagagttttgaggagccgcggaggagtgcacaggaccccaccatgctgcagttcaaatcaactccagacctccttcgagaccagcaggaggcagccccaccaggcagtgtggaccatatgaaggccaccatctatggcatcctgagggagggaagctcagaaagtgaaacctctgtgaggaggaaggttagtttggtgctggagaagatgcagcctctagtgatggtttcttctggttctactaaggccgtggcagggcagggtgagcttacccgaaaagtggaggagctacagcgaaagctggatgaagaggtgaagaagcggcagaagctagagccatcccaagttgggctggagcggcagctggaggagaaaacagaagagtgcagccgactgcaggagctgctggagaggaggaagggggaggcccagcagagcaacaaggagctccagaacatgaagcgcctcttggaccagggtgaagatttacgacatgggctggagacccaggtgatggagctgcagaacaagctgaaacatgtccagggtcctgagcctgctaaggaggtgttactgaaggacctgttagagacccgggaacttctggaagaggtcttggaggggaaacagcgagtagaggagcagctgaggctgcgggagcgggagttgacagccctgaagggggccctgaaagaggaggtagcctcccgtgaccaggaggtggaacatgtccggcagcagtaccagcgagacacagagcagctccgcaggagcatgcaagatgcaacccaggaccatgcagtgctggaggccgagaggcagaagatgtcagcccttgtgcgagggctgcagagggagctggaggagacttcagaggagacagggcattggcagagtatgttccagaagaacaaggaggatcttagagccaccaagcaggaactcctgcagctgcgaatggagaaggaggagatggaagaggagcttggagagaagatagaggtcttgcagagggaattagagcaggcccgagctagtgctggagatactcgccaggttgaggtgctcaagaaggagctgctccggacacaggaggagcttaaggaactgcaggcagaacggcagagccaggaggtggctgggcgacaccgggaccgggagttggagaagcagctggcggtcctgagggtcgaggctgatcgaggtcgggagctggaagaacagaacctccagctacaaaagaccctccagcaactgcgacaggactgtgaagaggcttccaaggctaagatggtggccgaggcagaggcaacagtgctggggcagcggcgggccgcagtggagacgacgcttcgggagacccaggaggaaaatgacgaattccgccggcgcatcctgggtttggagcagcagctgaaggagactcgaggtctggtggatggtggggaagcggtggaggcacgactacgggacaagctgcagcggctggaggcagagaaacagcagctggaggaggccctgaatgcgtcccaggaagaggaggggagtctggcagcagccaagcgggcactggaggcacgcctagaggaggctcagcgggggctggcccgcctggggcaggagcagcagacactgaaccgggccctggaggaggaagggaagcagcgggaggtgctccggcgaggcaaggctgagctggaggagcagaagcgtttgctggacaggactgtggaccgactgaacaaggagttggagaagatcggggaggactctaagcaagccctgcagcagctccaggcccagctggaggattataaggaaaaggcccggcgggaggtggcagatgcccagcgccaggccaaggattgggccagtgaggctgagaagacctctggaggactgagccgacttcaggatgagatccagaggctgcggcaggccctgcaggcatcccaggctgagcgggacacagcccggctggacaaagagctactggcccagcgactgcaggggctggagcaagaggcagagaacaagaagcgttcccaggacgacagggcccggcagctgaagggtctcgaggaaaaagtctcacggctggaaacagagttagatgaggagaagaacaccgtggagctgctaacagatcgggtgaatcgtggccgggaccaggtggatcagctgaggacagagctcatgcaggaaaggtctgctcggcaggacctggagtgtgacaaaatctccttggagagacagaacaaggacctgaagacccggttggccagctcagaaggcttccagaagcctagtgccagcctctctcagcttgagtcccagaatcagttgttgcaggagcggctacaggctgaagagagggagaagacagttctgcagtctaccaatcgaaaactggagcggaaagttaaagaactatccatccagattgaagacgagcggcagcatgtcaatgaccagaaagaccaggtgaggacatggcaccctggagc

SEQ ID NO: 37936 - DNA, 1251 bp, Homo sapiens
  misc_feature (2)..(2): n is a, c, g, or t
  misc_feature (4)..(7): n is a, c, g, or t
  misc_feature (10)..(12): n is a, c, g, or t
gnannnngcnnngaggacgagggggagggccagagctgcgcgtgctgctttgcccgagcccgagcccgagcccgagcccgagcccgagcccgagcccgagcccgaacgcaagcctgggagcgcggagcccggctagggactcctcctatttatggagcaggcacccaacatggctgagccccggggccccgtagaccatggagtccagattcgcttcatcacagagccagtgagtggtgcagagatgggcactctacgtcgaggtggacgacgcccagctaaggatgcaagagccagtacctacggggttgctgtgcgtgtgcagggaatcgctgggcagccctttgtggtgctcaacagtggggagaaaggcggtgactcctttggggtccaaatcaagggggccaatgaccaaggggcctcaggagctctgagctcagatttggaactccctgagaacccctactctcaggtcaagggatttcctgccccctcgcagagcagcacatctgatgaggagcctggggcctactggaatggaaagctactccgttcccactcccaggcctcactggcaggccctggcccagtggatcctagtaacagaagcaacagcatgctggagctagccccgaaagtggcttccccaggtagcaccattgacactgctcccctgtcttcagtggactcactcatcaacaagtttgacagtcaacttggaggccaggcccggggtcggactggccgccgaacacggatgctaccccctgaacagcgcaaacggagcaagagcctggacagccgcctcccacgggacacctttgaggaacgggagcgccagtccaccaaccactggacctctagcacaaaatatgacaaccatgtgggcacttcgaagcagccagcccagagccagaacctgagtcctctcagtggctttagccgttctcgtcagactcaggactgggtccttcagagttttgaggagccgcggaggagtgcacaggaccccaccatgctgcagttcaaatcaactccagacctccttcgagaccagcaggaggcagccccaccaggcagtgtggaccatatgaaggccaccatctatggcatcctgagggagggaagctcagaaagtgaaacctctgtgaggaggaaggttagtttggtgctggagaagatgcagcctctagtgatggtggccttcatatggtccacactgcctggtggggctgcctcctgctggtctcg

SEQ ID NO: 37937 - DNA, 378 bp, Homo sapiens
cagaacttcacataattaactaatgtaattctcacaacaccttgtgatatagttactatttttaatcccattttacagatgggggactgagacccagagagataagtaacttgcacatggtcaccagtaagtggtagagccaggatttgaacccagacatctgtatataactattagctatactaggaacctaggcccaggaaagagcaagagagggctgccttgtcaggaaggagacccttaggggagagtcttgggagtctgggcctggagagggtcatttatgtacagtgctgaagacccttttctctgtgtttcagttggagaagatcggggaggactctaagcaagccctgcagcagctccaggcccagctgg

SEQ ID NO: 37938 - DNA, 611 bp, Homo sapiens
tccacattcaggtatcttagtctggctctgggtgccccatcaccattcccgtttccttccaggagctgctccggacacaggaggagcttaaggaactgcaggcagaacggcagagccaggaggtggctgggcgacaccgggaccgggagttggagaagcagctggcggtcctgagggtcgaggctgatcgaggtcgggagctggaagaacagaacctccagctacaaaagaccctccagcaactgcgacaggactgtgaagaggcttccaaggctaagatggtggccgaggcagaggcaacagtgctggggcagcggcgggccgcagtggagacgacgcttcgggagacccaggaggaaaatgacgaattccgccggcgcatcctgggtttggagcagcagctgaaggagactcgaggtctggtggatggtggggaagcggtggaggcacgactacgggacaagctgcagcggctggaggtcagtggttctgccctcccagccctctctgctcagccctggtgaaatactcctatgctaagtagttagccatcagtttcactttgcccttagtgtgcatctgttttgcctccccaaacctgctctgttaac

SEQ ID NO: 37939 - DNA, 2446 bp, Homo sapiens
catactcttagcctctacgtggtactgcctccagtacctcagtttctgagtctcttcacctcagccttggcccaggtacttgggtttctctctcttttcccattagagaaataaggttttccaatgaagagtagattctggggtttgcctttctgtcaaagggccgtcaccagagcatggccccgacctgcccatgatgccacatctggtcagtagagggcgctggctccatagtggctctgggtccaggcaagtaccaaaaggttactgggatgtgcaagagagaaaagtctgttaatgctggagtttgagaggctcctggtctgagtttggcattctggtgtccagcatttgggacagaattacttgttcttctgtcctaggaaaaagtctcacggctggaaacagagttagatgaggagaagaacaccgtggagctgctaacagatcgggtgaatcgtggccgggaccaggtggatcagctgaggacagagctcatgcaggaaaggtctgctcggcaggacctggagtgtgacaaaatctccttggagagacagaacaaggacctgaagacccggttggccagctcagaaggcttccagaagcctagtgccagcctctctcagcttgagtcccagaatcagttgttgcaggagcggctacaggctgaagagagggagaagacagttctgcagtctaccaatcgaaaactggagcggaaagttaaagaactatccatccagattgaagacgagcggcagcatgtcaatgaccagaaagaccagctaagcctgagggtgaaggctttgaagcgtcaggtggatgaagcagaagaggaaattgagcgactggacggcctgaggaagaaggcccagcgtgaggtggaggagcagcatgaggtcaatgaacagctccaggcccggatcaagtctctggagaaggactcctggcgcaaagcttcccgctcagctgctgagtcagctctcaaaaacgaagggctgagctcagatgaggaattcgacagtgtctacgatccctcgtccattgcatcactgcttacggagagcaacctacagaccagctcctgttagctcgtggtcctcaaggactcagaaaccaggctcgaggcctatcccagcaagtgctgctctgctctgcccaccctgggttctgcattcctatgggtgacccaattattcagacctaagacagggaggggtcagagtgatggtgataaaaaaaaaaaaatcatcagcaataagctgatagatggactttccactgtaggagtggacgtttcaagccaactgagccttttcctcaagtgccgacacctccctcatctctcttatagtggaaggatggtcagcattaggctgatggggactgagaaggataggaagggatagaaattgccatgtgtataaagctttattctttagcccttaaccctaaggctcagggaaataccctatgttattgtgctccctggattcctgcaactcattttccttccactctggagcagggtgaggggaatgttatgggtaacagacatgcaggcatggctctacccatttctttgcacaagtatggggcccatgtggtagtccccatacccctccagttcctatatttttgtcttcttcctttcccctctttgccattcctaccttgcatttttcctgtcagtgccttagccaaggcaaggagataaggatgctcttcttgctttttatatctgcacattcatacctctccaaagaccagcttttccccagccagggccctcagccttccctgctgccccagtgattgattgagagagctgttggggtttctctgccaatgacccctgggagagggactttggtagggtcatgataaagtggcgggggtctggtcctgctcagggttttcatccttcctcctctccctcctctgtgactgtggatatggttataaggtggttgcacctgggagccctgacaactggctgcacaaattccaaaagtaaaggtgtcagtccctgtggccttccttggggcttctctgaccacatgtgcccaacttcaataagagaaccaagggaccctcattttctgaggtgcttggctctgattcagggctttgcaaggggttagaagctgactgtaaaaatgggaagaggcaacggaagacatttatttctcctttggattttggggagaaccaagccctggtagggaagaggtaagggggatgattcacctccatatttcctaagcaggttgtatagggagccggtggcaggaggaaggctgttttcacaaatgacttgtaatgtcgtgattaaaaaaattcctatattcttctgcaaatcaaacgttctttcccaatccaatccagccttggttttattttaaattaaatattaaaattacacatttatattgaaaaaaaaagt

SEQ ID NO: 37940 - DNA, 1846 bp, Homo sapiens
gttctgtaagtattacacatgtgttaatacatttaatccctaagacaaccatgtgaggttaaggaacttgcccaaggccacatttttccagcggcaattataccttgtcaagattgttatgggggagggtcccaggccatggtagtagatgctattcagatgtgtggacttggtatcctgcccagctaagcctgagggtgaaggctttgaagcgtcaggtggatgaagcagaagaggaaattgagcgactggacggcctgaggaagaaggcccagcgtgaggtggaggagcagcatgaggtcaatgaacagctccaggcccggatcaagtctctggagaaggactcctggcgcaaagcttcccgctcagctgctgagtcagctctcaaaaacgaagggctgagctcagatgaggaattcgacagtgtctacgatccctcgtccattgcatcactgcttacggagagcaacctacagaccagctcctgttagctcgtggtcctcaaggactcagaaaccaggctcgaggcctatcccagcaagtgctgctctgctctgcccaccctgggttctgcattcctatgggtgacccaattattcagacctaagacagggaggggtcagagtgatggtgataaaaaaaaaaaaatcatcagcaataagctgatagatggactttccactgtaggagtggacgtttcaagccaactgagccttttcctcaagtgccgacacctccctcatctctcttatagtggaaggatggtcagcattaggctgatggggactgagaaggataggaagggatagaaattgccatgtgtataaagctttattctttagcccttaaccctaaggctcagggaaataccctatgttattgtgctccctggattcctgcaactcattttccttccactctggagcagggtgaggggaatgttatgggtaacagacatgcaggcatggctctacccatttctttgcacaagtatggggcccatgtggtagtccccatacccctccagttcctatatttttgtcttcttcctttcccctctttgccattcctaccttgcatttttcctgtcagtgccttagccaaggcaaggagataaggatgctcttcttgctttttatatctgcacattcatacctctccaaagaccagcttttccccagccagggccctcagccttccctgctgccccagtgattgattgagagagctgttggggtttctctgccaatgacccctgggagagggactttggtagggtcatgataaagtggcgggggtctggtcctgctcagggttttcatccttcctcctctccctcctctgtgactgtggatatggttataaggtggttgcacctgggagccctgacaactggctgcacaaattccaaaagtaaaggtgtcagtccctgtggccttccttggggcttctctgaccacatgtgcccaacttcaataagagaaccaagggaccctcattttctgaggtgcttggctctgattcagggctttgcaaggggttagaagctgactgtaaaaatgggaagaggcaacggaagacatttatttctcctttggattttggggagaaccaagccctggtagggaagaggtaagggggatgattcacctccatatttcctaagcaggttgtatagggagccggtggcaggaggaaggctgttttcacaaatgacttgtaatgtcgtgattaaaaaaattcctatattcttctgcaaatcaaacgttctttcccaatccaatccagccttggttttattttaaattaaatattaaaattacacatttatattgaaaaaaaaagt

SEQ ID NO: 37941 - DNA, 5055 bp, Homo sapiens
  misc_feature (2)..(2): n is a, c, g, or t
  misc_feature (4)..(7): n is a, c, g, or t
  misc_feature (10)..(12): n is a, c, g, or t
gnannnngcnnngaggacgagggggagggccagagctgcgcgtgctgctttgcccgagcccgagcccgagcccgagcccgagcccgagcccgagcccgagcccgaacgcaagcctgggagcgcggagcccggctagggactcctcctatttatggagcaggcacccaacatggctgagccccggggccccgtagaccatggagtccagattcgcttcatcacagagccagtgagtggtgcagagatgggcactctacgtcgaggtggacgacgcccagctaaggatgcaagagccagtacctacggggttgctgtgcgtgtgcagggaatcgctgggcagccctttgtggtgctcaacagtggggagaaaggcggtgactcctttggggtccaaatcaagggggccaatgaccaaggggcctcaggagctctgagctcagatttggaactccctgagaacccctactctcaggtcaagggatttcctgccccctcgcagagcagcacatctgatgaggagcctggggcctactggaatggaaagctactccgttcccactcccaggcctcactggcaggccctggcccagtggatcctagtaacagaagcaacagcatgctggagctagccccgaaagtggcttccccaggtagcaccattgacactgctcccctgtcttcagtggactcactcatcaacaagtttgacagtcaacttggaggccaggcccggggtcggactggccgccgaacacggatgctaccccctgaacagcgcaaacggagcaagagcctggacagccgcctcccacgggacacctttgaggaacgggagcgccagtccaccaaccactggacctctagcacaaaatatgacaaccatgtgggcacttcgaagcagccagcccagagccagaacctgagtcctctcagtggctttagccgttctcgtcagactcaggactgggtccttcagagttttgaggagccgcggaggagtgcacaggaccccaccatgctgcagttcaaatcaactccagacctccttcgagaccagcaggaggcagccccaccaggcagtgtggaccatatgaaggccaccatctatggcatcctgagggagggaagctcagaaagtgaaacctctgtgaggaggaaggttagtttggtgctggagaagatgcagcctctagtgatggtttcttctggttctactaaggccgtggcagggcagggtgagcttacccgaaaagtggaggagctacagcgaaagctggatgaagaggtgaagaagcggcagaagctagagccatcccaagttgggctggagcggcagctggaggagaaaacagaagagtgcagccgactgcaggagctgctggagaggaggaagggggaggcccagcagagcaacaaggagctccagaacatgaagcgcctcttggaccagggtgaagatttacgacatgggctggagacccaggtgatggagctgcagaacaagctgaaacatgtccagggtcctgagcctgctaaggaggtgttactgaaggacctgttagagacccgggaacttctggaagaggtcttggaggggaaacagcgagtagaggagcagctgaggctgcgggagcgggagttgacagccctgaagggggccctgaaagaggaggtagcctcccgtgaccaggaggtggaacatgtccggcagcagtaccagcgagacacagagcagctccgcaggagcatgcaagatgcaacccaggaccatgcagtgctggaggccgagaggcagaagatgtcagcccttgtgcgagggctgcagagggagctggaggagacttcagaggagacagggcattggcagagtatgttccagaagaacaaggaggatcttagagccaccaagcaggaactcctgcagctgcgaatggagaaggaggagatggaagaggagcttggagagaagatagaggtcttgcagagggaattagagcaggcccgagctagtgctggagatactcgccaggttgaggtgctcaagaaggagctgctccggacacaggaggagcttaaggaactgcaggcagaacggcagagccaggaggtggctgggcgacaccgggaccgggagttggagaagcagctggcggtcctgagggtcgaggctgatcgaggtcgggagctggaagaacagaacctccagctacaaaagaccctccagcaactgcgacaggactgtgaagaggcttccaaggctaagatggtggccgaggcagaggcaacagtgctggggcagcggcgggccgcagtggagacgacgcttcgggagacccaggaggaaaatgacgaattccgccggcgcatcctgggtttggagcagcagctgaaggagactcgaggtctggtggatggtggggaagcggtggaggcacgactacgggacaagctgcagcggctggaggcagagaaacagcagctggaggaggccctgaatgcgtcccaggaagaggaggggagtctggcagcagccaagcgggcactggaggcacgcctagaggaggctcagcgggggctggcccgcctggggcaggagcagcagacactgaaccgggccctggaggaggaagggaagcagcgggaggtgctccggcgaggcaaggctgagctggaggagcagaagcgtttgctggacaggactgtggaccgactgaacaaggagttggagaagatcggggaggactctaagcaagccctgcagcagctccaggcccagctggaggattataaggaaaaggcccggcgggaggtggcagatgcccagcgccaggccaaggattgggccagtgaggctgagaagacctctggaggactgagccgacttcaggatgagatccagaggctgcggcaggccctgcaggcatcccaggctgagcgggacacagcccggctggacaaagagctactggcccagcgactgcaggggctggagcaagaggcagagaacaagaagcgttcccaggacgacagggcccggcagctgaagggtctcgaggaaaaagtctcacggctggaaacagagttagatgaggagaagaacaccgtggagctgctaacagatcgggtgaatcgtggccgggaccaggtggatcagctgaggacagagctcatgcaggaaaggtctgctcggcaggacctggagtgtgacaaaatctccttggagagacagaacaaggacctgaagacccggttggccagctcagaaggcttccagaagcctagtgccagcctctctcagcttgagtcccagaatcagttgttgcaggagcggctacaggctgaagagagggagaagacagttctgcagtctaccaatcgaaaactggagcggaaagttaaagaactatccatccagattgaagacgagcggcagcatgtcaatgaccagaaagaccagctaagcctgagggtgaaggctttgaagcgtcaggtggatgaagcagaagaggaaattgagcgactggacggcctgaggaagaaggcccagcgtgaggtggaggagcagcatgaggtcaatgaacagctccaggcccggatcaagtctctggagaaggactcctggcgcaaagcttcccgctcagctgctgagtcagctctcaaaaacgaagggctgagctcagatgaggaattcgacagtgtctacgatccctcgtccattgcatcactgcttacggagagcaacctacagaccagctcctgttagctcgtggtcctcaaggactcagaaaccaggctcgaggcctatcccagcaagtgctgctctgctctgcccaccctgggttctgcattcctatgggtgacccaattattcagacctaagacagggaggggtcagagtgatggtgataaaaaaaaaaaaatcatcagcaataagctgatagatggactttccactgtaggagtggacgtttcaagccaactgagccttttcctcaagtgccgacacctccctcatctctcttatagtggaaggatggtcagcattaggctgatggggactgagaaggataggaagggatagaaattgccatgtgtataaagctttattctttagcccttaaccctaaggctcagggaaataccctatgttattgtgctccctggattcctgcaactcattttccttccactctggagcagggtgaggggaatgttatgggtaacagacatgcaggcatggctctacccatttctttgcacaagtatggggcccatgtggtagtccccatacccctccagttcctatatttttgtcttcttcctttcccctctttgccattcctaccttgcatttttcctgtcagtgccttagccaaggcaaggagataaggatgctcttcttgctttttatatctgcacattcatacctctccaaagaccagcttttccccagccagggccctcagccttccctgctgccccagtgattgattgagagagctgttggggtttctctgccaatgacccctgggagagggactttggtagggtcatgataaagtggcgggggtctggtcctgctcagggttttcatccttcctcctctccctcctctgtgactgtggatatggttataaggtggttgcacctgggagccctgacaactggctgcacaaattccaaaagtaaaggtgtcagtccctgtggccttccttggggcttctctgaccacatgtgcccaacttcaataagagaaccaagggaccctcattttctgaggtgcttggctctgattcagggctttgcaaggggttagaagctgactgtaaaaatgggaagaggtaagggggatgattcacctccatatttcctaagcaggttgtatagggagccggtggcaggaggaaggctgttttcacaaatgacttgtaatgtcgtgattaaaaaaattcctatattcttctgcaaatcaaacgttctttcccaatccaatccagccttggttttattttaaattaaatattaaaattacacatttatattgaaaaaaaaagt

SEQ ID NO: 37942 - DNA, 2007 bp, Homo sapiens
  misc_feature (2)..(2): n is a, c, g, or t
  misc_feature (4)..(7): n is a, c, g, or t
  misc_feature (10)..(12): n is a, c, g, or t
gnannnngcnnngaggacgagggggagggccagagctgcgcgtgctgctttgcccgagcccgagcccgagcccgagcccgagcccgagcccgagcccgagcccgaacgcaagcctgggagcgcggagcccggctagggactcctcctatttatggagcaggcacccaacatggctgagccccggggccccgtagaccatggagtccagattcgcttcatcacagagccagtgagtggtgcagagatgggcactctacgtcgaggtggacgacgcccagctaaggatgcaagagccagtacctacggggttgctgtgcgtgtgcagggaatcgctgggcagccctttgtggtgctcaacagtggggagaaaggcggtgactcctttggggtccaaatcaagggggccaatgaccaaggggcctcaggagctctgagctcagatttggaactccctgagaacccctactctcaggtcaagggatttcctgccccctcgcagagcagcacatctgatgaggagcctggggcctactggaatggaaagctactccgttcccactcccaggcctcactggcaggccctggcccagtggatcctagtaacagaagcaacagcatgctggagctagccccgaaagtggcttccccaggtagcaccattgacactgctcccctgtcttcagtggactcactcatcaacaagtttgacagtcaacttggaggccaggcccggggtcggactggccgccgaacacggatgctaccccctgaacagcgcaaacggagcaagagcctggacagccgcctcccacgggacacctttgaggaacgggagcgccagtccaccaaccactggacctctagcacaaaatatgacaaccatgtgggcacttcgaagcagccagcccagagccagaacctgagtcctctcagtggctttagccgttctcgtcagactcaggactgggtccttcagagttttgaggagccgcggaggagtgcacaggaccccaccatgctgcagttcaaatcaactccagacctccttcgagaccagcaggaggcagccccaccaggcagtgtggaccatatgaaggccaccatctatggcatcctgagggagggaagctcagaaagtgaaacctctgtgaggaggaaggttagtttggtgctggagaagatgcagcctctagtgatggtttcttctggttctactaaggccgtggcagggcagggtgagcttacccgaaaagtggaggagctacagcgaaagctggatgaagaggtgaagaagcggcagaagctagagccatcccaagttgggctggagcggcagctggaggagaaaacagaagagtgcagccgactgcaggagctgctggagaggaggaagggggaggcccagcagagcaacaaggagctccagaacatgaagcgcctcttggaccagggtgaagatttacgacatgggctggagacccaggtgatggagctgcagaacaagctgaaacatgtccagggtcctgagcctgctaaggaggtgttactgaaggacctgttagagacccgggaacttctggaagaggtcttggaggggaaacagcgagtagaggagcagctgaggctgcgggagcgggagttgacagccctgaagggggccctgaaagaggaggtagcctcccgtgaccaggaggtggaacatgtccggcagcagtaccagcgagacacagagcagctccgcaggagcatgcaagatgcaacccaggaccatgcagtgctggaggccgagaggcagaagatgtcagcccttgtgcgagggctgcagagggagctggaggagacttcagaggagacagggcattggcagagtatgttccagaagaacaaggaggatcttagagccaccaagcaggaactcctgcagctgcgaatggagaagtgcgcctgggtgcgcaccagcgcacttctgcacccaggcgcacttctgcacccaggcgcacttctgca

SEQ ID NO: 37943 - DNA, 426 bp, Homo sapiens
tgaatgaaaggtttactcacggcagggacaacaatatcccagagtcaggactctcaccctcacagtcgggatcaggcaactagagatggagtctcccttatgtttgttatgctgttccaaacctgattcacatcacaggagttatcagaaatgggttttcactggtgaaaagagttgcttgttaatttgtgtaatggattttagaaaagggctgtcattgtcaaaatttatggcagtcaatgactctgaattactttgttgtagtcactttctgagtagaatatttactaaccactcttggaatggaaattgctgattaaaacacaagctgcacctaggtgtgtaaataactggtgcctacaaatgtcatcctgtctttcccaaaagatttaatatgcccaagtattttttttttttttttgagat

SEQ ID NO: 37944 - DNA, 1446 bp, Homo sapiens
agaaagtctcctggagtagaaataaaaagtttgagagaattggatagtggattggaagtgcataaaatagctgaaggtttttcagaatccaagaaaaggtcatcagaagatgaaaatgaaaataaaatagagtttaggaagaaaggaggatttgaagggggaggattccttggaagaaagaaagttccctatctggcatcatcaccaagtacttccgatggaggaactgactcacctggtactgcgtccccatctcctacaaagactactccatctcctcggcataaaaaaagtgattcttcaggtcaggagtacagcttgtgaaaactcaccaaaatgaatagttgtttcgttacatttagatgaaagttaaactttactgaatttcagtacattagtttttacactaaaactttacaagataaaattggacttcatttagtatctttttaacagaattacttggaataatgagatacaataatcatatctcttttgacattttggaaatttttttaattttacaagtacatttaacagatcatttataaagcaggagtccattttaacacttaccgacttttttggtttggaaacatattaccacgtcttaataggatggtgcccatataggtgagcatccctttagatcatgggaaccagcagactgcattcctaatcttcattatgcctgagacttgtcttacaatgttacctttaagtgaatcacataattgtctttggaacttggtctcccaacacttattgtgattgcaaagtgtttaccagatatttgatgaggtgctatgtttgtgaaaaacatatcatgtaattcaaaaacactattgatattgaataccagataccactatgtagtaagtcttttaggatgattttaatttagtcgtgcgtcattttctgattctcatcattgggagatcttaaatcttagcaagcattagcaatattaaatgccaaaattcccattgaaactttcaagttggagcaattgtctggtgtttgaaaagatgaaataaaaataataatcaagggcaaagctttgagtgcccagaagggaaagctgtaccagttgctaacctgtcttgtttcaggagccaccatgtttttttttcagtgttaacaacaatcatgataattaaattaaaacactagtttgttcacttgtaggactgcagttctgaattttgggttaaaggttttggctgctgtaagaatgtgaatttgaatgtattttgaattgtaagagcaaaagaacgtttttgtacaattttttttcatttaattggaatgatcttcaggtttctacaaatagggtaattgtaaatttaaagcattagcatttattggtgaataatgtatatatccccattccaagaaatataagtgagtgaagttgaaataaaatctttaaaatttactatattg

SEQ ID NO: 37945 - DNA, 1179 bp, Homo sapiens
cgacccacgcgtccgcggacggcgtgggtccggacgcgtgggtcgacccacgcgtccgaactcaccaaaatgaatagttgtttcgttacatttagatgaaagttaaactttactgaatttcagtacattagtttttacactaaaactttacaagataaaattggacttcatttagtatctttttaacagaattacttggaataatgagatacaataatcatatctcttttgacattttggaaatttttttaattttacaagtacatttaacagatcatttataaagcaggagtccattttaacacttaccgacttttttggtttggaaacatattaccacgtcttaataggatggtgcccatataggtgagcatccctttagatcatgggaaccagcagactgcattcctaatcttcattatgcctgagacttgtcttacaatgttacctttaagtgaatcacataattgtctttggaacttggtctcccaacacttattgtgattgcaaagtgtttaccagatatttgatgaggtgctatgtttgtgaaaaacatatcatgtaattcaaaaacactattgatattgaataccagataccactatgtagtaagtcttttaggatgattttaatttagtcgtgcgtcattttctgattctcatcattgggagatcttaaatcttagcaagcattagcaatattaaatgccaaaattcccattgaaactttcaagttggagcaattgtctggtgtttgaaaagatgaaataaaaataataatcaagggcaaagctttgagtgcccagaagggaaagctgtaccagttgctaacctgtcttgtttcaggagccaccatgtttttttttcagtgttaacaacaatcatgataattaaattaaaacactagtttgttcacttgtaggactgcagttctgaattttgggttaaaggttttggctgctgtaagaatgtgaatttgaatgtattttgaattgtaagagcaaaagaacgtttttgtacaattttttttcatttaattggaatgatcttcaggtttctacaaatagggtaattgtaaatttaaagcattagcatttattggtgaataatgtatatatccccattccaagaaatataagtgagtgaagttgaaataaaatctttaaaatttactatattg

SEQ ID NO: 37946 - DNA, 213 bp, Homo sapiens
tcagcccctctccaggacaaggccaacatgccattatgaacctaagaagaagctagttaactgatgctcaattcttcattctaaaactgctagtggccagctgccgtggctcacacctgtaatcccagcactttgggaggccgaggcgtgtggatcatctgaggtcaggagttcgagaccagcctggccaacacagtgaaaccctgtctctac

SEQ ID NO: 37947 - DNA, 319 bp, Homo sapiens
taccttgtaactatccgaagcgtatttaaaagacaggtaataactggaaaagtaggaacaagctaaacaacaccatgattaagcaatcaggcaaatcctgaaggtgagatattccactggacaactgtcctggactcttagcaaatcagcatcatagaaacagtgaatttatagagtaaaaccaatttaagtgacccaaccatcagatgtattataacatgtggtcctagattagattccagtttatgtagatttaaatagctataaaaatgattttgggaaacgttatggaaattggaatatggcttgggtcataaat

SEQ ID NO: 37948 - DNA, 397 bp, Homo sapiens
agactctgcctctctaaaaaaaaacacacacacacaacaacaacaacaaaaattgtaatcagtctcgtagacagtgatcgtgtacaaagttctatttaggaaagaaaacatcagtatttaagtctacttttattaagaatgtgggttcctaaaccaattcgtctggttaggaatcagctctgccacttttatctgggtggcaagcaagttatttaatcattcgacacctcaatttccatacctgtaaaataagaataataatagtaaattatcggccaggtgcagtggctcatgcctgtaatcccagcactttgggaggccgaggcgggcagatcatgatgtcaggagttcgagacaagcctggccaacatagtgaaaccccgcctctactaaaaaa

SEQ ID NO: 37949 - DNA, 397 bp, Homo sapiens
ttaaatttcacagaggtcaattgagcaaacaatgatttgcaaattgggcagttccctgaaccagagagactctggtgctgttgggtgattggggaagatttaaggactgaaaaagggccgggtgcagtggctcacacttgtgatctcagcactttgggaggccgagggggacagatcacttgagatcgggagtttgagaccagcctggccaacatggttaaaccccatctctactaaaaatacaaaaattagtggggcatggtggtgggtgcctatagtcccagctactcttgagtctaaagcaagagaatcgcttgaacccgggaggcagagattgcggtgagccgagatcatgctactgcattccagcctgggcgacagagcgagactccatctc

SEQ ID NO: 37950 - DNA, 632 bp, Homo sapiens
cagcctccgcctgctcccacagtggaacagccaccatccaggagctcacccccagctcagctgcatgtgtcccctcacaggacccacgcatcagatggggagcagagaagggccctgaatgcaggaagcctccgcgactcggtatgcaccccaggaccaacagagatttgcacagaaagctgcaactcagtggtcaaaaaagagagggcaatgctttttcacgggtggtccatggcattttgcttggatgactcagagaagagaaacctaacgaccccctccccaccacaatgtttaacacagactgtctaccaccacactggagactctattttcatagacacaattccacagatggggaaactgaggcagcaggtgctatggaactcggcaacgcaaagcttgcctgatcctggggtcctcgccacaagcagggccctctgagcaggacctacaggccaggccagggcagctcctggctgagcgccacatagactaccacagtgacacatgggttaacgtgctggacccagtcagttttatatcaggaatgatggacacaccactttctgcactgaatgcttgtatcatctttgaatgctacaactagcatcaatgtttctacatcggaa

SEQ ID NO: 37951 - DNA, 443 bp, Homo sapiens
  misc_feature (441)..(442): n is a, c, g, or t
caaagtttttaccaaaaatatatacttcaatgtaacatggatgttaaatgtttgcaaaatagttcacttgaaaacagtattgttttagtctgcttgcattgctataaaggaatacctaggctgagtaatttataaggaagagttttatttggctaatggttctgcaggctttatcagaagcataaagccagcatctgcttctgatgaggacctcagagagcttccagtcatggcagaaggggaaggggagctgacatgtcacatggggagagaaggagcaagagagagagaaaggaagtgccaaagtttttggggtttttttgttttgttttgttttgtttgagatggagtctctctctggtatccagactggaggttgcaatgagccgaggttggccattgcactccagccagggaaacaagagcaaaacaccatctcgnnt

SEQ ID NO: 37952 - DNA, 437 bp, Homo sapiens
ccgggtcgactactactactaaattcgcggccgcgtcgacagaacaaccttttctacccacttttgtttcttctggtgatacctatttacattttgctttcaaagggtgcccaaccactggatgccatacttgtgttattagctatctctatctgcctaagcctctggtttgcttcctcttgggaattaaaaataagatttctcttgatttcattgaaaaatcatcattctttcagctttgaccatattgttttgataaaaacagctgatttgtattattgaacatctttctcatttttctctctccataaggagaaattcatcacgatttattacctgaacatttgtgaaaccaatttgagagaatcccaaaagaatcattttaattgaagccacctaattacttgtaattaagaagacttaaaatgccaaaaaaa

SEQ ID NO: 37953 - DNA, 995 bp, Homo sapiens
gtcactttgtcgcgggacgtcgcgtggtacaattggcctgtgggagtaccattgatcccgccctcatctgaggtgacgggaaagggccgggaaatttccacttctgaataaaatgactgctgaagtgatgacccgcaagaattggtcaaatttggagtagacttcaccctgcgcttggtgaaacttctacgtcaaggatgcaagaggcgccgaagtaacgcagctcccacctgtcgctctccgctgggcgccgagactatggccggagaatagctgcaccgggattggagaaaggaagccatcagtcttaggaaggctccaccttcctgccattgcctggttggaggagcgtagcgtcagtcactagagcagtcaccacctctgggacaggtgaagatgtgtaacctatttgccgggggctatttgggagggaatagaggacggggagcgatgaggggacagtcgaggggcaaggccgatctcgcttcgcgcctcccgcctttctgagttgagcctagcgcgcgggtctgagggacatccggggagctgcttgggatggccgccttggggagactcgacccgcccgccaggacccggccgcgcgccgcagttcgggcgccttcgggcaggatcgcccagcggggccgcgttctcctgcttgcggacggctgcgggcctgagggctggacagcgccatgcctcagtaccgggaactgtcccacgtaggaaggtgggaatgccgcgaacggcgtgcggaatccgacctcaaggtggaacggggtggtgaagagtgcatgctccgaggcagtttcgagttctggtgctgccacttacttgctgcctgacttcggcgcgtttgctgtttcatttttgtgactttcaactcgctcctctgtgaaatgggagtaatattagtaccttcctcattgggttgttgttatgaataaattagatgataatatagcgcttagcaaagtcccaaacttaaaaaaaaa

SEQ ID NO: 37954 - DNA, 659 bp, Homo sapiens
gtcactttgtcgcgggacgtcgcgtggtacaattggcctgtgggagtaccattgatcccgccctcatctgaggtgacgggaaagggccgggaaatttccacttctgaataaaatgactgctgaagtgatgacccgcaagaattggtcaaatttggagtagacttcaccctgcgcttggtgaaacttctacgtcaaggatgcaagaggcgccgaagtaacgcagctcccacctgtcgctctccgctgggcgccgagactatggccggagaatagctgcaccgggattggagaaaggaagccatcagtcttaggaaggctccaccttcctgccattgcctggttggaggagcgtagcgtcagtcactagagcagtcaccacctctgggacaggaaggtgggaatgccgcgaacggcgtgcggaatccgacctcaaggtggaacggggtggtgaagagtgcatgctccgaggcagtttcgagttctggtgctgccacttacttgctgcctgacttcggcgcgtttgctgtttcatttttgtgactttcaactcgctcctctgtgaaatgggagtaatattagtaccttcctcattgggttgttgttatgaataaattagatgataatatagcgcttagcaaagtcccaaacttaaaaaaaaa

SEQ ID NO: 37955 - DNA, 4965 bp, Homo sapiens
gacggcgccagcagccagcccgaggacgcgagcggcaggtgtgcacagaggttctccactttgttttctgaactcgcggtcaggatggttttctctgtcaggcagtgtggccatgttggcagaactgaagaagttttactgacgttcaagatattccttgtcatcatttgtcttcatgtcgttctggtaacatccctggaagaagatactgataattccagtttgtcaccaccacctgctaaattatctgttgtcagttttgccccctcctccaatgaggttgaaacaacaagcctcaatgatgttactttaagcttactcccttcaaacgaaacagaaaaaactaaaatcactatagtaaaaaccttcaatgcttcaggcgtcaaaccccagagaaatatctgcaatttgtcatctatttgcaatgactcagcattttttagaggtgagatcatgtttcaatatgataaagaaagcactgttccccagaatcaacatataacgaatggcaccttaactggagtcctgtctctaagtgaattaaaacgctcagagctcaacaaaaccctgcaaaccctaagtgagacttactttataatgtgtgctacagcagaggcccaaagcacattaaattgtacattcacaataaaactgaataatacaatgaatgcatgtgctgcaatagccgctttggaaagagtaaagattcgaccaatggaacactgctgctgttctgtcaggataccctgcccttcctccccagaagagttgggaaagcttcagtgtgacctgcaggatcccattgtctgtcttgctgaccatccacgtggcccaccattttcttccagccaatccatcccagtggtgcctcgggccactgtgctttcccaggtccccaaagctacctcttttgctgagcctccagattattcacctgtgacccacaatgttccctctccaataggggagattcaacccctttcaccccagccttcagctcccatagcttccagccctgccattgacatgcccccacagtctgaaacgatctcttcccctatgccccaaacccatgtctccggcaccccacctcctgtgaaagcctcattttcctctcccaccgtgtctgcccctgcgaatgtcaacactaccagcgcacctcctgtccagacagacatcgtcaacaccagcagtatttctgatcttgagaaccaagtgttgcagatggagaaggctctgtccttgggcagcctggagcctaacctcgcaggagaaatgatcaaccaagtcagcagactccttcattccccgcctgacatgctggcccctctggctcaaagattgctgaaagtagtggatgacattggcctacagctgaacttttcaaacacgactataagtctaacctccccttctttggctctggctgtgatcagagtgaatgccagtagtttcaacacaactacctttgtggcccaagaccctgcaaatcttcaggtttctctggaaacccaagctcctgagaacagtattggcacaattactcttccttcatcgctgatgaataatttaccagctcatgacatggagctagcttccagggttcagttcaatttttttgaaacacctgctttgtttcaggatccttccctggagaacctctctctgatcagctacgtcatatcatcgagtgttgcaaacctgaccgtcaggaacttgacaagaaacgtgacagtcacattaaagcacatcaacccgagccaggatgagttaacagtgagatgtgtattttgggacttgggcagaaatggtggcagaggaggctggtcagacaatggctgctctgtcaaagacaggagattgaatgaaaccatctgtacctgtagccatctaacaagcttcggcgttctgctggacctatctaggacatctgtgctgcctgctcaaatgatggctctgacgttcattacatatattggttgtgggctttcatcaatttttctgtcagtgactcttgtaacctacatagcttttgaaaagatccggagggattacccttccaaaatcctcatccagctgtgtgctgctctgcttctgctgaacctggtcttcctcctggactcgtggattgctctgtataagatgcaaggcctctgcatctcagtggctgtatttcttcattattttctcttggtctcattcacatggatgggcctagaagcattccatatgtacctggcccttgtcaaagtatttaatacttacatccgaaaatacatccttaaattctgcattgtcggttggggggtaccagctgtggttgtgaccatcatcctgactatatccccagataactatgggcttggatcctatgggaaattccccaatggttcaccggatgacttctgctggatcaacaacaatgcagtattctacattacggtggtgggatatttctgtgtgatatttttgctgaacgtcagcatgttcattgtggtcctggttcagctctgtcgaattaaaaagaagaagcaactgggagcccagcgaaaaaccagtattcaagacctcaggagtatcgctggccttacatttttactgggaataacttggggctttgccttctttgcctggggaccagttaacgtgaccttcatgtatctgtttgccatctttaataccttacaaggatttttcatattcatcttttactgtgtggccaaagaaaatgtcaggaagcaatggaggcggtatctttgttgtggaaagttacggctggctgaaaattctgactggagtaaaactgctactaatggtttaaagaagcagactgtaaaccaaggagtgtccagctcttcaaattccttacagtcaagcagtaactccactaactccaccacactgctagtgaataatgattgctcagtacacgcaagcgggaatggaaatgcttctacagagaggaatggggtctcttttagtgttcagaatggagatgtgtgccttcacgatttcactggaaaacagcacatgtttaacgagaaggaagattcctgcaatgggaaaggccgtatggctctcagaaggacttcaaagcggggaagcttacactttattgagcaaatgtgattcctttcttctaaaatcaaagcatgatgcttgacagtgtgaaatgtccaattttaccttttacacaatgtgagatgtatgaaaatcaactcattttattctcggcaacatctggagaagcataagctaattaagggcgatgattattattacaagaagaaaccaagacattacaccatggtttttagacatttctgatttggtttcttatctttcattttataagaaggttggttttaaacaatacactaagaatgactcctataaagaaaacaaaaaaaggtagtgaactttcagctaccttttaaagaggctaagttatctttgataacatcatataaagcaactgttgacttcagcctgttggtgagtttagttgtgcatgcctttgttgtatataagctaaattctagtgacccatgtgtcaaaaatcttacttctacatttttttgtatttattttctactgtgtaaatgtattcctttgtagaatcatggttgttttgtctcacgtgataattcagaaaatccttgctcgttccgcaaatcctaaagctccttttggagatgatataggatgtgaaatacagaaacctcagtgaaatcaagaaataatgatcccagccagactgagaaaatgtaagcagacagtgccacagttagctcatacagtgcctttgagcaagttaggaaaagatgcccccactgggcagacacagccctatgggtcatggtttgacaaacagagtggagagaccatattttagccccactcaccctcttgggtgcacgacctgtacagccaaacacagcatccaatatgaatacccatcccctgaccgcatccccagtagtcagattatagaatctgcaccaagatgtttagctttataccttggccacagagagggatgaactgtcatccagaccatgtgtcaggaaaattgtgaacgtagatgaggtacatacactgccgcttctcaaatccccagagcctttaggaacaggagagtagactaggattccttctcttaaaaaggtacatatatatggaaaaaaatcatattgccgttctttaaaaggcaactgcatggtacattgttgattgttatgactggtacactctggcccagccagagctataattgttttttaaatgtgtcttgaagaatgcacagtgacaaggggagtagctattgggaacagggaactgtcctacactgctattgttgctacatgtatcgagccttgattgctcctagttatatacagggtctatcttgcttcctacctacatctgcttgagcagtgcctcaagtacatccttattaggaacatttcaaaccccttttagttaagtctttcactaaggttctcttgcatatatttcaagtgaatgttggatctcagactaaccatagtaataatacacatttctgtgagtgctgacttgtctttgcaatatttcttttctgatttatttaattttcttgtatttatatgttaaaatcaaaaatgttaaaatcaatgaaataaatttgcagttaagatctttaagtttggtaattttcacaaagaaaaaacatctgcagtctctttccctggtggcctggcatggaagtggtgtaggacatgctgattaagacaaacacaattggctgggcatggtggctcacacctgtaatcccagcactttgggaggctgacgcaggtggattgcttgagtgcaggagttggagaccagcccgggcagcacagggagacccctgtctctacaaaaaattaaaaattagttagtcatagtgttgtgtgcctgtactcctagctactcaggagg

SEQ ID NO: 37956 - DNA, 627 bp, Homo sapiens
cgctcaaggttacgcactccagactcatgtatcgagccttgattgctcctagttatatacagggtctatcttgcttcctacctacatctgcttgagcagtgcctcaagtacatccttattaggaacatttcaaaccccttttagttaagtctttcactaaggttctcttgcatatatttcaagtgaatgttggatctcagactaaccatagtaataatacacatttctgtgagtgctgacttgtctttgcaatatttcttttctgatttatttaattttcttgtatttatatgttaaaatcaaaaatgttaaaatcaatgaaataaatttgcagttaagatctttaagtttggtaattttcacaaagaaaaaacatctgcagtctctttccctggtggcctggcatggaagtggtgtaggacatgctgattaagacaaacacaattggctgggcatggtggctcacacctgtaatcccagcactttgggaggctgacgcaggtggattgcttgagtgcaggagttggagaccagcccgggcagcacagggagacccctgtctctacaaaaaattaaaaattagttagtcatagtgttgtgtgcctgtactcctagctactcaggagg

SEQ ID NO: 37957 - DNA, 4680 bp, Homo sapiens
gacggcgccagcagccagcccgaggacgcgagcggcaggtgtgcacagaggttctccactttgttttctgaactcgcggtcaggatggttttctctgtcaggcagtgtggccatgttggcagaactgaagaagttttactgacgttcaagatattccttgtcatcatttgtcttcatgtcgttctggtaacatccctggaagaagatactgataattccagtttgtcaccaccacctgctaaattatctgttgtcagttttgccccctcctccaatgaggttgaaacaacaagcctcaatgatgttactttaagcttactcccttcaaacgaaacagaaaaaactaaaatcactatagtaaaaaccttcaatgcttcaggcgtcaaaccccagagaaatatctgcaatttgtcatctatttgcaatgactcagcattttttagaggtgagatcatgtttcaatatgataaagaaagcactgttccccagaatcaacatataacgaatggcaccttaactggagtcctgtctctaagtgaattaaaacgctcagagctcaacaaaaccctgcaaaccctaagtgagacttactttataatgtgtgctacagcagaggcccaaagcacattaaattgtacattcacaataaaactgaataatacaatgaatgcatgtgctgcaatagccgctttggaaagagtaaagattcgaccaatggaacactgctgctgttctgtcaggataccctgcccttcctccccagaagagttgggaaagcttcagtgtgacctgcaggatcccattgtctgtcttgctgaccatccacgtggcccaccattttcttccagccaatccatcccagtggtgcctcgggccactgtgctttcccaggtccccaaagctacctcttttgctgagcctccagattattcacctgtgacccacaatgttccctctccaataggggagattcaacccctttcaccccagccttcagctcccatagcttccagccctgccattgacatgcccccacagtctgaaacgatctcttcccctatgccccaaacccatgtctccggcaccccacctcctgtgaaagcctcattttcctctcccaccgtgtctgcccctgcgaatgtcaacactaccagcgcacctcctgtccagacagacatcgtcaacaccagcagtatttctgatcttgagaaccaagtgttgcagatggagaaggctctgtccttgggcagcctggagcctaacctcgcaggagaaatgatcaaccaagtcagcagactccttcattccccgcctgacatgctggcccctctggctcaaagattgctgaaagtagtggatgacattggcctacagctgaacttttcaaacacgactataagtctaacctccccttctttggctctggctgtgatcagagtgaatgccagtagtttcaacacaactacctttgtggcccaagaccctgcaaatcttcaggtttctctggaaacccaagctcctgagaacagtattggcacaattactcttccttcatcgctgatgaataatttaccagctcatgacatggagctagcttccagggttcagttcaatttttttgaaacacctgctttgtttcaggatccttccctggagaacctctctctgatcagctacgtcatatcatcgagtgttgcaaacctgaccgtcaggaacttgacaagaaacgtgacagtcacattaaagcacatcaacccgagccaggatgagttaacagtgagatgtgtattttgggacttgggcagaaatggtggcagaggaggctggtcagacaatggctgctctgtcaaagacaggagattgaatgaaaccatctgtacctgtagccatctaacaagcttcggcgttctgctggacctatctaggacatctgtgctgcctgctcaaatgatggctctgacgttcattacatatattggttgtgggctttcatcaatttttctgtcagtgactcttgtaacctacatagcttttgaaaagatccggagggattacccttccaaaatcctcatccagctgtgtgctgctctgcttctgctgaacctggtcttcctcctggactcgtggattgctctgtataagatgcaaggcctctgcatctcagtggctgtatttcttcattattttctcttggtctcattcacatggatgggcctagaagcattccatatgtacctggcccttgtcaaagtatttaatacttacatccgaaaatacatccttaaattctgcattgtcggttggggggtaccagctgtggttgtgaccatcatcctgactatatccccagataactatgggcttggatcctatgggaaattccccaatggttcaccggatgacttctgctggatcaacaacaatgcagtattctacattacggtggtgggatatttctgtgtgatatttttgctgaacgtcagcatgttcattgtggtcctggttcagctctgtcgaattaaaaagaagaagcaactgggagcccagcgaaaaaccagtattcaagacctcaggagtatcgctggccttacatttttactgggaataacttggggctttgccttctttgcctggggaccagttaacgtgaccttcatgtatctgtttgccatctttaataccttacaaggatttttcatattcatcttttactgtgtggccaaagaaaatgtcaggaagcaatggaggcggtatctttgttgtggaaagttacggctggctgaaaattctgactggagtaaaactgctactaatggtttaaagaagcagactgtaaaccaaggagtgtccagctcttcaaattccttacagtcaagcagtaactccactaactccaccacactgctagtgaataatgattgctcagtacacgcaagcgggaatggaaatgcttctacagagaggaatggggtctcttttagtgttcagaatggagatgtgtgccttcacgatttcactggaaaacagcacatgtttaacgagaaggaagattcctgcaatgggaaaggccgtatggctctcagaaggacttcaaagcggggaagcttacactttattgagcaaatgtgattcctttcttctaaaatcaaagcatgatgcttgacagtgtgaaatgtccaattttaccttttacacaatgtgagatgtatgaaaatcaactcattttattctcggcaacatctggagaagcataagctaattaagggcgatgattattattacaagaagaaaccaagacattacaccatggtttttagacatttctgatttggtttcttatctttcattttataagaaggttggttttaaacaatacactaagaatgactcctataaagaaaacaaaaaaaggtagtgaactttcagctaccttttaaagaggctaagttatctttgataacatcatataaagcaactgttgacttcagcctgttggtgagtttagttgtgcatgcctttgttgtatataagctaaattctagtgacccatgtgtcaaaaatcttacttctacatttttttgtatttattttctactgtgtaaatgtattcctttgtagaatcatggttgttttgtctcacgtgataattcagaaaatccttgctcgttccgcaaatcctaaagctccttttggagatgatataggatgtgaaatacagaaacctcagtgaaatcaagaaataatgatcccagccagactgagaaaatgtaagcagacagtgccacagttagctcatacagtgcctttgagcaagttaggaaaagatgcccccactgggcagacacagccctatgggtcatggtttgacaaacagagtggagagaccatattttagccccactcaccctcttgggtgcacgacctgtacagccaaacacagcatccaatatgaatacccatcccctgaccgcatccccagtagtcagattatagaatctgcaccaagatgtttagctttataccttggccacagagagggatgaactgtcatccagaccatgtgtcaggaaaattgtgaacgtagatgaggtacatacactgccgcttctcaaatccccagagcctttaggaacaggagagtagactaggattccttctcttaaaaaggtacatatatatggaaaaaaatcatattgccgttctttaaaaggcaactgcatggtacattgttgattgttatgactggtacactctggcccagccagagctataattgttttttaaatgtgtcttgaagaatgcacagtgacaaggggagtagctattgggaacagggaactgtcctacactgctattgttgctacatgtatcgagccttgattgctcctagttatatacagggtctatcttgcttcctacctacatctgcttgagcagtgcctcaagtacatccttattaggaacatttcaaaccccttttagttaagtctttcactaaggttctcttgcatatatttcaagtgaatgttggatctcagactaaccatagtaataatacacatttctgtgagtgctgacttgtctttgcaatatttcttttctgatttatttaattttcttgtatttatatgttaaaatcaaaaatgttaaaatcaatgaaataaatttgcagttaagatc

SEQ ID NO: 37958 - DNA, 441 bp, Homo sapiens
accattaacaagctctgtggcttcaagcaatgcatttatacattttgaagcttagttttcttatttgtaagaaaagacttatttctagccctagaatcccatgattctgatttcacctcttatcaactaataattgtagaaatcagaagatcagggtgtgtgtgctcggttaataatccaagagcataggcacatgtgcagcagagattttaaccgaggtttgcaatagtacatcgttcaaagattaaatgccagggagccgctgcagaataggaagaagactgagatactcaagttagggattttgtcttgcatcatgttttattaataaaagattttaatgttctcttaatgttaagcttttaaaaaataaaaacattttttctttgtaaagtaaaaggtaattaaatcagctttccatttgatttattaatatcgtct

SEQ ID NO: 37959 - DNA, 121 bp, Homo sapiens
cattccccatccttctgcctccatgctccagggttagacagcttgaatgtctccttcctgtttggtgttcccagcctcagcattcatgagtcttgtgtccatatggtgctctactcagagc

SEQ ID NO: 37960 - DNA, 773 bp, Homo sapiens
aatgaagatgaagtattgctgaagccaaccagagatcttgatctctctctgaggaaaaaacctagaaatgatggttagaatcaggagacttgagaactacgaggaacatggcagcctctagctcatacttgtcgttgtacaattgagatcaagtgaattggccccggtctcacattttcagtgaagtcagactcagaactaggtcctgggtttcatgtttcctgctgctcttctcactgtgtacacaccatgcccacatacaacatacctatcagaaatggttttcattaagggagtagaatagtcacttaactggggctcttaacattgctaataacctgtggctcaatttcctcaactgtataatgaggttactactagtatctacctcaaagcgttgtcatgtggattgagatgatatgtatgaatcacataaaagagtgcctggcacatagtaggtgccattaataatattactattgttaacaccttaagggtctaacttgtaatgaagacagaaatatgtatgaggatgatcactgaaatatttatgacagtgcataatttgcaaaataaaaaatgtacactagcataatatttgtggcatatccgtgtaatggaagattatgcaggcattaaaatatgtacacaaaaagtttggtaaaggaaaaatgctgtcatgtgttacaaaagcatgataaataattgttaatatggaataagctcaaatatgtcaaaataaatgtaaaaaatgagtgttgcccaaaactaag

SEQ ID NO: 37961 - DNA, 633 bp, Homo sapiens
tcccctttttttttttgggaaaacacaacagaacagtagacatgatacgattcgagctcgtaccccctcattggacatcaaaagacccatactggtgaggaaccctatgaatgtaaagaatgtggaaaatccttcagctggttctctcaccttgttactcatcagagaactcatacaggagacaaactgtacacatgtaatcagtgtgggaaatcttttgttcatagctctaggcttattagacaccagaggacacatactggagagaaaccctatgaatgtcctgaatgtgggaaatctttcagacagagcacacatctcattagtgaactcccattcacaattgcttcaaagagagtaaaatacctaggaatccaacttacaagggatgtgaaggaactcttcaaggagaactacaaatcactgctcaatgaaataaaagagaacacaaacaaatgaaagaaccattccatgcttatggataggaagaatcaatatcgtgaaaatggccatactgcccaaggtaatttatagattcaatgccatccccatcaagctaccaatgactttcttcacagaattggaaaaaactttaaagttcatgtggaaccaaaaaagggcccgcattgccaa

SEQ ID NO: 37962 - DNA, 3428 bp, Homo sapiens
ggcctcagactcacctctgacgccgctcttcgcgctccgctggtgaatggagtcgcgttctctgttttgctgttgctgctgcctttgtgacgggatcgctttctcccatcgaaccttctagttgcttattgcaggtatatacgaaagtgctgaattttgtgtttgcatcgtcatcaggcgcgtgttgagccctttagtaatgtagcagtgtattagcttcgtatttctaggtagacggtaatttcgtcaatgaaaaaatttaacggtgatcgtcaccccttgcctcagtcactttctgtccctcgcgcggccccggcgttcacggcggacgttcttgttctgtggagaataacggctgcacctggagattgacgcagagtgggcggcggtggtgctttgtctcctcagcactctgctgtcactcaaggaagtatcatcaagaacaaggagggcatggatgctaagtcactaactgcctggtcccggacactggtgaccttcaaggatgtatttgtggacttcaccagggaggagtggaagctgctggacactgctcagcagatcgtgtacagaaatgtgatgctggagaactataagaacctggtttccttgggttatcagcttactaagccagatgtgatcctccggttggagaagggagaagagccctggctggtggagagagaaattcaccaagagacccatcctgattcagagactgcatttgaaatcaaatcatcagtttccagcaggagcatttttaaagataagcaatcctgtgacattaaaatggaaggaatggcaaggaatgatctctggtatttgtcattagaagaagtctggaaatgtagagaccagttagacaagtatcaggaaaacccagagagacatttgaggcatcagcttattcatactggagaaaaaccctatgagtgtaaagaatgtggaaagtctttcagccggagttctcacctcattggacatcaaaagacccatactggtgaggaaccctatgaatgtaaagaatgtggaaaatccttcagctggttctctcaccttgttactcatcagagaactcatacaggagacaaactgtacacatgtaatcagtgtgggaaatcttttgttcatagctctaggcttattagacaccagaggacacatactggagagaaaccctatgaatgtcctgaatgtgggaaatctttcagacagagcacacatctcattctgcatcagagaacccatgtgagagtgaggccctatgaatgcaatgaatgtggaaagtcttacagccagagatctcaccttgttgtgcatcatagaattcacactggactaaaaccttttgagtgtaaggattgtggaaaatgttttagtcgaagctctcacctttattcacatcaaagaacccacactggagagaaaccatatgagtgtcatgattgtggaaaatctttcagccagagttctgcccttattgtgcatcagaggatacacactggagagaaaccatatgaatgctgtcagtgtgggaaagccttcatccggaagaatgacctcattaagcaccagagaattcatgttggagaagagacctataaatgtaatcaatgtggcattatcttcagccagaactctccatttatagttcatcaaatagctcacactggagagcagttcttaacatgcaatcaatgtgggacagcgcttgttaatacctctaaccttattggataccagacaaatcatattagagaaaatgcttactaataaatatgggaatttttcacaaagagcaatgactttattttgcattggagaactcctggagataagctgtacaaattgaatctatgtggaaatgctttcagtcttgttactatcctattgcacattagagaattggtcctggaagggaaagaaaccacagattttatttcagtacacaaatccatcagattttcttcttttcatgaattcctacagaagtaattggcctgagagcattcttgaccaagtcttaaatgctagaatctgagaaggaattattaaataggtgagttgttgagcgagaaccccttcatttgaaaagaaatgagtatgctactatagggagagttgttgctgagaattaagaaatgatacagttaatgcaacaaaagatggaaaataatatttcagtcaatatgtcattgttttcttgactatgtctctcttctgggacatttagtagtgtttggtatgttttatgtgtctggtagaaaccatattttggttaacagcaagaaaaatgcttataatgtagtacaattaaaaacaacacatctccactaccagtgctaacccatttttaagtacatttgcatgtgggcaagaattgaaagtatacagataattgaacagaattgatttgttagataaggagattttgactgagttttatagtctgtttaatgttgctgtaataattattttaagaaacttttaaatattgtaagaggatatctagtttctctattctaccatcaaagaagcttttgagtaccacctgttaatgagctttcctattctaaattgttttgggtcacagagttccactttttccactcttattagcactgcaaaagctcctgagaatttaaaaacacagtaattctctggatgttaggacctaggggaacattgggcatttgaacatatcagggagggtccccattttagtgggaacaagtatttaaaccaatatttagagcaagtgtcctcatgtgataaacagagcacagtccaaagataccctctttctcaaggtagtcttttatctttataaagaaagattagtgtttaagagcgtagacttgagctagactacccaggttgaaaccccactagctgggtgatcttgaacatgctgcttagcttctctgtgccaaacttactgatatcctcatctgtaaattagcgataataatagtacttacctggtaggattatggtgagtattaaatgagtaaatggaaacagcttagaatagtgcctgacatatattatgttctctgtagttactggctgtgattattaataatattgccgcaccctaatatctgttatttaattgaaatctgcttgtgtgcttataagaatttactgagttctcacttcccttacagtcatacatggtttttcccttttgcctaaatcagaactcaacagcctgggaaaatcactgacaaatagtggatataggtttcatttctgaggatcaataaacagcttgtaatgttgtatacacatttattctgtttgtacaaaggttttccattctatggagaggatcccagtcttcagattctctggtaagttaataacccactctgttgtatatagggactgaccatgattctccattttctggcataatattagct

SEQ ID NO: 37963 - DNA, 3570 bp, Homo sapiens
ggcctcagactcacctctgacgccgctcttcgcgctccgctggtgaatggagtcgcgttctctgttttgctgttgctgctgcctttgtgacgggatcgctttctcccatcgaaccttctagttgcttattgcagctttgtctcctcagcactctgctgtcactcaaggaagtatcatcaagaacaaggagggcatggatgctaagtcactaactgcctggtcccggacactggtgaccttcaaggatgtatttgtggacttcaccagggaggagtggaagctgctggacactgctcagcagatcgtgtacagaaatgtgatgctggagaactataagaacctggtttccttgggttatcagcttactaagccagatgtgatcctccggttggagaagggagaagagccctggctggtggagagagaaattcaccaagagacccatcctgattcagagactgcatttgaaatcaaatcatcagtttccagcaggagcatttttaaagataagcaatcctgtgacattaaaatggaaggaatggcaaggaatgatctctggtatttgtcattagaagaagtctggaaatgtagagaccagttagacaagtatcaggaaaacccagagagacatttgaggcaagtggcattcacccaaaagaaagtacttactcaggagagagtctctgaaagtggtaaatatgggggaaactgtcttcttcctgctcagctagtactgagagagtatttccataaacgtgactcacatactaaaagtttaaaacatgatttagttcttaatggtcatcaggacagttgtgcaagtaacagtaatgaatgtggtcaaactttctgtcaaaacattcaccttattcagtttgcaagaactcacacaggtgataaatcctacaaatgccctgataatgacaactctcttactcatggttcatctcttggtatatcaaagggcatacatagagagaaaccctatgaatgtaaggaatgtggaaaattcttcagctggcgctctaatcttactaggcatcagcttattcatactggagaaaaaccctatgagtgtaaagaatgtggaaagtctttcagccggagttctcacctcattggacatcaaaagacccatactggtgaggaaccctatgaatgtaaagaatgtggaaaatccttcagctggttctctcaccttgttactcatcagagaactcatacaggagacaaactgtacacatgtaatcagtgtgggaaatcttttgttcatagctctaggcttattagacaccagaggacacatactggagagaaaccctatgaatgtcctgaatgtgggaaatctttcagacagagcacacatctcattctgcatcagagaacccatgtgagagtgaggccctatgaatgcaatgaatgtggaaagtcttacagccagagatctcaccttgttgtgcatcatagaattcacactggactaaaaccttttgagtgtaaggattgtggaaaatgttttagtcgaagctctcacctttattcacatcaaagaacccacactggagagaaaccatatgagtgtcatgattgtggaaaatctttcagccagagttctgcccttattgtgcatcagaggatacacactggagagaaaccatatgaatgctgtcagtgtgggaaagccttcatccggaagaatgacctcattaagcaccagagaattcatgttggagaagagacctataaatgtaatcaatgtggcattatcttcagccagaactctccatttatagttcatcaaatagctcacactggagagcagttcttaacatgcaatcaatgtgggacagcgcttgttaatacctctaaccttattggataccagacaaatcatattagagaaaatgcttactaataaatatgggaatttttcacaaagagcaatgactttattttgcattggagaactcctggagataagctgtacaaattgaatctatgtggaaatgctttcagtcttgttactatcctattgcacattagagaattggtcctggaagggaaagaaaccacagattttatttcagtacacaaatccatcagattttcttcttttcatgaattcctacagaagtaattggcctgagagcattcttgaccaagtcttaaatgctagaatctgagaaggaattattaaataggtgagttgttgagcgagaaccccttcatttgaaaagaaatgagtatgctactatagggagagttgttgctgagaattaagaaatgatacagttaatgcaacaaaagatggaaaataatatttcagtcaatatgtcattgttttcttgactatgtctctcttctgggacatttagtagtgtttggtatgttttatgtgtctggtagaaaccatattttggttaacagcaagaaaaatgcttataatgtagtacaattaaaaacaacacatctccactaccagtgctaacccatttttaagtacatttgcatgtgggcaagaattgaaagtatacagataattgaacagaattgatttgttagataaggagattttgactgagttttatagtctgtttaatgttgctgtaataattattttaagaaacttttaaatattgtaagaggatatctagtttctctattctaccatcaaagaagcttttgagtaccacctgttaatgagctttcctattctaaattgttttgggtcacagagttccactttttccactcttattagcactgcaaaagctcctgagaatttaaaaacacagtaattctctggatgttaggacctaggggaacattgggcatttgaacatatcagggagggtccccattttagtgggaacaagtatttaaaccaatatttagagcaagtgtcctcatgtgataaacagagcacagtccaaagataccctctttctcaaggtagtcttttatctttataaagaaagattagtgtttaagagcgtagacttgagctagactacccaggttgaaaccccactagctgggtgatcttgaacatgctgcttagcttctctgtgccaaacttactgatatcctcatctgtaaattagcgataataatagtacttacctggtaggattatggtgagtattaaatgagtaaatggaaacagcttagaatagtgcctgacatatattatgttctctgtagttactggctgtgattattaataatattgccgcaccctaatatctgttatttaattgaaatctgcttgtgtgcttataagaatttactgagttctcacttcccttacagtcatacatggtttttcccttttgcctaaatcagaactcaacagcctgggaaaatcactgacaaatagtggatataggtttcatttctgaggatcaataaacagcttgtaatgttgtatacacatttattctgtttgtacaaaggttttccattctatggagaggatcccagtcttcagattctctggtaagttaataacccactctgttgtatatagggactgaccatgattctccattttctggcataatattagct

SEQ ID NO: 37964 - DNA, 2195 bp, Homo sapiens
ggcctcagactcacctctgacgccgctcttcgcgctccgctggtgaatggagtcgcgttctctgttttgctgttgctgctgcctttgtgacgggatcgctttctcccatcgaaccttctagttgcttattgcaggtatatacgaaagtgctgaattttgtgtttgcatcgtcatcaggcgcgtgttgagccctttagtaatgtagcagtgtattagcttcgtatttctaggtagacggtaatttcgtcaatgaaaaaatttaacggtgatcgtcaccccttgcctcagtcactttctgtccctcgcgcggccccggcgttcacggcggacgttcttgttctgtggagaataacggctgcacctggagattgacgcagagtgggcggcggtggtgctttgtctcctcagcactctgctgtcactcaaggaagtatcatcaagaacaaggagggcatggatgctaagtcactaactgcctggtcccggacactggtgaccttcaaggatgtatttgtggacttcaccagggaggagtggaagctgctggacactgctcagcagatcgtgtacagaaatgtgatgctggagaactataagaacctggtttccttgggttatcagcttactaagccagatgtgatcctccggttggagaagggagaagagccctggctggtggagagagaaattcaccaagagacccatcctgattcagagactgcatttgaaatcaaatcatcagtttccagcaggagcatttttaaagataagcaatcctgtgacattaaaatggaaggaatggcaaggaatgatctctggtatttgtcattagaagaagtctggaaatgtagagaccagttagacaagtatcaggaaaacccagagagacatttgaggcaagtggcattcacccaaaagaaagtacttactcaggagagagtctctgaaagtggtaaatatgggggaaactgtcttcttcctgctcagctagtactgagagagtatttccataaacgtgactcacatactaaaagtttaaaacatgatttagttcttaatggtcatcaggacagttgtgcaagtaacagtaatgaatgtggtcaaactttctgtcaaaacattcaccttattcagtttgcaagaactcacacaggtgataaatcctacaaatgccctgataatgacaactctcttactcatggttcatctcttggtatatcaaagggcatacatagagagaaaccctatgaatgtaaggaatgtggaaaattcttcagctggcgctctaatcttactaggcatcagcttattcatactggagaaaaaccctatgagtgtaaagaatgtggaaagtctttcagccggagttctcacctcattggacatcaaaagacccatactggtgaggaaccctatgaatgtaaagaatgtggaaaatccttcagctggttctctcaccttgttactcatcagagaactcatacaggagacaaactgtacacatgtaatcagtgtgggaaatcttttgttcatagctctaggcttattagacaccagaggacacatactggagagaaaccctatgaatgtcctgaatgtgggaaatctttcagacagagcacacatctcattctgcatcagagaacccatgtgagagtgaggccctatgaatgcaatgaatgtggaaagtcttacagccagagatctcaccttgttgtgcatcatagaattcacactggactaaaaccttttgagtgtaaggattgtggaaaatgttttagtcgaagctctcacctttattcacatcaaagaacccacactggagagaaaccatatgagtgtcatgattgtggaaaatctttcagccagagttctgcccttattgtgcatcagaggatacacactggagagaaaccatatgaatgctgtcagtgtgggaaagccttcatccggaagaatgacctcattaagcaccagagaattcatgttggagaagagacctataaatgtaatcaatgtggcattatcttcagccagaactctccatttatagttcatcaaatagctcacactggagagcagttcttaacatgcaatcaatgtgggacagcgcttgttaatacctctaaccttattggataccagacaaatcatattagagaaaatgcttactaataaatatgggaatttttcac

SEQ ID NO: 37965 - DNA, 782 bp, Homo sapiens
gataccctctttctcaaggtagtcttttatctttataaagaaagattagtgtttaagagcgtagacttgagctagactacccaggttgaaaccccactagctgggtgatcttgaacatgctgcttagcttctctgtgccaaacttactgatatcctcatctgtaaattagcgataataatagtacttacctggtaggattatggtgagtattaaatgagtaaatggaaacagcttagaatagtgcctgacatatattatgttctctgtagttactggctgtgattattaataatattgccgcaccctaatatctgttatttaattgaaatctgcttgtgtgcttataagaatttactgagttctcacttcccttacagtcatacatggtttttcccttttgcctaaatcagaactcaacagcctgggaaaatcactgacaaatagtggatataggtttcatttctgaggatcaataaacagcttgtaatgttgtatacacatttattctgtttgtacaaaggttttccattctatggagaggatcccagtcttcagattctctggtaagttaataacccacaaaagattcaggaagaggatctattttaattttctctttcattctataaatcagtctgttgtatatagggactgaccatgattctccattttctggcataatattagctgctcaatgattgattgttgaatgaagatgaagtattgctgaagccaaccagagatcttgatctctctctgaggaaaaaacctagaaatgatg

SEQ ID NO: 37966 - DNA, 254 bp, Homo sapiens
gtccctcgcgcggccccggcgttcacggcggacgttcttgttctgtggagaataacggctgcacctggagattgacgcagagtgggcggcggtggtggtaagtttgaaccagatattttcagtaatacaaaataaggtttcttctagtctaacttccatttttccccccagctgggatagatgtttaaaattttgcatatggcctttctagtatttgttgaaatagtgacgccgattcgtgtgtggtcttttaa

SEQ ID NO: 37967 - DNA, 606 bp, Homo sapiens
aaactatagttgtaaaaataacaatagctaacaaaatttcatcaaaacttaaactctaatgtgtattcgcattcatttatttcatttgatcatcacattgactgtgtagaatattaggattaaatgtacgattaagatttctataccagtttttgaggtgtagtaacagagatccagtcatatagcaaatagcttgttctactaggattaaaatcttaaatatatgcgtaagagcttagtgcttgttcctttaaaatatgcctaatcttttaaatgattgatctgcattgatgtattggcaatcttttaatttgtcctaggtttcccaaaatttaacttgaatcggtcttaaccaatttcttatcagatgttaagaaaatttaaaaagaagggaaacatagatgatagaggaaaagcataggggatagccaagtttttttaataaagattaaaaaattgaataatggataacccttttaatcttttagttgtctgatgtgtttcaaactttttttaaaaagccaagtgacttatttaagaagatttgattgtcagaaaataaaagctgtacttttaaagagcttatatgtttctgaaaataatgat

SEQ ID NO: 37968 - DNA, 127 bp, Homo sapiens
caatttagggcaatgaaaaaggtcagaactatccaattcattctgtagcagttaggccacaaaatacttgtatggctttgatcatgtctttgatcttttctgagctgctttttccttctcaaataag

SEQ ID NO: 37969 - DNA, 258 bp, Homo sapiens
cccctgtctctacaataaaagtaaacaacttagctgggcataatggcatgtgcctgtagtcccagctactcaagaggtggagatgggaggatcacttgagcccaggagtttgaggctgcagtcagccgtgactgcaccaccatactccagcctgggtgacagagcgagatcttgtcttaaaacaaaacaaaacaaaacccagacttcctataattcctaaaaataaatgtgggtttgagaggcctaccttgaaatgta

SEQ ID NO: 37970 - DNA, 273 bp, Homo sapiens
acatgagataggagatatttttgtggtcatctttgaaaaatataatctgccacaggcagacacatccattcctaaaaacagaatggcaaaaatcactttaactctcagcccactggttaaagcctagtctcatggccccacttagctgcaaggacaacctatgagacatctttagctgagtgtctgcaggcccatcgcaagctctttgtttttaaaaatatttttatttataaatggattttttttgttgttatataacaaacctacatatgt

SEQ ID NO: 37971 - DNA, 406 bp, Homo sapiens
aagttttaacttgattctgaaggaagagtaggaaattacaaatgagttgtcaggaataaaaacaaagtcactaagcagaataaacaaaacatatgaaggtaataaattagaaaataaaagataataacatcaacaaaagtgaactcaacacacgatagtaatgagaatttcattatatctgcaaaatacagtatgatgaataggcaaggaatggagatgtcattataacttgagacaagattttaaaagtacttagttttaagagagccagtataaagttttattcctaaaactaataacatcaactttctctttatgatataaaaatatatgcttttaacaacttgccagctgctctgcctacgaagtagctattcttttattcctttgctttcttaatgaaaaa

SEQ ID NO: 37972 - DNA, 362 bp, Homo sapiens
tgagtatgtatgttcaaatttattgaaaacctatttttatgaattgcgaagtacaccaaatatggcattaatagaactacagccttaactacatgcttattgtcaggcctctgagcccaagctaaaccatcataatcccctgtgacctgcatgtatacatccagatggcctgaagcaagtgaagaatcacaaaagaagtggaaacggccggttcctgccttaactgatgacattgcgccattgtgatttgtttctgccccaccttaactgagcgattaaccttgtgaaattccttctcctggctcagaacctcccccactgagcaccttgggacccccacccctacccgcaagagaacaacc

SEQ ID NO: 37973 - DNA, 330 bp, Homo sapiens
gcagcctcccacaatggctgtgacattcatcctgttctgatagaaactccctgctttctgtgtggcctgggatttgaatctggaggtctttgatccttagcctctcccgtggctggttaccggatggaacggacctgatctttcatttcccaaagaaggcctattaccatcagaagcaaaccgcatccttgcttttatagcagttgcgcttgataattattggtgatactgacatctgcccatgcttacttcatattcatgagcctgaagtggaattttttttttaagctaacatccccagttttggggaatagagtatttcctccaaag

SEQ ID NO: 37974 - DNA, 432 bp, Homo sapiens
tcgtatatcctatgtctttttcactccatttacatgatctaaatgaaaagattttgtattagtatgtgtcactttgataacattaaatctcttttcattgtatgcgcagcctgtaaataatttagaactaatcttaaaaactggaaaaaggcagggcgtggtggctcacacctataatcccagcactttgggaggctgaggcaggcggatcacctgaggtcaggagttcgagatcagcctggccaacatggtgaaaccccgtctctactaaaaacacaaaaattagccgggcgtggtggcggacgcttgtaatcccagctactcgggaggctgaggtaggagaattgcttgaacccaggaggcagaggttgcagtgagccaagattgcgccactgcactccagcctgggtgtcagatcgagactcggtctca

SEQ ID NO: 37975 - DNA, 674 bp, Homo sapiens
ggtttaggacagtggttcttaaagcgtggtccgccagcaggtagcactggcattacctgagaacttgctagacatgcacattcttgagcaccacccctgacttactgaaccagcattctgctttagcatgacttgcaggtgattctgatgttggttcaagtttgagaaacactgggttaggaagtttatttgaggaatgagcccttgactagctagaccctctacagaaagggctggccttgccgtcctgatatgtcctccagtgaggaatccctcataccatcagatcaggatagagcctttctcttttacattgcaaaactctgaaaatgttacatgatagttatttctatcagtctagaaaggcccaaacaagctgacccatccaacctccccagtaacccccattggtgagtccttatggcaactgtctgtcttggaatttgcagatggtagaacatgaatcaaaagctccatattttgatagccgtggctgagaatcagcacatctccagaattcagcatcacagctggccagagaagagaagcagtgagttccctatccttggagacaagcagaggcttcagaatcactgatggggatgttgaggggaacacttagggaactgatggggctggttgagatggctgtagcccccctaactctgtgcgtc

SEQ ID NO: 37976 - DNA, 608 bp, Homo sapiens
gacgggctttgccaaggcgcacggcattcgggcctgtgctgcgcgctgtcagatgtccgaggcagatacctgtttcttcatgtgaatctgaatggcttgggtggacttagcacactgtgctgtctgctgtttctgtcgacgagaagccagagtggtgcttctctaaggagatgtcagaaaaatgtttttcctttttcccaggggggagaaattcaaggctggtttggcctatttttttttccttagtgatataaaatacactgaggccgcatcttttggtttatttgtttattttgtttggagccatccatgctggtatctaaatacaataggaaaacagatggcaaactttgaacttctggaccaaatttgtgtttgcctttgtctccttaacagccaaactgtaaattatggagtataaatattcaacagaggagctctttatggaaatcaccatagctgaatagactctgattaaccaaatatgcactgaaaagtacttggtaaacacttccgctccccctttccccaatccttttcaagttcccattatggactaaggttagagttctctttacagcatttatactttttctcttctcttacct

SEQ ID NO: 37977 - DNA, 478 bp, Homo sapiens
tacttctttttcactttcttaatggagtctttctttaaaaatttttttagaatatcttaaattcattccgttaacatggagtcttctgatgaacaaaagtgcttaattttaacataggatcaaatttaccaatctttttctttatggtgaagactgaattctgcctaagaatttttgcctgtccccaaggtcgtgaagatacaagttatcttctagaagcttgattattcagtctttcacatttaattgtataattcacctagaattggtttcgtatgtggtatgaggtaagagtcaagatttttttccttatttgaagtatccagttgacccagcaccatttattgaaaagatcatcctttcctactattctgtagtgccatctttgtcatatatcaagtgtctgtatatattttccaatctgtttgccgctcagaaacttaaaccctgcttaaatagttcttgggtcaaaaaaaaa

SEQ ID NO: 37978 - DNA, 338 bp, Homo sapiens
aagagaatgtggaatccgtgcagccacgagaagaaatgtaccaaacaacagggagaaataaaaagtgtcaaatgctgctgctaggccaaataaaaagatactcaagtaaccaccactgggcttagcaatgcagaggtcactggtgacattaaacaaagaagtttcggtagagcagtgtgaggtgaaagcaacttccgaatgttcggcaacatacgatacattttctgatctggttattgccaaccttgaattcaaaaattaaactaaaaatcatatatggctataaccatagcatagtgaatcagctactctctgacatcctaatcaaataggtaatt

SEQ ID NO: 37979 - DNA, 605 bp, Homo sapiens
atagaggacaattggtggtggcctctcccagccctatctagaggaatgaagcctgtgaaaacctcttagagacaagtcctctctccagctctggtcctcacctcaactccccctccaagggggtggcaggaaggataatttgtaaaatgtaaataaagtctgtagattagaaaatagtaggcatcaacgttaaacttcccaattctgataattgtgctatggtgtcctaagataatttccttagttttagcaggtatttagagttaaaagggcatgatgtttataacttactctcatatggtttgcaaatgacataataataatatgtatatatgcaaacaaacacatacagagaatgagaaaagaaatatggtaaaatgttaacaattggtgaatccaggtgaggggtatgggaattatttgcactattacaactttttggtaaacctgagattaatttagaacaaaatataaaaaggaatttataggtctgcctgaggagctcttccaagaaaacgtacaatttactcaaccttgaagacttagtggtcctttgccaccaattttatttttccacttcaactcttagaaacagaatccaactc

SEQ ID NO: 37980 - DNA, 853 bp, Homo sapiens
tcacagcccgccgggcggctctatggggggcccccccagttttagaaagttccaaagccccccaaaaaaaaaaaaaaaagttaacttgctgtatacctcagtgtaatgtccattcaaggagtattaaatgaggatttccctgcgaggacatttactgtattgctacttaaattatggaagacaatatatcttcaactttaataaaacctattcagaaaattaccaattcagaattcggagttcttatccaggtgctctaactaacttcagggaaattggaacaataagttatgttacatgcacactcaaattctttattttctccactttaagcaggaaagggtaaaaactgttttggtactcaagcccagccttacatactgtgtttctctctctgtctgcatgcatattaaagtggaaaaattgtatttatatcttagttattaccatagtacctatgaaccttatcaaaattgcttatttgactggtgttacagctgctattaatctaagtctattgtttttctattttagtagataatttagttttaaaatacgtagggtttgagagcagatatatttatttaatctgttttctctagtaactattgctgaagggttaggcattcagtattcctatttgtcctaattttgaagttaaaaattttggttacagatagatagagggagaaaagttcaaaatgagtgagagagaactttatgcaggttgagataatgcctaaaataatgagctggccagactgtggaggtactctttgtattttgtaacattgactttgggtaaatgctttttcactgttaataaatatatatcctgtatacaaaaaaaaat

SEQ ID NO: 37981 - DNA, 485 bp, Homo sapiens
taacagtaatcatagttatttttaaagtcctgtctcttgttctcatatgctgatctcctccagcttctcatctatggtctgttattttctcttagcttttggtcatatgattctctcacttcacattcctaggattttacgattttttttttcttttctttttttttaagatgacaccttcttctcctaagcagatagatagagtaaacggctggacaccttaatcttttcacagactcaagtgagctaagattggtgtgtagttttaatcacagtgtaccttggactcacctctgttctaagaatatgactttaaaattctctgttgagacccccacaggcaagagtctcttcaccactggggcttgcaggaaatttgttctgattcacagatctctttggttttgatctttagccttccattttgagattccttcacatttggcaaaggtcccaggtagcgacagtgtgtgggtttgatgttg

SEQ ID NO: 37982 - DNA, 425 bp, Homo sapiens
gcgatcaaagtcagtttccttcccttgcaaagcagcccctctgtttacttgtctgtctccctccctgagcgccttgctcagcgctgtctccccagggcctgcagtgtgctacatcaaagtcggggttccttcccttgtgggttgtgcccagtgcctgaaaacacagtgtcttcctgccaagtagagccttgtaagaacgtcccactgacctgcaaagtgtgtgggcgaaaaccttcccatcctccctcttaggccctggacttccctctgttacaacattagcattctgcacagtgattatttgtttgacttactcatatttgtagcctttcactggagaatttctatccaagtaattcagcctattttgccttctttgcacataagaacgtcaccatgctctagaccaagctaaagctttggct

SEQ ID NO: 37983 - DNA, 348 bp, Homo sapiens
acatgaaaaacattttcagtacccccttgttcacctaccaacatcgggaaataaaaccttctatttatgtccattttctagaagcaatgccataccaacttgatcatgagaagcattttttcctctaattggagatgtattaatttaactgttttggtgactaagtcatacccctctcaacttgagtgacagtgtttttttaaagctaaaaccagagatgtcctcaggggctgtcgaggcgtggtaacattttgcccctttgcagaatggcccgaggtgactgtgacttccagattcttgtacctactttaaaattttgtgtgtgtgttcttcctcctggacaaatct

SEQ ID NO: 37984 - DNA, 571 bp, Homo sapiens
tctgcaggccacaccccatggtctatgccttcccatcatcccctaaatataagctcactcagcctgtggacaaaagatctgaaagacctatgtccatggcagaatcaatggggactaatacctattatgaaaataaagggctccttctcttccaggaatcagcacttggaacaggggtcaacataatatccatcaattggtcaaccaacaaatgatttattgagaacccattgtgtgctcagcatttaactcaaagaatcaaaacacagacatcaagtatgggtttttagagagacatgggatatgtggtgaggggttctctcaaatcgtgttactgcaactactgtatttccaagcctacctttgggccctgaagcaatctatctgtagctgttcttgcactagctcctctttcccccacccctgatcccttggcctccagactgaatgtttggctcaacaagacaaaatgtttggctcctaagtctcagctggagacagattacattcaactgagcaacagaatttgttctatggggcagcaataaaaatactagtttgtaataacctt

SEQ ID NO: 37985 - DNA, 327 bp, Homo sapiens
cagtgcctgcttagggaggctggaccatggtgtgggtgtcctgagaccagtggtgtgccacgatcactgagataagatcctgagtacatggtaggatccaatcaggtacaaatttgctttgttgatcaaaagagtatcctagcctggcatggtggcatgcacctgtagtcccagctacttcgaaagctgaggcaggaggattgcttgagcccaggagttcagggctagcaacttagcaggaccttgtctctaacaacattttttttttaagaaagaatattccatgttggcttacagagaatttttaaaatcctgaatgatataaag

SEQ ID NO: 37986 - DNA, 235 bp, Homo sapiens
ggtacagtgataatacattcatataattgtaaagatcaaatcagtgtattgggggtatctgttaccttaaatatttgtctttatgctggaaacatttgaattactctcttctagctattttgaaatgtgcaatagaatattgtgaactatagtcatcttactgatctaacactaggtcttatttcttctattaagctgtgtatgtacattcattaatcagcttctatatacactt

SEQ ID NO: 37987 - DNA, 615 bp, Homo sapiens
ttgagaaagtgacctgtggattaagacctcagagataagtgggacagagcttggtagaagcaccagtgtgggcaaaggtcctgagtctgaacagaacatggcatgtgaggaatgaagcagcctggccctaggtgaagctgagaaaaccctgcaggcccttgtaagccatagagaaggctccgagacacaagctgagccatggtctactagtaagaacaataaaccagacatttactcaaagttaactatgtgccatgcacaattctaagacctttacatgtattaatttgaatcctcatggtattcttttgaaataaggacattttgggccagatgcagtggctgacgcctgtaatctcagcactttggggggccgaggtgggtggatcatttgaggtcaggagtttgagaccagcctgaccaacatggtgaaatccagtctctactaaaaatacaaaaaaattagccaggcatggtggtgcatgcctgtagtcccaattacttgggaggctgaggcagaagaatcacttgaacgtgggaggcagaggttgcagtgagccaagattgtgccactgcactccagcctgggcgacagagtgagactctgtctcaaaa

SEQ ID NO: 37988 - DNA, 416 bp, Homo sapiens
gtatgggtaatacaaaacaatctgattgatacacatcaagagtaattatccctagaggaaaagagagtggtgttagaggagggcagtatagttttactttttctctgtacaattctatattatatattataatttacaattacaattttgatagtaggtatgcagattactattatagcaaaatacaattactattttgatagtaggtatgcagattactaatattaaacatttgcacactggaggatgcttataataggattccttcattctacaacaacactctactgtaaatgtaattaatgccttgtactgaacactcaggtttttaaaaaaatgatgttttctgctatcgatgaagtattggtattttctaaatttttgacaccaaaaatataagtataaaaaagaataaa

SEQ ID NO: 37989 - DNA, 217 bp, Homo sapiens
aatgtttccatggcttctcattgccttaggatttaagttctttatgatccctatgatcttttccatttcgtatttgaatggatcacaatatttgcactgtgtgctattgttattttcagcatcaaatctgctaacgcaccatgctccctcttgcctctgagcatcattatgcctttccaaggccagggacatttttccatcagccactccctcttct

SEQ ID NO: 37990 - DNA, 447 bp, Homo sapiens
cgagccatgatcacaccaccgtactctagcttggatgacagagtgagaccctgtctcggtaggtaggtaggtaggtaggtaggtaggtaggtaggtaggtaggtagattatagatagatagatagatagatacagacaggcaataatttcatcaaaaaacaccctcacagaaacataataaggataatatttgaccaaatacctgggcactatggcccagccaaggtgacacacaaaattaaccgtcacatcatacagcccagcagttgcatcccttgccatttattccagagcagtgaaaacttttttccgtacaaaaacccttgcatgattgttcatagcagctttatttgtaattgctaacaattggaaaaactaacatgtccgtcagtaggtgagtggttcagcaaagcagtacacatttcctggagcactgctcccacatta

SEQ ID NO: 37991 - DNA, 180 bp, Homo sapiens
aatgaaatggcagtcgtagacataactgatgtgtaactgcacaccacctctccatccaccatcaaatgaaagaaagaaagagaatgaaaggaaaccagaagaaatatccaacagaaggaaaatagttaaccaaattatggctcagactagtttggtttaaccattgctcaaaaacaaaac

SEQ ID NO: 37992 - DNA, 498 bp, Homo sapiens
caccgcgcccagcctagaatatataggatctttagacgtgtttctttttagaggtaggaatgtagctaccacctagagcccactgagattcagctttcagaatctagagacatctcaggagccagggagccacatttcatctttcccttgaacagaacacaagatcagtggctttgcttcattctcattactctgtattagttaagcagtgccgccacatcactgtacaagcatgttttcaggaaggcatatgacgcactcctggtaagatggggcaggaagcactttggggctgggccttccaaccaggtgttcaggctgttcagggcccgcatgctgcaatgagaatttagcagtgactcctcatggagcaggaatatgatgcgcttaacgtattcttaaggacttctcagttttaattataagtttagtaatataagcagaatttaacatccagaattaaggctatttccatttccattctctacaaataaaaac

SEQ ID NO: 37993 - DNA, 649 bp, Homo sapiens
gcgcatgcctgtaatcccagctactcaggtggcatgtaccagtagtcccagctacttgggatgctgaggtggtaggattgtttgagcccagaaattcgagtccaacctgggcaacataaagagaccctgcctccaaataaaaataattaaaaaaaatcaaatatataaaatacctaatgaatgtgcaatgcagatgacttcagcagactccaattctactaggaaacttgtggagctaagatagtagttattcatttgtctctctttaatatctcaacacagtttagaaatcaaaagatgaggagcaatattaaatttggtattcaaaattaaggtttacattaatgctatcaaatgacttttattaatttaatacttatatgcttggtttttcatagatcaacttccctcttattattttaaatttttatagacttagagagtacaagtgaatttttgcttgtttctttggttggttggttggtttttttgagacaggatcttgccctgttgccaggctggagtgcagtgctggagtgcagggcttacagtaacttcgagctcccaggctcaagcaatcctctcaccttggcctcttgagtaggtgagaccacaagtgcacatcaccacacacagctaattgttaaaa

SEQ ID NO: 37994 - DNA, 381 bp, Homo sapiens
gcagctttggcaaaagtgatttgtttcttctccacttttaagtaggttcaggatgaagggaggccataaaacaaagtccacatcttcaaggtaaaaacctacttttaaaggaagcaggccaattagaaactccaaacacagcagttagagatgagagaggaagaatgaactcctcaaagcattgaaggtcaagactaaccttaggaattcaggtcacagccctcccagccccaatacatgaaggtcgttttgcagaaagactggccaatttcattaattgcctttgtgaggctttagaattttggagattatctgaaagagctttttaatctcaagtttggctgtggagcatacagatacaagctgattttcctatctttt

SEQ ID NO: 37995 - DNA, 317 bp, Homo sapiens
agaacactgtgaaaattttattccaatattacaaataaaaattgaagataagaatttaggtagctttctcaacatagtacacttggtagctagtagagatagaattcaaataaaaatgcaccacatattaaagactttactctttgctgaaatactactctgacttccttttgatttcacttgactttgcaatcacttattgaacttttattatgtacataacttgaagcttaggtatttactattgcttatgggcttcaaaaagtgccccaaattgtctaattcaacccaactttatttatcatccagtactttaa

SEQ ID NO: 37996 - DNA, 173 bp, Homo sapiens
tcaaggttctcttggaggagggtttgagtgtgacttgagggctgcctctgaattggccagtggacacaagagtaggggaaggatttggtgggaaacagcaggtcccttcatccctccgagcctcagtttacccccatctgtaaaatggaggaaatagtagtgcctgccttaca

SEQ ID NO: 37997 - DNA, 449 bp, Homo sapiens
gttcacaaccccaaagcaaaattttcgcatgcaaaaacatagcatcaaccttttggaaaagcttcccctgagttctcagcttttgtttctgttcataaaatcaaattaatctttttatggtaggtgggaatctcccatcaatggcattgatctggtcttaaagaaagaagcctgcaagtggccatctcctcacatacctgattcattctaactgcagatcagctgataagtggaaagtatgggcagcacaaaggaaatagaagaaatgattccacagaaatgtggtagattggctggtgaatcctagccaaaagaggcactgaaaaggggcttgggttaccacaatcatgtgtgataataagtaatctttttttttttttttttgacaagtctcactcagtcgcccaggccagagtgcagtggcgcaatcttggctcactgcaagctcc

SEQ ID NO: 37998 - DNA, 2178 bp, Homo sapiens
ccaaatccagttttcatatttaaagcgaatgagccccctcctctcagtgggaaagatgagctgaagctttactccctcgatagtgttgggaaaagaaatcagacaaaaatctaaggaaggaccaaatattgtacagagtgtgccagtagcttttgcaactggactgaaaatacctgccttttctctccacaggggaaagtggaagttgaagctgggaaagaaggtatgaagtttgaagcgagcgccttctcatactatggcgtgatggccctgacagcctctccaggtgaaaataagtcccctcctcgcccatgtggcttgaatcactcagactctctcagtcgaagcgaccggattgacgccgtcacaccaacactggggagcagcaataaccagctcaattcttcgctcctccaagtctacatccccgattactcggtgcgagccctttcggatctgcagtttgttaagatctcaagacagcaataccaaaatgccttgatggcatcccggatggacaaaaccccccagtcttcagacagtgaaaacactaaaatcgaattgactcttacggagctgcatgacgggttgccagacgagacagccaacctgctcaacgaacagaactgtgtgacgcacagtaaggccaaccacagcctgcacaacgaaggcgccatctaggccgcgctggctgcacccgcccaggcccgcacccgcccagtcccgagggcccggccctgtctgcccatgacttcactggtgtgagcttgtccgccatgctgtaccctgcaacatcctgagaccaaagaccttgtgcccttcccaggagccgcggaggaggacagtgagggaggaatggaaacgagagatgtgaagttggcagccggggcatggcgttcaagattttggagatgaactgattccgcccaaatagaatcatgtttattttttcagctctcccttttatcattattcacactcctctgccctcgatttgcatgaagttgaaaattgttgcgatttattttttcaagagatcatgtttttaaagtgtcttttgcagagttttaagttgttctgtctgaactctgctgtgatcccatgatgtgaccctgatgggctggacttgcccctccggtagccttccttggccctcccagcgaggggcacccttcctctgtgccccagtgggcatcaccgtcgatctcgctggctgaatgaagaagaccgtgttactgcagaacctgccaagtctgtcatcactgtggggtgtagcctgcctcagagggacctgcaatcacctctctgagctcagtggtattttgagaatttaatgtttaactgtacccctttccctcaggaagatttaacatttgcttgggaatgtgattttgctcccaccctaaggaatttttatcaccaaaatgaatgttaatgaatttaaaacccatggtttatcattggcaagaggcaagttgacttcatcctgtcattccagcctggggtctgccagccagccctcctccccgacccagcgcctaagctcacagagtgtcgtcgcccacctccctggtccttgctcttgttaacccaagatgctgctacacagatgccaaatggaaatcttccacagggctttttcagtaaacacgtgatgtggagtgcaagctcctccccttcccactagaacatactttaacagaaaacgagtcggaccttctagctgcactctgtactgtgtgccgagaaggcatttctagacccgtgtttttaaaggagggaactttggggattgccagcccctgctcctcctcccagggagccaactgtccctcctcccctgtccctgggcccatggggcccggcagtggctgtgtcccctgcctgagggctctgtgcctcctgcctcagatgcggcctgtgccagagaggctgcctgtacagccagggtcagtttggccccaaacagggattcagaaaccaaatgtgtgttgtggccattttatgtgtgtctccgtcttattttaataccaaattcatcatgtagtgaaattatgtcaggaggtatatgagtgactgaattcttaactatagcttatctgtgttttgttagcccgagggatatgtgcaggttgttggcgctattcatgcactgaaatgaaatcatactgaccagtg

SEQ ID NO: 37999 - DNA, 4232 bp, Homo sapiens
ctcccgcgagcctcggggttcctcagctggctgaggtggagtcagtgtcagtcagggaggcgaactgctgagcactggccgcggacgctccgttgcagtctcgcccaggggccggtacctgcgctcgcgccgccgggttgaaaggatgaagccgcagctggagcagccaccctatgattggctgtggcgcttgtgaacccaaagtaaagatggcgggcgggcaggcagccgccgcactgcccacttggaagatggcggcgcgccgcagcctcagcgctcgcggccgggggatcctgcaggcggctgcggggcggctgctgccgctgctcctgctgagctgctgctgcggtgcgggcggctgcgcagcggtgggcgagaatgaggagacggtgatcatcgggctgcgactggaggacacgaacgacgtgtcgttcatggaagggggggcgctgcgggtgagcgaacggacccgggtcaagctgcgggtgtacgggcagaacatcaataacgagacgtggtcccgcatcgccttcaccgagcacgagcggcggcgccacagcccgggggagcgcgggctggggggccccgcgccgccagagccggacagcggcccccagcgatgcggcatccgcacctcagacatcatcatcttgccccacatcattctcaaccgccgcacctcgggcatcatcgagatcgagatcaaaccgctacgcaagatggagaagagcaagtcctattacctgtgcacgtcgctctccacgcccgccctgggcgccggcggctcggggtccacgggtggcgccgtcgggggcaagggtggctcgggggtggccgggctcccgccgcccccgtgggccgagaccacctggatttaccacgacggcgaggacaccaagatgatcgtaggcgaagagaagaagttcctgctgcccttctggctgcaggtgatcttcatttcgctgctgctgtgcctgtcgggcatgttcagcggcctcaacctggggctcatggccctggacccgatggagctgcgcatcgtgcagaactgcggcacggagaaggagaagaattacgccaagcgcatcgagccggtgcgcaggcagggcaactacctgctgtgctcactgctgctgggcaacgtgctggtcaacaccacgctcaccatcctgctcgacgacatcgccggctcgggcctcgtggccgtggtagtctccaccatcggtatcgtcatcttcggagagatcgtgccccaggccatctgctcccggcatggcctggctgtgggggccaacaccatcttcctcaccaagtttttcatgatgatgaccttccccgcttcctacccggtcagcaagctgctggactgcgtcctgggccaggagataggcaccgtctataaccgggaaaaactgctggagatgctccgggtcaccgatccctacaacgacctcgttaaggaggagctgaacatcatccaaggggcgctggagctccgcaccaagacggtggaggacgtgatgaccccactccgggactgcttcatgatcaccggcgaagccatcctggacttcaacaccatgtctgagatcatggagagcggctacacccgcattccagtgtttgaaggggagcgctccaatatcgtggacctgctgtttgtcaaagacttggccttcgtggatcccgatgactgtacccccctgaaaaccatcaccaaattttataaccaccccttgcactttgttttcaatgacaccaagttggacgctatgctggaagaatttaagaaaggtaaatctcacctggctatcgtgcagcgggtaaacaatgagggagaaggggatccattttatgaagttctgggaatcgtcaccttagaagatgtgattgaagaaatcatcaaatctgagattcttgatgaaacagatttatacactgacaacagaacgaaaaagaaagtggctcaccgggaacgaaagcaagatttttctgcctttaagcagacagacagtgagatgaaggttaaaatatcaccacagctcctcctggccatgcaccgtttcctagcaacagaagtagaagcatttagcccatcccagatgtcagagaagatccttctaaggctgctaaagcaccccaatgtcatccaggaactgaaatatgatgagaagaacaagaaagcccccgaatactacctctaccagcgcaacaagccagtagactacttcgttctcattctgcaggggaaagtggaagttgaagctgggaaagaaggtatgaagtttgaagcgagcgccttctcatactatggcgtgatggccctgacagcctctccaggtgaaaataagtcccctcctcgcccatgtggcttgaatcactcagactctctcagtcgaagcgaccggattgacgccgtcacaccaacactggggagcagcaataaccagctcaattcttcgctcctccaagtctacatccccgattactcggtgcgagccctttcggatctgcagtttgttaagatctcaagacagcaataccaaaatgccttgatggcatcccggatggacaaaaccccccagtcttcagacagtgaaaacactaaaatcgaattgactcttacggagctgcatgacgggttgccagacgagacagccaacctgctcaacgaacagaactgtgtgacgcacagtaaggccaaccacagcctgcacaacgaaggcgccatctaggccgcgctggctgcacccgcccaggcccgcacccgcccagtcccgagggcccggccctgtctgcccatgacttcactggtgtgagcttgtccgccatgctgtaccctgcaacatcctgagaccaaagaccttgtgcccttcccaggagccgcggaggaggacagtgagggaggaatggaaacgagagatgtgaagttggcagccggggcatggcgttcaagattttggagatgaactgattccgcccaaatagaatcatgtttattttttcagctctcccttttatcattattcacactcctctgccctcgatttgcatgaagttgaaaattgttgcgatttattttttcaagagatcatgtttttaaagtgtcttttgcagagttttaagttgttctgtctgaactctgctgtgatcccatgatgtgaccctgatgggctggacttgcccctccggtagccttccttggccctcccagcgaggggcacccttcctctgtgccccagtgggcatcaccgtcgatctcgctggctgaatgaagaagaccgtgttactgcagaacctgccaagtctgtcatcactgtggggtgtagcctgcctcagagggacctgcaatcacctctctgagctcagtggtattttgagaatttaatgtttaactgtacccctttccctcaggaagatttaacatttgcttgggaatgtgattttgctcccaccctaaggaatttttatcaccaaaatgaatgttaatgaatttaaaacccatggtttatcattggcaagaggcaagttgacttcatcctgtcattccagcctggggtctgccagccagccctcctccccgacccagcgcctaagctcacagagtgtcgtcgcccacctccctggtccttgctcttgttaacccaagatgctgctacacagatgccaaatggaaatcttccacagggctttttcagtaaacacgtgatgtggagtgcaagctcctccccttcccactagaacatactttaacagaaaacgagtcggaccttctagctgcactctgtactgtgtgccgagaaggcatttctagacccgtgtttttaaaggagggaactttggggattgccagcccctgctcctcctcccagggagccaactgtccctcctcccctgtccctgggcccatggggcccggcagtggctgtgtcccctgcctgagggctctgtgcctcctgcctcagatgcggcctgtgccagagaggctgcctgtacagccagggtcagtttggccccaaacagggattcagaaaccaaatgtgtgttgtggccattttatgtgtgtctccgtcttattttaataccaaattcatcatgtagtgaaattatgtcaggaggtatatgagtgactgaattcttaactatagcttatctgtgttttgttagcccgagggatatgtgcaggttgttggcgctattcatgcactgaaatgaaatcatactgaccagtg

SEQ ID NO: 38000 - DNA, 4298 bp, Homo sapiens
ctcccgcgagcctcggggttcctcagctggctgaggtggagtcagtgtcagtcagggaggcgaactgctgagcactggccgcggacgctccgttgcagtctcgcccaggggccggtacctgcgctcgcgccgccgggttgaaaggatgaagccgcagctggagcagccaccctatgattggctgtggcgcttgtgaacccaaagtaaagatggcgggcgggcaggcagccgccgcactgcccacttggaagatggcggcgcgccgcagcctcagcgctcgcggccgggggatcctgcaggcggctgcggggcggctgctgccgctgctcctgctgagctgctgctgcggtgcgggcggctgcgcagcggtgggcgagaatgaggagacggtgatcatcgggctgcgactggaggacacgaacgacgtgtcgttcatggaagggggggcgctgcgggtgagcgaacggacccgggtcaagctgcgggtgtacgggcagaacatcaataacgagacgtggtcccgcatcgccttcaccgagcacgagcggcggcgccacagcccgggggagcgcgggctggggggccccgcgccgccagagccggacagcggcccccagcgatgcggcatccgcacctcagacatcatcatcttgccccacatcattctcaaccgccgcacctcgggcatcatcgagatcgagatcaaaccgctacgcaagatggagaagagcaagtcctattacctgtgcacgtcgctctccacgcccgccctgggcgccggcggctcggggtccacgggtggcgccgtcgggggcaagggtggctcgggggtggccgggctcccgccgcccccgtgggccgagaccacctggatttaccacgacggcgaggacaccaagatgatcgtaggcgaagagaagaagttcctgctgcccttctggctgcaggtgatcttcatttcgctgctgctgtgcctgtcgggcatgttcagcggcctcaacctggggctcatggccctggacccgatggagctgcgcatcgtgcagaactgcggcacggagaaggagaagaattacgccaagcgcatcgagccggtgcgcaggcagggcaactacctgctgtgctcactgctgctgggcaacgtgctggtcaacaccacgctcaccatcctgctcgacgacatcgccggctcgggcctcgtggccgtggtagtctccaccatcggtatcgtcatcttcggagagatcgtgccccaggccatctgctcccggcatggcctggctgtgggggccaacaccatcttcctcaccaagtttttcatgatgatgaccttccccgcttcctacccggtcagcaagctgctggactgcgtcctgggccaggagataggcaccgtctataaccgggaaaaactgctggagatgctccgggtcaccgatccctacaacgacctcgttaaggaggagctgaacatcatccaaggggcgctggagctccgcaccaagacggtggaggacgtgatgaccccactccgggactgcttcatgatcaccggcgaagccatcctggacttcaacaccatgtctgagatcatggagagcggctacacccgcattccagtgtttgaaggggagcgctccaatatcgtggacctgctgtttgtcaaagacttggccttcgtggatcccgatgactgtacccccctgaaaaccatcaccaaattttataaccaccccttgcactttgttttcaatgacaccaagttggacgctatgctggaagaatttaagaaaggtaaatctcacctggctatcgtgcagcgggtaaacaatgagggagaaggggatccattttatgaagttctgggaatcgtcaccttagaagatgtgattgaagaaatcatcaaatctgagattcttgatgaaacagatttatacactgacaacagaacgaaaaagaaagtggctcaccgggaacgaaagcaagatttttctgcctttaagcagacagacagtgagatgaaggttaaaatatcaccacagctcctcctggccatgcaccgtttcctagcaacagaagtagaagcatttagcccatcccagatgtcagagaagatccttctaaggctgctaaagcaccccaatgtcatccaggaactgaaatatgatgagaagaacaagaaagcccccgaatactacctctaccagcgcaacaagccagtagactacttcgttctcattctgcaggggaaagtggaagttgaagctgggaaagaaggtatgaagtttgaagcgagcgccttctcatactatggcgtgatggccctgacagcctctccagttcctttgtccctgtctcgtacctttgttgtcagcagaacagagttgttagcagcaggttctccaggtgaaaataagtcccctcctcgcccatgtggcttgaatcactcagactctctcagtcgaagcgaccggattgacgccgtcacaccaacactggggagcagcaataaccagctcaattcttcgctcctccaagtctacatccccgattactcggtgcgagccctttcggatctgcagtttgttaagatctcaagacagcaataccaaaatgccttgatggcatcccggatggacaaaaccccccagtcttcagacagtgaaaacactaaaatcgaattgactcttacggagctgcatgacgggttgccagacgagacagccaacctgctcaacgaacagaactgtgtgacgcacagtaaggccaaccacagcctgcacaacgaaggcgccatctaggccgcgctggctgcacccgcccaggcccgcacccgcccagtcccgagggcccggccctgtctgcccatgacttcactggtgtgagcttgtccgccatgctgtaccctgcaacatcctgagaccaaagaccttgtgcccttcccaggagccgcggaggaggacagtgagggaggaatggaaacgagagatgtgaagttggcagccggggcatggcgttcaagattttggagatgaactgattccgcccaaatagaatcatgtttattttttcagctctcccttttatcattattcacactcctctgccctcgatttgcatgaagttgaaaattgttgcgatttattttttcaagagatcatgtttttaaagtgtcttttgcagagttttaagttgttctgtctgaactctgctgtgatcccatgatgtgaccctgatgggctggacttgcccctccggtagccttccttggccctcccagcgaggggcacccttcctctgtgccccagtgggcatcaccgtcgatctcgctggctgaatgaagaagaccgtgttactgcagaacctgccaagtctgtcatcactgtggggtgtagcctgcctcagagggacctgcaatcacctctctgagctcagtggtattttgagaatttaatgtttaactgtacccctttccctcaggaagatttaacatttgcttgggaatgtgattttgctcccaccctaaggaatttttatcaccaaaatgaatgttaatgaatttaaaacccatggtttatcattggcaagaggcaagttgacttcatcctgtcattccagcctggggtctgccagccagccctcctccccgacccagcgcctaagctcacagagtgtcgtcgcccacctccctggtccttgctcttgttaacccaagatgctgctacacagatgccaaatggaaatcttccacagggctttttcagtaaacacgtgatgtggagtgcaagctcctccccttcccactagaacatactttaacagaaaacgagtcggaccttctagctgcactctgtactgtgtgccgagaaggcatttctagacccgtgtttttaaaggagggaactttggggattgccagcccctgctcctcctcccagggagccaactgtccctcctcccctgtccctgggcccatggggcccggcagtggctgtgtcccctgcctgagggctctgtgcctcctgcctcagatgcggcctgtgccagagaggctgcctgtacagccagggtcagtttggccccaaacagggattcagaaaccaaatgtgtgttgtggccattttatgtgtgtctccgtcttattttaataccaaattcatcatgtagtgaaattatgtcaggaggtatatgagtgactgaattcttaactatagcttatctgtgttttgttagcccgagggatatgtgcaggttgttggcgctattcatgcactgaaatgaaatcatactgaccagtg

SEQ ID NO: 38001 - DNA, 1817 bp, Homo sapiens
ctcccgcgagcctcggggttcctcagctggctgaggtggagtcagtgtcagtcagggaggcgaactgctgagcactggccgcggacgctccgttgcagtctcgcccaggggccggtacctgcgctcgcgccgccgggttgaaaggatgaagccgcagctggagcagccaccctatgattggctgtggcgcttgtgaacccaaagtaaagatggcgggcgggcaggcagccgccgcactgcccacttggaagatggcggcgcgccgcagcctcagcgctcgcggccgggggatcctgcaggcggctgcggggcggctgctgccgctgctcctgctgagctgctgctgcggtgcgggcggctgcgcagcggtgggcgagaatgaggagacggtgatcatcgggctgcgactggaggacacgaacgacgtgtcgttcatggaagggggggcgctgcgggtgagcgaacggacccgggtcaagctgcgggtgtacgggcagaacatcaataacgagacgtggtcccgcatcgccttcaccgagcacgagcggcggcgccacagcccgggggagcgcgggctggggggccccgcgccgccagagccggacagcggcccccagcgatgcggcatccgcacctcagacatcatcatcttgccccacatcattctcaaccgccgcacctcgggcatcatcgagatcgagatcaaaccgctacgcaagatggagaagagcaagtcctattacctgtgcacgtcgctctccacgcccgccctgggcgccggcggctcggggtccacgggtggcgccgtcgggggcaagggtggctcgggggtggccgggctcccgccgcccccgtgggccgagaccacctggatttaccacgacggcgaggacaccaagatgatcgtaggcgaagagaagaagttcctgctgcccttctggctgcaggtgatcttcatttcgctgctgctgtgcctgtcgggcatgttcagcggcctcaacctggggctcatggccctggacccgatggagctgcgcatcgtgcagaactgcggcacggagaaggagaagaattacgccaagcgcatcgagccggtgcgcaggcagggcaactacctgctgtgctcactgctgctgggcaacgtgctggtcaacaccacgctcaccatcctgctcgacgacatcgccggctcgggcctcgtggccgtggtagtctccaccatcggtatcgtcatcttcggagagatcgtgccccaggccatctgctcccggcatggcctggctgtgggggccaacaccatcttcctcaccaagtttttcatgatgatgaccttccccgcttcctacccggtcagcaagctgctggactgcgtcctgggccaggagataggcaccgtctataaccgggaaaaactgctggagatgctccgggtcaccgatccctacaacgacctcgttaaggaggagctgaacatcatccaaggggcgctggagctccgcaccaagacggtggaggacgtgatgaccccactccgggactgcttcatgatcaccggcgaagccatcctggacttcaacaccatgtctgagatcatggagagcggctacacccgcattccagtgtttgaaggggagcgctccaatatcgtggacctgctgtttgtcaaagacttggccttcgtggatcccgatgactgtacccccctgaaaaccatcaccaaattttataaccaccccttgcactttgttttcaatgacaccaagttggacgctatgctggaagaatttaagaaaggtgggaaattttggtctctttca

SEQ ID NO: 38002 - DNA, 2059 bp, Homo sapiens
ctcccgcgagcctcggggttcctcagctggctgaggtggagtcagtgtcagtcagggaggcgaactgctgagcactggccgcggacgctccgttgcagtctcgcccaggggccggtacctgcgctcgcgccgccgggttgaaaggatgaagccgcagctggagcagccaccctatgattggctgtggcgcttgtgaacccaaagtaaagatggcgggcgggcaggcagccgccgcactgcccacttggaagatggcggcgcgccgcagcctcagcgctcgcggccgggggatcctgcaggcggctgcggggcggctgctgccgctgctcctgctgagctgctgctgcggtgcgggcggctgcgcagcggtgggcgagaatgaggagacggtgatcatcgggctgcgactggaggacacgaacgacgtgtcgttcatggaagggggggcgctgcgggtgagcgaacggacccgggtcaagctgcgggtgtacgggcagaacatcaataacgagacgtggtcccgcatcgccttcaccgagcacgagcggcggcgccacagcccgggggagcgcgggctggggggccccgcgccgccagagccggacagcggcccccagcgatgcggcatccgcacctcagacatcatcatcttgccccacatcattctcaaccgccgcacctcgggcatcatcgagatcgagatcaaaccgctacgcaagatggagaagagcaagtcctattacctgtgcacgtcgctctccacgcccgccctgggcgccggcggctcggggtccacgggtggcgccgtcgggggcaagggtggctcgggggtggccgggctcccgccgcccccgtgggccgagaccacctggatttaccacgacggcgaggacaccaagatgatcgtaggcgaagagaagaagttcctgctgcccttctggctgcaggtgatcttcatttcgctgctgctgtgcctgtcgggcatgttcagcggcctcaacctggggctcatggccctggacccgatggagctgcgcatcgtgcagaactgcggcacggagaaggagaagaattacgccaagcgcatcgagccggtgcgcaggcagggcaactacctgctgtgctcactgctgctgggcaacgtgctggtcaacaccacgctcaccatcctgctcgacgacatcgccggctcgggcctcgtggccgtggtagtctccaccatcggtatcgtcatcttcggagagatcgtgccccaggccatctgctcccggcatggcctggctgtgggggccaacaccatcttcctcaccaagtttttcatgatgatgaccttccccgcttcctacccggtcagcaagctgctggactgcgtcctgggccaggagataggcaccgtctataaccgggaaaaactgctggagatgctccgggtcaccgatccctacaacgacctcgttaaggaggagctgaacatcatccaaggggcgctggagctccgcaccaagacggtggaggacgtgatgaccccactccgggactgcttcatgatcaccggcgaagccatcctggacttcaacaccatgtctgagatcatggagagcggctacacccgcattccagtgtttgaaggggagcgctccaatatcgtggacctgctgtttgtcaaagacttggccttcgtggatcccgatgactgtacccccctgaaaaccatcaccaaattttataaccaccccttgcactttgttttcaatgacaccaagttggacgctatgctggaagaatttaagaaaggtaaatctcacctggctatcgtgcagcgggtaaacaatgagggagaaggggatccattttatgaagttctgggaatcgtcaccttagaagatgtgattgaagaaatcatcaaatctgagattcttgatgaaacagatttatacagtaagtagcattgtctgagtgtatttcccgaaacctttgctttttttgttgtgctgtttgtgagtcttctgacgtttctccagttgctgcctctgtttataatgacacatgatgtgtgtag

SEQ ID NO: 38003 - DNA, 636 bp, Homo sapiens
ccatatcacatataacatgtcattcagaaaattcagaaagtcacttcctaaactttttcttgtctctaaaggtaaatctcacctggctatcgtgcagcgggtaaacaatgagggagaaggggatccattttatgaagttctgggaatcgtcaccttagaagatgtgattgaagaaatcatcaaatctgagattcttgatgaaacagatttatacagtaagtagcattgtctgagtgtatttcccgaaacctttgctttttttgttgtgctgtttgtgagtcttctgacgtttctccagttgctgcctctgtttataatgacacatgatgtgtgtaggccgtgcacaacctgttggtatattccagtccttttatcagaaggagcagaccctgtaatgtcaagcgacagcattcttctgaacagccagctgcttctaaccactgatgagggcattacttgccctaaacagaaaactgctgttggttttaaattttattttacatatgtaaaaaaatctctactaaaatttcattttatacaactaggtatattgttttcagataaacttctgtttgtacttttcataactcaagtactctttaaagtgaatgggaggccgggcgtggtggctcacgt

SEQ ID NO: 38004 - DNA, 335 bp, Homo sapiens
ttttttttaatagagatggggtcttactatgttgcctaggctggtctcaagcgatcatctggcctagggttcccaaagtgctgggattacaggtgtgagccactgcacccagaccctgagaacctgctatgctggtatgttctataaaaataaaggcaaagccactaaaaattattagatatagatagatagatagatagtagggcagaaaattacttgctgactcataagaaatctgactttcaggctttatagagctttctggtctgcttacggtagaaccactgctcagttttctgtctttctgtttaggtttactagcaatatctcttgta

SEQ ID NO: 38005 - DNA, 460 bp, Homo sapiens
gtcttcacaagagcctgtaactctctctcccaccccagctagcaggtgaggccaggcagcaaaaacccctccatgggagggggctgcaaactgtgcctgtgggaacagtgcgtatgagactgccctcacttcagagagaggccatgaatttggggttcccagactagattgtaagtcattagagtgacttacagaactcagagaagcacctcatttacagtcacacttttactctaacaaatgcatgaaggctggaactaacccacgaagagacacacagggtgaggtctgggaaggtcccaaatgtgaagcttctgtgtcctcagagtgtgtcaccccacagggcacgtcaccccgcaacacatcagtgtgtgttgccaaccgggaaagcacccctgagtctctgtgtccagagttcgtagtgaggctgcattacagaggcatggctgggggagcactg

SEQ ID NO: 38006 - DNA, 348 bp, Homo sapiens
tctgtgcccttggccaggtgctacttactgacattagttaatcttgctgagtctctattctcttatcagtgggatgtgactaataatagtaattgcctcacagagttgtgaagaatcaataaagtagtgtatgtgaatggctcagtgcagagcctggcgcctgagtacatgctcaggagttattcactattaatgtttttgttgtgtttgtgttctgacatgttttcaagatttataatttagttgtgtttctgtgatatgtaaacaggaagtagaggagggatattataaagaggagcttgggcacagcttcacctaccccaccatgaccccagttcacccacggaa

SEQ ID NO: 38007 - DNA, 730 bp, Homo sapiens
attgtaaaatagggtagtaacagtgagtcctgggggaggacgtgttctgttagccagatccactctccaacctgctgtctgtcctttggagccttaactcaagagactttctttccctctagcttccagttgagtgaaggcactaggaagcaacagcgatggaacaaagaggaaggagtatggttatttattcccccctggctcccttactatggcgccattgcaggctggttgcctccctcaaccaaaggaagcagccagtatccctccctagggtgacccagagtaaacccctatggtttcccttcattttgcacatacctttgcagatagtctttttataaaactctactcacattatccagtaggaatgaacatctcattccttcacagaattgttttgagagttaactgagaaaatactgtattattattattagaatgacctataatttctgtccaaactgagaaacttttgaggctgggaaaagggggtttgtgctgatagtaatgatgtcaggacaataggaaaaacaaggacttatggccaccccagctattattgccagtaaactctgctttagacatattaagcaatcaagaagtggtcgtactatcacgcttctgtcactagactgtgaatgtctcaaggtaagagtgcttttttgtctattagcttctgtcacatggtctggtatattcaataaattttgagttggagatgagggta

SEQ ID NO: 38008 - DNA, 1017 bp, Homo sapiens
gacagggtctctctctgtcacccaggctggagtgcagtgacgcaatctcagctcactgtaacctctacccccagcttcaggcaattctcctacctcagcctcccaagaagctgggattacaggcacatgccaccacacctggctaatttttatatttttagtagtagagacaaagtcttaatatgttgcccaggctagtcttgaactccctggcttgaacaataaatcatatggtcatcctacctcatagagttactaagataaagtaagctaatacacacaaagcatttttaagagtatctggcatatggtaagagttcagttagtattagttcttgttcatgttagtcactgtcagtgactttttatagattttgaactgtataatgaacagtgcgtcccacaatattccttcttataaataaaatgatgcatttaatgtcccacattaaattctttcaaacaactaagcagcactaactgcttgaaatcaacactaaccaatttatcccacagcaatagcagtatcaacagcattcacattgtatcacgaattttaatagaggccatattagagttactaacaggaaagtgacagtgaaaagtaaaactttatttagtgccaaaccaagtcccttaatattctagcagcctttctcaaccagtgttcctcatgttaactacagaactcagaaaatgacttgactacagaactcagaaaatgacttcagtgactattcctgaagtctcccaagaatgatacctaactaatatctttctagatgtgcaggggagaaactaatttataatatacaatggatgcctcggggaataattctgtcatggaacaccagttcttggttttcttggaatacaaagggggaaatatggatgaaaagactcctcaatgaacaaagagtctgagtataagactgctgttcatcacctgggaaaaaagtatttcctacatgttaaagcttaaaggaatgatcaatataaacatataaatttgactca

SEQ ID NO: 38009 - DNA, 791 bp, Homo sapiens
gacagggtctctctctgtcacccaggctggagtgcagtgacgcaatctcagctcactgtaacctctacccccagcttcaggcaattctcctacctcagcctcccaagaagctgggattacaggcacatgccaccacacctggctaatttttatatttttagtagtagagacaaagtcttaatatgttgcccaggctagtcttgaactccctggcttgaacaataaatcatatggtcatcctacctcatagagttactaagataaagtaagctaatacacacaaagcatttttaagagtatctggcatatggtaagagttcagttagtattagttcttgttcatgttagtcactgtcagtgactttttatagattttgaactgtataatgaacagtgcgtcccacaatattccttcttataaataaaatgatgcatttaatgtcccacattaaattctttcaaacaactaagcagcactaactgcttgaaatcaacactaaccaatttatcccacagcaatagcagtatcaacagcattcacattgtatcacgaattttaatagaggccatattagagttactaacaggaaagtgacagtgaaaagcaactttcctgagggccacctaagttaaaacaaaactctaagataacgacatctgagtttgtctcccgtatgtattattcaggttccctttaccattttcttaggcagaaatgtggatcgtagaaatttttactgagaagacagtagaaagaagatgaatacttatgtgactagggagaagtgtta

SEQ ID NO: 38010 - DNA, 312 bp, Homo sapiens
gaggcatggttggtcatgcatctgtagttccagctacttgggagactgaggcaggaggattacttgagcccaggaagtcaagattgcagtcagccatgattgcaccactgcactccagcctgggcaatagagtgagaccctgttaatgaaaaaaaaaaaaaaaaaaaaaaaaaaaaaaaaggagttctggagatatgtgctagtgatgactcacgctaatgtgaatgtacttaatgccacagaaccgtacacttaaaaatggttagtgttctgtgtattgtactatataaataaacacaaaatggtgaatca

SEQ ID NO: 38011 - DNA, 286 bp, Homo sapiens
tcagaattgctaataattagcaaaatggaccaatgtaagttccatttccataaataaaagtatgattagggcaacagcttcttattaagggcagaagaaaagagctcctgcttgccatgtgtcaccctctgctcggagttccatattctcacctgacttggtttttcatggcagcatgcagtgctagtaagtagatgatttcatagacgagatgagctgagctggcacaggcacataacgtgcccagacattttgaagctgggattgggatcctggcctgactgca

SEQ ID NO: 38012 - DNA, 571 bp, Homo sapiens
actccttgtgatttttaggtctgcttctccaaagcatggattcaccattatgaataggctgagcatggaaaataggacagaacctattactaaagacttggatttccaactccaggaccctttccttctctacagaaatgccagattgtccatctatggaatttggttttatgataaggaagaatgccaaagaattgcagagcttatgaaaaacctaactcagtatgaacagttgaaagcccatacagagcccggagccctccgtgatcaccagcagcccactcaccaagctccagctccaggaggcactgctgtacctcattcagaatgatgacaacttcttaaatataatctatgaagcctatctcttcagcatgactcaagcagccatgaaaaagactatgtgacagcaaggccttttaaaactgattttcaaggtccttctagaactccggcacaaggttctttcatgttgagtgttgtttccttcaatgtttctgccttttttaaaaaaaaagtatgtgtaatatgaagtaaaatgtttcagacttttttttataaaaaaaaaaat

SEQ ID NO: 38013 - DNA, 695 bp, Homo sapiens
catattttattttatgtttccgtattttataatgattttcatttattttaccatgtttaataatcacaattttgtggagtagacattttcattgccattttgcagatgaggaaactgagactccagtgaggaggcagactgtgtaaaaacccacagattctgatttcacttccgttgctttttccacaccacctgtactgctctactattaaacatggatgcaaattaaaggtagcctttgggatgcatattaaaatgtttctaatgaatttccatacaaaagaaatagaatcagttgaacaacaaagagtgaaagggaatggatctatttacttttctggattcattttgcctttttttttttttttttgtcctttctatctgatactgattgcctttgcacccagagtcatttggttttatgttgtttgcaaaagccttttcaatcccgggcatcaaaggtacacagaagggtttaccacaggtgctgtcagagtctcagatacctcttaaacgttttaatagaattcaaatatgttatataataattatgtatggtttacatgttctttggtggcatatagattggttggcctttctttgggcaaggaactcagctttactcaggattgtttttgtaagactatttcctcaagatattctgtatagtcaagaatctctctgtctggtctttg

SEQ ID NO: 38014 - DNA, 2101 bp, Homo sapiens
tgcgaggcagctcgctcgttctgcgatctattgagagtggcttccaagagccccgtgcctatgtctgggagggagggaagatggcagccgtggcggcaggcggcctggtgggaaaggggcgcgacatcagcctagcggccctgcagcgccacgacccctatatcaaccgcatcgtggacgtggccagccaggtggctctgtacaccttcggccatcgggccaacgagtgggagaaaactgatgtggaaggaaccttatttgtttatacaaggtctgcttctccaaagcatggattcaccattatgaataggctgagcatggaaaataggacagaacctattactaaagacttggatttccaactccaggaccctttccttctctacagaaatgccagattgtccatctatggaatttggttttatgataaggaagaatgccaaagaattgcagagcttatgaaaaacctaactcagtatgaacagttgaaagcccatcagggaactggagcaggaatttccccagtgatcctcaattcaggagagggcaaagaagtagacattttacgaatgctcatcaaggccaaagacgaatacacaaagtgtaaaacctgttctgagccaaaaaagataaccagttcctctgccatctatgacaatccaaatctcatcaaaccaattccagtgaaacccagtgaaaaccagcaacagcgtatacctcagcccaaccagaccttagaccctgaaccccaacacttatccttgacagctctgtttgggaagcaggacaaagctacatgtcaggaaactgtggagcctccgcagactctccaccagcagcagcagcagcagcagcagcagcagcaagagaagcttccaattaggcagggggttgtacgctccctgtcctatgaggaacccagaagacactcaccccccattgagaagcagctctgtccagccattcagaaactcatggtcaggagcgcagacctccacccattgtcagagctgcctgaaaaccggccttgtgaaaatggcagtacccattctgcgggagaattttttacaggacctgtccagccagggtctcctcacaacattggaacttctcgtggtgtacaaaatgcttccagaactcagaacctgttcgagaaacttcagagtaccccaggggcagcaaacaagtgtgaccctagtacaccagcacctgccagctcagctgccctgaaccgcagcagagctcccacttctgtcacccctgtggctccaggaaagggtctggctcagccaccacaggcctatttcaatggctcccttccacctcagacagtaggacatcaggctcatggaagagaacagtccacactcccaagacaaacactccccatctctggtagtcagactggcagctctggagtgatctcccctcaagagttactgaagaagcttcagattgtacagcaggagcagcagctgcatgcctctaaccggccagccttggccgctaagtttcctgtgctcgctcagagctctggaacagggaaacccttggaatcctggatcaacaagacacccaacacagaacagcagactcctcttttccaggtcatctcacctcagcgcatccctgctacagcagctccgtctctgcttatgtcccccatggtgttcgcacaacccacctccgtcccgccaaaggaaagggagagcggcctcttgcctgtgggaggccaggagccacctgctgctgccaccagcctcctcctgcccatacagagcccggagccctccgtgatcaccagcagcccactcaccaagctccagctccaggaggcactgctgtacctcattcagaatgatgacaacttcttaaatataatctatgaagcctatctcttcagcatgactcaagcagccatgaaaaagactatgtgacagcaaggccttttaaaactgattttcaaggtccttctagaactccggcacaaggttctttcatgttgagtgttgtttccttcaatgtttctgccttttttaaaaaaaaagtatgtgtaatatgaagtaaaatgtttcagacttttttttataaaaaaaaaaat

SEQ ID NO: 38015 - DNA, 1697 bp, Homo sapiens
agagcatcctttagaatgcactgtgtgaggagttggcaaactcttctcaaagggaccagagacctaactcagtatgaacagttgaaagcccatcagggaactggagcaggaatttccccagtgatcctcaattcaggagagggcaaagaagtagacattttacgaatgctcatcaaggccaaagacgaatacacaaagtgtaaaacctgttctgagccaaaaaagataaccagttcctctgccatctatgacaatccaaatctcatcaaaccaattccagtgaaacccagtgaaaaccagcaacagcgtatacctcagcccaaccagaccttagaccctgaaccccaacacttatccttgacagctctgtttgggaagcaggacaaagctacatgtcaggaaactgtggagcctccgcagactctccaccagcagcagcagcagcagcagcagcagcagcaagagaagcttccaattaggcagggggttgtacgctccctgtcctatgaggaacccagaagacactcaccccccattgagaagcagctctgtccagccattcagaaactcatggtcaggagcgcagacctccacccattgtcagagctgcctgaaaaccggccttgtgaaaatggcagtacccattctgcgggagaattttttacaggacctgtccagccagggtctcctcacaacattggaacttctcgtggtgtacaaaatgcttccagaactcagaacctgttcgagaaacttcagagtaccccaggggcagcaaacaagtgtgaccctagtacaccagcacctgccagctcagctgccctgaaccgcagcagagctcccacttctgtcacccctgtggctccaggaaagggtctggctcagccaccacaggcctatttcaatggctcccttccacctcagacagtaggacatcaggctcatggaagagaacagtccacactcccaagacaaacactccccatctctggtagtcagactggcagctctggagtgatctcccctcaagagttactgaagaagcttcagattgtacagcaggagcagcagctgcatgcctctaaccggccagccttggccgctaagtttcctgtgctcgctcagagctctggaacagggaaacccttggaatcctggatcaacaagacacccaacacagaacagcagactcctcttttccaggtcatctcacctcagcgcatccctgctacagcagctccgtctctgcttatgtcccccatggtgttcgcacaacccacctccgtcccgccaaaggaaagggagagcggcctcttgcctgtgggaggccaggagccacctgctgctgccaccagcctcctcctgcccatacagagcccggagccctccgtgatcaccagcagcccactcaccaagctccagctccaggaggcactgctgtacctcattcagaatgatgacaacttcttaaatataatctatgaagcctatctcttcagcatgactcaagcagccatgaaaaagactatgtgacagcaaggccttttaaaactgattttcaaggtccttctagaactccggcacaaggttctttcatgttgagtgttgtttccttcaatgtttctgccttttttaaaaaaaaagtatgtgtaatatgaagtaaaatgtttcagacttttttttataaaaaaaaaaat

SEQ ID NO: 38016 - DNA, 1933 bp, Homo sapiens
catattttattttatgtttccgtattttataatgattttcatttattttaccatgtttaataatcacaattttgtggagtagacattttcattgccattttgcagatgaggaaactgagactccagtgaggaggcagactgtgtaaaaacccacagattctgatttcacttccgttgctttttccacaccacctgtactgctctactattaaacatggatgcaaattaaagtgtccatctatggaatttggttttatgataaggaagaatgccaaagaattgcagagcttatgaaaaacctaactcagtatgaacagttgaaagcccatcagggaactggagcaggaatttccccagtgatcctcaattcaggagagggcaaagaagtagacattttacgaatgctcatcaaggccaaagacgaatacacaaagtgtaaaacctgttctgagccaaaaaagataaccagttcctctgccatctatgacaatccaaatctcatcaaaccaattccagtgaaacccagtgaaaaccagcaacagcgtatacctcagcccaaccagaccttagaccctgaaccccaacacttatccttgacagctctgtttgggaagcaggacaaagctacatgtcaggaaactgtggagcctccgcagactctccaccagcagcagcagcagcagcagcagcagcagcaagagaagcttccaattaggcagggggttgtacgctccctgtcctatgaggaacccagaagacactcaccccccattgagaagcagctctgtccagccattcagaaactcatggtcaggagcgcagacctccacccattgtcagagctgcctgaaaaccggccttgtgaaaatggcagtacccattctgcgggagaattttttacaggacctgtccagccagggtctcctcacaacattggaacttctcgtggtgtacaaaatgcttccagaactcagaacctgttcgagaaacttcagagtaccccaggggcagcaaacaagtgtgaccctagtacaccagcacctgccagctcagctgccctgaaccgcagcagagctcccacttctgtcacccctgtggctccaggaaagggtctggctcagccaccacaggcctatttcaatggctcccttccacctcagacagtaggacatcaggctcatggaagagaacagtccacactcccaagacaaacactccccatctctggtagtcagactggcagctctggagtgatctcccctcaagagttactgaagaagcttcagattgtacagcaggagcagcagctgcatgcctctaaccggccagccttggccgctaagtttcctgtgctcgctcagagctctggaacagggaaacccttggaatcctggatcaacaagacacccaacacagaacagcagactcctcttttccaggtcatctcacctcagcgcatccctgctacagcagctccgtctctgcttatgtcccccatggtgttcgcacaacccacctccgtcccgccaaaggaaagggagagcggcctcttgcctgtgggaggccaggagccacctgctgctgccaccagcctcctcctgcccatacagagcccggagccctccgtgatcaccagcagcccactcaccaagctccagctccaggaggcactgctgtacctcattcagaatgatgacaacttcttaaatataatctatgaagcctatctcttcagcatgactcaagcagccatgaaaaagactatgtgacagcaaggccttttaaaactgattttcaaggtccttctagaactccggcacaaggttctttcatgttgagtgttgtttccttcaatgtttctgccttttttaaaaaaaaagtatgtgtaatatgaagtaaaatgtttcagacttttttttataaaaaaaaaaat

SEQ ID NO: 38017 - DNA, 2027 bp, Homo sapiens
tgcgaggcagctcgctcgttctgcgatctattgagagtggcttccaagagccccgtgcctatgtctgggagggagggaagatggcagccgtggcggcaggcggcctggtgggaaaggggcgcgacatcagcctagcggccctgcagcgccacgacccctatatcaaccgcatcgtggacgtggccagccaggtggctctgtacaccttcggccatcgggccaacgagtgggagaaaactgatgtggaaggaaccttatttgtttatacaaggtctgcttctccaaagcatggattcaccattatgaataggctgagcatggaaaataggacagaacctattactaaagacttggatttccaactccaggaccctttccttctctacagaaatgccagattgtccatctatggaatttggttttatgataaggaagaatgccaaagaattgcagagcttatgaaaaacctaactcagtatgaacagttgaaagcccatcagggaactggagcaggaatttccccagtgatcctcaattcaggagagggcaaagaagtagacattttacgaatgctcatcaaggccaaagacgaatacacaaagtgtaaaacctgttctgagccaaaaaagataaccagttcctctgccatctatgacaatccaaatctcatcaaaccaattccagtgaaacccagtgaaaaccagcaacagcgtatacctcagcccaaccagaccttagaccctgaaccccaacacttatccttgacagctctgtttgggaagcaggacaaagctacatgtcaggaaactgtggagcctccgcagactctccaccagcagcagcagcagcagcagcagcagcagcaagagaagcttccaattaggcagggggttgtacgctccctgtcctatgaggaacccagaagacactcaccccccattgagaagcagctctgtccagccattcagaaactcatggtcaggagcgcagacctccacccattgtcagagctgcctgaaaaccggccttgtgaaaatggcagtacccattctgcgggagaattttttacaggacctgtccagccagggtctcctcacaacattggaacttctcgtggtgtacaaaatgcttccagaactcagaacctgttcgagaaacttcagagtaccccaggggcagcaaacaagtgtgaccctagtacaccagcacctgccagctcagctgccctgaaccgcagcagagctcccacttctgtcacccctgtggctccaggaaagggtctggctcagccaccacaggcctatttcaatggctcccttccacctcagacagtaggacatcaggctcatggaagagaacagtccacactcccaagacaaacactccccatctctggtagtcagactggcagctctggagtgatctcccctcaagagttactgaagaagcttcagattgtacagcaggagcagcagctgcatgcctctaaccggccagccttggccgctaagtttcctgtgctcgctcagagctctggaacagggaaacccttggaatcctggatcaacaagacacccaacacagaacagcagactcctcttttccaggtcatctcacctcagcgcatccctgctacagcagctccgtctctgcttatgtcccccatggtgttcgcacaacccacctccgtcccgccaaaggaaagggagagcggcctcttgcctgtgggaggccaggagccacctgctgctgccaccagcctcctcctgcccatacagagcccggagccctccgtgatcaccagcagcccactcaccaagctccagctccaggaggcactgctgtacctcattcagtatgtgacagcaaggccttttaaaactgattttcaaggtccttctagaactccggcacaaggttctttcatgttgagtgttgtttccttcaatgtttctgccttttttaaaaaaaaagtatgtgtaatatgaagtaaaatgtttcagacttttttttataaaaaaaaaaat

SEQ ID NO: 38018 - DNA, 1710 bp, Homo sapiens
tgcgaggcagctcgctcgttctgcgatctattgagagtggcttccaagagccccgtgcctatgtctgggagggagggaagatggcagccgtggcggcaggcggcctggtgggaaaggggcgcgacatcagcctagcggccctgcagcgccacgacccctatatcaaccgcatcgtggacgtggccagccaggtggctctgtacaccttcggccatcgggccaacgagtgggagaaaactgatgtggaaggaaccttatttgtttatacaaggtctgcttctccaaagcatggattcaccattatgaataggctgagcatggaaaataggacagaacctattactaaagacttggatttccaactccaggaccctttccttctctacagaaatgccagattgtccatctatggaatttggttttatgataaggaagaatgccaaagaattgcagagcttatgaaaaacctaactcagtatgaacagttgaaagcccatcagggaactggagcaggaatttccccagtgatcctcaattcaggagagggcaaagaagtagacattttacgaatgctcatcaaggccaaagacgaatacacaaagtgtaaaacctgttctgagccaaaaaagataaccagttcctctgccatctatgacaatccaaatctcatcaaaccaattccagtgaaacccagtgaaaaccagcaacagcgtatacctcagcccaaccagaccttagaccctgaaccccaacacttatccttgacagctctgtttgggaagcaggacaaagctacatgtcaggaaactgtggagcctccgcagactctccaccagcagcagcagcagcagcagcagcagcagcaagagaagcttccaattaggcagggggttgtacgctccctgtcctatgaggaacccagaagacactcaccccccattgagaagcagctctgtccagccattcagaaactcatggtcaggagcgcagacctccacccattgtcagagctgcctgaaaaccggccttgtgaaaatggcagtacccattctgcgggagaattttttacaggacctgtccagccagggtctcctcacaacattggaacttctcgtggtgtacaaaatgcttccagaactcagaacctgttcgagaaacttcagagtaccccaggggcagcaaacaagtgtgaccctagtacaccagcacctgccagctcagctgccctgaaccgcagcagagctcccacttctgtcacccctgtggctccaggaaagggtctggctcagccaccacaggcctatttcaatggctcccttccacctcagacagtaggacatcaggctcatggaagagaacagtccacactcccaagacaaacactccccatctctggtagtcagactggcagctctggagtgatctcccctcaagagttactgaagaagcttcagattgtacagcaaatgatgacaacttcttaaatataatctatgaagcctatctcttcagcatgactcaagcagccatgaaaaagactatgtgacagcaaggccttttaaaactgattttcaaggtccttctagaactccggcacaaggttctttcatgttgagtgttgtttccttcaatgtttctgccttttttaaaaaaaaagtatgtgtaatatgaagtaaaatgtttcagacttttttttataaaaaaaaaaat

SEQ ID NO: 38019 - DNA, 394 bp, Homo sapiens
aaagggtctggctcagccaccacaggcctatttcaatggctcccttccacctcagacagtaggacatcaggctcatggaagagaacagtccacactcccaagacaaacactccccatctctggtagtcagactggcagctctggagtgatctcccctcaagagttactgaagaagcttcagattgtacagcaggagcagcagctgcatgcctctaaccggccagccttggccgctaagtttcctgtgctcgctcagagctctggaacagggaaacccttggaatcctggatcaacaagacacccaacacagaacagcagactcctcttttccaggtaaatatgtaccaggggcaaaataaaacagcctgggcagcatagcaagatcctgtccct

SEQ ID NO: 38020 - DNA, 457 bp, Homo sapiens
cccacctcctggaagagggctggcggcatcttggactaaaggtcacgttggcttcctgggaatgctggcacacctgtgggctgccaaggccactcccaaggggctgtgagttttgactgtgctggcacacacacccctcacgtgcacacagtgggtgccccagaaaacatgacagtggcactcctgtcactacccagaccccagggcagggtgcacaaagccttgatttagagatgccacctggaaagccacagccccaatccattcctgtcaatccaaacctattggaaataagacatgggactcagcacttagcagcatcctcatcagaccttctggtaaatggaaggatttttctttaacacatgggttttctgatgtcattttgcttacagtggactgatcagggccactgaaggatgagagagagaatacatggcaggaacaacgatttcaa

SEQ ID NO: 38021 - DNA, 201 bp, Homo sapiens
ttagtacaggcctccttcagaacactggctcttccttggttcaaatttaaggacatggattataaaataatggctgaaaacttatctacttcaacctgttgatagatatatcaaatacttaggaagctcttgaatttaaaataagaaatcataatattttaaaatgctatccaaactgatagggacctatttgatctcctt

SEQ ID NO: 38022 - DNA, 447 bp, Homo sapiens
ggaaaattcttagcgttctataccccagcatcttaccttagggttaaatctaggtctaaccaggctgtgcaggttgactaagaaggaataatgaaacgacagagtttcatggagaaaccatggagatgtctgaatagctgataagcagttaacacactgacccaagcttggagggaaaccatttccccctccatcctgtgagatctctttcttgctccagtgcaacagttggccacagcatggcaggccttcctgtagggtgcctgacaattccctagatgcctctttaaaatcagaagctgcgcactgccccacccagtcacagccaaagggaaaacataaataaaaggctgtagtctcaggcttgtggttatggaaagagcctggaattgacaggagaggaagcactgccaaagtgaggatcttatttatccttcttgctttccc

SEQ ID NO: 38023 - DNA, 316 bp, Homo sapiens
gtcaagattgtgccactgcactccagcctgggtgacagagcaagactccgtctcaaaaaaaaaaaaaaaaattaaattgacagtaaggtttaatgaaatcttaaaggtctttgcatctttgggattattcacttaaatactatagaaggttattgtagttatctttagtactatgttattttaggaggcctgtgtttaaattttacaattcattaacaggactgatggcattttgtaggaactacttaggaacaagtttgcatttctgaaagtaaggaaaagctgtcacttaatactattatccccctcccccctg

SEQ ID NO: 38024 - DNA, 308 bp, Homo sapiens
tggtagagatgaggttttgccatgttgcccaggctggtctcaaactgctgggctcaggcaattcttccatttcagcttccttcttgatacttatgctctgtggcaaatattttctcccaatctggcacttgtcttttacccttgttttcaatgttctttgctgagcatattttattagacacagtttattttacttatctttaccttttgtgttagttatcttgtttaagaaacacatccatggccgggtgcggtggctcatgcctgtaatcccagcactttgggaggccgaggtgggcagattgcct

SEQ ID NO: 38025 - DNA, 1371 bp, Homo sapiens
gagagagtggggacgtccggcttcggagcgggagtgttcgttgtgccagcgactaaaaagagaattaaatatgggtgatgttgagaaaggcaagaagatttttattatgaagtgttcccagtgccacaccgttgaaaagggaggcaagcacaagactgggccaaatctccatggtctctttgggcggaagacaggtcaggcccctggatactcttacacagccgccaataagaacaaaggcatcatctggggagaggatacactgatggagtatttggagaatcccaagaagtacatccctggaacaaaaatgatctttgtcggcattaagaagaaggaagaaagggcagacttaatagcttatctcaaaaaagctactaatgagtaataattggccactgccttatttattacaaaacagaaatgtctcatgacttttttatgtgtaccatcctttaatagatctcatacaccagaattcagatcatgaatgactgacagaatattttgttgggcagtcctgatttaaaactaagactggcttgtggttaaatgaatatgttcagtttttgaatttaatagtaactccaattcagtaaatggtatcactgtttaccccttttaaagatatgattagactcgtacgaagtgcactctcccaacgatgggggcctcttaaattacgggcacggccacatagcagataccggctcgcgaacttctcaaacgcgcaacggcacgttcccaaacacgaaagaactcggcagggcacgactacgtcccaagagggcgaacaacagtatcatcacggcgacgaatcaaatcgcacagagatcccacagcgcgtcgacaaacacacctactgtctatttctttctgctcaccttcatcttcacgcgcgatcgcaacagcacaacagaactaatcggcgacacaacacacaacataccacacagcgcacggaagagacgcgagagaagaagaagaacagccgcgcaggcgagagcggcgaggagagcgaggaaacacacagagcgaaagaacgagaacgagagcggaccaggaacagaggacgagcgaacaggaagcaagccagaagaggagcaagggagaggaaaacgcgaacgggacgagaaataaagacagagagcggcgacgatagagagagcgagcgcgacagcgagaaggccgaagaaaggtagcgagaagcagaggacagccggagcgacgagaacccgaggagggagcgaacacgagcgacgaagaggcagacaggacgccacacgagacgagaagcaagagaggcaagacacaacgccgccaccaggcggacagcaagacacagcaggaggagaaaaagcgacaaaacga

SEQ ID NO: 38026 - DNA, 727 bp, Homo sapiens
gatttatagagctgttcggatttgcggctccggaccggtagtgtacttagtgtcatcagtatatgtagcacgaatgagatctgggtgatgtcgagagctggaatactatatcaataatagaacgtcgtgcccagtgccagagcgttcgtagaaagggaatcgccagagtgcaatactgggccaaatctccatggtctctttgggcggaagacaggtcaggcccctggatactcttacacagccgccaataagaacaaaggcatcatctggggagaggatacactgatggagtatttggagaatcccaagaagtacatccctggaacaaaaatgatctttgtcggcattaagaagaaggaagaaagggcagacttaatagcttatctcaaaaaagctactaatgagtaataattggccactgccttatttattacaaaacagaaatgtctcatgacttttttatgtgtaccatcctttaatagatctcatacaccagaattcagatcatgaatgactgacagaatattttgttgggcagtcctgatttaaaactaagactggcttgtggttaaatgaatatgttcagtttttgaatttaatagtaactccaattcagtaaatggtatcactgtttaccccttttaaagatatgattagacttcgttagtaatgttcaacttttcacaaagatggtgagtgccatcttaaaacttactggagattggtt

SEQ ID NO: 38027 - DNA, 654 bp, Homo sapiens
gagagagtggggacgtccggcttcggagcgggagtgttcgttgtgccagcgactaaaaagagaattaaatatgggtgatgttgagaaaggcaagaagatttttattatgaagtgttcccagtgccacaccgttgaaaagggaggcaagcacaagactgggccaaatctccatggtctctttgggcggaagacaggtcaggcccctggatactcttacacagccgccaataagaacaaaggcatcatctggggagaggatacactgatggagtatttggagaatcccaagaagtacatccctggaacaaaaatgatctttgtcggcattaagaagaaggaagaaagggcagacttaatagcttatctcaaaaaagctactaatgagtaataattggccactgccttatttattacaaaacagaaatgtctcatgacttttttatgtgtaccatcctttaatagatctcatacaccagaattcagatcatgaatgactgacagaatattttgttgggcagtcctgatttaataactccaattcagtaaatggtatcactgtttaccccttttaaagatatgattagacttcgttagtaatgttcaacttttcacaaagatggtgagtgccatcttaaaacttactggagattggtt

SEQ ID NO: 38028 - DNA, 368 bp, Homo sapiens
tctcaaacttttgacctcaggtgatccacccacctcggcctcccaaagtgctgggattacagtggctcatgccataatcccaactctttgggaggctgaggcagcaggattgcttgaaatcaagagttcaagaccaagcctgggcaacatagtgagaaccccgtctctacaaaaaaatatttttaaaattagctgggcatggtaactgacacatacctgtagtctgacctacttgggaggccgagccaggaggatcatttgagcccggaagctccacgttacagtgaactgtgatcataccactgtagcctaggtggcagagcaagaccctgtctctaaaaataataataaataataataaaagtgaa

SEQ ID NO: 38029 - DNA, 551 bp, Homo sapiens
gaaatgacaggtctggggttcctacctgctccccttactgctgaagtgctgtactgtgtgtctggagtgaaggttttgttttgctctgaatcttaggattggatgagacccatctaatttactgtttagaggaaggagctgcgcatcacccactaactaggagtcagtgggaacccctactcaagactcctgcctcttaatcctgtgtttcactccattactccaggcttcaggaatgaacagtctacctcagcttaatacattccagagctcaaatgcaaactaactttcagtgttatgactttcattcctgaagggaaaatgtaggagctgggtagtaatacactggaacttaaaaatgggcttagtaaggagttaagccagcatctcactgttgttattttgtactttagttaactagttgtgagtttctgtgaggtacaaatagatttatcttcatattagagaacatggttaatgacattttaccacttttaaactggagaggtgagagatttggctcagaattacaaataagatgcaaaaaaaaa

SEQ ID NO: 38030 - DNA, 345 bp, Homo sapiens
tttctttttctctcattttagcataaatttgttcacagtattttcctttatcctttaaatatctgtagtaataaattttgttttctgtatttcttggtcaatctagctaaaggtatatcagtattattaaccttttcaaaatatcaactcttggtattttctaagaacaaggatattctcctacaggtaatcataatggcattatctcacccaagaaatttaaaactgatatgataatcttgtccaatcttcagtccatattcacatttccctaattgtccacaaatgtccttcaaagttgtctttattcagttgagaatccaagcaaagaccatgcattgttgc

SEQ ID NO: 38031 - DNA, 918 bp, Homo sapiens
ttagtgtggctgtcagagggagcagagctaaatatgtgacttcagtgtttagtttttcaaagtaaagtggaatgttctttgcagaactgagaatttagacttttcagtttttccccatagtttgcatttgcctatctatatatagatagaagtatgtatatgtatatctttatgtatacatatctatatatacatatatgtgtagctatatgtctaagacatagatatatagatatacatacatttacatatgtatatgtacatagatatatatatctaagtcctatcttggctttctctaagtcctatcttgactataaatatatatttataaatatatatttaacatgtatatctgtatctatatacatttctaagtcctgtcttgactttcctattttttcaattgttttggcatcacttatttaagcttcagcttctaggtacctcagttttctcttgagctggaaggcactaataaagcttctccagtatttacccagaagagagattcagtgtcattcagtcatttgggcaaccactttgtaaaactaccattgtgtatatgacatatttctccactgtgagaagaaaacacaaaagaagtagagcttagcgtgaagaatgtatagtttcttaggcaaagtagcgttttactctcttttaacaagaaagttctttaagttttttaggggaaagtaacattgtaaattgttgatttttgttacttcatttgttgacttggtagtgctattctttgacctcttttttatctcatgtttattcataacgttttctctttatcatgcaccttcatgaaataggaaatcactttcaaaaagaaaaaaagcactcacttttgtaacttctcactaagcttttgaatcccatggtcagattcaggtgaaaaaagagaaa

SEQ ID NO: 38032 - DNA, 173 bp, Homo sapiens
actgtccgcttgctgggaagctcaacgttcatctccccacttagcaaatgcatcccgattacgtgtccacaggcctgctgagacaggaggagcaaacaggtgacctgggccctcagcaactgacggtgtagtggcacgtcccaagaaatccctgcacatccctgggaggggca

SEQ ID NO: 38033 - DNA, 481 bp, Homo sapiens
agagagaatgagggaataacatctaacattctattttgtgccatgcactcatttaaatattttatggccatttaagtgcatttaagctttgtgttgacctctaagttaaggaattattgtgagccctactttgcagatgaaaaagcagaggtcgacgaggttaagtaaaatgttcaagactacacaactaggactccgggggaactagaattgaacccgggcagcctgactgctacagtgtccccagaaagccaaggaaagagtgaaacaggccgagagaggagattcaggctgtgactcttgagagaagcagacatccacggtccgtcttgcccgggtccccctcgaagtcaaaatcagccatgtgagcagtctttcccgactcagagaccccaaatcctcaccacacattagcaggatattgatcattcactgaacacattggggcaagacagggatccacgcataatggaaataattt

SEQ ID NO: 38034 - DNA, 416 bp, Homo sapiens
gtgcaagtcgttggattttaggaaattcacggatgagtgagcccatcaccactgtgaatctcaggaagcttccatccccccaagaggaaaccccacccctgttggcagtcacttcccctttccccctctcccctccccagatgcctgctctggccatcgtcagtgatggggtggcaccgcacgtggactgagagggaagccttgtctcagttctttgcctctcctgctggagatgagcccctcccctcccacctgtgctgtgtccagtgcccactccgggcctcctgccacggaggagctttctgcactgtcaagtcacccagtccaccgagaaaggtaaaagctcttttatccacgaatgtagccgggtgcagtggtgcacaactgtaatcccagctactcagaaggctcaggca

SEQ ID NO: 38035 - DNA, 373 bp, Homo sapiens
aggaggctgcagttcctagaagccccccttaagcccacccttcggtttatttgatgggtaaaggtagtttgatacttgagctttttttggagtgaagcttatgtctgaggaaaccaccagagagaagagaaaatcctgcacaggaactcttggaaagggattgcaccataacggctagcgctgtggcatttaatctcctctgattgccctctcactgtgcatgcatcagtcaatattttagcagctccgcaaataaatggacttgaatgccatcttctacataaagcagaggttgaagggctcccctgaacctcctggctgcctgtcagtggtgtaggttttcggtgcacttactccagtcctgatcactcat

SEQ ID NO: 38036 - DNA, 441 bp, Homo sapiens
tgctcttctccttccagataaataacgctgacccaccaccctccatgcagcccctcttggaagaagagtcataaaaatatggcaggcaaaagcatctgtaaaaggatgacaggatgacataatgccaggaaaatttacaatcgatttagcagacagaggtggctgtcagtctgggggctctccagagttcaagcatgcccataaaagaactcaacaacccaaagactctactgcgaggaagagatctccctgcaaatccacctgtcactggtgagcagaaattccctgagggagcgggaactggtgtatctgtgtctggaacagccaaggatggaaagaggaagacccctggagtggacaaaggggacttctccagtgatttagggctctggatctccccccagcaaaagtccttctggtgccctaggggtcttgaaaaag

SEQ ID NO: 38037 - DNA, 385 bp, Homo sapiens
aatggcagagagggaggggagaagggagagttaccccgctatggagggcagccccaagcctccaccccagggagagagctggaggttccctgtcccagagatgacaggaaccaaactagagctgcctctgttcctaacagtgcagaggcctccctcctctgcagaaagtgttcccttggggcccaaagcaaggggcctgggaggtggcatagaggcagggaatcagcatgggtgtccaagagaggaaagagcggaggctgcggagtcccagacctgctgctcactagccgtgtgactgggagagttactttactcccctaagcctgttttcttgcttaaaattttcaggtaagtctgcttcacaggagtggcatgatgcaatgag

SEQ ID NO: 38038 - DNA, 383 bp, Homo sapiens
ttttttttgagacaggctagagtacagtggtgtgatcatagttgacagcagcctcagcctcctggactcaaggattctcctgcctcagcctcccgattagctgggactacaggtgcacactaccacgcccagctaatttttttgtacgttttgaagagaaagggtttcaccatgttgcttaggctggtcttgaactcctggactcaagcgatcctcccaccttgggctcccaaagtgctgggattacaggtgtgagccaccatacccaggcaaatttcttaagtaccataagtttacttctaagatcttacaagttactataaatagatctatatctattattatttactcctgcgtatgtacttgcactgactctgactcca

SEQ ID NO: 38039 - DNA, 839 bp, Homo sapiens
aatattccaataacatttacatagggcaaataaaatacttgaaagaattctgaaacaattgtacctggggtggatggcctctcagggtttcttctggctttatgacttcatagtttaaagaactttttttttaagtagttacatcagatgcaggtactccattagttagggctgcactctgaaaattcaaattattattatgagctcttaaatactatttaactctggaagagatatgccagaataaagccaaaagaccatcacccctataatggagaaattgatctgcctattcttttcaaagcctatcttactaatgtttggatcttttaaaatcatcttatcatcagtataattcttgagtatgttaggtccttctttaaggataaaattgcacaagcacaggacaccatgatttgtgtgtgtatatatatatatatatatcctagtgtgttcagctttaagctttgcaatcccttaggacactgatgtgggatgaatggattcgctaggcccacacagtaactcacctgtagacctgctgaacctcagcatgtatgacagttcacacaggttaatactgaatgtaaacgaaaaactagaagacaattgttataattttttttggctgtaatttatgcaattgctttttgtgatttttagaaaatggggcacccgtgttattactgtaaaatgttcttaaccaaaatttggtgaatttcactagtctacctcacattttgttaatgattcaaaattgtcttgtgtctactgttatatttttgtcctttgatttaatttgcttaatgtattaaagttatctcccaccccctccaaaa

SEQ ID NO: 38040 - DNA, 230 bp, Homo sapiens
cttattagcatactgatatgtttcagtacacatttcatggatttatggctaaggatgttactttcaagaaggtaactatacatcgctctctactagcatgctgttctgttcctgagaaatagtggctgggcgaagggtatgcaaacatttcttaatatctcatccaataccattttcccactactaattattcaacacatggaaatgtaggtcaaagcattaaaaaaaaa

SEQ ID NO: 38041 - DNA, 173 bp, Homo sapiens
ttcttttctgtgttcccattgcagtccaatttcttgttcctgactttctagtaccaaccgcaatgtaaaactatttgtgctccactgcaagccgagcaccatagattttatgggactgacatactttttttttatttaaaattcttgctttgtggggtgactgctttttgacc

SEQ ID NO: 38042 - DNA, 137 bp, Homo sapiens
caaattatctgtaatcttgtacagtgttacaagaaaaagaatcaggaaagaattggttagaggcagatgtccaaggggatagaaagtatctgactctaacattgcttttccttcagaaagctgtctggtttctttga

SEQ ID NO: 38043 - DNA, 795 bp, Homo sapiens
gccccttggagaattactgcaaggatctggttgagttgagaatttgtttcccccaccagtattgtttttggtgtttttttgttttgttttatttgttttgttttgttttaacatctctgtttccttcccctttctgttgttgctccttcctcctcccactccaactaccacacaaatcctgacaggagcctttctgcccctctagggaaggggcccgtgtgaggaactcttactggacgcccccttccctgttgctgtgctgatcttacacatcagtttccacggatcccatgtgaatcagttgtcttcctcatttactctgagcaagggtggcagcagcaatagcagaagacgtagatgcagtgactcattttgcatgatgtctgcaagagagccgggcctcccgtgtgctgtggctctcgttcaggcattgcttcagaaacttgattcttctggaattgtgcataagagggccttttagaaaaaaaaaaaaaaaaagctggaaaagttccccttcctgagcttcagtggaagcaccaggagggtgggccacgtccaggacggtgggagagcaaggttggcccctctgtgtccacctccagtgtgtggcactgtttcccatctcatctgggacatatcatggggctacagaatgcctcagaagcctgccagaaccctagtgatggttcccagcatctgggttggggaagactgtggtgatgcgctagggatagccatctgaaaggggtggggcagagacagcaggagccgtagtcgtctcaggagcctactctg

SEQ ID NO: 38044 - DNA, 288 bp, Homo sapiens
agataacacactggtaagaaaaatgtccaaggccaatcacaggagtcaaagctcgtgatcaaatcagctctgcctggggaggccgtgctcatggcaccatttagtgacaagtgggtgactctggggcaagttccaggggtgtcacccccaaggcagcagctcaggtgcagccaccatggaggcagtttcactgaggggccctctgaggcccctactctgagattctaagacagggtttgaagaatgttccagcatttgaacacatgaaccctatgatgtcctgctgtg

SEQ ID NO: 38045 - DNA, 596 bp, Homo sapiens
cttggtttggagtaaactctattaacctaaacagatacaaggtggaaaaggtaagaatctgagcatacaaatgccttccaccttcaggctggcagaaatttcatgtgaacacacagtactttgtccagtacgtgcactcatacctgaaatgttttgtttcatgttagtggaatttcacacaccagcaagcagatggaaagatatgttgaagagcatagaggttgaatccaggaccactcaggctagtgttgccacagctcgttcctgtagctccttagcacagggggctatatctgctggagctgcttcttcacatatctggtgttcgttatgcctccacacatcttgtaagaggcctcatgcttcatatccttctcagtgcccactttcctgccctcaggatggaaacttctctccaactagcctttgcattgaaaatctttcatgtcaaatgtagaaggaaagaatttcaggcatcaccgagaatattgaaagatattcttagaggagaaagactaagtccaggacaagactgaatgtagctattggaagtacaggtgtttcctgccttggcaatataagttgttcactcttat

SEQ ID NO: 38046 - DNA, 155 bp, Homo sapiens
ttggttgttaagtataaataaataaaatctaaccaaattcgtctaaaacagactgaactctatcttttcatcaaaccaacatttttgtaagagcaatttcactttgtgttttagagtagacatttttggaaatccttgaataaaaagctcttatt

SEQ ID NO: 38047 - DNA, 350 bp, Homo sapiens
cttctatggctgtcccgatttgcgcatttcctggggtactatgaacgtgagtggggtattttgttctggcattaaaagaaaaacaagcaagcaaacaaaaacacagcctccgatgccaaacatgttcccccttcttcacttccttggagctggaagtattattcctaagtctagtgcaaaatgcttctactctctgtgtcttcctgatagggatgtttaatgtaagtaggatattaatttcagaacattgatttcttatctgtgtgtctgacgtgccatctttaatgttaaaattaaggtgttaaaattaagcctagttatatagacgaaataaaatgctaagtcactac

SEQ ID NO: 38048 - DNA, 502 bp, Homo sapiens
acccccatccctaatctgagagaagctcatgaagacaggaccagcagccacaatgccctaactctctcttcctcctgaggccttccccaaactctgtatcatttctccccagtacctgttcccaacagtggtcagggttcagggcccttgaatcctttaggctctcccagtcaagctttagatggtggtcctgttttccttaaagtagctgagactggggagtagttttcagattgaatattccaggaagcagaggcaatgctctgactaactcaactcagagtaacagcaaggcagaaaaatcaagtaaggagacttggaggttcctgcgtctctcccataagcagaccttcccatgctctgtggccatgtagctcacagcgtttttgcattctttacaggaaattttgtcttctgaaagccatcacttattgtacttaactgcatgccagatactgcagatgttttatacacgttatatttagaattcatatggcttggc

SEQ ID NO: 38049 - DNA, 371 bp, Homo sapiens
tttctttaaaggacttatgttttgagaatttagaaagggctttatggaagcctctacaaagagaggaaggagaccctggcaagacccatgagctcacccaacaccctggccatcgtggagcctgtgcctacgttggccatggcatggatgcacacctccatcacagcaggtaaacactactttataactgaggccccaccccactatcagctgagaccctgagggatgtctgtgccttattcctcttgcttcccagcgatgagcacagtgccaggtgcaggagcgccacaaacgcgtatggaacaaacaaaaggaggtccacacagcaaccccttccctaacactgctgcacagaggagagcatgtacaga

SEQ ID NO: 38050 - DNA, 470 bp, Homo sapiens
actgtggtagattcgacgtccaaagtcactagactagtagtaaggctgaggttcaatgccaaatgagtctgcctccagagcctgacaccttgaccactatgctaaactgcctcttaagagacaggcaatgattacgtgtgaccttagacatcactgagtccaaaccctcatggacaaaagaggagcctgaggcccatggcaagtaacttggccaatggcacacaaaccaagaacagaacccagttctcctgcctctcggtcgaatcctttctcagctcactccacatcagggaagttatctgagatggaagttgtcttgcaggcagcacaaacatagtgacataagagctttccaggtaagtcaaaacagcaatggaaggaggcccattatacagctggtcccagaactggcctctgtcgacgcggccgcgaatttagtagtagtagcgaccccggaattccggaccggt

SEQ ID NO: 38051 - DNA, 659 bp, Homo sapiens
  misc_feature (652)..(653): n is a, c, g, or t
  misc_feature (658)..(659): n is a, c, g, or t
gcaaccgcggcgtgactacggcgcgcgcggtctgggcgcggacgggtggggccgggcggtgccggtgcgggctggggcagtgcagtgagtagcggtcttggggtgtgcgatctcgctgagcctcctcacacggttcgtcgtctcgggttcgagcccagtgggcttagccactcgccatggactcccagaaagaagctctacagaggatcatttcaactctggcaaataaaaatgatgaaattcagaactttattgatacactacatcatacactaaaaggagttcaggaaaattcgtccaacatactctcagagttagatgaagaatttgatagtttatactctatactggatgaagtaaaagaaagtatgattaactgtatcaagcaggaacaagctcgtaaatcccaagagttacagagtcagattagtcaatgtaataatgccctggagaactctgaagaactattagaatttgcaacaaggtcattagatataaaggaacctgaagaattttcaaaggtacacaaaaactgcattaatacacttaacaagggaagttgtatttttaaaaaggcgtttttgtttttctttagttttggatttctttactgatttctaatactaataaagccttggggtttcttgataannaaaann

SEQ ID NO: 38052 - DNA, 548 bp, Homo sapiens
ggacaaatctttattccatgtttaatttatttagcttcccctgtagctaatatttcatgctgaacacattttaaatgctgtaaatgtagataatataatttatggatcattaatgcctctttagtagtttagagaaaacgtcaaaagaaatggccccagaataagcttcttgatttgtaaaattctatgtcattggctcaaatttgtatagtatctcaaaatataaatatatagacatctcagataatatatttgaaatagcaaattccctgttagaaaataatagtacttaactagatgagaataacaggtcgccattatttgaattgtctcctattcgtttttcatttgttgtgttactcatgttttacttatgagggatatatataacttccgctgttttcagaattattgtatgcagtcagtatgagaatgcaatttaagtttccttgatgctttttcacacttctattactagaaataagaatacagtaatattggcaaagaaaattgaccagttcaataaaattttttagtaaatctgattg

SEQ ID NO: 38053 - DNA, 414 bp, Homo sapiens
aaaatattaattaaaagtctttccacattgaaaatctctgaatcaaaagctttaaatgataaatcttatcaacatctaataaaatattcatgctaattcttcaaagtaacttccaaaaatagaagcaacacttcccaatttactctatgaggccaggagtgccatgataccaaagctggaaaaaagcattgcaagaagactagaaagaaaaatccgtaatgactacagacacagaaatccttattaaatactaggaaatttattccaggaacataataaacatgattatataccatagccaagtgagattttattttcataaatgcaatgttagcttaatatctaaaagtcaattaagataatacacaatattacttgaatacatgacaaaaagaacatttcgatagacacata

SEQ ID NO: 38054 - DNA, 297 bp, Homo sapiens
tcattttccctcttcccctttcttttctttctttcgctattataaaaatgctatgatacaatgatcaacatgtctgttatacatctttgcacacttgtatcctgagtttgtctgctcttctgccttatctatagaattacttctcaacatgaacacagacatgagttggcctagcctagtgaaaaatgtttgtcacacttacttgacttgccctccaatatatatgtagaagtggtaattctcatatacaagaaggcatatacaataatttcacgtacattattgagttataagacc

SEQ ID NO: 38055 - DNA, 529 bp, Homo sapiens
ggaatagtgtcaataggattggtaccaattcttcttggaatgtctgatatatattcagttgtgaattcgtctggtcgtagaccttttttttttgttggtaactttttagataccatttcaatctcactccttgttattggtctgttcagagtttctgtttcttcctggtttaatcaaggagggttgtgtatttccaggaatgtattcatctcatctaggttttctagtttatgcgtgtaaaggtgttcatagtacccttgaaggatcttttatatttctgtggtatcagtggtaatatctcctgtttcgtttctgattgagcttatttagatcttctctcttcttttgttggttaatctcactaatggtctatcaattttatttatcttttgaaccagctttttgttccatttatcttctgtattttttctgttgttgttgtttcaatttcatttagtactgctcttatcttggttatttcttttcttctgctgggttggggtttggtttgttcttatttctctagttc

SEQ ID NO: 38056 - DNA, 636 bp, Homo sapiens
ctgtaaccccagctacttgggtggctgaggtatgagaattgcttgagcctgggaggccgagtttgcagtgagttgaaatcctgccactgcactccagcctgggcaaagaacaagattctgtttggaaaaaaaaaagtaattagaggtgacttgcagttaatttagaaaactttatatattcagtactgttgaaaatgtaatttaaagtactctctttcttgttatctcattttattaaaaaattacattgtcagtccctttatagcatagtatttctgaatcactctgtggtaacatatgagtgattctcaacttctaagtgcatatgcatgtgtatgctatttcaaactagatgtctaggctgggcacagtgactcacacctataatcccagtacttttgggaggccgaggcgggtggatcacttgaggtcaggagctggagaccagcctgaccaacatagtgaaatcctgtgtctgctaaaaatacaaaaattagccgggcctgttggtgtgtgcctgtagtcccagctactggggaggctgaggcaggaaactcgctgaaacctgggaggcagagggctgcagtgagctgagatcctgctactgcactgcagccttggcgacagtgtctcaat

SEQ ID NO: 38057 - DNA, 349 bp, Homo sapiens
tgaaagtcacttgagagaaatgtttagatcttggaaaggaattctcaaagccagatcggtgggctactgttctattgtgaaaaggtcatttaatttataaagtaatgggattagtatttggagaggtggatttactggctataatgccttcaggtgaaatttcccttctgactcgtgttcataacacttatcttctcattcccattgaattttccatctattggctctgaatttcaaatctagtcatagaaaatactagactgaaaccttcagggataaaattgcttccttcattgtcctgaaatggtttgtttcactactcagcaaaatctttaattgtgatgattta

SEQ ID NO: 38058 - DNA, 411 bp, Homo sapiens
agaaaagctttgtgctataaaagactgagccagaaggtggggtttggttcctagagttgccctttactaatgagaggaaggcccttgtctttgagcttctgctttttttacctctaaagtgggattaatgaccatgtacacaactggcaagatcaaaggaaatgaactaggtgaatgtaaattcatgcaaacatactattttggcagtaatgatggcagacaccaaaatgattatattcttaccatccctttcctttctacaatgctctgatgataaggtgagctttacctcccgaagaacaagactatattctgagtatgtacctagcatgtttattactctcagtaaatagaaatcttttttagtcagtaagcatgtttcaaaaatattttgagttatttaaaagaaaa

SEQ ID NO: 38059 - DNA, 185 bp, Homo sapiens
gagttttacaagtaaaaccttcaaaagtaaatgtttaataagaaataagcacacttgagctccttcatgacattacatgtaaagggtttaaactttaaaattgcactacacatatactttgcttacatgtatctgtgtgtgcatgtaaggaagataactacttttagaatatgtcaaaacataaa

SEQ ID NO: 38060 - DNA, 707 bp, Homo sapiens
taggtagaacatttaacatgaaatctatcttcttttttaagtatgcagtattatattgttaactaagtactatgttgtacaacggatctctagaacttattcctcttgcataactaaatctttgtacccattgagcaacagttccctacctctaaacttctgttccttgatctttttaactctctattttctcttatggctgcttgtaggtgattcaatgtaacaatgacagaaaacagttacagactttattcctctgcttcctaaaatccagtcaaaattgccttctctgcccattccaggcttacttttggttacaatagtgactgcagtgtatgctgagactgatcaatggaaaagtgtcagggaacatttggaatgatagccttttagttctgtagacactaaagtactgactctaccaaatcaatgatgggagttggagctgcatgcaatgcctgctgcagaacatctgaattccatcttggagccacactgcgaagtacccatcactgattatctaccagttctaagaaggggaacattggtgagaccttgatattctgccgggggtactacaaactagacccaatcattgcttacttgcttgacatttttgtttgccaagtgttcttttagctagaagaaaaaaattctcttttggttaaagtaaaagatagttgagattgttacttttacaaacttat

SEQ ID NO: 38061 - DNA, 680 bp, Homo sapiens
aattaaagcagggaaccttctgtgcctggagagcctcagcatctaggggcagtgtcctgagccaccattccagggaagccatttgcaattttttttagatttttaaaaaatgttgctgggtctgcgtttttccacatcctctgaactttccttcctgctagctttctatattgcttcctactttttctctgctttgggtataagcttctaggaatagaattttaaatcttagatggcttccccattctatatagctcttgggagtgctcacgtcaaagacttctgggaggctttctgcccagagttgggctgctggagaagattataaaggcaccaccatttttaaggtttttgttttgttttgtttggaagtttggaagtttcattcagaaaagtaaccccatgaccactgaaacaaatcctgaaaacagagaaaagtataaaagctcaagacagaaacagaaaatcctacagaaaccactctcccagaaagtacctatcttagtagttcatactgttttctttcacggcattttggttcctctaggttaacatatactaaaattggaattataattctgaaatgcttttctcttttcgtttccaatttaacagtgtagtagatattcctccgtgttatttaaaattcttcatgatcattattaatgattgaaaacttc

SEQ ID NO: 38062 - DNA, 342 bp, Homo sapiens
tgctaaaacgtaggcatagtttctataaacccttattgctcaggagtcatgtggccagaggtctgctcctatagatcacattagtattgtagaacctaagattgatcttttgagatgtttttcagacctttgcattctgacaactgactggtcctacctgtattcattgagttgactcatgagtcaaccagttctgtggcccccatccagaggcagactcagcacatgaaggctgttttccacacccctatgattgcattcccagccagtcagaagcatccattccctagtcccctgcccaccaaactatccttgaaacaccttaacatctgagccttcggg

SEQ ID NO: 38063 - DNA, 912 bp, Homo sapiens
tgtccgcactcgcggcccctaacctgccccgggagcccgggagtgcggcttgggaaggagggaaaggagtgtgtgagcagggattggcccgaacctatctccacgctctcccccgggactggaggtgaaggggggcgtggagaaaatctcagggaacaggggcttcgacagggggctcccgcccgcccgagccccctccccaaaatgcgaggcctgcacagtatgccttctccgcaaaacctcggcaagcgggttagtgaattcaggtcactaagaagctgagcccgcggaaagctgcccaaacacccccttctctaggggactccccacgccccccgccgggacgcgttcccgaagtcgccgcctggactgcaaccgcgtggcctgcgccgcgtcctcttctccgcagcctccgaggcccgtgcgaccaagctgaaaccgcttattctccggagcccctatgaccccgggtgggggccagggctcgcctcgatcgcagcccgtgcgccctccggactccagttcgccgggactgggcgacaccagaagcggctagtgtgagtgaaacaaacgggaaatttgctctggcccgcctgcccagccacccacggctgcctgttggccaatcaccatttgaccagtccaggaagagcaactgtggcaggcctgatttcctgggaggccccagactccctttgcctacctcttcctctctgaccccatcctcgctttgatgcccgggacctgctacccaggtacgtgggtcttctctgccggatgtggacatcttggcctctcgccttggtgcctactcttgggaagcgggtccagacatctctcctgcaggaagagaggaagggttaattacaggcgttggggataattaaagcctttgaccaagaggaaaaaaaa

SEQ ID NO: 38064 - DNA, 311 bp, Homo sapiens
cctccactcgtgataccttcaggtgcgggaggaacccaggtgaatagggtctggagtggaccccctgcacactgcagcagccctatggaagaaagggcctgactgctaaaagaaaaaacagaaagcaacaacatcaatgaaaaagaccccacaaaaacccatccaaaggtcagtagcctcaaagatcaaaggtagataaatgcaagaagatgagaaagaatcagcacaaaaatgctgaaaactcaaaaagccagtgtgcctcttctcctccagatgatcttaacacatctccaacaagggcatagaactgg

SEQ ID NO: 38065 - DNA, 328 bp, Homo sapiens
tcagttgctaactaaaagcaattgtacgtgtatttgatatttccccacagtttctacctctagatttaattcagtaaaggaagatgatatttgaagatgaagtagcacttgtgtcctgagcatctctcaggcactactgcatggaatggcaaaggggatgcaagaagcacatcagatgacaacggtcttagacgcttacaagtctgctaaggtgactgacaagggaatcaaagaaggcagtcatgtcatggacctatcagcagcatagctgggcaaccctggagctgaatctggccctcagacttgtttaaattgcccagtgttttta

SEQ ID NO: 38066 - DNA, 367 bp, Homo sapiens
tttttttttgagatggagtcttgctctgtcgcccaggctggagtgcaatggtgcaatctcagctcactgcaacctctgcctcctgagttcaagtgattctgcctcagcctcccaagtagctgggattacaggtgcaggccaccaaggctggctaatttttgtgtttttagtagagatgcggtttctccatgttggccaggctggtcttgaacttcagacctcaggtgatccacctgtctcgccctcccaaagtgctgagggcatgagccactgcacccggcctagattctttatgagattgccgagctgtcacctaagaaatgtcctggttgtgcttcgatttggtggggaggtgtgggacaatgac

SEQ ID NO: 38067 - DNA, 1201 bp, Homo sapiens
aattaaaaagtaaaataataggccaggcatggtggctcatgcctataagcaccctgggaggccgaggcaggcagattatttgagctcaggagtttgagaccatcctgggcaacatggcgaaaccctatctctacaaaaaatacaaaaattagccagacatggtggcacatgcctttagtcccagctactctggaggctgaagttggaggatggcttgagcccacgagatggaagttgcagtgaactgaaattgtgccactgcacttttcagcctgggtgccacagcgagaccctagttaagagaaaaaaaaagtaaaaacaaattgtgggtcaaagtaaatgtatacagttttattacaatgtaacaaaagttgaaaatcaggcagatgtgtattcagtatccaattcaatatatcttagaaaaagcacaggaaacagaccttaaaattgtaacctaccaactaacttacatgcttataaaagtaaaggagaataactggccgggcacggtggctcatgcctataaaattccagcactttgggaggccaaggcaggaggatcacttgagcctatgagttcaagaccagcctaggcaatgtagtgacacctcatttctatttattttaaaaaaaagagagagtaactacagaagaactttaaaaaataaaaaataagcttaccttggattcttggcttagagtagaggttttttttaagttatggaggaaacatttttgtaaaagtttaatgacccactttagatgctccaagaacaagcatcccttccatgtatgtcttgagaaagaaatcacagaagcatttctcaccaatactctttggcttaaaatgttcagcagaattgggcagtgggggtgacttttcttatattaataatatttacatccaatacactgaatcttcctttagaggtaagactttaatatctatactgtaaatatttggtttatttggcactactgtaagttttgtttttcacaaagctcttattatgaagcaaaataaaaattctagtttcttgtatgattttttgtactcattcattcctgttaagctgccaaaaattaaagtgcaatattgtatatttttaagaacaaatttaaaatagaattttgatgtttctcagatcacaagaaatacaaatctatatagtataataaaatcagcaaaaagatcaaataa

SEQ ID NO: 38068 - DNA, 1302 bp, Homo sapiens
aattaaaaagtaaaataataggccaggcatggtggctcatgcctataagcaccctgggaggccgaggcaggcagattatttgagctcaggagtttgagaccatcctgggcaacatggcgaaaccctatctctacaaaaaatacaaaaattagccagacatggtggcacatgcctttagtcccagctactctggaggctgaagttggaggatggcttgagcccacgagatggaagttgcagtgaactgaaattgtgccactgcacttttcagcctgggtgccacagcgagaccctagttaagagaaaaaaaaagtaaaaacaaattgtgggtcaaagtaaatgtatacagttttattacaatgtaacaaaagttgaaaatcaggcagatgtgtattcagtatccaattcaatatatcttagaaaaagcacaggaaacagaccttaaaattgtaacctaccaactaacttacatgcttataaaagtaaaggagaataactggccgggcacggtggctcatgcctataaaattccagcactttgggaggccaaggcaggaggatcacttgagcctatgagttcaagaccagcctaggcaatgtagtgacacctcatttctatttattttaaaaaaaagagagagtaactacagaagaactttaaaaaataaaaaataagcttaccttggattcttggcttagagtagaggttttttttaagttatggaggaaacatttttgtaaaagtttaatgacccactttagatgctccaagaacaagcatcccttccatgtatgtcttgagaaagaaatcacagaagcatttctcaccaatactctttggcttaaaatgttcagcagaattgggcagtgggggtgacttttcttatattaataatatttacatccaatacactgaatcttcctttagaggtaagactttaatatctatactgtaaatatttggtttatttggcactactgtaagttttgtttttcacaaagctcttattatgaagcaaaataaaaattctagtttcttgtatgattttttgtactcattcattcctgttaagctgccaaaaattaaagtgcaatattgtatatttttaagaacaaatttaaaatagaattttgatgtttctcagatcacaagaaatacaaatctatatagtataataaaatcagcaaaaagatcaaataaatgaaaaataaagcttcgaggggggggccccgggtacccatttcgccctattagtggagtcgtgttacattactggcccggcgttttaccgccgggctggg

SEQ ID NO: 38069 - DNA, 1297 bp, Homo sapiens
aattaaaaagtaaaataataggccaggcatggtggctcatgcctataagcaccctgggaggccgaggcaggcagattatttgagctcaggagtttgagaccatcctgggcaacatggcgaaaccctatctctacaaaaaatacaaaaattagccagacatggtggcacatgcctttagtcccagctactctggaggctgaagttggaggatggcttgagcccacgagatggaagttgcagtgaactgaaattgtgccactgcacttttcagcctgggtgccacagcgagaccctagttaagagaaaaaaaaagtaaaaacaaattgtgggtcaaagtaaatgtatacagttttattacaatgtaacaaaagttgaaaatcaggcagatgtgtattcagtatccaattcaatatatcttagaaaaagcacaggaaacagaccttaaaattgtaacctaccaactaacttacatgcttataaaagtaaaggagaataactggccgggcacggtggctcatgcctataaaattccagcactttgggaggccaaggcaggaggatcacttgagcctatgagttcaagaccagcctaggcaatgtagtgacacctcatttctatttattttaaaaaaaagagagagtaactacagaagaactttaaaaaataaaaaataagcttaccttggattcttggcttagagtagaggttttttttaagttatggaggaaacatttttgtaaaagtttaatgacccactttagatgctccaagaacaagcatcccttccatgtatgtcttgagaaagaaatcacagaagcatttctcaccaatactctttggcttaaaatgttcagcagaattgggcagtgggggtgacttttcttatattaataatatttacatccaatacactgaatcttcctttagaggtaagactttaatatctatactgtaaatatttggtttatttggcactactgtaagttttgtttttcacaaagctcttattatgaagcaaaataaaaattctagtttcttgtatgattttttgtactcattcattcctgttaagctgccaaaaattaaagtgcaatattgtatatttttaagaacaaatttaaaatagaattttgatgtttctcagatcacaagaaatacaaatctatatagtataataaaatcagcaaaaagatcaaataaaaaaaatgagagtcttgaggggggggcccggccccaattcgcccttatataagtcggattccacttaattgcctggggttcccctgttggcggcgg

SEQ ID NO: 38070 - DNA, 1147 bp, Homo sapiens
aattaaaaagtaaaataataggccaggcatggtggctcatgcctataagcaccctgggaggccgaggcaggcagattatttgagctcaggagtttgagaccatcctgggcaacatggcgaaaccctatctctacaaaaaatacaaaaattagccagacatggtggcacatgcctttagtcccagctactctggaggctgaagttggaggatggcttgagcccacgagatggaagttgcagtgaactgaaattgtgccactgcacttttcagcctgggtgccacagcgagaccctagttaagagaaaaaaaaagtaaaaacaaattgtgggtcaaagtaaatgtatacagttttattacaatgtaacaaaagttgaaaatcaggcagatgtgtattcagtatccaattcaatatatcttagaaaaagcacaggaaacagaccttaaaattgtaacctaccaactaacttacatgcttataaaagtaaaggagaataactggccgggcacggtggctcatgcctataaaattccagcactttgggaggccaaggcaggaggatcacttgagcctatgagttcaagaccagcctaggcaatgtagtgacacctcatttctatttattttaaaaaaaagagagagtaactacagaagaactttaaaaaataaaaaataagcttaccttggattcttggcttagagtagaggttttttttaagttatggaggaaacatttttgtaaaagtttaatgacccactttagatgctccaagaacaagcatcccttccatgtatgtcttgagaaagaaatcacagaagcatttctcaccaatactctttggcttttacatccaatacactgaatcttcctttagaggtaagactttaatatctatactgtaaatatttggtttatttggcactactgtaagttttgtttttcacaaagctcttattatgaagcaaaataaaaattctagtttcttgtatgattttttgtactcattcattcctgttaagctgccaaaaattaaagtgcaatattgtatatttttaagaacaaatttaaaatagaattttgatgtttctcagatcacaagaaatacaaatctatatagtataataaaatcagcaaaaagatcaaataa

SEQ ID NO: 38071 - DNA, 419 bp, Homo sapiens
tcccaattcttcctcagcctctgctcctccaccctataatctttttatcacctcccctccttacacctggtccggcttacagtttcgttcggtgacttttcttatattaataatatttacatccaatacactgaatcttcctttagaggtaagactttaatatctatactgtaaatatttggtttatttggcactactgtaagttttgtttttcacaaagctcttattatgaagcaaaataaaaattctagtttcttgtatgattttttgtactcattcattcctgttaagctgccaaaaattaaagtgcaatattgtatatttttaagaacaaatttaaaatagaattttgatgtttctcagatcacaagaaatacaaatctatatagtataataaaatcagcaaaaagatcaaataa

SEQ ID NO: 38072 - DNA, 175 bp, Homo sapiens
aatgttctaagaaagtttacaaatttgcgttgggctgcattcaaggctgtcctgggctgcgcgcagcccgtgggttggacaagcttggtgtatactttcgaaaaatttaaatcacaaaatcaatagaaatttgggactgatgaaatgtaaggatgaagaaaacttttgggttttg

SEQ ID NO: 38073 - DNA, 418 bp, Homo sapiens
ttgataggtctaaatggttgtgttcttgtctttaattcagaaaatgtttatcgagcatatactataagctggatatccctgtaggctctggagatgtgagagtgactgggatataaactgtgttcaaggaacacctagttcagtggagaaaagattgcattgcattttgcctcttttcctcctttacctgtgttgtatcagctaggattaaatttagttgtgagtggcagaaaatccaatagctgccttaaaccagttcactacaaaaatcctcaataactttagctacttttggagtttgcgaatatccaatatattcttttgaaaacctgccaataaaggagaaaatattcaacatttgtgttgcctttctcataaactgcaaggaaatcaaacagttgatgagaagtgtctcctt

SEQ ID NO: 38074 - DNA, 2350 bp, Homo sapiens
acggcgagcctcatcctccgggtgcggcgctgagcagcgagtccgactgtgctcgctgctcagcgccgcacccggaggatgaggctcgccgtgggagccctgctggtctgcgccgtcctggggctgtgtctggctgtccctgataaaactgtgagatggtgtgcagtgtcggagcatgaggccactaagtgccagagtttccgcgaccatatgaaaagcgtcattccatccgatggtcccagtgttgcttgtgtgaagaaagcctcctaccttgattgcatcagggccattgcggcaaacgaagcggatgctgtgacactggatgcaggtttggtgtatgatgcttacctggctcccaataacctgaagcctgtggtggcagagttctatgggtcaaaagaggatccacagactttctattatgctgttgctgtggtgaagaaggatagtggcttccagatgaaccagcttcgaggcaagaagtcctgccacacgggtctaggcaggtccgctgggtggaacatccccataggcttactttactgtgacttacctgagccacgtaaacctcttgagaaagcagtggccaatttcttctcgggcagctgtgccccttgtgcggatgggacggacttcccccagctgtgtcaactgtgtccagggtgtggctgctccacccttaaccaatacttcggctactcgggagccttcaagtgtctgaaggatggtgctggggatgtggcctttgtcaagcactcgactatatttgagaacttggcaaacaaggctgacagggaccagtatgagctgctttgcctggacaacacccggaagccggtagatgaatacaaggactgccacttggcccaggtcccttctcataccgtcgtggcccgaagtatgggcggcaaggaggacttgatctgggagcttctcaaccaggcccaggaacattttggcaaagacaaatcaaaagaattccaactattcagctctcctcatgggaaggacctgctgtttaaggactctgcccacgggtttttaaaagtcccccccaggatggatgccaagatgtacctgggctatgagtatgtcactgccatccggaatctacgggaaggcacatgcccagaagccccaacagatgaatgcaagcctgtgaagtggtgtgcgctgagccaccacgagaggctcaagtgtgatgagtggagtgttaacagtgtagggaaaatagagtgtgtatcagcagagaccaccgaagactgcatcgccaagatcatgaatggagaagctgatgccatgagcttggatggagggtttgtctacatagcgggcaagtgtggtctggtgcctgtcttggcagaaaactacaataagagcgataattgtgaggatacaccagaggcagggtattttgctgtagcagtggtgaagaaatcagcttctgacctcacctgggacaatctgaaaggcaagaagtcctgccatacggcagttggcagaaccgctggctggaacatccccatgggcctgctctacaataagatcaaccactgcagatttgatgaatttttcagtgaaggttgtgcccctgggtctaagaaagactccagtctctgtaagctgtgtatgggctcaggcctaaacctgtgtgaacccaacaacaaagagggatactacggctacacaggcgctttcaggtgtctggttgagaagggagatgtggcctttgtgaaacaccagactgtcccacagaacactgggggaaaaaaccctgatccatgggctaagaatctgaatgaaaaagactatgagttgctgtgccttgatggtaccaggaaacctgtggaggagtatgcgaactgccacctggccagagccccgaatcacgctgtggtcacacggaaagataaggaagcttgcgtccacaagatattacgtcaacagcagcacctatttggaagcaacgtaactgactgctcgggcaacttttgtttgttccggtcggaaaccaaggaccttctgttcagagatgacacagtatgtttggccaaacttcatgacagaaacacatatgaaaaatacttaggagaagaatatgtcaaggctgttggtaacctgagaaaatgctccacctcatcactcctggaagcctgcactttccgtagaccttaaaatctcagaggtagggctgccaccaaggtgaagatgggaacgcagatgatccatgagtttgccctggtttcactggcccaagtggtttgtgctaaccacgtctgtcttcacagctctgtgttgccatgtgtgctgaacaaaaaataaaaattattattgattttatatttcaaaa

SEQ ID NO: 38075 - DNA, 558 bp, Homo sapiens
cgtcaacagcagcacctatttggaagcaacgtaatatcttgtggacgcaagcttccttatctttccgtgtgaccacagcgtgattcggggctctggccaggtggcagttcgcatactcctccacagatttcctggtaccatcaaggcacagcaacagccacctatttggaagcaacgtaactgactgctcgggcaacttttgtttgttccggtcggaaaccaaggaccttctgttcagagatgacacagtatgtttggccaaacttcatgacagaaacacatatgaaaaatacttaggagaagaatatgtcaaggctgttggtaacctgagaaaatgctccacctcatcactcctggaagcctgcactttccgtagaccttaaaatctcagaggtagggctgccaccaaggtgaagatgggaacgcagatgatccatgagtttgccctggtttcactggcccaagtggtttgtgctaaccacgtctgtcttcacagctctgtgttgccatgtgtgctgaacaaaaaataaaaattattattgattttatatttcaaaa

SEQ ID NO: 38076 - DNA, 1031 bp, Homo sapiens
tctctaaacttctcttctcgcttcatttcattcatttgatcttcaatcactgataccctttcttccagttgattgaatcagctactaaagcttgtgcattcgtcacgtagttctcatgccatggttttcagctccatcaggtcatttaaggacttctctacactggttactctagttagccatttgtctaatcttttctcaaggtttttagcttctttgcgatgggttcgaacttcctcctttagctcggagaagtctgattctctgaagccttcttctctcaactcatcaaagtcattctgtgtccagctttgttccgttgctggtgaggagctgcggtcctttggagggggagaagcgctctgatttttataattttcagcttttctgctctgttttttccccatctttgtggttttatctacctttggtcctcgatgatggtgacatacagatggggttttggtgtggatgtcctttctgtttgttagttttccttctaacagtcaggaccctcagctgcaagtctgttggagtttgctggaggtcaactccagaccctgtttgcctgggttatcagcagcggaggctgcaggacagcgaatactgctgaactgtctgggttttatatgaactccatcccttaccatgctacgttgggtatgttactgtgcctcagttttctcatctatgaaatgtctaaattagtgcctacttcgtaaggtggctgagataattaaataggttactataatttttacagacagggtctcactttgtcaccaaggctgttggtaacctgagaaaatgctccacctcatcactcctggaagcctgcactttccgtagaccttaaaatctcagaggtagggctgccaccaaggtgaagatgggaacgcagatgatccatgagtttgccctggtttcactggcccaagtggtttgtgctaaccacgtctgtcttcacagctctgtgttgccatgtgtgctgaacaaaaaataaaaattattattgattttatatttcaaaa

SEQ ID NO: 38077 - DNA, 686 bp, Homo sapiens
  misc_feature (48)..(48): n is a, c, g, or t
gaggagagacgcctatccccagtaggattctagggaattcttatattntgatattcgggcacaacagtctaattcgctctctgtcaaattagcagtcttctagataagtgcatagagttacttgtcagctaaaccccctgggtcgatacaagtctggatgatctaacgcggcctcgtccgcgtgggcgtccagcagactctgaaatcccgcccggaggaaaagcgtaaaggcgttggagtcaaaggagcggggatccgccagcatctgaaagccctgcacagactccgagagctccattgtgagcgcgccgtgaccttcgacacgcctcgtgcaaaattcggcacgagcaaggaccttctgttcagagatgacacagtatgtttggccaaacttcatgacagaaacacatatgaaaaatacttaggagaagaatatgtcaaggctgttggtaacctgagaaaatgctccacctcatcactcctggaagcctgcactttccgtagaccttaaaatctcagaggtagggctgccaccaaggtgaagatgggaacgcagatgatccatgagtttgccctggtttcactggcccaagtggtttgtgctaaccacgtctgtcttcacagctctgtgttgccatgtgtgctgaacaaaaaataaaaattattattgattttatatttcaaaa

SEQ ID NO: 38078 - DNA, 899 bp, Homo sapiens
  misc_feature (857)..(857): n is a, c, g, or t
  misc_feature (859)..(859): n is a, c, g, or t
  misc_feature (889)..(889): n is a, c, g, or t
taggctgtggcccttgggataggacaacatggacaaaatgaaatggtgagtgaacaatctaagcccggcatgtatgacaggctagactgtaggggcagatagtaaggggatacaggctcagagcactaaggtagtgaacttattgggtatagagaattccatcttatttctaagaaaaggactgggtttatgtgtacatgccattgctctgcagtaaacttttgattagagttgccttgtccaatatggtagccaccagcaagatgtgactatttaaatttaagttaattaaaattaaactaaataaaagatgtatttcttcaatcccacctagctgcatttcaagtgctcaacagccacatgtggctccatattggtcagcaaagagaatgtttgcatcatcacagaaagctctttcagacagtgctgctctagacagcttcaacaatgataggttctggtaaccataaagttgctatgcatactactcatttggaacaccagtttctgagaactgaaatagaataaaacacatctttgcagtataactatgttgggtgtaactgagtcacctgaaaaagtttggaagctggggaataacatgtggtgtagggcagttagtctttccacaggagtatgcagataagggagtcttgatccttattaaaatgctgattctcagagccttgagatactgatttagaaagtctgtgctaggtcaggtatccgcatttgaaaagctgcccccatgtaattctgacggaagcagcaatgtgcttgtctaggttcgctattgtgagaatcaagttgatatttacctaacctatatcctccacaaactgcacattgcggtgctntntgtatgtcagtcctcaccgcttaagagtcnggagacagcc

SEQ ID NO: 38079 - DNA, 758 bp, Homo sapiens
taggctgtggcccttgggataggacaacatggacaaaatgaaatggtgagtgaacaatctaagcccggcatgtatgacaggctagactgtaggggcagatagtaaggggatacaggctcagagcactaaggtagtgaacttattgggtatagagaattccatcttatttctaagaaaaggactgggtttatgtgtacatgccattgctctgcagtaaacttttgattagagttgccttgtccaatatggtagccaccagcaagatgtgactatttaaatttaagttaattaaaattaaactaaataaaagatgtatttcttcaatcccacctagctgcatttcaagtgctcaacagccacatgtggctccatattggtcagcaaagagaatgtttgcatcatcacagaaagctctttcagacagtgctgctctagacagcttcaacaatgataggttctggtaaccataaagttgctatgcatactactcatttggaacaccagtttctgagaactgaaatagaataaaacacatctttgcagtataactatgttgggtgtaactgagtcacctgaaaaagtttggaagctggggaataacatgtggtgtagggcagttagtctttccacaggagtatgcagataagggagtcttgatccttattaaaatgctgattctcagagccttgagatactgatttagaaagtctgtgctaggtcaggtatccgcatttggtgagatgtgtattacctaccat

SEQ ID NO: 38080 - DNA, 656 bp, Homo sapiens
  misc_feature (5)..(5): n is a, c, g, or t
  misc_feature (15)..(15): n is a, c, g, or t
ctaancctgtgtgancccaacaccaaagagggaatctgtgaaacaccagactgtcccacagaacactgggggaaaaaaccctgatccatgggctaagaatctgaatgaaaaagactatgagttgctgtgccttgatggtaccaggaaacctgtggaggagtatgcgaactgccacctggccagagccccgaatcacgctgtggtcacacggaaagataaggaagcttgcgtccacaagatattacgtcaacagcagcacctatttggaagcaacgtaactgactgctcgggcaacttttgtttgttccggtcggaaaccaaggaccttctgttcagagatgacacagtatgtttggccaaacttcatgacagaaacacatatgaaaaatacttaggagaagaatatgtcaaggctgttggtaacctgagaaaatgctccacctcatcactcctggaagcctgcactttccgtagaccttaaaatctcagaggtagggctgccaccaaggtgaagatgggaacgcagatgatccatgagtttgccctggtttcactggcccaagtggtttgtgctaaccacgtctgtcttcacagctctgtgttgccatgtgtgctgaacaaaaaataaaaattattattgattttatatttcaaaa

SEQ ID NO: 38081 - DNA, 743 bp, Homo sapiens
  misc_feature (29)..(29): n is a, c, g, or t
  misc_feature (37)..(37): n is a, c, g, or t
  misc_feature (42)..(42): n is a, c, g, or t
  misc_feature (91)..(91): n is a, c, g, or t
cgcaaatcgctaccatacgcaagctgaanttacctcnttaanggacaaagctgagctcacgcgttgcgccgctttagccggcggatccccngggtgtctggttgagaagggagatgtggcctttgtgaaacaccagactgtcccacagaacactgggggaaaaaaccctgatccatgggctaagaatctgaatgaaaaagactatgagttgctgtgccttgatggtaccaggaaacctgtggaggagtatgcgaactgccacctggccagagccccgaatcacgctgtggtcacacggaaagataaggaagcttgcgtccacaagatattacgtcaacagcagcacctatttggaagcaacgtaactgactgctcgggcaacttttgtttgttccggtcggaaaccaaggaccttctgttcagagatgacacagtatgtttggccaaacttcatgacagaaacacatatgaaaaatacttaggagaagaatatgtcaaggctgttggtaacctgagaaaatgctccacctcatcactcctggaagcctgcactttccgtagaccttaaaatctcagaggtagggctgccaccaaggtgaagatgggaacgcagatgatccatgagtttgccctggtttcactggcccaagtggtttgtgctaaccacgtctgtcttcacagctctgtgttgccatgtgtgctgaacaaaaaataaaaattattattgattttatatttcaaaa

SEQ ID NO: 38082 - DNA, 151 bp, Homo sapiens
cccccccccccaaaatttgtgggggaaggtttttttgccctggtttcactggcccaagtggtttgtgctaaccacgtctgtcttcacagctctgtgttgccatgtgtgctgaacaaaaaataaaaattattattgattttatatttcaaaa

SEQ ID NO: 38083 - DNA, 1287 bp, Homo sapiens
ctgtttgatgtgtgcccccttcttcccgatgatggcgcccacagcctgggttgggatgaagagattcacaatctcctgctctggataagagtgatgatgcgggaacgggccaaactggtgatgggggtacaggctggagaagtatccggagtaacagtgtagggaaaatagagtgtgtatcagcagagaccaccgaagactgcatcgccaagatcatgaatggagaagctgatgccatgagcttggatggagggtttgtctacatagcgggcaagtgtggtctggtgcctgtcttggcagaaaactacaataagagcgataattgtgaggatacaccagaggcagggtattttgctgtagcagtggtgaagaaatcagcttctgacctcacctgggacaatctgaaaggcaagaagtcctgccatacggcagttggcagaaccgctggctggaacatccccatgggcctgctctacaataagatcaaccactgcagatttgatgaatttttcagtgaaggttgtgcccctgggtctaagaaagactccagtctctgtaagctgtgtatgggctcaggcctaaacctgtgtgaacccaacaacaaagagggatactacggctacacaggcgctttcaggtgtctggttgagaagggagatgtggcctttgtgaaacaccagactgtcccacagaacactgggggaaaaaaccctgatccatgggctaagaatctgaatgaaaaagactatgagttgctgtgccttgatggtaccaggaaacctgtggaggagtatgcgaactgccacctggccagagccccgaatcacgctgtggtcacacggaaagataaggaagcttgcgtccacaagatattacgtcaacagcagcacctatttggaagcaacgtaactgactgctcgggcaacttttgtttgttccggtcggaaaccaaggaccttctgttcagagatgacacagtatgtttggccaaacttcatgacagaaacacatatgaaaaatacttaggagaagaatatgtcaaggctgttggtaacctgagaaaatgctccacctcatcactcctggaagcctgcactttccgtagaccttaaaatctcagaggtagggctgccaccaaggtgaagatgggaacgcagatgatccatgagtttgccctggtttcactggcccaagtggtttgtgctaaccacgtctgtcttcacagctctgtgttgccatgtgtgctgaacaaaaaataaaaattattattgattttatatttcaaaa

SEQ ID NO: 38084 - DNA, 680 bp, Homo sapiens
  misc_feature (1)..(1): n is a, c, g, or t
  misc_feature (98)..(98): n is a, c, g, or t
ngttagaaactcagtctcgtactgtgatgggccagcttaaccgggtacccacaccaagaggatctcggctcacagcgcttcaggttctggtaagaagnaatgtgctttgtaaccacagctttccacagacactggggaaaaaaccctgatccatgggctaagaatctgaatgaaaaagactatgagttgctgtgccttgatggtaccaggaaacctgtggaggagtatgcgaactgccacctggccagagccccgaatcacgctgtggtcacacggaaagataaggaagcttgcgtccacaagatattacgtcaacagcagttgtttgttccggtcggaaaccaaggaccttctgttcagagatgacacagtatgtttggccaaacttcatgacagaaacacatatgaaaaatacttaggagaagaatatgtcaaggctgttggtaacctgagaaaatgctccacctcatcactcctggaagcctgcactttccgtagaccttaaaatctcagaggtagggctgccaccaaggtgaagatgggaacgcagatgatccatgagtttgccctggtttcactggcccaagtggtttgtgctaaccacgtctgtcttcacagctctgtgttgccatgtgtgctgaacaaaaaataaaaattattattgattttatatttcaaaa

SEQ ID NO: 38085 - DNA, 2145 bp, Homo sapiens
gatctactaacttgctttctagttaattcttccttctcttccttcctctcacttatatatatctaagagaatatttagaatgtggtcacatgatttgttgagggtatactgatgactttctgcatgctgttttaatcaaatatttaaattcacatcaccgttaagctgtggtggcagagttctatgggtcaaaagaggatccacagactttctattatgctgttgctgtggtgaagaaggatagtggcttccagatgaaccagcttcgaggcaagaagtcctgccacacgggtctaggcaggtccgctgggtggaacatccccataggcttactttactgtgacttacctgagccacgtaaacctcttgagaaagcagtggccaatttcttctcgggcagctgtgccccttgtgcggatgggacggacttcccccagctgtgtcaactgtgtccagggtgtggctgctccacccttaaccaatacttcggctactcgggagccttcaagtgtctgaaggatggtgctggggatgtggcctttgtcaagcactcgactatatttgagaacttggcaaacaaggctgacagggaccagtatgagctgctttgcctggacaacacccggaagccggtagatgaatacaaggactgccacttggcccaggtcccttctcataccgtcgtggcccgaagtatgggcggcaaggaggacttgatctgggagcttctcaaccaggcccaggaacattttggcaaagacaaatcaaaagaattccaactattcagctctcctcatgggaaggacctgctgtttaaggactctgcccacgggtttttaaaagtcccccccaggatggatgccaagatgtacctgggctatgagtatgtcactgccatccggaatctacgggaaggcacatgcccagaagccccaacagatgaatgcaagcctgtgaagtggtgtgcgctgagccaccacgagaggctcaagtgtgatgagtggagtgttaacagtgtagggaaaatagagtgtgtatcagcagagaccaccgaagactgcatcgccaagatcatgaatggagaagctgatgccatgagcttggatggagggtttgtctacatagcgggcaagtgtggtctggtgcctgtcttggcagaaaactacaataagagcgataattgtgaggatacaccagaggcagggtattttgctgtagcagtggtgaagaaatcagcttctgacctcacctgggacaatctgaaaggcaagaagtcctgccatacggcagttggcagaaccgctggctggaacatccccatgggcctgctctacaataagatcaaccactgcagatttgatgaatttttcagtgaaggttgtgcccctgggtctaagaaagactccagtctctgtaagctgtgtatgggctcaggcctaaacctgtgtgaacccaacaacaaagagggatactacggctacacaggcgctttcaggtgtctggttgagaagggagatgtggcctttgtgaaacaccagactgtcccacagaacactgggggaaaaaaccctgatccatgggctaagaatctgaatgaaaaagactatgagttgctgtgccttgatggtaccaggaaacctgtggaggagtatgcgaactgccacctggccagagccccgaatcacgctgtggtcacacggaaagataaggaagcttgcgtccacaagatattacgtcaacagcagcacctatttggaagcaacgtaactgactgctcgggcaacttttgtttgttccggtcggaaaccaaggaccttctgttcagagatgacacagtatgtttggccaaacttcatgacagaaacacatatgaaaaatacttaggagaagaatatgtcaaggctgttggtaacctgagaaaatgctccacctcatcactcctggaagcctgcactttccgtagaccttaaaatctcagaggtagggctgccaccaaggtgaagatgggaacgcagatgatccatgagtttgccctggtttcactggcccaagtggtttgtgctaaccacgtctgtcttcacagctctgtgttgccatgtgtgctgaacaaaaaataaaaattattattgattttatatttcaaaa

SEQ ID NO: 38086 - DNA, 2304 bp, Homo sapiens
acggcgagcctcatcctccgggtgcggcgctgagcagcgagtccgactgtgctcgctgctcagcgccgcacccggaggatgaggctcgccgtgggagccctgctggtctgcgccgtcctggggctgtgtctggctgtccctgataaaactgtgagatggtgtgcagtgtcggagcatgaggccactaagtgccagagtttccgcgaccatatgaaaagcgtcattccatccgatggtcccagtgttgcttgtgtgaagaaagcctcctaccttgattgcatcagggccattgcggcaaacgaagcggatgctgtgacactggatgcaggtttggtgtatgatgcttacctggctcccaataacctgaagcctgtggtggcagagttctatgggtcaaaagaggtggcttccagatgaaccagcttcgaggcaagaagtcctgccacacgggtctaggcaggtccgctgggtggaacatccccataggcttactttactgtgacttacctgagccacgtaaacctcttgagaaagcagtggccaatttcttctcgggcagctgtgccccttgtgcggatgggacggacttcccccagctgtgtcaactgtgtccagggtgtggctgctccacccttaaccaatacttcggctactcgggagccttcaagtgtctgaaggatggtgctggggatgtggcctttgtcaagcactcgactatatttgagaacttggcaaacaaggctgacagggaccagtatgagctgctttgcctggacaacacccggaagccggtagatgaatacaaggactgccacttggcccaggtcccttctcataccgtcgtggcccgaagtatgggcggcaaggaggacttgatctgggagcttctcaaccaggcccaggaacattttggcaaagacaaatcaaaagaattccaactattcagctctcctcatgggaaggacctgctgtttaaggactctgcccacgggtttttaaaagtcccccccaggatggatgccaagatgtacctgggctatgagtatgtcactgccatccggaatctacgggaaggcacatgcccagaagccccaacagatgaatgcaagcctgtgaagtggtgtgcgctgagccaccacgagaggctcaagtgtgatgagtggagtgttaacagtgtagggaaaatagagtgtgtatcagcagagaccaccgaagactgcatcgccaagatcatgaatggagaagctgatgccatgagcttggatggagggtttgtctacatagcgggcaagtgtggtctggtgcctgtcttggcagaaaactacaataagagcgataattgtgaggatacaccagaggcagggtattttgctgtagcagtggtgaagaaatcagcttctgacctcacctgggacaatctgaaaggcaagaagtcctgccatacggcagttggcagaaccgctggctggaacatccccatgggcctgctctacaataagatcaaccactgcagatttgatgaatttttcagtgaaggttgtgcccctgggtctaagaaagactccagtctctgtaagctgtgtatgggctcaggcctaaacctgtgtgaacccaacaacaaagagggatactacggctacacaggcgctttcaggtgtctggttgagaagggagatgtggcctttgtgaaacaccagactgtcccacagaacactgggggaaaaaaccctgatccatgggctaagaatctgaatgaaaaagactatgagttgctgtgccttgatggtaccaggaaacctgtggaggagtatgcgaactgccacctggccagagccccgaatcacgctgtggtcacacggaaagataaggaagcttgcgtccacaagatattacgtcaacagcagcacctatttggaagcaacgtaactgactgctcgggcaacttttgtttgttccggtcggaaaccaaggaccttctgttcagagatgacacagtatgtttggccaaacttcatgacagaaacacatatgaaaaatacttaggagaagaatatgtcaaggctgttggtaacctgagaaaatgctccacctcatcactcctggaagcctgcactttccgtagaccttaaaatctcagaggtagggctgccaccaaggtgaagatgggaacgcagatgatccatgagtttgccctggtttcactggcccaagtggtttgtgctaaccacgtctgtcttcacagctctgtgttgccatgtgtgctgaacaaaaaataaaaattattattgattttatatttcaaaa

SEQ ID NO: 38087 - DNA, 2301 bp, Homo sapiens
  misc_feature (1)..(1): n is a, c, g, or t
  misc_feature (4)..(4): n is a, c, g, or t
  misc_feature (6)..(6): n is a, c, g, or t
  misc_feature (10)..(10): n is a, c, g, or t
  misc_feature (16)..(16): n is a, c, g, or t
  misc_feature (40)..(40): n is a, c, g, or t
  misc_feature (43)..(43): n is a, c, g, or t
ntcngnatcntcttanacccgtaaagcccgatgaactcgncgngggagccctgctggtctgcgccgtcccggggctgtgtctggctgtccctgataaaactgtgagatggtgtgcagtgtcggagcatgaggccactaagtgccagagtttccgcgaccatatgaaaagcgtcattccatccgatggtcccagtgttgcttgtgtgaagaaagcctcctaccttgattgcatcagggccattgcggcaaacgaagcggatgctgtgacactggatgcaggtttggtgtatgatgcttacctggctcccaataacctgaagcctgtggtggcagagttctatgggtcaaaagaggatccacagactttctattatgctgttgctgtggtgaagaaggatagtggcttccagatgaaccagcttcgaggcaagaagtcctgccacacgggtctaggcaggtccgctgggtggaacatccccataggcttactttactgtgacttacctgagccacgtaaacctcttgagaaagcagtggccaatttcttctcgggcagctgtgccccttgtgcggatgggacggacttcccccagctgtgtcaactgtgtccagggtgtggctgctccacccttaaccaatacttcggctactcgggagccttcaagtgtctgaaggatggtgctggggatgtggcctttgtcaagcactcgactatatttgagaacttggcaaacaaggctgacagggaccagtatgagctgctttgcctggacaacacccggaagccggtagatgaatacaaggactgccacttggcccaggtcccttctcataccgtcgtggcccgaagtatgggcggcaaggaggacttgatctgggagcttctcaaccaggcccaggaacattttggcaaagacaaatcaaaagaattccaactattcagctctcctcatgggaaggacctgctgtttaaggactctgcccacgggtttttaaaagtcccccccaggatggatgccaagatgtacctgggctatgagtatgtcactgccatccggaatctacgggaaggcacatgcccagaagccccaacagatgaatgcaagcctgtgaagtggtgtgcgctgagccaccacgagaggctcaagtgtgatgagtggagtgttaacagtgtagggaaaatagagtgtgtatcagcagagaccaccgaagactgcatcgccaagatcatgaatggagaagctgatgccatgagcttggatggagggtttgtctacatagcgggcaagtgtggtctggtgcctgtcttggcagaaaactacaataagagcgataattgtgaggatacaccagaggcagggtattttgctgtagcagtggtgaagaaatcagcttctgacctcacctgggacaatctgaaaggcaagaagtcctgccatacggcagttggcagaaccgctggctggaacatccccatgggcctgctctacaataagatcaaccactgcagatttgatgaatttttcagtgaaggttgtgcccctgggtctaagaaagactccagtctctgtaagctgtgtatgggctcaggcctaaacctgtgtgaacccaacaacaaagagggatactacggctacacaggcgctttcaggtgtctggttgagaagggagatgtggcctttgtgaaacaccagactgtcccacagaacactgggggaaaaaaccctgatccatgggctaagaatctgaatgaaaaagactatgagttgctgtgccttgatggtaccaggaaacctgtggaggagtatgcgaactgccacctggccagagccccgaatcacgctgtggtcacacggaaagataaggaagcttgcgtccacaagatattacgtcaacagcagcacctatttggaagcaacgtaactgactgctcgggcaacttttgtttgttccggtcggaaaccaaggaccttctgttcagagatgacacagtatgtttggccaaacttcatgacagaaacacatatgaaaaatacttaggagaagaatatgtcaaggctgttggtaacctgagaaaatgctccacctcatcactcctggaagcctgcactttccgtagaccttaaaatctcagaggtagggctgccaccaaggtgaagatgggaacgcagatgatccatgagtttgccctggtttcactggcccaagtggtttgtgctaaccacgtctgtcttcacagctctgtgttgccatgtgtgctgaacaaaaaataaaaattattattgattttatatttcaaaa

SEQ ID NO: 38088 - DNA, 2296 bp, Homo sapiens
acggcgagcctcatcctccgggtgcggcgctgagcagcgagtccgactgtgctcgctgctcagcgccgcacccggaggatgaggctcgccgtgggagccctgctggtctgcgccgtcctggggctgtgtctggctgtccctgataaaactgtgagatggtgtgcagtgtcggagcatgaggccactaagtgccagagtttccgcgaccatatgaaaagcgtcattccatccgatggtcccagtgttgcttgtgtgaagaaagcctcctaccttgattgcatcagggccattgcggcaaacgaagcggatgctgtgacactggatgcaggtttggtgtatgatgcttacctggctcccaataacctgaagcctgtggtggcagagttctatgggtcaaaagaggatccacagactttctattatgctgttgctgtggtgaagaaggatagtggcttccagatgaaccagcttcgaggcaagaagtcctgccacacgggtctaggcaggtccgctgggtggaacatccccataggcttactttactgtgacttacctgagccacgtaaacctcttgagaaagcagtggccaatttcttctcgggcagctgtgccccttgtgcggatgggacggacttcccccagctgtgtcaactgtgtccagggtgtggctgctccacccttaaccaatacttcggctactcgggagccttcaagtgtctgaaggatggtgctggggatgtggcctttgtcaagcactcgactatatttgagaacttggcaaacaaggctgacagggaccagtatgagctgctttgcctggacaacacccggaagccggtagatgaatacaaggactgccacttggcccaggtcccttctcataccgtcgtggcccgaagtatgggcggcaaggaggacttgatctgggagcttctcaaccaggcccaggaacattttggcaaagacaaatcaaaagaattccaactattcagctctcctcatgggaaggacctgctgtttaaggactctgcccacgggttttttgccatccggaatctacgggaaggcacatgcccagaagccccaacagatgaatgcaagcctgtgaagtggtgtgcgctgagccaccacgagaggctcaagtgtgatgagtggagtgttaacagtgtagggaaaatagagtgtgtatcagcagagaccaccgaagactgcatcgccaagatcatgaatggagaagctgatgccatgagcttggatggagggtttgtctacatagcgggcaagtgtggtctggtgcctgtcttggcagaaaactacaataagagcgataattgtgaggatacaccagaggcagggtattttgctgtagcagtggtgaagaaatcagcttctgacctcacctgggacaatctgaaaggcaagaagtcctgccatacggcagttggcagaaccgctggctggaacatccccatgggcctgctctacaataagatcaaccactgcagatttgatgaatttttcagtgaaggttgtgcccctgggtctaagaaagactccagtctctgtaagctgtgtatgggctcaggcctaaacctgtgtgaacccaacaacaaagagggatactacggctacacaggcgctttcaggtgtctggttgagaagggagatgtggcctttgtgaaacaccagactgtcccacagaacactgggggaaaaaaccctgatccatgggctaagaatctgaatgaaaaagactatgagttgctgtgccttgatggtaccaggaaacctgtggaggagtatgcgaactgccacctggccagagccccgaatcacgctgtggtcacacggaaagataaggaagcttgcgtccacaagatattacgtcaacagcagcacctatttggaagcaacgtaactgactgctcgggcaacttttgtttgttccggtcggaaaccaaggaccttctgttcagagatgacacagtatgtttggccaaacttcatgacagaaacacatatgaaaaatacttaggagaagaatatgtcaaggctgttggtaacctgagaaaatgctccacctcatcactcctggaagcctgcactttccgtagaccttaaaatctcagaggtagggctgccaccaaggtgaagatgggaacgcagatgatccatgagtttgccctggtttcactggcccaagtggtttgtgctaaccacgtctgtcttcacagctctgtgttgccatgtgtgctgaacaaaaaataaaaattattattgattttatatttcaaaa

SEQ ID NO: 38089 - DNA, 2283 bp, Homo sapiens
acggcgagcctcatcctccgggtgcggcgctgagcagcgagtccgactgtgctcgctgctcagcgccgcacccggaggatgaggctcgccgtgggagccctgctggtctgcgccgtcctggggctgtgtctggctgtccctgataaaactgtgagatggtgtgcagtgtcggagcatgaggccactaagtgccagagtttccgcgaccatatgaaaagcgtcattccatccgatggtcccagtgttgcttgtgtgaagaaagcctcctaccttgattgcatcagggccattgcggcaaacgaagcggatgctgtgacactggatgcaggtttggtgtatgatgcttacctggctcccaataacctgaagcctgtggtggcagagttctatgggtcaaaagaggatccacagactttctattatgctgttgctgtggtgaagaaggatagtggcttccagatgaaccagcttcgaggcaagaagtcctgccacacgggtctaggcaggtccgctgggtggaacatccccataggcttactttactgtgacttacctgagccacgtaaacctcttgagaaagcagtggccaatttcttctcgggcagctgtgccccttgtgcggatgggacggacttcccccagctgtgtcaactgtgtccagggtgtggctgctccacccttaaccaatacttcggctactcgggagccttcaagtgtctgaaggatggtgctggggatgtggcctttgtcaagcactcgactatatttgagaacttggcaaacaaggctgacagggaccagtatgagctgctttgcctggacaacacccggaagccggtagatgaatacaaggactgccacttggcccaggtcccttctcataccgtcgtggcccgaagtatgggcggcaaggaggacttgatctgggagcttctcaaccaggcccaggaacattttggcaaagacaaatcaaaagaattccaactattcagctctcctcatgggaaggacctgctgtttaaggactctgcccacgggtttttaaaagtcccccccaggatggatgccaagatgtacctgggctatgagtatgtcactgccatccggaatctacgggaaggcacatgcccagaagccccaacagatgaatgcaagcctgtgaagtggtgtgcgctgagccaccacgagaggctcaagtgtgatgagtggagtgtaatggagaagctgatgccatgagcttggatggagggtttgtctacatagcgggcaagtgtggtctggtgcctgtcttggcagaaaactacaataagagcgataattgtgaggatacaccagaggcagggtattttgctgtagcagtggtgaagaaatcagcttctgacctcacctgggacaatctgaaaggcaagaagtcctgccatacggcagttggcagaaccgctggctggaacatccccatgggcctgctctacaataagatcaaccactgcagatttgatgaatttttcagtgaaggttgtgcccctgggtctaagaaagactccagtctctgtaagctgtgtatgggctcaggcctaaacctgtgtgaacccaacaacaaagagggatactacggctacacaggcgctttcaggtgtctggttgagaagggagatgtggcctttgtgaaacaccagactgtcccacagaacactgggggaaaaaaccctgatccatgggctaagaatctgaatgaaaaagactatgagttgctgtgccttgatggtaccaggaaacctgtggaggagtatgcgaactgccacctggccagagccccgaatcacgctgtggtcacacggaaagataaggaagcttgcgtccacaagatattacgtcaacagcagcacctatttggaagcaacgtaactgactgctcgggcaacttttgtttgttccggtcggaaaccaaggaccttctgttcagagatgacacagtatgtttggccaaacttcatgacagaaacacatatgaaaaatacttaggagaagaatatgtcaaggctgttggtaacctgagaaaatgctccacctcatcactcctggaagcctgcactttccgtagaccttaaaatctcagaggtagggctgccaccaaggtgaagatgggaacgcagatgatccatgagtttgccctggtttcactggcccaagtggtttgtgctaaccacgtctgtcttcacagctctgtgttgccatgtgtgctgaacaaaaaataaaaattattattgattttatatttcaaaa

SEQ ID NO: 38090 - DNA, 2297 bp, Homo sapiens
acggcgagcctcatcctccgggtgcggcgctgagcagcgagtccgactgtgctcgctgctcagcgccgcacccggaggatgaggctcgccgtgggagccctgctggtctgcgccgtcctggggctgtgtctggctgtccctgataaaactgtgagatggtgtgcagtgtcggagcatgaggccactaagtgccagagtttccgcgaccatatgaaaagcgtcattccatccgatggtcccagtgttgcttgtgtgaagaaagcctcctaccttgattgcatcagggccattgcggcaaacgaagcggatgctgtgacactggatgcaggtttggtgtatgatgcttacctggctcccaataacctgaagcctgtggtggcagagttctatgggtcaaaagaggatccacagactttctattatgctgttgctgtggtgaagaaggatagtggcttccagatgaaccagcttcgaggcaagaagtcctgccacacgggtctaggcaggtccgctgggtggaacatccccataggcttactttactgtgacttacctgagccacgtaaacctcttgagaaagcagtggccaatttcttctcgggcagctgtgccccttgtgcggatgggacggacttcccccagctgtgtcaactgtgtccagggtgtggctgctccacccttaaccaatacttcggctactcgggagccttcaagtgtctgaaggatggtgctggggatgtggcctttgtcaagcactcgactatatttgaacacccggaagccggtagatgaatacaaggactgccacttggcccaggtcccttctcataccgtcgtggcccgaagtatgggcggcaaggaggacttgatctgggagcttctcaaccaggcccaggaacattttggcaaagacaaatcaaaagaattccaactattcagctctcctcatgggaaggacctgctgtttaaggactctgcccacgggtttttaaaagtcccccccaggatggatgccaagatgtacctgggctatgagtatgtcactgccatccggaatctacgggaaggcacatgcccagaagccccaacagatgaatgcaagcctgtgaagtggtgtgcgctgagccaccacgagaggctcaagtgtgatgagtggagtgttaacagtgtagggaaaatagagtgtgtatcagcagagaccaccgaagactgcatcgccaagatcatgaatggagaagctgatgccatgagcttggatggagggtttgtctacatagcgggcaagtgtggtctggtgcctgtcttggcagaaaactacaataagagcgataattgtgaggatacaccagaggcagggtattttgctgtagcagtggtgaagaaatcagcttctgacctcacctgggacaatctgaaaggcaagaagtcctgccatacggcagttggcagaaccgctggctggaacatccccatgggcctgctctacaataagatcaaccactgcagatttgatgaatttttcagtgaaggttgtgcccctgggtctaagaaagactccagtctctgtaagctgtgtatgggctcaggcctaaacctgtgtgaacccaacaacaaagagggatactacggctacacaggcgctttcaggtgtctggttgagaagggagatgtggcctttgtgaaacaccagactgtcccacagaacactgggggaaaaaaccctgatccatgggctaagaatctgaatgaaaaagactatgagttgctgtgccttgatggtaccaggaaacctgtggaggagtatgcgaactgccacctggccagagccccgaatcacgctgtggtcacacggaaagataaggaagcttgcgtccacaagatattacgtcaacagcagcacctatttggaagcaacgtaactgactgctcgggcaacttttgtttgttccggtcggaaaccaaggaccttctgttcagagatgacacagtatgtttggccaaacttcatgacagaaacacatatgaaaaatacttaggagaagaatatgtcaaggctgttggtaacctgagaaaatgctccacctcatcactcctggaagcctgcactttccgtagaccttaaaatctcagaggtagggctgccaccaaggtgaagatgggaacgcagatgatccatgagtttgccctggtttcactggcccaagtggtttgtgctaaccacgtctgtcttcacagctctgtgttgccatgtgtgctgaacaaaaaataaaaattattattgattttatatttcaaaa

SEQ ID NO: 38091 - DNA, 2317 bp, Homo sapiens
acggcgagcctcatcctccgggtgcggcgctgagcagcgagtccgactgtgctcgctgctcagcgccgcacccggaggatgaggctcgccgtgggagccctgctggtctgcgccgtcctggggctgtgtctggctgtccctgataaaactgtgagatggtgtgcagtgtcggagcatgaggccactaagtgccagagtttccgcgaccatatgaaaagcgtcattccatccgatggtcccagtgttgcttgtgtgaagaaagcctcctaccttgattgcatcagggccattgcggcaaacgaagcggatgctgtgacactggatgcaggtttggtgtatgatgcttacctggctcccaataacctgaagcctgtggtggcagagttctatgggtcaaaagaggatccacagactttctattatgctgttgctgtggtgaagaaggatagtggcttccagatgaaccagcttcgaggcaagaagtcctgccacacgggtctaggcaggtccgctgggtggaacatccccataggcttactttactgtgacttacctgagccacgtaaacctcttgagaaagcagtggccaatttcttctcgggcagctgtgccccttgtgcggatgggacggacttcccccagctgtgtcaactgtgtccagggtgtggctgctccacccttaaccaatacttcggctactcgggagccttcaagtgtctgaaggatggtgctggggatgtggcctttgtcaagcactcgactatatttgagaacttggcaaacaaggctgacagggaccagtatgagctgctttgcctggacaacacccggaagccggtagatgaatacaaggactgccacttggcccaggtcccttctcataccgtcgtggcccgaagtatgggcggcaaggaggacttgatctgggagcttctcaaccaggcccaggaacattttggcaaagacaaatcaaaagaattccaactattcagctctcctcatgggaaggacctgctgtttaaggactctgcccacgggtttttaaaagtcccccccaggatggatgccaagatgtacctgggctatgagtatgtcactgccatccggaatctacgggaaggcacatgcccagaagccccaacagatgaatgcaagcctgtgaagtggtgtgcgctgagccaccacgagaggctcaagtgtgatgagtggagtgttaacagtgtagggaaaatagagtgtgtatcagcagagaccaccgaagactgcatcgccaagatcatgaatggagaagctgatgccatgagcttggatggagggtttgtctacatagcgggcaagtgtggtctggtgcctgtcttggcagaaaactacaataggtattttgctgtagcagtggtgaagaaatcagcttctgacctcacctgggacaatctgaaaggcaagaagtcctgccatacggcagttggcagaaccgctggctggaacatccccatgggcctgctctacaataagatcaaccactgcagatttgatgaatttttcagtgaaggttgtgcccctgggtctaagaaagactccagtctctgtaagctgtgtatgggctcaggcctaaacctgtgtgaacccaacaacaaagagggatactacggctacacaggcgctttcaggtgtctggttgagaagggagatgtggcctttgtgaaacaccagactgtcccacagaacactgggggaaaaaaccctgatccatgggctaagaatctgaatgaaaaagactatgagttgctgtgccttgatggtaccaggaaacctgtggaggagtatgcgaactgccacctggccagagccccgaatcacgctgtggtcacacggaaagataaggaagcttgcgtccacaagatattacgtcaacagcagcacctatttggaagcaacgtaactgactgctcgggcaacttttgtttgttccggtcggaaaccaaggaccttctgttcagagatgacacagtatgtttggccaaacttcatgacagaaacacatatgaaaaatacttaggagaagaatatgtcaaggctgttggtaacctgagaaaatgctccacctcatcactcctggaagcctgcactttccgtagaccttaaaatctcagaggtagggctgccaccaaggtgaagatgggaacgcagatgatccatgagtttgccctggtttcactggcccaagtggtttgtgctaaccacgtctgtcttcacagctctgtgttgccatgtgtgctgaacaaaaaataaaaattattattgattttatatttcaaaa

SEQ ID NO: 38092 - DNA, 1696 bp, Homo sapiens
acggcgagcctcatcctccgggtgcggcgctgagcagcgagtccgactgtgctcgctgctcagcgccgcacccggaggatgaggctcgccgtgggagccctgctggtctgcgccgtcctggggctgtgtctggctgtccctgataaaactgtgagatggtgtgcagtgtcggagcatgaggccactaagtgccagagtttccgcgaccatatgaaaagcgtcattccatccgatggtcccagtgttgcttgtgtgaagaaagcctcctaccttgattgcatcagggccattgcggcaaacgaagcggatgctgtgacactggatgcaggtttggtgtatgatgcttacctggctcccaataacctgaagcctgtggtggcagagttctatgggtcaaaagaggatccacagactttctattatgctgttgctgtggtgaagaaggatagtggcttccagatgaaccagcttcgcccagaagccccaacagatgaatgcaagcctgtgaagtggtgtgcgctgagccaccacgagaggctcaagtgtgatgagtggagtgttaacagtgtagggaaaatagagtgtgtatcagcagagaccaccgaagactgcatcgccaagatcatgaatggagaagctgatgccatgagcttggatggagggtttgtctacatagcgggcaagtgtggtctggtgcctgtcttggcagaaaactacaataagagcgataattgtgaggatacaccagaggcagggtattttgctgtagcagtggtgaagaaatcagcttctgacctcacctgggacaatctgaaaggcaagaagtcctgccatacggcagttggcagaaccgctggctggaacatccccatgggcctgctctacaataagatcaaccactgcagatttgatgaatttttcagtgaaggttgtgcccctgggtctaagaaagactccagtctctgtaagctgtgtatgggctcaggcctaaacctgtgtgaacccaacaacaaagagggatactacggctacacaggcgctttcaggtgtctggttgagaagggagatgtggcctttgtgaaacaccagactgtcccacagaacactgggggaaaaaaccctgatccatgggctaagaatctgaatgaaaaagactatgagttgctgtgccttgatggtaccaggaaacctgtggaggagtatgcgaactgccacctggccagagccccgaatcacgctgtggtcacacggaaagataaggaagcttgcgtccacaagatattacgtcaacagcagcacctatttggaagcaacgtaactgactgctcgggcaacttttgtttgttccggtcggaaaccaaggaccttctgttcagagatgacacagtatgtttggccaaacttcatgacagaaacacatatgaaaaatacttaggagaagaatatgtcaaggctgttggtaacctgagaaaatgctccacctcatcactcctggaagcctgcactttccgtagaccttaaaatctcagaggtagggctgccaccaaggtgaagatgggaacgcagatgatccatgagtttgccctggtttcactggcccaagtggtttgtgctaaccacgtctgtcttcacagctctgtgttgccatgtgtgctgaacaaaaaataaaaattattattgattttatatttcaaaa

SEQ ID NO: 38093 - DNA, 1256 bp, Homo sapiens
  misc_feature (17)..(18): n is a, c, g, or t
ccccccccccttccttnngctcccttcgttcagcccagaagccccaacagatgaatgcaagcctgtgaagtggtgtgcgctgagccaccacgagaggctcaagtgtgatgagtggagtgttaacagtgtagggaaaatagagtgtgtatcagcagagaccaccgaagactgcatcgccaagatcatgaatggagaagctgatgccatgagcttggatggagggtttgtctacatagcgggcaagtgtggtctggtgcctgtcttggcagaaaactacaataagagcgataattgtgaggatacaccagaggcagggtattttgctgtagcagtggtgaagaaatcagcttctgacctcacctgggacaatctgaaaggcaagaagtcctgccatacggcagttggcagaaccgctggctggaacatccccatgggcctgctctacaataagatcaaccactgcagatttgatgaatttttcagtgaaggttgtgcccctgggtctaagaaagactccagtctctgtaagctgtgtatgggctcaggcctaaacctgtgtgaacccaacaacaaagagggatactacggctacacaggcgctttcaggtgtctggttgagaagggagatgtggcctttgtgaaacaccagactgtcccacagaacactgggggaaaaaaccctgatccatgggctaagaatctgaatgaaaaagactatgagttgctgtgccttgatggtaccaggaaacctgtggaggagtatgcgaactgccacctggccagagccccgaatcacgctgtggtcacacggaaagataaggaagcttgcgtccacaagatattacgtcaacagcagcacctatttggaagcaacgtaactgactgctcgggcaacttttgtttgttccggtcggaaaccaaggaccttctgttcagagatgacacagtatgtttggccaaacttcatgacagaaacacatatgaaaaatacttaggagaagaatatgtcaaggctgttggtaacctgagaaaatgctccacctcatcactcctggaagcctgcactttccgtagaccttaaaatctcagaggtagggctgccaccaaggtgaagatgggaacgcagatgatccatgagtttgccctggtttcactggcccaagtggtttgtgctaaccacgtctgtcttcacagctctgtgttgccatgtgtgctgaacaaaaaataaaaattattattgattttatatttcaaaa

SEQ ID NO: 38094 - DNA, 2285 bp, Homo sapiens
acggcgagcctcatcctccgggtgcggcgctgagcagcgagtccgactgtgctcgctgctcagcgccgcacccggaggatgaggctcgccgtgggagccctgctggtctgcgccgtcctggggctgtgtctggctgtccctgataaaactgtgagatggtgtgcagtgtcggagcatgaggccactaagtgccagagtttccgcgaccatatgaaaagcgtcattccatccgatggtcccagtgttgcttgtgtgaagaaagcctcctaccttgattgcatcagggccattgcggcaaacgaagcggatgctgtgacactggatgcaggtttggtgtatgatgcttacctggctcccaataacctgaagcctgtggtggcagagttctatgggtcaaaagaggatccacagactttctattatgctgttgctgtggtgaagaaggatagtggcttccagatgaaccagcttcgaggcaagaagtcctgccacacgggtctaggcaggtccgctgggtggaacatccccataggcttactttactgtgacttacctgagccacgtaaacctcttgagaaagcagtggccaatttcttctcgggcagctgtgccccttgtgcggatgggacggacttcccccagctgtgtcaactgtgtccagggtgtggctgctccacccttaaccaatacttcggctactcgggagccttcaagtgtctgaaggatggtgctggggatgtggcctttgtcaagcactcgactatatttgagaacttggcaaacaaggctgacagggaccagtatgagctgctttgcctggacaacacccggaagccggtagatgaatacaaggactgccacttggcccaggtcccttctcataccgtcgtggcccgaagtatgggcggcaaggaggacttgatctgggagcttctcaaccaggcccaggaacattttggcaaagacaaatcaaaagaattccaactattcagctctcctcatgggaaggacctgctgtttaaggactctgcccacgggtttttaaaagtcccccccaggatggatgccaagatgtacctgggctatgagtatgtcactgccatccggaatctacgggaaggcacatgcccagaagccccaacagatgaatgcaagcctgtgaagtggtgtgcgctgagccaccacgagaggctcaagtgtgatgagtggagtgttaacagtgtagggaaaatagagtgtgtatcagcagagaccaccgaagactgcatcgccaagatcatgaatggagaagctgatgccatgagcttggatggagggtttgtctacatagcgggcaagtgtggtctggtgcctgtcttggcagaaaactacaataagagcgataattgtgaggatacaccagaggcagggtattttgctgtagcagtggtgaagaaatcagcttctgacctcacctgggacaatctgaaaggcaagaagtcctgccatacggcagttggcagaaccgctggctggaacatccccatgggcctgctctacaataagatcaaccactgcagatttgatgaatttttcagtgaaggttgtgcccctgggtctaagaaagactccagtctctgtaagctgtgtatgggctcaggcctaaacctgtgtgaacccaacaacaaagagggatactacggctacacaggcgctttcaggaaaaaaccctgatccatgggctaagaatctgaatgaaaaagactatgagttgctgtgccttgatggtaccaggaaacctgtggaggagtatgcgaactgccacctggccagagccccgaatcacgctgtggtcacacggaaagataaggaagcttgcgtccacaagatattacgtcaacagcagcacctatttggaagcaacgtaactgactgctcgggcaacttttgtttgttccggtcggaaaccaaggaccttctgttcagagatgacacagtatgtttggccaaacttcatgacagaaacacatatgaaaaatacttaggagaagaatatgtcaaggctgttggtaacctgagaaaatgctccacctcatcactcctggaagcctgcactttccgtagaccttaaaatctcagaggtagggctgccaccaaggtgaagatgggaacgcagatgatccatgagtttgccctggtttcactggcccaagtggtttgtgctaaccacgtctgtcttcacagctctgtgttgccatgtgtgctgaacaaaaaataaaaattattattgattttatatttcaaaa

SEQ ID NO: 38095 - DNA, 2288 bp, Homo sapiens
acggcgagcctcatcctccgggtgcggcgctgagcagcgagtccgactgtgctcgctgctcagcgccgcacccggaggatgaggctcgccgtgggagccctgctggtctgcgccgtcctggggctgtgtctggctgtccctgataaaactgtgagatggtgtgcagtgtcggagcatgaggccactaagtgccagagtttccgcgaccatatgaaaagcgtcattccatccgatggtcccagtgttgcttgtgtgaagaaagcctcctaccttgattgcatcagggccattgcggcaaacgaagcggatgctgtgacactggatgcaggtttggtgtatgatgcttacctggctcccaataacctgaagcctgtggtggcagagttctatgggtcaaaagaggatccacagactttctattatgctgttgctgtggtgaagaaggatagtggcttccagatgaaccagcttcgaggcaagaagtcctgccacacgggtctaggcaggtccgctgggtggaacatccccataggcttactttactgtgacttacctgagccacgtaaacctcttgagaaagcagtggccaatttcttctcgggcagctgtgccccttgtgcggatgggacggacttcccccagctgtgtcaactgtgtccagggtgtggctgctccacccttaaccaatacttcggctactcgggagccttcaagtgtctgaaggatggtgctggggatgtggcctttgtcaagcactcgactatatttgagaacttggcaaacaaggctgacagggaccagtatgagctgctttgcctggacaacacccggaagccggtagatgaatacaaggactgccacttggcccaggtcccttctcataccgtcgtggcccgaagtatgggcggcaaggaggacttgatctgggagcttctcaaccaggcccaggaacattttggcaaagacaaatcaaaagaattccaactattcagctctcctcatgggaaggacctgctgtttaaggactctgcccacgggtttttaaaagtcccccccaggatggatgccaagatgtacctgggctatgagtatgtcactgccatccggaatctacgggaaggcacatgcccagaagccccaacagatgaatgcaagcctgtgaagtggtgtgcgctgagccaccacgagaggctcaagtgtgatgagtggagtgttaacagtgtagggaaaatagagtgtgtatcagcagagaccaccgaagactgcatcgccaagatcatgaatggagaagctgatgccatgagcttggatggagggtttgtctacatagcgggcaagtgtggtctggtgcctgtcttggcagaaaactacaataagagcgataattgtgaggatacaccagaggcagggtattttgctgtagcagtggtgaagaaatcagcttctgacctcacctgggacaatctgaaaggcaagaagtcctgccatacggcagttggcagaaccgctggctggaacatccccatgggcctgctctacaataagatcaaccactgcagatttgatgaatttttcagtgaaggttgtgcccctgggtctaagaaagactccagtctctgtaagctgtgtatgggctcaggcctaaacctgtgtgaacccaacaacaaagagggatactacggctacacaggcgctttcaggtgtctggttgagaagggagatgtggcctttgtgaaacaccagactgtcccacagaacactgggggaaaaaaccctgatccatgggctaagaatctgaatgtgccacctggccagagccccgaatcacgctgtggtcacacggaaagataaggaagcttgcgtccacaagatattacgtcaacagcagcacctatttggaagcaacgtaactgactgctcgggcaacttttgtttgttccggtcggaaaccaaggaccttctgttcagagatgacacagtatgtttggccaaacttcatgacagaaacacatatgaaaaatacttaggagaagaatatgtcaaggctgttggtaacctgagaaaatgctccacctcatcactcctggaagcctgcactttccgtagaccttaaaatctcagaggtagggctgccaccaaggtgaagatgggaacgcagatgatccatgagtttgccctggtttcactggcccaagtggtttgtgctaaccacgtctgtcttcacagctctgtgttgccatgtgtgctgaacaaaaaataaaaattattattgattttatatttcaaaa

SEQ ID NO: 38096 - DNA, 2296 bp, Homo sapiens
acggcgagcctcatcctccgggtgcggcgctgagcagcgagtccgactgtgctcgctgctcagcgccgcacccggaggatgaggctcgccgtgggagccctgctggtctgcgccgtcctggggctgtgtctggctgtccctgataaaactgtgagatggtgtgcagtgtcggagcatgaggccactaagtgccagagtttccgcgaccatatgaaaagcgtcattccatccgatggtcccagtgttgcttgtgtgaagaaagcctcctaccttgattgcatcagggccattgcggcaaacgaagcggatgctgtgacactggatgcaggtttggtgtatgatgcttacctggctcccaataacctgaagcctgtggtggcagagttctatgggtcaaaagaggatccacagactttctattatgctgttgctgtggtgaagaaggatagtggcttccagatgaaccagcttcgaggcaagaagtcctgccacacgggtctaggcaggtccgctgggtggaacatccccataggcttactttactgtgacttacctgagccacgtaaacctcttgagaaagcagtggccaatttcttctcgggcagctgtgccccttgtgcggatgggacggacttcccccagctgtgtcaactgtgtccagggtgtggctgctccacccttaaccaatacttcggctactcgggagccttcaagtgtctgaaggatggtgctggggatgtggcctttgtcaagcactcgactatatttgagaacttggcaaacaaggctgacagggaccagtatgagctgctttgcctggacaacacccggaagccggtagatgaatacaaggactgccacttggcccaggtcccttctcataccgtcgtggcccgaagtatgggcggcaaggaggacttgatctgggagcttctcaaccaggcccaggaacattttggcaaagacaaatcaaaagaattccaactattcagctctcctcatgggaaggacctgctgtttaaggactctgcccacgggtttttaaaagtcccccccaggatggatgccaagatgtacctgggctatgagtatgtcactgccatccggaatctacgggaaggcacatgcccagaagccccaacagatgaatgcaagcctgtgaagtggtgtgcgctgagccaccacgagaggctcaagtgtgatgagtggagtgttaacagtgtagggaaaatagagtgtgtatcagcagagaccaccgaagactgcatcgccaagatcatgaatggagaagctgatgccatgagcttggatggagggtttgtctacatagcgggcaagtgtggtctggtgcctgtcttggcagaaaactacaataagagcgataattgtgaggatacaccagaggcagggtattttgctgtagcagtggtgaagaaatcagcttctgacctcacctgggacaatctgaaaggcaagaagtcctgccatacggcagttggcagaaccgctggctggaacatccccatgggcctgctctacaataagatcaaccactgcagatttgatgaatttttcagtgaaggttgtgcccctgggtctaagaaagactccagtctctgtaagctgtgtatgggctcaggcctaaacctgtgtgaacccaacaacaaagagggatactacggctacacaggcgctttcaggtgtctggttgagaagggagatgtggcctttgtgaaacaccagactgtcccacagaacactgggggaaaaaaccctgatccatgggctaagaatctgaatgaaaaagactatgagttgctgtgccttgatggtaccaggaaacctgtggaggagtatgcgaactgccacctggccagagccccgaatcacgctgtggtcacacggaaagataaggaagcttgcgtccacaagatattacgtcaacagcagcacctatttggaagcaacgtaactgactgctcgggcaacttttgtttgttccggtcggaaaccaaggaccttctgttcagagatgacacagtatgtttggccaaacttcatgacagaaacacatatgaaaaatacttaggagaagaatatgtcaaggctgttggtaacctgagaaaatgctccacctcatcactcctggaagcctgcactttccgtagaccttaaaattttgccctggtttcactggcccaagtggtttgtgctaaccacgtctgtcttcacagctctgtgttgccatgtgtgctgaacaaaaaataaaaattattattgattttatatttcaaaa

SEQ ID NO: 38097 - DNA, 2326 bp, Homo sapiens
acggcgagcctcatcctccgggtgcggcgctgagcagcgagtccgactgtgctcgctgctcagcgccgcacccggaggatgaggctcgccgtgggagccctgctggtctgcgccgtcctggggctgtgtctggctgtccctgataaaactgtgagatggtgtgcagtgtcggagcatgaggccactaagtgccagagtttccgcgaccatatgaaaagcgtcattccatccgatggtcccagtgttgcttgtgtgaagaaagcctcctaccttgattgcatcagggccattgcggcaaacgaagcggatgctgtgacactggatgcaggtttggtgtatgatgcttacctggctcccaataacctgaagcctgtggtggcagagttctatgggtcaaaagaggatccacagactttctattatgctgttgctgtggtgaagaaggatagtggcttccagatgaaccagcttcgaggcaagaagtcctgccacacgggtctaggcaggtccgctgggtggaacatccccataggcttactttactgtgacttacctgagccacgtaaacctcttgagaaagcagtggccaatttcttctcgggcagctgtgccccttgtgcggatgggacggacttcccccagctgtgtcaactgtgtccagggtgtggctgctccacccttaaccaatacttcggctactcgggagccttcaagtgtctgaaggatggtgctggggatgtggcctttgtcaagcactcgactatatttgagaacttggcaaacaaggctgacagggaccagtatgagctgctttgcctggacaacacccggaagccggtagatgaatacaaggactgccacttggcccaggtcccttctcataccgtcgtggcccgaagtatgggcggcaaggaggacttgatctgggagcttctcaaccaggcccaggaacattttggcaaagacaaatcaaaagaattccaactattcagctctcctcatgggaaggacctgctgtttaaggactctgcccacgggtttttaaaagtcccccccaggatggatgccaagatgtacctgggctatgagtatgtcactgccatccggaatctacgggaaggcacatgcccagaagccccaacagatgaatgcaagcctgtgaagtggtgtgcgctgagccaccacgagaggctcaagtgtgatgagtggagtgttaacagtgtagggaaaatagagtgtgtatcagcagagaccaccgaagactgcatcgccaagatcatgaatggagaagctgatgccatgagcttggatggagggtttgtctacatagcgggcaagtgtggtctggtgcctgtcttggcagaaaactacaataagagcgataattgtgaggatacaccagaggcagggtattttgctgtagcagtggtgaagaaatcagcttctgacctcacctgggacaatctgaaaggcaagaagtcctgccatacggcagttggcagaaccgctggctggaacatccccatgggcctgctctacaataagatcaaccactgcagatttgatgaatttttcagtgaaggttgtgcccctgggtctaagaaagactccagtctctgtaagctgtgtatgggctcaggcctaaacctgtgtgaacccaacaacaaagagggatactacggctacacaggcgctttcaggtgtctggttgagaagggagatgtggcctttgtgaaacaccagactgtcccacagaacactgggggaaaaaaccctgatccatgggctaagaatctgaatgaaaaagactatgagttgctgtgccttgatggtaccaggaaacctgtggaggagtatgcgaactgccacctggccagagccccgaatcacgctgtggtcacacggaaagataaggaagcttgcgtccacaagatattacgtcaacagcagcacctatttggaagcaacgtaactgactgctcgggcaacttttgtttgttccggtcggaaaccaaggaccttctgttcagagatgacacagtatgtttggccaaacttcatgacagaaacacatatgaaaaatacttaggagaagaatatgtcaaggctgttggtaacctgagaaaatgctccacctcatctctcctgaaagcatgggctctatgtatcccctaatataacaaaggaggtcagcctaacaagcatgagatcgttctcctatgatcatgagtgtcaatggtttcactggaccaagtggtttgtactaaaatattccgaatccacagctaagtcatatcacgcgtcatggtcaaaaaatcacaggcat

SEQ ID NO: 38098 - DNA, 2294 bp, Homo sapiens
acggcgagcctcatcctccgggtgcggcgctgagcagcgagtccgactgtgctcgctgctcagcgccgcacccggaggatgaggctcgccgtgggagccctgctggtctgcgccgtcctggggctgtgtctggctgtccctgataaaactgtgagatggtgtgcagtgtcggagcatgaggccactaagtgccagagtttccgcgaccatatgaaaagcgtcattccatccgatggtcccagtgttgcttgtgtgaagaaagcctcctaccttgattgcatcagggccattgcggcaaacgaagcggatgctgtgacactggatgcaggtttggtgtatgatgcttacctggctcccaataacctgaagcctgtggtggcagagttctatgggtcaaaagaggatccacagactttctattatgctgttgctgtggtgaagaaggatagtggcttccagatgaaccagcttcgaggcaagaagtcctgccacacgggtctaggcaggtccgctgggtggaacatccccataggcttactttactgtgacttacctgagccacgtaaacctcttgagaaagcagtggccaatttcttctcgggcagctgtgccccttgtgcggatgggacggacttcccccagctgtgtcaactgtgtccagggtgtggctgctccacccttaaccaatacttcggctactcgggagccttcaagtgtctgaaggatggtgctggggatgtggcctttgtcaagcactcgactatatttgagaacttggcaaacaaggctgacagggaccagtatgagctgctttgcctggacaacacccggaagccggtagatgaatacaaggactgccacttggcccaggtcccttctcataccgtcgtggcccgaagtatgggcggcaaggaggacttgatctgggagcttctcaaccaggcccaggaacattttggcaaagacaaatcaaaagaattccaactattcagctctcctcatgggaaggacctgctgtttaaggactctgcccacgggtttttaaaagtcccccccaggatggatgccaagatgtacctgggctatgagtatgtcactgccatccggaatctacgggaaggcacatgcccagaagccccaacagatgaatgcaagcctgtgaagtggtgtgcgctgagccaccacgagaggctcaagtgtgatgagtggagtgttaacagtgtagggaaaatagagtgtgtatcagcagagaccaccgaagactgcatcgccaagatcatgaatggagaagctgatgccatgagcttggatggagggtttgtctacatagcgggcaagtgtggtctggtgcctgtcttggcagaaaactacaataagagcgataattgtgaggatacaccagaggcagggtattttgctgtagcagtggtgaagaaatcagcttctgacctcacctgggacaatctgaaaggcaagaagtcctgccatacggcagttggcagaaccgctggctggaacatccccatgggcctgctctacaataagatcaaccactgcagatttgatgaatttttcagtgaaggttgtgcccctgggtctaagaaagactccagtctctgtaagctgtgtatgggctcaggcctaaacctgtgtgaacccaacaacaaagagggatactacggctacacaggcgctttcaggtgtctggttgagaagggagatgtggcctttgtgaaacaccagactgtcccacagaacactgggggaaaaaaccctgatccatgggctaagaatctgaatgaaaaagactatgagttgctgtgccttgatggtaccaggaaacctgtggaggagtatgcgaactgccacctggccagagccccgaatcacgctgtggtcacacggaaagataaggaagcttgcgtccacaagatattacgtcaacagcagcacctatttggaagcaacgtaactgactgctcgggcaacttttgtttgttccggtcggaaaccaaggaccttctgttcagagatgacacagtatgtttggccaaacttcatgacagaaacacatatgaaaaatacactcctggaagcctgcactttccgtagaccttaaaatctcagaggtagggctgccaccaaggtgaagatgggaacgcagatgatccatgagtttgccctggtttcactggcccaagtggtttgtgctaaccacgtctgtcttcacagctctgtgttgccatgtgtgctgaacaaaaaataaaaattattattgattttatatttcaaaa

SEQ ID NO: 38099 - DNA, 2250 bp, Homo sapiens
acggcgagcctcatcctccgggtgcggcgctgagcagcgagtccgactgtgctcgctgctcagcgccgcacccggaggatgaggctcgccgtgggagccctgctggtctgcgccgtcctggggctgtgtctggctgtccctgataaaactgtgagatggtgtgcagtgtcggagcatgaggccactaagtgccagagtttccgcgaccatatgaaaagcgtcattccatccgatggtcccagtgttgcttgtgtgaagaaagcctcctaccttgattgcatcagggccattgcggcaaacgaagcggatgctgtgacactggatgcaggtttggtgtatgatgcttacctggctcccaataacctgaagcctgtggtggcagagttctatgggtcaaaagaggatccacagactttctattatgctgttgctgtggtgaagaaggatagtggcttccagatgaaccagcttcgaggcaagaagtcctgccacacgggtctaggcaggtccgctgggtggaacatccccataggcttactttactgtgacttacctgagccacgtaaacctcttgagaaagcagtggccaatttcttctcgggcagctgtgccccttgtgcggatgggacggacttcccccagctgtgtcaactgtgtccagggtgtggctgctccacccttaaccaatacttcggctactcgggagccttcaagtgtctgaaggatggtgctggggatgtggcctttgtcaagcactcgactatatttgagaacttggcaaacaaggctgacagggaccagtatgagctgctttgcctggacaacacccggaagccggtagatgaatacaaggactgccacttggcccaggtcccttctcataccgtcgtggcccgaagtatgggcggcaaggaggacttgatctgggagcttctcaaccaggcccaggaacattttggcaaagacaaatcaaaagaattccaactattcagctctcctcatgggaaggacctgctgtttaaggactctgcccacgggtttttaaaagtcccccccaggatggatgccaagatgtacctgggctatgagtatgtcactgccatccggaatctacgggaaggcacatgcccagaagccccaacagatgaatgcaagcctgtgaagtggtgtgcgctgagccaccacgagaggctcaagtgtgatgagtggagtgttaacagtgtagggaaaatagagtgtgtatcagcagagaccaccgaagactgcatcgccaagatcatgaatggagaagctgatgccatgagcttggatggagggtttgtctacatagcgggcaagtgtggtctggtgcctgtcttggcagaaaactacaataagagcgataattgtgaggatacaccagaggcagggtattttgctgtagcagtggtgaagaaatcagcttctgacctcacctgggacaatctgaaaggcaagaagtcctgccatacggcagttggcagaaccgctggctggaacatccccatgggcctgctctacaataagatcaaccactgcagatttgatgaatttttcagtgaaggttgtgcccctgggtctaagaaagactccagtctctgtaagctgtgtatgggctcaggcctaaacctgtgtgaacccaacaacaaagagggatactacggctacacaggcgctttcaggtgtctggttgagaagggagatgtggcctttgtgaaacaccagactgtcccacagaacactgggggaaaaaaccctgatccatgggctaagaatctgaatgaaaaagactatgagttgctgtgccttgatggtaccaggaaacctgtggaggagtatgcgaactgccacctggccagagccccgaatcacgctgtggtcacacggaaagataaggaagcttgcgtccacaagatattacgtcaacagcagcacctatttggaagcaacgtaactgactgctcgggcaacttttgtttgttccggtcggaaaccaaggaccttctgttcagagatgacacacactcctggaagcctgcactttccgtagaccttaaaatctcagaggtagggctgccaccaaggtgaagatgggaacgcagatgatccatgagtttgccctggtttcactggcccaagtggtttgtgctaaccacgtctgtcttcacagctctgtgttgccatgtgtgctgaacaaaaaataaaaattattattgattttatatttcaaaa

SEQ ID NO: 38100 - DNA, 2309 bp, Homo sapiens
acggcgagcctcatcctccgggtgcggcgctgagcagcgagtccgactgtgctcgctgctcagcgccgcacccggaggatgaggctcgccgtgggagccctgctggtctgcgccgtcctggggctgtgtctggctgtccctgataaaactgtgagatggtgtgcagtgtcggagcatgaggccactaagtgccagagtttccgcgaccatatgaaaagcgtcattccatccgatggtcccagtgttgcttgtgtgaagaaagcctcctaccttgattgcatcagggccattgcggcaaacgaagcggatgctgtgacactggatgcaggtttggtgtatgatgcttacctggctcccaataacctgaagcctgtggtggcagagttctatgggtcaaaagaggatccacagactttctattatgctgttgctgtggtgaagaaggatagtggcttccagatgaaccagcttcgaggcaagaagtcctgccacacgggtctaggcaggtccgctgggtggaacatccccataggcttactttactgtgacttacctgagccacgtaaacctcttgagaaagcagtggccaatttcttctcgggcagctgtgccccttgtgcggatgggacggacttcccccagctgtgtcaactgtgtccagggtgtggctgctccacccttaaccaatacttcggctactcgggagccttcaagtgtctgaaggatggtgctggggatgtggcctttgtcaagcactcgactatatttgagaacttggcaaacaaggctgacagggaccagtatgagctgctttgcctggacaacacccggaagccggtagatgaatacaaggactgccacttggcccaggtcccttctcataccgtcgtggcccgaagtatgggcggcaaggaggacttgatctgggagcttctcaaccaggcccaggaacattttggcaaagacaaatcaaaagaattccaactattcagctctcctcatgggaaggacctgctgtttaaggactctgcccacgggtttttaaaagtcccccccaggatggatgccaagatgtacctgggctatgagtatgtcactgccatccggaatctacgggaaggcacatgcccagaagccccaacagatgaatgcaagcctgtgaagtggtgtgcgctgagccaccacgagaggctcaagtgtgatgagtggagtgttaacagtgtagggaaaatagagtgtgtatcagcagagaccaccgaagactgcatcgccaagatcatgaatggagaagctgatgccatgagcttggatggagggtttgtctacatagcgggcaagtgtggtctggtgcctgtcttggcagaaaactacaataagagcgataattgtgaggatacaccagaggcagggtattttgctgtagcagtggtgaagaaatcagcttctgacctcacctgggacaatctgaaaggcaagaagtcctgccatacggcagttggcagaaccgctggctggaacatccccatgggcctgctctacaataagatcaaccactgcagatttgatgaatttttcagtgaaggttgtgcccctgggtctaagaaagactccagtctctgtaagctgtgtatgggctcaggcctaaacctgtgtgaacccaacaacaaagagggatactacggctacacaggcgctttcaggtgtctggttgagaagggagatgtggcctttgtgaaacaccagactgtcccacagaacactgggggaaaaaaccctgatccatgggctaagaatctgaatgaaaaagactatgagttgctgtgccttgatggtaccaggaaacctgtggaggagtatgcgaactgccacctggccagagccccgaatcacgctgtggtcacacggaaagataaggaagcttgcgtccacaagatattacgtcaacagcagttgtttgttccggtcggaaaccaaggaccttctgttcagagatgacacagtatgtttggccaaacttcatgacagaaacacatatgaaaaatacttaggagaagaatatgtcaaggctgttggtaacctgagaaaatgctccacctcatcactcctggaagcctgcactttccgtagaccttaaaatctcagaggtagggctgccaccaaggtgaagatgggaacgcagatgatccatgagtttgccctggtttcactggcccaagtggtttgtgctaaccacgtctgtcttcacagctctgtgttgccatgtgtgctgaacaaaaaataaaaattattattgattttatatttcaaaa

SEQ ID NO: 38101 - DNA, 801 bp, Homo sapiens
  misc_feature (1)..(1): n is a, c, g, or t
  misc_feature (4)..(4): n is a, c, g, or t
  misc_feature (6)..(6): n is a, c, g, or t
  misc_feature (10)..(10): n is a, c, g, or t
  misc_feature (16)..(16): n is a, c, g, or t
  misc_feature (40)..(40): n is a, c, g, or t
  misc_feature (43)..(43): n is a, c, g, or t
ntcngnatcntcttanacccgtaaagcccgatgaactcgncgngggagccctgctggtctgcgccgtcccggggctgtgtctggctgtccctgataaaactgtgagatggtgtgcagtgtcggagcatgaggccactaagtgccagagtttccgcgaccatatgaaaagcgtcattccatccgatggtcccagtgttgcttgtgtgaagaaagcctcctaccttgattgcatcagggccattgcggcaaacgaagcggatgctgtgacactggatgcaggtttggtgtatgatgcttacctggctcccaataactgccacctggccagagccccgaatcacgctgtggtcacacggaaagataaggaagcttgcgtccacaagatattacgtcaacagcagcacctatttggaagcaacgtaactgactgctcgggcaacttttgtttgttccggtcggaaaccaaggaccttctgttcagagatgacacagtatgtttggccaaacttcatgacagaaacacatatgaaaaatacttaggagaagaatatgtcaaggctgttggtaacctgagaaaatgctccacctcatcactcctggaagcctgcactttccgtagaccttaaaatctcagaggtagggctgccaccaaggtgaagatgggaacgcagatgatccatgagtttgccctggtttcactggcccaagtggtttgtgctaaccacgtctgtcttcacagctctgtgttgccatgtgtgctgaacaaaaaataaaaattattattgattttatatttcaaaa

SEQ ID NO: 38102 - DNA, 1257 bp, Homo sapiens
acggcgagcctcatcctccgggtgcggcgctgagcagcgagtccgactgtgctcgctgctcagcgccgcacccggaggatgaggctcgccgtgggagccctgctggtctgcgccgtcctggggctgtgtctggctgtccctgataaaactgtgagatggtgtgcagtgtcggagcatgaggccactaagtgccagagtttccgcgaccatatgaaaagcgtcattccatccgatggtcccagtgttgcttgtgtgaagaaagcctcctaccttgattgcatcagggccattgcggcaaacgaagcggatgctgtgacactggatgcaggtttggtgtatgatgcttacctggctcccaataacctgaagcctgtggtggcagagttctatgggtcaaaagaggatccacagactttctattatgctgttgctgtggtgaagaaggatagtggcttccagatgaaccagcttcgaggcaagaagtcctgccacacgggtctaggcaggtccgctgggtggaacatccccataggcttactttactgtgacttacctgagccacgtaaacctcttgagaaagcagtggccaatttcttctcgggcagctgtgccccttgtgcggatgggacggacttcccccagctgtgtcaactgtgtccagggtgtggctgctccacccttaaccaatacttcggctactcgggagccttcaagtgtctgaaggatggtgctggggatgtggcctttgtcaagcactcgactatatttgagaacttggcaaacaaggctgacagggaccagtatgagctgctttgcctggacaacacccggaagccggtagatgaatacaaggactgccacttggcccaggtcccttctcataccgtcgtggcccgaagtatgggcggcaaggaggacttgatctgggagcttctcaaccaggcccaggaacatttttgggcaaaaaaaaaaaaaaacaaaaaaaaaaaaatctttttggcgccgccttgggccccttaagagaaagttttaagagacccatcggttgggcgggcgggcccccgtcggctgataggtgacaccggggtcacatagctggtcccccaggaaacacccggggcacggaaacacgggctcgcggattcctcccccaataacaacccccccgcggcagaccaggcgttcggacacacaccccaaagcgcactccgacaccacacaggcctcaacaccggacaccaaccaggcccatgtcaa

SEQ ID NO: 38103 - DNA, 899 bp, Homo sapiens
  misc_feature (1)..(1): n is a, c, g, or t
  misc_feature (4)..(4): n is a, c, g, or t
  misc_feature (6)..(6): n is a, c, g, or t
  misc_feature (10)..(10): n is a, c, g, or t
  misc_feature (16)..(16): n is a, c, g, or t
  misc_feature (40)..(40): n is a, c, g, or t
  misc_feature (43)..(43): n is a, c, g, or t
ntcngnatcntcttanacccgtaaagcccgatgaactcgncgngggagccctgctggtctgcgccgtcccggggctgtgtctggctgtccctgataaaactgtgagatggtgtgcagtgtcggagcatgaggccactaagtgccagagtttccgcgaccatatgaaaagcgtcattccatccgatggtcccagtgttgcttgtgtgaagaaagcctcctaccttgattgcatcagggccattgcggcaaacgaagcggatgctgtgacactggatgcaggtttggtgtatgatgcttacctggctcccaataacctgaagcctgtggtggcagagttctatgggtcaaaagaggtggcttccagatgaaccagcttcgaggcaagaagtcctgccacacgggtctaggcaggtccgctgggtggaacatccccataggcttactttactgtgacttacctgagccacgtaaacctcttgagaaagcagtggccaatttcttctcgggcagctgtgccccttgtgcggatgggacggacttcccccagctgtgtcaactgtgtccagggtgtggctgctccacccttaaccaatacttcggctactcgggagccttcaagtgtctgaaggatggtgctggggatgtggcctttgtcaagcactcgactatatttgagaacttggcaaacaaggctgacagggaccagtatgagctgctttgcctggacaacacccggaagccggtagatgaatacaaggactgccacttggcccaggtcccttctcataccgtcgtggcccgaagtatgggcggcaaggaggacttgatctgggagcttctcaaccaggcccaggaacattttggcaaagacttcaagagtttccttttcgctctcctcg

SEQ ID NO: 38104 - DNA, 809 bp, Homo sapiens
acggcgagcctcatcctccgggtgcggcgctgagcagcgagtccgactgtgctcgctgctcagcgccgcacccggaggatgaggctcgccgtgggagccctgctggtctgcgccgtcctggggctgtgtctggctgtccctgataaaactgtgagatggtgtgcagtgtcggagcatgaggccactaagtgccagagtttccgcgaccatatgaaaagcgtcattccatccgatggtcccagtgttgcttgtgtgaagaaagcctcctaccttgattgcatcagggccattgcggcaaacgaagcggatgctgtgacactggatgcaggtttggtgtatgatgcttacctggctcccaataacctgaagcctgtggtggcagagttctatgggtcaaaagaggatccacagactttctattatgctgttgctgtggtgaagaaggatagtggcttccagatgaaccagcttcgaggcaagaagtcctgccacacgggtctaggcaggtccgctgggtggaacatccccataggcttactttactgtgacttacctgagccacgtaaacctcttgagaaagcagtggccaatttcttctcgggcagctgtgccccttgtgcggatgggacggacttcccccagctgtgtcaactgtgtccagggtgtggctgctccacccttaaccaatacttcggctactcgggagccttcaagtgtctgaaggatggtgctggggatgtggcctttgtcaagcactcgactatatttgagaacttgcaaacagctggcagacccagtcggtaccgcca

SEQ ID NO: 38105 - DNA, 732 bp, Homo sapiens
acggcgagcctcatcctccgggtgcggcgctgagcagcgagtccgactgtgctcgctgctcagcgccgcacccggaggatgaggctcgccgtgggagccctgctggtctgcgccgtcctggggctgtgtctggctgtccctgataaaactgtgagatggtgtgcagtgtcggagcatgaggccactaagtgccagagtttccgcgaccatatgaaaagcgtcattccatccgatggtcccagtgttgcttgtgtgaagaaagcctcctaccttgattgcatcagggccattgcggcaaacgaagcggatgctgtgacactggatgcaggtttggtgtatgatgcttacctggctcccaataacctgaagcctgtggtggcagagttctatgggtcaaaagaggatccacagactttctattatgctgttgctgtggtgaagaaggatagtggcttccagatgaaccagcttcgaggcaagaagtcctgccacacgggtctaggcaggtccgctgggtggaacatccccataggcttactttactgtgacttacctgagccacgtaaacctcttgagaaagcagtggccaatttctgtgtcttttaaaacttgattatatctattttttaaaatccagtctaaatcttcttgcctgcaacttttttttatacttcctttgccactgtatttgtccattgtatccttgctttaatctatccttggtgaaattga

SEQ ID NO: 38106 - DNA, 370 bp, Homo sapiens
gggacttatcagaggaaggtgggaccagggaccctatagatgattttgggggcatcatgaaagcatgcagctggggccctaagtggataaatggcagataaaggaggtggaaaattcccaagacatactccgtagcttccctttttccccagggctggttcagagctttcagactcttctcatccatgtgttcccagctgctaaagaccacaaggtcctcacggactttctgttcacttgacacacctatttggaagcaacgtaactgactgctcgggcaacttttgtttgttccggtcggaaaccaaggaccttctgttcagagatgacacagtatgtttggccaaacttcatgacagaaacacatatg

SEQ ID NO: 38107 - DNA, 557 bp, Homo sapiens
gtgggtgttctttttctgtgttccctttttcatgctcagtaattggaaatgagcatactgtatttctcctttatcattgcctgggtttccacctgtgcagagttaggtacctacggggtccccatctggattcctgggcctctttccatcattcaatctctccacacggtgcctctgcctctggggtagtgttgccataaccaaagactgggggttggtgctgctaagatcaggctcatggtggaatgaggagcaatcactgctacatgggcatcagaagcctttacctggctgtgggctcttgagcgagtcattctcccgcatgttctctggccttcagtgctcactccagacctctcagctcatactttctatgatcaattgaatttcaaggatgggcaccacagcccatggctctcctgtgttaagctcacctgggctttccctccccagagaacttggcaaacaaggctgacagggaccagtatgagctgctttgcctggacaacacccggaagccggtagatgaatacaaggactgccacttggcccaggtc

SEQ ID NO: 38108 - DNA, 1354 bp, Homo sapiens
ccagcttgcccggcatcactcgcggcattggagtcaagatggaggagtacgcgcgagagccttgcccatggcgaattgtggatgactgtggtggggcctttacgatgggtaccattggtggtggtatctttcaagcaatcaaaggttttcgcaattctccagtgggagtaaaccacagactacgagggagtttgacagctattaaaaccagggctccacagttaggaggtagctttgcagtttggggagggctgttttccatgattgactgtagtatggttcaagtcagaggaaaggaagatccctggaactccatcacaagtggtgccttaacgggagccatactggcagcaagaaatggaccagtggccatggttgggtcagccgcaatgggtggcattctcctagctttaattgaaggagctggtatcttgttgacaagatttgcctctgcacagtttcccaatggtcctcagtttgcagaagacccctcccagttgccttcaactcagttaccttcctcaccttttggagactatcgacaatatcagtaggacttctttcctaggatttctttaacagaacgagttgtggttcgagaaggatttcagaagatcaagttacagtctgtttttaaaaccataggtgggacagctatggccaataggctataaagagacatttagcacttttttctatttaaaggaacaagcggggaagggtgctaaaagataatacgtttatttattcacacttgaattgcatttgtgatcaaaataaatgtttaaatcgctaaaggaaaatacagtaagtgcttgaaagatgaaggaccaaaaggccaaaaaacagtgaaatatgatcatcatctccttgcggacttctctgcctggttttgtgtgttctgttattcaaacaataaaaagctggtggaacttactctttcttttaagataagttgtagacttcgatgtttcatgctcatgtacttcaaataatgcatgttttatagttagtccctcatcacttgaagtgacttctgagaattatgcagagtcaacatggatcatttcacagtgagatgctttatggattgaaggatatggtaaaatgtttatagtttactttgaaagtaaaatatactatgtcttggttttgaggatattggatacaaaactctcttcctttagggctactgagtcttgattcctgatcatcagaaatttcaccagaaacaacttgcttccaatatacccaattctatatgaagaattcatggagagtgtactggcactggaagagtttagtgtttcttgtatgcttgaaaataaagtatgtactgttttgaatgtgttcc

SEQ ID NO: 38109 - DNA, 2529 bp, Homo sapiens
  misc_feature (963)..(963): n is a, c, g, or t
ctcccagggcatagaattactgagttagaagaaataactggtttatttttacataggatgtgatgtctaatattgtactaaaaatgaggatgcttatgctatactccactggtactatccactggatttatttattttttttattttttgagacggagtctcgctctgtcgcccaggctggagcacagtggtgcaaacttggctcactgcaagctctgcctcctgggttcacaccattctcctgcctcggcctccagagtagctgggactacaggtgcccgccatcacacctggctaattttttttgtattttttagtagagacgggggtttcaccgtgttggccaggatgccctcgatcttctgacctcatgatccacccgcctcggcctcccaaaatgctgggattgtaggcgtgagctaccgcacctggctgtttttgtatttagatagagtttaagtgcaaagtaatctgctgatttaaggttgttttaaattcatatctgaggaataaaggatggacaggcaatttccatccctttgatgttccataattctagctatttatatcattcatttgccccttcagcatggattggcttacacctgtaatacgttccagaatagctggatttcttttgttttcccatcggtgattttcatagagtagatgctcaatgacatataatgcagaaaggccaaaaatagaggtaagtaaagctatgaaagaaaagaagaacgaaagaggaagcagagtagtttgattttgtttattgctgcttaaaccagagagatatgttattctggaagggtgatttgcttgtttttacacatatgcagcctgactgttttaggcttggcttcttttttgtttgtttgagatggagtgtcgctcttgttgcccaggctggagtgcagtggcacgatctcggctcactgcaacctccgcctcctgggttcaagngattctcctgcctcagcctccccagtagctgggattacaggtgctcgccaccacacccggctaatttttacatttttagtagaggcggagtttcgccatgttagccaggctggtcttgaactcctggcctcaggtgatccacccacttcagcctcccaaagtgctgggattacaggtgtgagctatggcacccggctggcttatttcttataggctttgggccgttgctaattttccagctgatataatacaatccagctttattcgaaagataagtattctaactcttgttcggtgtttattcaaacttgtgtttgcatgtatttgtttggactataaattttgagactatagtgagtatgtttttgactataatattttaaatggaagatgaaatttaaattagtatttgcttgtttctttttacaataaaataggtagtagctttgcagtttggggagggctgttttccatgattgactgtagtatggttcaagtcagaggaaaggaagatccctggaactccatcacaagtggtgccttaacgggagccatactggcagcaagaaatggaccagtggccatggttgggtcagccgcaatgggtggcattctcctagctttaattgaaggagctggtatcttgttgacaagatttgcctctgcacagtttcccaatggtcctcagtttgcagaagacccctcccagttgccttcaactcagttaccttcctcaccttttggagactatcgacaatatcagtaggacttctttcctaggatttctttaacagaacgagttgtggttcgagaaggatttcagaagatcaagttacagtctgtttttaaaaccataggtgggacagctatggccaataggctataaagagacatttagcacttttttctatttaaaggaacaagcggggaagggtgctaaaagataatacgtttatttattcacacttgaattgcatttgtgatcaaaataaatgtttaaatcgctaaaggaaaatacagtaagtgcttgaaagatgaaggaccaaaaggccaaaaaacagtgaaatatgatcatcatctccttgcggacttctctgcctggttttgtgtgttctgttattcaaacaataaaaagctggtggaacttactctttcttttaagataagttgtagacttcgatgtttcatgctcatgtacttcaaataatgcatgttttatagttagtccctcatcacttgaagtgacttctgagaattatgcagagtcaacatggatcatttcacagtgagatgctttatggattgaaggatatggtaaaatgtttatagtttactttgaaagtaaaatatactatgtcttggttttgaggatattggatacaaaactctcttcctttagggctactgagtcttgattcctgatcatcagaaatttcaccagaaacaacttgcttccaatatacccaattctatatgaagaattcatggagagtgtactggcactggaagagtttagtgtttcttgtatgcttgaaaataaagtatgtactgttttgaatgtgttcc

SEQ ID NO: 38110 - DNA, 494 bp, Homo sapiens
  misc_feature (19)..(19): n is a, c, g, or t
cctggactggaaatgtggncctgtaacccagctgagccgaaagttggagaatgttaaatatctctggtggaacttactctttcttttaagataagttgtagacttcgatgtttcatgctcatgtacttcaaataatgcatgttttatagttagtccctcatcacttgaagtgacttctgagaattatgcagagtcaacatggatcatttcacagtgagatgctttatggattgaaggatatggtaaaatgtttatagtttactttgaaagtaaaatatactatgtcttggttttgaggatattggatacaaaactctcttcctttagggctactgagtcttgattcctgatcatcagaaatttcaccagaaacaacttgcttccaatatacccaattctatatgaagaattcatggagagtgtactggcactggaagagtttagtgtttcttgtatgcttgaaaataaagtatgtactgttttgaatgtgttcc

SEQ ID NO: 38111 - DNA, 370 bp, Homo sapiens
  misc_feature (346)..(346): n is a, c, g, or t
ctgaggaatgagcgacagttcaaggaggagaagcttgcagagcagctcaagcaagctgaggagctcaggcaatataaagtcctggttcactctcaggaacgggagctgacccagttaagggagaagttacgggaagggagagatgcctcccgctcattgaatcagcatctcctcaggatccctggaactccatcacaagtggtgccttaacgggagccatactggcagcaagaaatggaccagtggccatggttgggtcagccgcaatgggtggcattctcctagctttaattgaaggagctggtatcttgttgacaagatttgcctctgcacagtttcccaatgntcaggggtgccgagctcgaatgcg

SEQ ID NO: 38112 - DNA, 1370 bp, Homo sapiens
aagcagtggtatcaacgcagagtgcccattacggccgggggcattggagtcaagatggaggagtacgcgcgagagccttgcccatggcgaattgtggatgactgtggtggggcctttacgatgggtaccattggtggtggtatctttcaagcaatcaaaggttttcgcaattctccagtgggagtaaaccacagactacgagggagtttgacagctattaaaaccagggctccacagttaggaggtagctttgcagtttggggagggctgttttccatgattgactgtagtatggttcaagtcagaggaaaggaagatccctggaactccatcacaagtggtgccttaacgggagccatactggcagcaagaaatggaccagtggccatggttgggtcagccgcaatgggtggcattctcctagctttaattgaaggagctggtatcttgttgacaagatttgcctctgcacagtttcccaatggtcctcagtttgcagaagacccctcccagttgccttcaactcagttaccttcctcaccttttggagactatcgacaatatcagtaggacttctttcctaggatttctttaacagaacgagttgtggttcgagaaggatttcagaagatcaagttacagtctgtttttaaaaccataggtgggacagctatggccaataggctataaagagacatttagcacttttttctatttaaaggaacaagcggggaagggtgctaaaagataatacgtttatttattcacacttgaattgcatttgtgatcaaaataaatgtttaaatcgctaaaggaaaatacagtaagtgcttgaaagatgaaggaccaaaaggccaaaaaacagtgaaatatgatcatcatctccttgcggacttctctgcctggttttgtgtgttctgttattcaaacaataaaaagctggtggaacttactctttcttttaagataagttgtagacttcgatgtttcatgctcatgtacttcaaataatgcatgttttatagttagtccctcatcacttgaagtgacttctgagaattatgcagagtcaacatggatcatttcacagtgagatgctttatggattgaaggatatggtaaaatgtttatagtttactttgaaagtaaaatatactatgtcttggttttgaggatattggatacaaaactctcttcctttagggctactgagtcttgattcctgatcatcagaaatttcaccagaaacaacttgcttccaatatacccaattctatatgaagaattcatggagagtgtactggcactggaagagtttagtgtttcttgtatgcttgaaaataaagtatgtactgttttgaatgtgttcc

SEQ ID NO: 38113 - DNA, 1343 bp, Homo sapiens
aagcagtggtatcaacgcagagtgcccattacggccgggggcattggagtcaagatggaggagtacgcgcgagagccttgcccatggcgaattgtggatgactgtggtggggcctttacgatgggtaccattggtggtggtatctttcaagcaatcaaaggttttcgcaattctccagtgggagtaaaccacagactacgagggagtttgacagctagtagctttgcagtttggggagggctgttttccatgattgactgtagtatggttcaagtcagaggaaaggaagatccctggaactccatcacaagtggtgccttaacgggagccatactggcagcaagaaatggaccagtggccatggttgggtcagccgcaatgggtggcattctcctagctttaattgaaggagctggtatcttgttgacaagatttgcctctgcacagtttcccaatggtcctcagtttgcagaagacccctcccagttgccttcaactcagttaccttcctcaccttttggagactatcgacaatatcagtaggacttctttcctaggatttctttaacagaacgagttgtggttcgagaaggatttcagaagatcaagttacagtctgtttttaaaaccataggtgggacagctatggccaataggctataaagagacatttagcacttttttctatttaaaggaacaagcggggaagggtgctaaaagataatacgtttatttattcacacttgaattgcatttgtgatcaaaataaatgtttaaatcgctaaaggaaaatacagtaagtgcttgaaagatgaaggaccaaaaggccaaaaaacagtgaaatatgatcatcatctccttgcggacttctctgcctggttttgtgtgttctgttattcaaacaataaaaagctggtggaacttactctttcttttaagataagttgtagacttcgatgtttcatgctcatgtacttcaaataatgcatgttttatagttagtccctcatcacttgaagtgacttctgagaattatgcagagtcaacatggatcatttcacagtgagatgctttatggattgaaggatatggtaaaatgtttatagtttactttgaaagtaaaatatactatgtcttggttttgaggatattggatacaaaactctcttcctttagggctactgagtcttgattcctgatcatcagaaatttcaccagaaacaacttgcttccaatatacccaattctatatgaagaattcatggagagtgtactggcactggaagagtttagtgtttcttgtatgcttgaaaataaagtatgtactgttttgaatgtgttcc

SEQ ID NO: 38114 - DNA, 1329 bp, Homo sapiens
aggcgtacgccggattagggatgagtagcgcagatgtgcatagtgatcgggatatagtgaggggactcgacgactgggactatagcggtcggcttttcaagcaaccaaaagtggtcgtaaagttttccagctgggagtaatacacagactcagcgagggacgtcgacaaactagttaaaacgcaggtctgcacagttaggagcgtagctttgcagtttggggagggctgttttccatgattgactgtagtatggttcaagtcagaggaaaggaagatccctggaactccatcacaagtggtgccttaacgggagccatactggcagcaagaaatggaccagtggccatggttgggtcagccgcaatgggtggcattctcctagctttaattgaaggagctggtatcttgttgacaagatttgcctctgcacagtttcccaatggtcctcagtttgcagaagacccctcccagttgccttcaactcagttaccttcctcaccttttggagactatcgacaatatcagtaggacttctttcctaggatttctttaacagaacgagttgtggttcgagaaggatttcagaagatcaagttacagtctgtttttaaaaccataggtgggacagctatggccaataggctataaagagacatttagcacttttttctatttaaaggaacaagcggggaagggtgctaaaagataatacgtttatttattcacacttgaattgcatttgtgatcaaaataaatgtttaaatcgctaaaggaaaatacagtaagtgcttgaaagatgaaggaccaaaaggccaaaaaacagtgaaatatgatcatcatctccttgcggacttctctgcctggttttgtgtgttctgttattcaaacaataaaaagctggtggaacttactctttcttttaagataagttgtagacttcgatgtttcatgctcatgtacttcaaataatgcatgttttatagttagtccctcatcacttgaagtgacttctgagaattatgcagagtcaacatggatcatttcacagtgagatgctttatggattgaaggatatggtaaaatgtttatagtttactttgaaagtaaaatatactatgtcttggttttgaggatattggatacaaaactctcttcctttagggctactgagtcttgattcctgatcatcagaaatttcaccagaaacaacttgcttccaatatacccaattctatatgaagaattcatggagagtgtactggcactggaagagtttagtgtttcttgtatgcttgaaaataaagtatgtactgttttgaatgtgttcc

SEQ ID NO: 38115 - DNA, 1661 bp, Homo sapiens
gttcgtgagtcaggaccgatagcttctgaggtaacataaagctgaagagaatgtgatctgaaggattggggtttcatgcaggagaaacccatcaagccgattgggctcttctccaaggttggttttgggacattgtgcagaggtcattggaaaatttgaaaagattctattcattgtactttgtaaacttggttattcagaagctgggaaaagggaggtgacaaaaaatgtttgtaggttatattcacttacaaaggtatagtcagggttgggcgcaatggctcacgccaataatcccaaagtgctgggattacaggtgtgagctatggcacccggctggcttatttcttataggctttgggccgttgctaattttccagctgatataatacaatccagctttattcgaaagataagtattctaactcttgttcggtgtttattcaaacttgtgtttgcatgtatttgtttggactataaattttgagactatagtgagtatgtttttgactataatattttaaatggaagatgaaatttaaattagtatttgcttgtttctttttacaataaaataggtatatggttcaagtcagaggaaaggaagatccctggaactccatcacaagtggtgccttaacgggagccatactggcagcaagaaatggaccagtggccatggttgggtcagccgcaatgggtggcattctcctagctttaattgaaggagctggtatcttgttgacaagatttgcctctgcacagtttcccaatggtcctcagtttgcagaagacccctcccagttgccttcaactcagttaccttcctcaccttttggagactatcgacaatatcagtaggacttctttcctaggatttctttaacagaacgagttgtggttcgagaaggatttcagaagatcaagttacagtctgtttttaaaaccataggtgggacagctatggccaataggctataaagagacatttagcacttttttctatttaaaggaacaagcggggaagggtgctaaaagataatacgtttatttattcacacttgaattgcatttgtgatcaaaataaatgtttaaatcgctaaaggaaaatacagtaagtgcttgaaagatgaaggaccaaaaggccaaaaaacagtgaaatatgatcatcatctccttgcggacttctctgcctggttttgtgtgttctgttattcaaacaataaaaagctggtggaacttactctttcttttaagataagttgtagacttcgatgtttcatgctcatgtacttcaaataatgcatgttttatagttagtccctcatcacttgaagtgacttctgagaattatgcagagtcaacatggatcatttcacagtgagatgctttatggattgaaggatatggtaaaatgtttatagtttactttgaaagtaaaatatactatgtcttggttttgaggatattggatacaaaactctcttcctttagggctactgagtcttgattcctgatcatcagaaatttcaccagaaacaacttgcttccaatatacccaattctatatgaagaattcatggagagtgtactggcactggaagagtttagtgtttcttgtatgcttgaaaataaagtatgtactgttttgaatgtgttcc

SEQ ID NO: 38116 - DNA, 1299 bp, Homo sapiens
ccagcttgcccggcatcactcgcggcattggagtcaagatggaggagtacgcgcgagagccttgcccatggcgaattgtggatgactgtggtggggcctttacgatgggtaccattggtggtggtatctttcaagcaatcaaaggttttcgcaattctccagtgggagtaaaccacagactacgagggagtttgacagctattaaaaccagggctccacagttaggaggtagctttgcagtttggggagggctgttttccatgattgactgtagtatggttcaagtcagaggaaaggaagatccctggaactccatcacaagtggtgccttaacgggagccatactggcagcaagaaatggaccagtggccatggttgggtcagccgcaatgggtggcattctcctagctttaattgaaggagctggtatcttgttgacaagatttgcctctgcacagtttcccaatggtcctcagtttgcagaagacccctcccagttgccttcaactcagttaccttcctcaccttttggagactatcgacaatatcagtaggacttctttcctaggatttctttaacagaacgagttgtggttcgagaaggatttcagaagatcaagttacagtctgttttttttttctatttaaaggaacaagcggggaagggtgctaaaagataatacgtttatttattcacacttgaattgcatttgtgatcaaaataaatgtttaaatcgctaaaggaaaatacagtaagtgcttgaaagatgaaggaccaaaaggccaaaaaacagtgaaatatgatcatcatctccttgcggacttctctgcctggttttgtgtgttctgttattcaaacaataaaaagctggtggaacttactctttcttttaagataagttgtagacttcgatgtttcatgctcatgtacttcaaataatgcatgttttatagttagtccctcatcacttgaagtgacttctgagaattatgcagagtcaacatggatcatttcacagtgagatgctttatggattgaaggatatggtaaaatgtttatagtttactttgaaagtaaaatatactatgtcttggttttgaggatattggatacaaaactctcttcctttagggctactgagtcttgattcctgatcatcagaaatttcaccagaaacaacttgcttccaatatacccaattctatatgaagaattcatggagagtgtactggcactggaagagtttagtgtttcttgtatgcttgaaaataaagtatgtactgttttgaatgtgttcc

SEQ ID NO: 38117 - DNA, 1325 bp, Homo sapiens
ccagcttgcccggcatcactcgcggcattggagtcaagatggaggagtacgcgcgagagccttgcccatggcgaattgtggatgactgtggtggggcctttacgatgggtaccattggtggtggtatctttcaagcaatcaaaggttttcgcaattctccagtgggagtaaaccacagactacgagggagtttgacagctattaaaaccagggctccacagttaggaggtagctttgcagtttggggagggctgttttccatgattgactgtagtatggttcaagtcagaggaaaggaagatccctggaactccatcacaagtggtgccttaacgggagccatactggcagcaagaaatggaccagtggccatggttgggtcagccgcaatgggtggcattctcctagctttaattgaaggagctggtatcttgttgacaagatttgcctctgcacagtttcccaatgttgccttcaactcagttaccttcctcaccttttggagactatcgacaatatcagtaggacttctttcctaggatttctttaacagaacgagttgtggttcgagaaggatttcagaagatcaagttacagtctgtttttaaaaccataggtgggacagctatggccaataggctataaagagacatttagcacttttttctatttaaaggaacaagcggggaagggtgctaaaagataatacgtttatttattcacacttgaattgcatttgtgatcaaaataaatgtttaaatcgctaaaggaaaatacagtaagtgcttgaaagatgaaggaccaaaaggccaaaaaacagtgaaatatgatcatcatctccttgcggacttctctgcctggttttgtgtgttctgttattcaaacaataaaaagctggtggaacttactctttcttttaagataagttgtagacttcgatgtttcatgctcatgtacttcaaataatgcatgttttatagttagtccctcatcacttgaagtgacttctgagaattatgcagagtcaacatggatcatttcacagtgagatgctttatggattgaaggatatggtaaaatgtttatagtttactttgaaagtaaaatatactatgtcttggttttgaggatattggatacaaaactctcttcctttagggctactgagtcttgattcctgatcatcagaaatttcaccagaaacaacttgcttccaatatacccaattctatatgaagaattcatggagagtgtactggcactggaagagtttagtgtttcttgtatgcttgaaaataaagtatgtactgttttgaatgtgttcc

SEQ ID NO: 38118 - DNA, 1597 bp, Homo sapiens
  misc_feature (963)..(963): n is a, c, g, or t
ctcccagggcatagaattactgagttagaagaaataactggtttatttttacataggatgtgatgtctaatattgtactaaaaatgaggatgcttatgctatactccactggtactatccactggatttatttattttttttattttttgagacggagtctcgctctgtcgcccaggctggagcacagtggtgcaaacttggctcactgcaagctctgcctcctgggttcacaccattctcctgcctcggcctccagagtagctgggactacaggtgcccgccatcacacctggctaattttttttgtattttttagtagagacgggggtttcaccgtgttggccaggatgccctcgatcttctgacctcatgatccacccgcctcggcctcccaaaatgctgggattgtaggcgtgagctaccgcacctggctgtttttgtatttagatagagtttaagtgcaaagtaatctgctgatttaaggttgttttaaattcatatctgaggaataaaggatggacaggcaatttccatccctttgatgttccataattctagctatttatatcattcatttgccccttcagcatggattggcttacacctgtaatacgttccagaatagctggatttcttttgttttcccatcggtgattttcatagagtagatgctcaatgacatataatgcagaaaggccaaaaatagaggtaagtaaagctatgaaagaaaagaagaacgaaagaggaagcagagtagtttgattttgtttattgctgcttaaaccagagagatatgttattctggaagggtgatttgcttgtttttacacatatgcagcctgactgttttaggcttggcttcttttttgtttgtttgagatggagtgtcgctcttgttgcccaggctggagtgcagtggcacgatctcggctcactgcaacctccgcctcctgggttcaagngattctcctgcctcagcctccccagtagctgggattacaggtgctcgccaccacacccggctaatttttacatttttagtagaggcggagtttcgccatgttagccaggctggtcttgaactcctggcctcaggtgatccacccacttcagcctcccaaagtgctgggattacaggtgtgagctatggcacccggctggcttatttcttataggctttgggccgttgctaattttccagctgatataatacaatccagctttattcgaaagataagtattctaactcttgttcggtgtttattcaaacttgtgtttgcatgtatttgtttggactataaattttgagactatagtgagtatgtttttgactataatattttaaatggaagatgaaatttaaattagtatttgcttgtttctttttacaataaaataggtaaaggggtaagctggatttgtagacagttgtttctgtacttcctgggcactatcagaagctcataagagctgttcaacatcatgcgcctgagctgacccaaatcccgctccccatgctggaaagacaggcatatctttgaattcacctgttgagttcagaaatcggtaacactcatgggtagctgaaagtgtcgc

SEQ ID NO: 38119 - DNA, 757 bp, Homo sapiens
aagcagtggtatcaacgcagagtgcccattacggccgggggcattggagtcaagatggaggagtacgcgcgagagccttgcccatggcgaattgtggatgactgtggtggggcctttacgatgggtaccattggtggtggtatctttcaagcaatcaaaggttttcgcaattctccagtgggagtaaaccacagactacgagggagtttgacagctattaaaaccagggctccacagttaggaggtaagcagaattttcattttaactgaactatttttttctgttcctttgaagatggagctatttttatttttagattacaacaattagtgattttagtttggtctaacggtttgtcacaaacatatatccctatagtttcttcttgatttgtagtttgtttgaaaaattaacctgaattatgatacccatttgaaaatcttgtctctgtccttcagacactcggtgatttttttttttttttccttctccagaagaaagacagttatttaaagctcaggtgtgaggccgggcacggggctcacgcctgtaatcccagcactttgggaggccgaggtgggcagatcacctgaggtcaggagtttgagaccagcctgaccaacatggagaaaccccatctctactaaaaatactgaggcaggagaatcacttgaacccgggaggcggaggttgcagtgagccaagatcatgccattgcactccatcctgggcaacaagagcgaaactccgtctcaa

SEQ ID NO: 38120 - DNA, 1665 bp, Homo sapiens
ccagcttgcccggcatcactcgcggcattggagtcaagatggaggagtacgcgcgagagccttgcccatggcgaattgtggatgactgtggtggggcctttacgatgggtaccattggtggtggtatctttcaagcaatcaaaggttttcgcaattctccagtgggagtaaaccacagactacgagggagtttgacagctattaaaaccagggctccacagttaggaggtagctttgcagtttggggagggctgttttccatgattgactgtagtatggttcaagtcagaggaaaggaagatccctggaactccatcacaagtggtgccttaacgggagccatactggcagcaagaaatggaccagtggccatggttgggtcagccgcaatgggtggcattctcctagctttaattgaaggagctggtatcttgttgacaagatttgcctctgcacagtttcccaatggtcctcagtttgcagaagacccctcccagttgccttcaactcagttaccttcctcaccttttggagactatcgacaatatcagtaggacttctttcctaggatttctttaacagaacgagttgtggttcgagaaggatttcagaagatcaagttacagtctgtttttaaaaccataggtgggacagctatggccaataggctataaagagacatttagcacttttttctatttaaaggaacaagcggggaagggtgctaaaagataatacgtttatttattcacacttgaattgcatttgtgatcaaaataaatgtttaaatcgctaaaggaaaatacagtaagtgcttgaaagatgaaggaccaaaaggccaaaaaacagtgaaatatgatcatcatctccttgcggacttctctgcctggttttgtgtgttctgttattcaaacaataaaaagctggtggaacttactctttcttttaagataagttgtagacttcgatgtttcatgctcatgtacttcaaataatgcatgttttatagttagtccctcatcacttgaagtgacttctgagaattatgcagagtcaacatggatcatttcacagtgagatgctttatggattgaaggatatggtaaaatgtttatagtttactttgaaagtaaaatatactatgtcttggttttgaggatattggatacaaaactctcttcctttagggctactgagtcttgattcctgatcatcagaaatttcaccagaaacaacttgcttccaatatacccaattctatatgaagaattcatggagagtgtactggcactggaagagtttagtgtttcttgtatgcttgaaaataaagtatgtactgttttgaatgtgttccaagtcctctgcataaacgatgtattttggggtctggttgggcctggaaaatggatgagcacttcagaacaggtcattttcctgatattggaagtgacatgtggccctataggaggcatgatgttagttaattacacatttgcctacatctgtgggaaatggagaacaaagccatgtgggtactgtaaacacacgtttatcttttggcccaatgccatacatatggtaggcatttaattactgattgtgtttggataatttgggaattttcgactgtggtaaaatatacataaaataatactttttaaccat

SEQ ID NO: 38121 - DNA, 1445 bp, Homo sapiens
aagcagtggtatcaacgcagagtgcccattacggccgggggcattggagtcaagatggaggagtacgcgcgagagccttgcccatggcgaattgtggatgactgtggtggggcctttacgatgggtaccattggtggtggtatctttcaagcaatcaaaggttttcgcaattctccagtgggagtaaaccacagactacgagggagtttgacagctattaaaaccagggctccacagttaggagtaatgaagaagttagtactattattatctcccattttccagatgaggaaatttagttcctgagggttgaggtaatgtagctttgcagtttggggagggctgttttccatgattgactgtagtatggttcaagtcagaggaaaggaagatccctggaactccatcacaagtggtgccttaacgggagccatactggcagcaagaaatggaccagtggccatggttgggtcagccgcaatgggtggcattctcctagctttaattgaaggagctggtatcttgttgacaagatttgcctctgcacagtttcccaatggtcctcagtttgcagaagacccctcccagttgccttcaactcagttaccttcctcaccttttggagactatcgacaatatcagtaggacttctttcctaggatttctttaacagaacgagttgtggttcgagaaggatttcagaagatcaagttacagtctgtttttaaaaccataggtgggacagctatggccaataggctataaagagacatttagcacttttttctatttaaaggaacaagcggggaagggtgctaaaagataatacgtttatttattcacacttgaattgcatttgtgatcaaaataaatgtttaaatcgctaaaggaaaatacagtaagtgcttgaaagatgaaggaccaaaaggccaaaaaacagtgaaatatgatcatcatctccttgcggacttctctgcctggttttgtgtgttctgttattcaaacaataaaaagctggtggaacttactctttcttttaagataagttgtagacttcgatgtttcatgctcatgtacttcaaataatgcatgttttatagttagtccctcatcacttgaagtgacttctgagaattatgcagagtcaacatggatcatttcacagtgagatgctttatggattgaaggatatggtaaaatgtttatagtttactttgaaagtaaaatatactatgtcttggttttgaggatattggatacaaaactctcttcctttagggctactgagtcttgattcctgatcatcagaaatttcaccagaaacaacttgcttccaatatacccaattctatatgaagaattcatggagagtgtactggcactggaagagtttagtgtttcttgtatgcttgaaaataaagtatgtactgttttgaatgtgttcc

SEQ ID NO: 38122 - DNA, 1491 bp, Homo sapiens
aagcagtggtatcaacgcagagtgcccattacggccgggggcattggagtcaagatggaggagtacgcgcgagagccttgcccatggcgaattgtggatgactgtggtggggcctttacgatgggtaccattggtggtggtatctttcaagcaatcaaaggttttcgcaattctccagtgggagtaaaccacagactacgagggagtttgacagctattaaaaccagggctccacagttaggagcatggattggcttacacctgtaatacgttccagaatagctggatttcttttgttttcccatcggtgattttcatagagtagatgctcaatgacatataatgcagaaaggccaaaaatagaggtagctttgcagtttggggagggctgttttccatgattgactgtagtatggttcaagtcagaggaaaggaagatccctggaactccatcacaagtggtgccttaacgggagccatactggcagcaagaaatggaccagtggccatggttgggtcagccgcaatgggtggcattctcctagctttaattgaaggagctggtatcttgttgacaagatttgcctctgcacagtttcccaatggtcctcagtttgcagaagacccctcccagttgccttcaactcagttaccttcctcaccttttggagactatcgacaatatcagtaggacttctttcctaggatttctttaacagaacgagttgtggttcgagaaggatttcagaagatcaagttacagtctgtttttaaaaccataggtgggacagctatggccaataggctataaagagacatttagcacttttttctatttaaaggaacaagcggggaagggtgctaaaagataatacgtttatttattcacacttgaattgcatttgtgatcaaaataaatgtttaaatcgctaaaggaaaatacagtaagtgcttgaaagatgaaggaccaaaaggccaaaaaacagtgaaatatgatcatcatctccttgcggacttctctgcctggttttgtgtgttctgttattcaaacaataaaaagctggtggaacttactctttcttttaagataagttgtagacttcgatgtttcatgctcatgtacttcaaataatgcatgttttatagttagtccctcatcacttgaagtgacttctgagaattatgcagagtcaacatggatcatttcacagtgagatgctttatggattgaaggatatggtaaaatgtttatagtttactttgaaagtaaaatatactatgtcttggttttgaggatattggatacaaaactctcttcctttagggctactgagtcttgattcctgatcatcagaaatttcaccagaaacaacttgcttccaatatacccaattctatatgaagaattcatggagagtgtactggcactggaagagtttagtgtttcttgtatgcttgaaaataaagtatgtactgttttgaatgtgttcc

SEQ ID NO: 38123 - DNA, 1241 bp, Homo sapiens
aagcagtggtatcaacgcagagtgcccattacggccgggggcattggagtcaagatggaggagtacgcgcgagagccttgcccatggcgaattgtggatgactgtggtggggcctttacgatgggtaccattggtggtggtatctttcaagcaatcaaaggttttcgcaattctccagtgggagtaaaccacagactacgagggagtttgacagctattaaaaccagggctccacagttaggagatggaccagtggccatggttgggtcagccgcaatgggtggcattctcctagctttaattgaaggagctggtatcttgttgacaagatttgcctctgcacagtttcccaatggtcctcagtttgcagaagacccctcccagttgccttcaactcagttaccttcctcaccttttggagactatcgacaatatcagtaggacttctttcctaggatttctttaacagaacgagttgtggttcgagaaggatttcagaagatcaagttacagtctgtttttaaaaccataggtgggacagctatggccaataggctataaagagacatttagcacttttttctatttaaaggaacaagcggggaagggtgctaaaagataatacgtttatttattcacacttgaattgcatttgtgatcaaaataaatgtttaaatcgctaaaggaaaatacagtaagtgcttgaaagatgaaggaccaaaaggccaaaaaacagtgaaatatgatcatcatctccttgcggacttctctgcctggttttgtgtgttctgttattcaaacaataaaaagctggtggaacttactctttcttttaagataagttgtagacttcgatgtttcatgctcatgtacttcaaataatgcatgttttatagttagtccctcatcacttgaagtgacttctgagaattatgcagagtcaacatggatcatttcacagtgagatgctttatggattgaaggatatggtaaaatgtttatagtttactttgaaagtaaaatatactatgtcttggttttgaggatattggatacaaaactctcttcctttagggctactgagtcttgattcctgatcatcagaaatttcaccagaaacaacttgcttccaatatacccaattctatatgaagaattcatggagagtgtactggcactggaagagtttagtgtttcttgtatgcttgaaaataaagtatgtactgttttgaatgtgttcc

SEQ ID NO: 38124 - DNA, 782 bp, Homo sapiens
aagcagtggtatcaacgcagagtgcccattacggccgggggcattggagtcaagatggaggagtacgcgcgagagccttggtgagcttcaccgctgtctttgcatttctcttgcccccctgcccactgccctccttctcccttgtccaggctcccaaggtgcaagccagactcaaccgcagcctcgtcgacttgggcctggtaactgggcaatgcggtctttcgcggccagtcggcttcttagccctgtacttagtacctccccggccgcgtgagcctccctctcccaacccagcacccgtgtgaccttgtgatggatggtaaggaggtccagacttgagtttgatagaacctcggaacctcctcccaacgcagggcgtaatcgactttatgcggggccagttataatcccccctgttcgtcgaggtgaccttgggcgcgtccctccgtctcgccttgctcagttcctgcgttgaggaactgaagaataggcatttgagggagtgtcattcttgaggttttacttgtatcatgatatgtgtccacagagtgaagcattttaaatgaatggaacatagattttagccaaggggtctggataagcttctttattgcgtggggccttgttttccttcttggaattctttcttgagggtagagggggacaaaaattacctgggaaataggaagaggtaatagcatgtgttctctgaaaagccatggacagaaattcattgttacatccagcgtttattgagtatgaataaaccagacacatagata

SEQ ID NO: 38125 - DNA, 176 bp, Homo sapiens
tggcatcacaaggacttaatctttcaattattattcatcaagtaatatttagcacatattcattgctgctttctgtcagccaggttaggcaccattaggcactgccaccagagcagtcaacaagatagatatggaatgtagtctagtgggaggaagttaaggcttgcacagctgga

SEQ ID NO: 38126 - DNA, 235 bp, Homo sapiens
gtaatttgctgaccccaatcatggctactgatccagctgtatgaccctggaaaaataagctccctgtgcctcaaattcttcatctgtaaaacaggtatttatttactttatgggattgttatgaggattcaatgagtaaatttgtgtaaaacagaatggggccagtcatatagtaactgctcaatacatgatagctactaccatcactaccaccacctattcacaacttgtctag

SEQ ID NO: 38127 - DNA, 408 bp, Homo sapiens
attgctgcaataatagaattaaattagacatttccttatcattagattttactttataagacaatggagacatcaataatttgttcaataagatttccacattaccacagattttctctatcatattgataacacataggcacaagtaatcaatatttgattaaatcatatttatttaagtggtatcatctgcaaaacagataatttctagtagaaattattatttattattatttctggtactcaataaattttcttcttgatctagaagtaggttttgaatcataaagggtttaacaaggctatctgaaataggacttctaaaacattgatattttgaacaattccttaaattgccagaacttttctgaagagctaatccaccttatgttagttttgtccaagttg

SEQ ID NO: 38128 - DNA, 685 bp, Homo sapiens
aagtttctccaggcatcagacatcaggcactggtgctgccccccagctaacataattcaacacagcccaggcctcccaagtgcccagcaccactgcagatcactgtgtgcccactctgtgcctcaactaaggaagctcctatggatggtcagcagggagagatgccaaacagcaatgagagcaggacatactaagcaaagggctgtcctaagtgtccaacggacaacttcaacctcaccacagtgacatcaacaaggaggggctgctgttatccctgattttcccaactgtcaggaaacgtttcaagaggttaagtcttgcctaagattatgcaggctgtctctgtccagaggcagagagaccatgttcctggaatcagggtatctgagttctaatccacttccagagtggaggctctttctaatagaccctgtactcctcatctagaatttcacatacagagcacaccagccatgcttcagagaataaatgactttctgtctgaacagaacacagtttttgctggttactctgccagatgcattttcaatggcatagaattcaccaaaaaaccttccttgggggggtccaaagagaaaaaaacaaacaagagaacaccaaaccaggaggaaacagccaagctacatgttttaaacccccagagaatcccaaacacaggaagaaa

SEQ ID NO: 38129 - DNA, 705 bp, Homo sapiens
tcagctgttcacggaagtctgatcctgatattctaaacccgaaaagtgataagaatcttgacagagaactaagtccactcccacttgaatgaaactcttacccagggaaaacgaaaactactcctgcctgcctccctcccctcagcccccaggagaaccgtgaaatgcctgctgaattgagagactggaaaagaacagagcaaggcagagcccctgaggtctttgccacaggagagtgatcaacatctgagtcctttgcatccttattttaccctgacttcagttaatgccaccaatgtccagtgtgcacactctcagcacacacacaggcagtgccatgaagtggaggggacagaaaagctttccacaccaaaactcttctccatgcaaacaaaagaatggctgtctcgccttagaaggaagccctggctagggtgatttcaggggttaatcctcaatgaaagagggttaagcagagacttgaagattgctgaggttttatgatggtgaattgcctggggaatccacattcagatcagccttggtatgttttgctgagtgagataagagttggagacttcatgctgggacatgtgcaaaaggaagggaaaaaattaaaaggggaggggaaggaactaggcaactaaaaacagcccactcgtggcaaccaaatctaaacagaaaaacattgcagggagccaaacg

SEQ ID NO: 38130 - DNA, 376 bp, Homo sapiens
tagaggaaaataacacacgacgtgacaccgaatgggaacactgcaacaagacaacatttttaacaacctataaaaccacattatgttggtattaatagtatgcactagccttaatgttaaaaaaaatgacaaagatttttttccccaatatttataaggtttactaaggatagataccactattctcaaagaatgaacagtgaccatgtgaattactgtcctgaaatttaggttgcaattttgaatagctcccaggcatcacgccccaaatttaggagctgtcttccagcaaagactatcagtcaaggtgtggagcatggttagacctaaagttcacgcttttacacttgcaattgtctctctataaaaaccaatc

SEQ ID NO: 38131 - DNA, 754 bp, Homo sapiens
tggaagaaatgatgagaatggtagcaagaacagtatagggtcttggaagggagcagagggtgggaagagcacaggccctggaagggaaagactgggttgtaggaatctactctgccatctaccagctgagtgtccctgaactgccctaagtctcatctgtcaaggggaagcctgcttgccctcccttcccaccttcacaaagaagagaatttatatatgggcactttggaaacttcagaaattacatacatgaaacagaaattacataaatgatcatgaaagccatcagaaactctatccagcaggctcgtgggtgacaatgggaggaaccatagtagagggtggagagtgcatctgagctcattcatggccatcaaaggggcagcgcttactcaggcagggtgtgtgtgacatacttgccgaaagctttccccgagccccagaggctacctggtcacctttaaaggcgttgaggaggggcggctattgtctcagcatgtttaaaaccgcttttagctttctgggaaccctaaaccctctctttgtaaaagtgccacatacatagatctcttctttttgatcaatggcaccgcacaactgacggcattaccgagagcaatatttgtaattacaaatggcacattctggaaatactcttgtaatcttatgtatgggtggtttgcaaaccaactgtaaacattttagaatctacatcctaaggtatagggactatcgtaacttaatttgtagatct

SEQ ID NO: 38132 - DNA, 449 bp, Homo sapiens
atagatagtccattgtgaactgtgtattgtttgcccccaaaagtcacagttgggtgtgcactgcagtactccattatcaaatggaagtggtgtttaccagagtggactcaggcacaccttgaaggaataggaaagttacatgaagaggtgtcccaaatgtgcatggctcttactcttgctacactgctttttctctctcagcttgtacctgaacccacatgagagtaccctatgactatctgagggtgaaaaaactcttgtgtagtttacaaatggatctgaatgatgtgcacgtactgtctgagatgggcagctgcaatactgcagccccacacctacagggtcttcctgaagacaatcgcaaaggaaaatcctcccagtgggcagaacgtggatgagtgcacctggttgttcattttgcctggaagcagagagggctaaagatgggg

SEQ ID NO: 38133 - DNA, 1858 bp, Homo sapiens
tacttccagatgtggttaataatattcagatccctaggttactcaaacaaaactaaaggagagaactatttaggggccatctgctttaaagtttaaggtgttttgttgttgttttagtgcctgtacaaattgaccataaaacccagattgattagtgagtgtggatttgagttgcctaagttgaggctattaaggtacttctttacttaaaagataagtttaaaagactctattcatcagttcatgatgatcttggaaatgctgtttctctactcaaaggatatacccacaggcaggtccatggggacttgctctggtgatctctgctattaaggcaaattccagcctgtttgtgccaagaacagagtcaagtgagagagaatgaagactcagagatgtgcagcactggcttgtatgttgtcaggcagaagccttgttcctttctcaagaaaacttcaggcctatcaagcttggaaggaaatacatttttttatgctgatttgcagcctacaccagctgatgaatatgctaggactttgagagaacacaaagcatggtaagttttggtcaggtggaaaggagcctgacatctgaacataatgcttcctctctcaacatctgggatacttttgaaaattcagtaaggcttaatgtaggaaaaattctttacaggaaaagctaattgatctgtttgtctaacctcatagccactccaaaatatgccttttataatggaaaaaaacagtgaacagagagaagagatttggggataagttagaaggtaccctcaaaactactgccgtaaacctacaggtgggcaaggaggaattactgtagtgtctctggagaaagttcttgaacatccaaatcatctcttttctaagcagtttttcccctaatctcataccttacatcttccagcatcatttgctacatcaatgtcttttcatcctcttcatcagccccattgagctgactccagcttatttttgcactgatttccaccatttccttcccacacccatcctttccctctatttaaagcctccatctcaccctcagtaatgctgctgatttactctcagatgtctcaagtctagcttcctttttgaatccttctcctactccaggggctgtcaaaggcagccttaaagttcagtgactgttaggtggctcaggccatttttcattgggtggtctttggtgtttgcatactgaatttgaattcagtttaaaagcaaactgttggatatgaggaagaaagggatatggccttagccctttttccaatatttggaatatgaaagcatattgtgctttgtgtaaaaaatgttttcttctcctattctgctcttgtctttactgaaggtaaaagtattccttaagtagcttttgcaaatttctagtctgatttccacattcattaagttgatttagcagacatgtaagtcagaagtttcacatatcccttgtatcaaacattttatagggaaacctagtaaatttatgatgcttcattttgggctttccagactatttgagttattcaagatagccataatgttttagtagcgacattcttttattacttctaattgccttgtaaaatgcattgttatggcccggcacggtgggtggatcacaaggtcaggagttcaagaacagcctggccaagatggtgaaatgctgtctctactgaaaatacaaaaattagccaggtgtggtggcaggtgcctgtaatcccagctactcgggaggctgaggcagagaattgcttgaacccgggaggtggaggttgcagtgagctgagatcgcaccactgcactccaccctgggcgacagagtgagactatctcaa

SEQ ID NO: 38134 - DNA, 1369 bp, Homo sapiens
tacttccagatgtggttaataatattcagatccctaggttactcaaacaaaactaaaggagagaactatttaggggccatctgctttaaagtttaaggtgttttgttgttgttttagtgcctgtacaaattgaccataaaacccagattgattagtgagtgtggatttgagttgcctaagttgaggctattaaggtacttctttacttaaaagataagtttaaaagactctattcatcagttcatgatgatcttggaaatgctgtttctctactcaaaggatatacccacaggcaggtccatggggacttgctctggtgatctctgctattaaggcaaattccagcctgtttgtgccaagaacagagtcaagtgagagagaatgaagactcagagatgtgcagcactggcttgtatgttgtcaggcagaagccttgttcctttctcaagaaaacttcaggcctatcaagcttggaaggaaatacatttttttatgctgatttgcagcctacaccagctgatgaatatgctaggactttgagagaacacaaagcatggtaagttttggtcaggtggaaaggagcctgacatctgaacataatgcttcctctctcaacatctgggatacttttgaaaattcagtaaggcttaatgtaggaaaaattctttacaggaaaagctaattgatctgtttgtctaacctcatagccactccaaaatatgccttttataatggaaaaaaacagtgaacagagagaagagatttggggataagttagaaggtaccctcaaaactactgccgtaaacctacaggtgggcaaggaggaattactgtagtgtctctggagaaagttcttgaacatccaaatcatctcttttctaagcagtttttcccctaatctcataccttacatcttccagcatcatttgctacatcaatgtcttttcatcctcttcatcagccccattgagctgactccagcttatttttgcactgatttccaccatttccttcccacctgccttggcctcccaaagtgctgggattacaggtgtaagccaccgcacctggccagtttctatcataaattttaaatgtaagattggaagatacagagagctgtataaaatcataccagtagggtataattagcccaggtagtttaggaataaaattgggttgtatccgagtgccctaacttgacattttgattctccagcaaagaacataggttactaggttactaaccttgccttctcacttgggataaactttttttttttttcttgttgcccaggctggaggttgcagtgagctgagatcgcaccactgcactccaccctgggcgacagagtaagactatctcaa

SEQ ID NO: 38135 - DNA, 1463 bp, Homo sapiens
tacttccagatgtggttaataatattcagatccctaggttactcaaacaaaactaaaggagagaactatttaggggccatctgctttaaagtttaaggtgttttgttgttgttttagtgcctgtacaaattgaccataaaacccagattgattagtgagtgtggatttgagttgcctaagttgaggctattaaggtacttctttacttaaaagataagtttaaaagactctattcatcagttcatgatgatcttggaaatgctgtttctctactcaaaggatatacccacaggcaggtccatggggacttgctctggtgatctctgctattaaggcaaattccagcctgtttgtgccaagaacagagtcaagtgagagagaatgaagactcagagatgtgcagcactggcttgtatgttgtcaggcagaagccttgttcctttctcaagaaaacttcaggcctatcaagcttggaaggaaatacatttttttatgctgatttgcagcctacaccagctgatgaatatgctaggactttgagagaacacaaagcatggtaagttttggtcaggtggaaaggagcctgacatctgaacataatgcttcctctctcaacatctgggatacttttgaaaattcagtaaggcttaatgtaggaaaaattctttacaggaaaagctaattgatctgtttgtctaacctcatagccactccaaaatatgccttttataatggaaaaaaacagtgaacagagagaagagatttggggataagttagaaggtaccctcaaaactactgccgtaaacctacaggtgggcaaggaggaattactgtagtgtctctggagaaagttcttgaacatccaaatcatctcttttctaagcagtttttcccctaatctcataccttacatcttccagcatcatttgctacatcaatgtcttttcatcctcttcatcagccccattgagctgactccagcttatttttgcactgatttccaccatttccttcccacacccatcctttccctctatttaaagcctccatctcaccctcagtaatgctgctgatttactctcagatgtctcaagtctagcttcctttttgaatccttctcctactccaggggctgtcaaaggcagccttaaagttcagtgactgttaggtggctcaggccatttttcattgggtggtctttggtgtttgcatactgaatttgaattcagtttaaaagcaaactgttggatatgaggaagaaagggatatggccttagccctttttccaatatttggaatatgaaagcatattgtgctttgtgtaaaaaatgttttcttctcctattctgctcttgtctttactgaaggtaaaagtattccttaagtagcttttgcaaatttctaggttgtcctccaccatctattaggtgtcttgaactaccatttccctaatgttccatac

SEQ ID NO: 38136 - DNA, 1671 bp, Homo sapiens
tacttccagatgtggttaataatattcagatccctaggttactcaaacaaaactaaaggagagaactatttaggggccatctgctttaaagtttaaggtgttttgttgttgttttagtgcctgtacaaattgaccataaaacccagattgattagtgagtgtggatttgagttgcctaagttgaggctattaaggtacttctttacttaaaagataagtttaaaagactctattcatcagttcatgatgatcttggaaatgctgtttctctactcaaaggatatacccacaggcaggtccatggggacttgctctggtgatctctgctattaaggcaaattccagcctgtttgtgccaagaacagagtcaagtgagagagaatgaagactcagagatgtgcagcactggcttgtatgttgtcaggcagaagccttgttcctttctcaagaaaacttcaggcctatcaagcttggaaggaaatacatttttttatgctgatttgcagcctacaccagctgatgaatatgctaggactttgagagaacacaaagcatggtaagttttggtcaggtggaaaggagcctgacatctgaacataatgcttcctctctcaacatctgggatacttttgaaaattcagtaaggcttaatgtaggaaaaattctttacaggaaaagctaattgatctgtttgtctaacctcatagccactccaaaatatgccttttataatggaaaaaaacagtgaacagagagaagagatttggggataagttagaaggtaccctcaaaactactgccgtaaacctacaggtgggcaaggaggaattactgtagtgtctctggagaaagttcttgaacatccaaatcatctcttttctaagcagtttttcccctaatctcataccttacatcttccagcatcatttgctacatcaatgtcttttcatcctcttcatcagccccattgagctgactccagcttatttttgcactgatttccaccatttccttcccacctgccttggcctcccaaagtgctgggattacaggtgtaagccaccgcacctggccagtttctatcataaattttaaatgtaagattggaagatacagagagctgtataaaatcataccagtagggtataattagcccaggtagtttaggaataaaattgggttgtatccgagtgccctaacttgacattttgattctccagcaaagaacataggttactaggttactaaccttgccttctcacttgggataaactttttttttttttcttgttgcccaggctggagtgcaatagtgagatctcggctcaccgcaacctccgcctcttgggttcaagcgattctcctcccttagcctcccgagtagctggaattacagcctgtgccaccacgcccggcaaaatttgtatttttagtagagacggggtttcaccatgttggtcaggctggtttcaaactcccaacctcaggtgatctgcccacctcagcctcccaacatgctaggattacaggcgtgagccactgcgcccagcccaggataaacattctacctgcctgaaagtaccataagaggcaagtgagtttcttgcatgatgggcttctgcagcttccccctcaagtcacatctacctgttgtatttatttatttattta

SEQ ID NO: 38137 - DNA, 902 bp, Homo sapiens
gtcgtcgacggtaagaggtacacggcgcttatgttaactctggggcatgtggcacgctggaggtatttttgaaaaactttacttctaaaggtaatgaaaacgttgtgattcttttaaagcttatttaaatcatttaagacgcccgtgcttatctgggggaatttacaagtgctgtttgcatgtggaaaacgggattttacttaatgatgggacaaaaaaaagtgttttattcttgctcgtgaaacaatatccagatgtcgtcttgtttgcggtgggtgtacgggggtctagcttgcgggacaagaattactccgacttctctttgcaagggtctgtcagagcaagtttgttgattttcagcgattacatagttctttggctaattctgaagcagttactttcctttgtcaatggggaaatcagtttagattgccgtaaggcgaaacctcgccggaatattttaaaatctgttacctatccttttgagaaaagttatgtaagttttctgtggtaggtgtaaggaatgtaaacgatcctgagtttggaaatattatgaactttgttcatgacccatgattaatatgttttttaatctgtgtataatttcatgagagtttagactatcctcagctaataaatgttatactgggtgaaatttccacattgctcctgtaacgccaacgtttgtctcctctgtacttccgcatttagtcacttgaaggaaataagaatttattgttcaatagacatttcttgacctcataatttcttttaacccacaggttagaaaacttacaacgaatgtagtatttgactgtggaaaactaaagaccaaaaatgtgtaccattaattcaaatgtttagatttatctttttcccctttacctgtaagagggattttg

SEQ ID NO: 38138 - DNA, 358 bp, Homo sapiens
tccttttaattacatttattttaatgctgaatttactcctgtgccataagtttttgtttcttcagtttcttctgggatatctttttcttctgggcaacctcctcttctgatttaggaacaatctgttccttttccgtaaggatcatctcaatgtggcagggagagctcatgtatgggttaatccgaccatgagctctgtgggtccggcggcgcatcttaggtgttttgttcacttggatgtgctcaatgaccagagaatctacatctaaacccttaagttcagcattactctctgcgtttttaagcatgtgcagcaaaaattcagcactctttttgggccaccgaccttgtgtccagc

SEQ ID NO: 38139 - DNA, 370 bp, Homo sapiens
tagggtaggaattttttaaaaatctctataggtcagaaaataaaaccacatgaagcattgagggtagtgctagaggcctgccagttttaggggccatttggctcctgagaagaactgttaataaaagtattaataaggaagaggacacacaaaacacgctcaatgggaaaagccaggcgtgcagctgacctggccctggcctaggacaatgtttacaaggattgaccactgtcaagtcacagagtcacaaattgtctagaatcaatattatgtagactatgttttttaaacctcaatgcaactaaatttaaacttataataaaaaagttagtttcaaaaaacatgtcttgccctaccagctattaaaaca

SEQ ID NO: 38140 - DNA, 1104 bp, Homo sapiens
gggacatgtgagcccctcttcatgttgatgttccattggggaactgcccctcccccattctgggtccagtgtcccatccattgcagaggggcctgaaggtgctgaaggagctcagagccagagcaaaaaggggggacctggcctcacagagaggaaggacaccttttgtttttctgactgtctggcgaaggagatcaagatgattgcacatgcaaacaagttcgtcagtgccaccattgccacctgagtattgggtgctcaagtggaacaggggacttgaggaaggtggggaagcgttggggagtggctggtgaggcaaaccgaagtgggcccacccggacggagagctgggtttctcaacctttgcacgagtgacatcttgggcccgataattctgtgttgtgggggctgacctgtgcactgtaggatgtttagtggcatccctgggctaaatccactggataccaaagctcacacccttcctcccagtcataacagccaaaaatgtcaccagatactgccatgtttccccagggttgagtgggatgggatcactcctacccatctccccgctgagttcctgagtgaggactgcagaatgctgactggacatcaggaatgtgggttgcagtcttcatggctgtatttgttgttgttttcttctgggagtaggagcagagaagatgaagtgaacgatgggttaagtcagatttgttggggatggtgggcccattggtgctgcaatggagggataagggggtccgtgggattgatagtatggcccaagacatgggtgtagttgaaggcaaaagctcatgggtctgagctacatgaagtcacccagggggtggtgtctgaggactggccaagatcaggtccctgcaaacaaggcagctgtatctttaagatgggaagagagtaataaaacctcttcttagggttgttgagagaatcaaaggctttaatacacagaaagcacttaaaatagtgccttactatgcttgtagtaagtgcccaagaagcgctagctattattatcattaggcttttatagctgcaagtaattgaaactaactcatacccatacccgcttaccaaaaaaag

SEQ ID NO: 38141 - DNA, 1744 bp, Homo sapiens
acagtaagttttactatttggctgtcctgaggaaaactatttcatctcagaagtcttagtgatttgaattgttactcctaggttcttcaatgaagtttccatggattattttactcttaaaaataagaattgtaggccaggcccggtggctcacgcgggtaatcccagcactttgggagactgaggtgggtggatccacaaggtcaagagatcgagaccagcctggctaacatggtgaaaccctgcctctactaaaactacaaaaattaggccaggcgtggtggtggctcacgcctgtaatcccagcactctggaaggccgaggcaggcggatcacctgaggtcagaagttcaagaccagcctggccatggtgaaaccctgtctgtactaaaaaatacaaaaaattagctgggcgtggtggtgtgcacctgtcatcccagctactcgggaggctagaggcaggagaatcgcttgaacccaagaggcggaggttgcagtgagccgagatcgcgccattgcactccagcctgggcaacaagagcgaaactctgtctcaaaaaaaaaaaaaaaatacaaaaattagctgggcatggtggtgtgcacctgtagtcccagctacttgggatgctgaggcaagagaatcacttgaacccaggaggcaagggttgcagtaagctgagattgcgccactgctctccagcctggtgacagagcaagactgtctacaaaaaaaaagggaactgtatttgttcagttgagacccccggctagaaagcatttgcttttttatttttattttttattttttgaggtagggtttctctttgtcacccaggctatagtgcagtgacgcaatcatgtctcactgcagtttctaatggccggtcataagcaatcccacccaggttagcctcccgagtagctgggactataggtgcagccaccatgccctgctaatttttctattttttttttgtagagacaaggttttgccatgttgctcagttggtctgaaaatccagggccaagcaatctgcacgctactcccggccttaaaagcttttgtgcctgggcgtggtggctcatgcctgtaacaataaggtcaggatatcgagaccagcctgaccaacatggtgaaaccccatctctactaataaagtacaaaaattagccggatgtagtggcgcgtgcgtgtaatcccagttactcgggaagagaggcaggagaattgcttgaacccgtgagatggaggttgtgatgagccaagatcacaccactgcactccagcctgggtgacagctagactgcgtttccaaaaagaaaaaaaagcttttgtgacaaatcttacaggtggagcgaccaccccaacccccgtacatcctgagagtgtccaaaaaatggaaaagatcgtgtttaggcttacatcttaaaggatgacttacaaccttaattgatattttgtaacagagatgatgttaatagacactgtatctaaatttgtaaagtagaatttgtagaatcatttggggtttcacttcaagtttgccatttgtgattgtcaaacttaatttgactttacaattacatggttttgttgtaaagaatcatccattacactgattttggatcagtctggcatttgtgattggtctggtgatatgttttatgactatgattaaactgtcaggcttctggttgacccttgttttagaaaaattaccctttttgggccaggcgtggtggc

SEQ ID NO: 38142 - DNA, 963 bp, Homo sapiens
cggggcggcgaggggccgcaacggtgacgactgtggcagagaaggcccggaggggctctgcgttctgtagtggcgctgcttgggcccgtggcggattgtaagctgctggttttgcggctgggaagagcggcgagagggttcggcatttttcgtcgggatccccgcaaggatgagtgctgccagagagtctcacccgcatggggtgaagcgttcagcctccccagacgacgatctgggatctagcaattgggaggcagcagacttgggtaatgaagagagaaaacaaaagttcttgagacttatgggtgcaggaaagaaagaacatactggtcgtcttgttataggagatcacaaatcaacatctcacttccgaaccggggaagaagacaagaaaattaatgaagaactggagtctcaatatcagcaaagtatggacagtaaattatcaggaagatatcggcgacattgtggacttggcttcagtgaggtagaagaccatgatggagaaggtgatgtggctggagatgatgatgatgacgatgatgattcacctgatcctgaaagtccagatgattctgaaagcgattcagagtcagagaaagaagaatctgctgaagaactccaagctgctgagcaccctgatgaagtggaggatcccaaaaacaaaaaagatgcaaaaagcaattataaaatgatgtttgttaaatccagtggttcataactcccaaacgcttagtctttgtattaaaagtaagccttattgttacaatgcacagtggaggactgcttatagagcacagacctttgtattataatttttaaaaaggcccttttaaataattacaaagagtgtttgctttcaaatgccatgggttacacttttatgggcatgactataaccatttttgtaaagagtaagagttgtataaaataagaaataaatacagtactcaacttcctttc

SEQ ID NO: 38143 - DNA, 735 bp, Homo sapiens
cggggcggcgaggggccgcaacggtgacgactgtggcagagaaggcccggaggggctctgcgttctgtagtggcgctgcttgggcccgtggcggattgtaagctgctggttttgcggctgggaagagcggcgagagggttcggcatttttcgtcgggatccccgcaaggatgagtgctgccagagagtctcacccgcatggggtgaagcgttcagcctccccagacgacgatctgggatctagcaattgggaggcagcagacttgggtaatgaagagagaaaacaaaagttcttgagacttatgggtgcaggaaagaaagaacatactggtcgtcttgttataggagatcacaaatcaacatctcacttccgaaccggggaagaagacaagaaaattaatgaagaactggagtctcaatatcagcaaagtatggacagtaaattatcaggaagatatcggcgacattgtggacttggcttcagtgaggtagaagaccatgatggagaaggtgatgtggctggagatgatgatgatgacgatgatgattcacctgatcctgaaagtccagatgattctgaaagcgattcagagtcagagaaagaagaatctgctgaagaactccaagctgctgagcaccctgaccgtgaaagcgggggaccccccccacaaggtgcccaacggactcataaacgacgctcggtaaacccacgggccataccccccctcccccttcg

SEQ ID NO: 38144 - DNA, 1053 bp, Homo sapiens
  misc_feature (1000)..(1000): n is a, c, g, or t
  misc_feature (1007)..(1007): n is a, c, g, or t
  misc_feature (1010)..(1010): n is a, c, g, or t
  misc_feature (1016)..(1016): n is a, c, g, or t
tgctactttgaacaaaaggtccccctgtggtcttttgttcaacattgtacaatgtagaactctgtccaacactaatttattttgtcttgagttttactacaagatgagactgtggatcccgcatgcctgaattcactaaagccaagggtctgtaagccacgctgctcttctgagacttccattcctttctgattggcacttgctgcccacgaagtgaagtggaggatcccaaaaacaaaaaagatgcaaaaagcaattataaaatgatgtttgttaaatccagtggttcataactcccaaacgcttagtctttgtattaaaagtaagccttattgttacaatgcacagtggaggactgcttatagagcacagacctttgtattataatttttaaaaaggcccttttaaataattacaaagagtgtttgctttcaaatgccatgggttacacttttatgggcatgactataaccatttttgtaaagagtaagagttgtataaaataagaaataaatacagtactcaacttcctttcatattagcatcatcaaccctctaattcaccttatgggggaaatgcttctttttgtttgtgatagctattttatcatttccttcatatttttctcttataaaaatgtatttgatactgtgatatgttcacgaaaagtattctttaattattctttgttatagtagagctgttcattatggatatttctgctgccagtcacaatctaaattaattttggcaaaagattgggtacttagtttcctgttactgagttagctctactcttttggaccaaagcaacatgagagcaagtacttttcacacttgttaagatggagttataactgtcatacatttggaatattatgatcccaagtagtctttttataatttggattgtatcgtatgttagatttttgataaaatttggccaatttttacagaagaaattctctgatcattaggtatctattagaatttgtaacnggttttnagnaatggnccaggttatttgtccaagggtaatagagagtccgaag

SEQ ID NO: 38145 - DNA, 813 bp, Homo sapiens
cggggcggcgaggggccgcaacggtgacgactgtggcagagaaggcccggaggggctctgcgttctgtagtggcgctgcttgggcccgtggcggattgtaagctgctggttttgcggctgggaagagcggcgagagggttcggcatttttcgtcgggatccccgcaaggatgagtgctgccagagagtctcacccgcatggggtgaagcgttcagcctccccagacgacgatctgggatctagcaattgggaggcagcagacttgggtaatgaagagagaaaacaaaagttcttgagacttatgggtgcaggaaagaaagaacatactggtcgtcttgttataggagatcacaaatcaacatctcacttccgaaccgaagaaagtaaagtgtaattaaaatggaagtgctaaattcagaatatgaagtatgtgttcatgtttcaggatattctactttggcatgtaattgtgtaaattattaaaatattataattagagctgggtgcagtggcttaatgcctgtaatcccggttatttgggaggttaaagtgggaggatcacttaagcccaggagtttgaggctgcaatgaagctatgattgcaccactgcattccagcctgggctacagagcaagacctcatctcttaaatttaaaaaaaaaaaggagagaaaaaaatgctgggcaccttggcttatgcttgtaatcccagcattttgggaggctgaggtgggccgatcacttgaggcaaatcaccagcctggtcaacatggcaaaaccgtgtctctactaaaaaaaaaaaaaaaaaaaaaa

SEQ ID NO: 38146 - DNA, 456 bp, Homo sapiens
cggggcggcgaggggccgcaacggtgacgactgtggcagagaaggcccggaggggctctgcgttctgtagtggcgctgcttgggcccgtggcggattgtaagctgctggttttgcggctgggaagagcggcgagagggttcggcatttttcgtcgggatccccgcaaggatgagtgctgccagagagtctcacccgcatggggtgaagcgttcagcctccccagacgacgatctgggatctagcaattgggaggcagcagacttgggtaatgaagagagaaaacaaaagttcttgagacttatgggtgcaggaaagaaagaacatactggtcgtcttgttataggagatcacaaatcaacatctcacttccgaaccggacatgtaatttattgaagaactggcgcctaatatcagcaacgtttgctcacgctacttataggcctactcgtgactcc

SEQ ID NO: 38147 - DNA, 632 bp, Homo sapiens
cttaaaggcagagtcgactaatcttttgtcttcactgtgtcccagaagcctagaatagttttcagcacatagtagatacccaataaggttaaattagtggtctcaaatgctaatacattttcaaccttcttatagaaagaacatactggtcgtcttgttataggagatcacaaatcaacatctcacttccgaaccgaagaaagtaaagtgtaattaaaatggaagtgctaaattcagaatatgaagtatgtgttcatgtttcaggatattctactttggcatgtaattgtgtaaattattaaaatattataattagagctgggtgcagtggcttaatgcctgtaatcccggttatttgggaggttaaagtgggaggatcacttaagcccaggagtttgaggctgcaatgaagctatgattgcaccactgcattccagcctgggctacagagcaagacctcatctcttaaatttaaaaaaaaaaaggagagaaaaaaatgctgggcaccttggcttatgcttgtaatcccagcattttgggaggctgaggtgggccgatcacttgaggcaaatcaccagcctggtcaacatggcaaaaccgtgtctctactaaaaaaaaaaaaaaaaaaaaaa

SEQ ID NO: 38148 - DNA, 231 bp, Homo sapiens
  misc_feature (21)..(21): n is a, c, g, or t
tatctagaggatcccgagaanctgctgctccgcgagaatctgtgctggttttgcggctgggaagagcggcgagagggttcggcatttttcgtcgggatccccgcaaggatgagtgctgccagagagtctcacccgcatggggtgaagcgttcagcctccccagacgacgatctgggatctagcacttgggaagcagcaggatctcgcgggagcagcaggaattctcgcggg

SEQ ID NO: 38149 - DNA, 2094 bp, Homo sapiens
  misc_feature (1790)..(1790): n is a, c, g, or t
cggggcggcgaggggccgcaacggtgacgactgtggcagagaaggcccggaggggctctgcgttctgtagtggcgctgcttgggcccgtggcggattgtaagctgctggttttgcggctgggaagagcggcgagagggttcggcatttttcgtcgggatccccgcaaggatgagtgctgccagagagtctcacccgcatggggtgaagcgttcagcctccccagacgacgatctgggatctagcaattgggaggcagcagacttgggtaatgaagagagaaaacaaaagttcttgagacttatgggtgcaggaaagaaagaacatactggtcgtcttgttataggagatcacaaatcaacatctcacttccgaaccggggaagaagacaagaaaattaatgaagaactggagtctcaatatcagcaaagtatggacagtaaattatcaggaagatatcggcgacattgtggacttggcttcagtgaggtagaagaccatgatggagaaggtgatgtggctggagatgatgatgatgacgatgatgattcacctgatcctgaaagtccagatgattctgaaagcgattcagagtcagagaaagaagaatctgctgaagaactccaagctgctgagcaccctgatgaagtggaggatcccaaaaacaaaaaagatgcaaaaagcaattataaaatgatgtttgttaaatccagtggttcataactcccaaacgcttagtctttgtattaaaagtaagccttattgttacaatgcacagtggaggactgcttatagagcacagacctttgtattataatttttaaaaaggcccttttaaataattacaaagagtgtttgctttcaaatgccatgggttacacttttatgggcatgactataaccatttttgtaaagagtaagagttgtataaaataagaaataaatacagtactcaacttcctttcatattagcatcatcaaccctctaattcaccttatgggggaaatgcttctttttgtttgtgatagctattttatcatttccttcatatttttctcttataaaaatgtatttgatactgtgatatgttcacgaaaagtattctttaattattctttgttatagtagagctgttcattatggatatttctgctgccagtcacaatctaaattaattttggcaaaagattgggtacttagtttcctgttactgagttagctctactcttttggaccaaagcaacatgagagcaagtacttttcacacttgttaagatggagttataactgtcatacatttggaatattatgatcccaagtagtctttttataatttggattgtatcgtatgttagatttttgataaaatttggccaatttttacagaagaaattctctgatcatttagttctatctatttagaaatatgtaaaactggatttttttttaagtaatatgtgaccaaagttaattttgtcccaaaggtctaaataaagagcagtttcccatatttggctgtgatacctttatcctcattatctacaaatgaggaacaggcttactgataagaagctgaaacaagaaattctcttcattttatcccagtgctattttattgattaattactaaaaagtattactttctaattttattgctgtttctgttggtgtgagattagaatcatctgactgctattaggtggttgatttgtatagctgattaacacaaattgcattatgagctagtaaatggatctttggaaaaaaaaaaaaaaaaaaaaaaaaaaaaanaaaaaaaaaaaaaaaaaaaaaaataaaaaaaaagaaaaaacaaaaaaaaaaaaaagaaaaaaaaagacgaagagacaaaaaaaataacgaaaaacaaggcagccgcactcagaaggaacgtggcctaccactgtgtcacgcacagcggggtaatctattaacagtagcaataagtcgggagacagacagaggcgtcactgtcaacggtggctgaggggctgacgatgttcgtctctgcgaggagatggctcgacctctgcgagaggatcggtgcccggtactgtacgtagactctcctcttaca

SEQ ID NO: 38150 - DNA, 1864 bp, Homo sapiens
  misc_feature (1537)..(1537): n is a, c, g, or t
cggggcggcgaggggccgcaacggtgacgactgtggcagagaaggcccggaggggctctgcgttctgtagtggcgctgcttgggcccgtggcggattgtaagctgctggttttgcggctgggaagagcggcgagagggttcggcatttttcgtcgggatccccgcaaggatgagtgctgccagagagtctcacccgcatggggtgaagcgttcagcctccccagacgacgatctgggatctagcaattgggaggcagcagacttgggtaatgaagagagaaaacaaaagttcttgagacttatgggtgcaggaaagaaagaacatactggtcgtcttgttataggagatcacaaatcaacatctcacttccgaaccggggaagaagacaagaaaattaatgaagaactggagtctcaatatcagcaaagtatggacagtaaattatcaggaagatatcggcgacattgtggacttggcttcagtgaggtagaagaccatgatggagaaggtgatgtggctggagatgatgatgatgacgatgatgattcacctgatcctgaaagtccagatgattctgaaagcgattcagagtcagagaaagaagaatctgctgaagaactccaagctgctgagcaccctgatgaagtggaggatcccaaaaacaaaaaagatgcaaaaagcaattataaaatgatgtttgttaaatccagtggttcataactcccaaacgcttagtctttgtattaaaagtaagccttattgttacaatgcacagtggaggactgcttatagagcacagacctttgtattataatttttaaaaaggcccttttaaataattacaaagagtgtttgctttcaaatgccatgggttacacttttatgggcatgactataaccatttttgtaaagagtaagagttgtataaaataagaaataaatacagtactcaacttcctttcatattagcatcatcaaccctctaattcaccttatgggggaaatgcttctttttgtttgtgatagctattttatcatttccttcatatttttctcttataaaaatgtatttgatactgtgatatgttcacgaaaagtattctttaattattctttgttatagtagagctgttcattatggatatttctgctgccagtcacaatctaaattaattttggcaaaagattgggtacttagtttcctgttactgagttagctctactcttttggaccaaagcaacatgagagcaagtacttttcacacttgttaagatggagttataactgtcatacatttggaatattatgatcccaagtagtctttttataatttggattgtatcgtatgttagatttttgataaaatttggccaatttttacagaagaaattctctgatcatttagttctatctatttagaaatatgtaaaactggatttttttttaagtaatatgtgaccaaagttaattttgtcccaaaggtctaaataaagagcagtttcccataaaaaaaaaaaaaaaaaaaaaaaaaaaanaaaaaaaaagggggggggggccaaaaattccccggggggggcccagttggggttccccggttttttgttacaggggggcgcccttaataggggagggccggatatttaataacagcaagggaacagggggccgcggttaaaaacacgggtcgagcgtggagaacgtggcacgctggagaccctgggggaaaggaaccctactctctgtcggggggcatatctgggcaactcacccaaagagttaaacgtcacggaatatcaacatttcagggtttctggttaccaacggatatggtgcgtaaaattcggtaccagtttcgacatttg

SEQ ID NO: 38151 - DNA, 1759 bp, Homo sapiens
cggggcggcgaggggccgcaacggtgacgactgtggcagagaaggcccggaggggctctgcgttctgtagtggcgctgcttgggcccgtggcggattgtaagctgctggttttgcggctgggaagagcggcgagagggttcggcatttttcgtcgggatccccgcaaggatgagtgctgccagagagtctcacccgcatggggtgaagcgttcagcctccccagacgacgatctgggatctagcaattgggaggcagcagacttgggtaatgaagagagaaaacaaaagttcttgagacttatgggtgcaggaaagaaagaacatactggtcgtcttgttataggagatcacaaatcaacatctcacttccgaaccggggaagaagacaagaaaattaatgaagaactggagtctcaatatcagcaaagtatggacagtaaattatcaggaagatatcggcgacattgtggacttggcttcagtgaggtagaagaccatgatggagaaggtgatgtggctggagatgatgatgatgacgatgatgattcacctgatcctgaaagtccagatgattctgaaagcgattcagagtcagagaaagaagaatctgctgaagaactccaagctgctgagcaccctgatgaagtggaggatcccaaaaacaaaaaagatgcaaaaagcaattataaaatgatgtttgttaaatccagtggttcataactcccaaacgcttagtctttgtattaaaagtaagccttattgttacaatgcacagtggaggactgcttatagagcacagacctttgtattataatttttaaaaaggcccttttaaataattacaaagagtgtttgctttcaaatgccatgggttacacttttatgggcatgactataaccatttttgtaaagagtaagagttgtataaaataagaaataaatacagtactcaacttcctttcatattagcatcatcaaccctctaattcaccttatgggggaaatgcttctttttgtttgtgatagctattttatcatttccttcatatttttctcttataaaaatgtatttgatactgtgatatgttcacgaaaagtattctttaattattctttgttatagtagagctgttcattatggatatttctgctgccagtcacaatctaaattaattttggcaaaagattgggtacttagtttcctgttactgagttagctctactcttttggaccaaagcaacatgagagcaagtacttttcacacttgttaagatggagttataactgtcatacatttggaatattatgatcccaagtagtctttttataatttggattgtatcgtatgttagatttttgataaaatttggccaatttttacagaagaaattctctgatcatttagttctatctatttagaaatatgtaaaactggatttttttttaagtaatatgtgaccaaagttaattttgtcccaaaggtctaaataaagagcagtttcccataaaaaaaacaatcaaataataatgaaaactggagacgtggaggacgtgctagaaccccgcagccgaggacctgaaaccagacagctaaccgactgcccccgagctgcaccaaaaagtgcaggagatcctgagggctggacggcggggccgcggagccacataattcctcatcggggggacgcatatatacaccttttttattgaacacactccatgttataattatacgaggcggggctttacataccctc

SEQ ID NO: 38152 - DNA, 1995 bp, Homo sapiens
cggggcggcgaggggccgcaacggtgacgactgtggcagagaaggcccggaggggctctgcgttctgtagtggcgctgcttgggcccgtggcggattgtaagctgctggttttgcggctgggaagagcggcgagagggttcggcatttttcgtcgggatccccgcaaggatgagtgctgccagagagtctcacccgcatggggtgaagcgttcagcctccccagacgacgatctgggatctagcaattgggaggcagcagacttgggtaatgaagagagaaaacaaaagttcttgagacttatgggtgcaggaaagaaagaacatactggtcgtcttgttataggagatcacaaatcaacatctcacttccgaaccggggaagaagacaagaaaattaatgaagaactggagtctcaatatcagcaaagtatggacagtaaattatcaggaagatatcggcgacattgtggacttggcttcagtgaggtagaagaccatgatggagaaggtgatgtggctggagatgatgatgatgacgatgatgattcacctgatcctgaaagtccagatgattctgaaagcgattcagagtcagagaaagaagaatctgctgaagaactccaagctgctgagcaccctgatgaagtggaggatcccaaaaacaaaaaagatgcaaaaagcaattataaaatgatgtttgttaaatccagtggttcataactcccaaacgcttagtctttgtattaaaagtaagccttattgttacaatgcacagtggaggactgcttatagagcacagacctttgtattataatttttaaaaaggcccttttaaataattacaaagagtgtttgctttcaaatgccatgggttacacttttatgggcatgactataaccatttttgtaaagagtaagagttgtataaaataagaaataaatacagtactcaacttcctttcatattagcatcatcaaccctctaattcaccttatgggggaaatgcttctttttgtttgtgatagctattttatcatttccttcatatttttctcttataaaaatgtatttgatactgtgatatgttcacgaaaagtattctttaattattctttgttatagtagagctgttcattatggatatttctgctgccagtcacaatctaaattaattttggtggaccaaagcaacatgagagcaagtacttttcacacttgttaagatggagttataactgtcatacatttggaatattatgatcccaagtagtctttttataatttggattgtatcgtatgttagatttttgataaaatttggccaatttttacagaagaaattctctgatcatttagttctatctatttagaaatatgtaaaactggatttttttttaagtaatatgtgaccaaagttaattttgtcccaaaggtctaaataaagagcagtttcccatatttggctgtgatacctttatcctcattatctacaaatgaggaacaggcttactgataagaagctgaaacaagaaattctcttcattttatcccagtgctattttattgattaattactaaaaagtattactttctaattttattgctgtttctgttggtgtgagattagaatcatctgactgctattaggtggttgatttgtatagctgattaacacaaattgcattatgagctagtaaatggatctttggataatggggtccaaattcttaatgtttataagtaacaagttcaaaggctttagtcacacctgtttgtgagctgagctattatacatctacatacttaaaggatgtatttggagtgttacattttttttttttttttttttttgagacggagtctcattctgtccccaggctggagtgcagtggcgcgatctcggctaactgcaacctctgcctcgcaggagaatcacttgaacccaggaagcggaggttgcagtgagccgggatcgccccattgcactccagcc

SEQ ID NO: 38153 - DNA, 1235 bp, Homo sapiens
  misc_feature (1036)..(1036): n is a, c, g, or t
  misc_feature (1041)..(1041): n is a, c, g, or t
  misc_feature (1045)..(1045): n is a, c, g, or t
cggggcggcgaggggccgcaacggtgacgactgtggcagagaaggcccggaggggctctgcgttctgtagtggcgctgcttgggcccgtggcggattgtaagctgctggttttgcggctgggaagagcggcgagagggttcggcatttttcgtcgggatccccgcaaggatgagtgctgccagagagtctcacccgcatggggtgaagcgttcagcctccccagacgacgatctgggatctagcaattgggaggcagcagacttgggtaatgaagagagaaaacaaaagttcttgagacttatgggtgcaggaaagaaagaacatactggtcgtcttgttataggagatcacaaatcaacatctcacttccgaaccggggaagaagacaagaaaattaatgaagaactggagtctcaatatcagcaaagtatggacagtaaattatcaggaagatatcggcgacattgtggacttggcttcagtgaggtagaagaccatgatggagaaggtgatgtggctggagatgatgatgatgacgatgatgattcacctgatcctgaaagtccagatgattctgaaagcgattcagagtcagagaaagaagaatctgctgaagaactccaagctgctgagcaccctgatgaagtggaggatcccaaaaacaaaaaagatgcaaaaagcaattataaaatgatgtttgttaaatccagtggttcataactcccaaacgcttagtctttgtattaaaagtaagccttattgttacaatgcacagtggaggactgcttatagagcacagacctttgtattataatttttaaaaaggcccttttaaataattacaaagagtgtttgctttcaaatgccatgggttacacttttatgggcatgactataaccatttttgtaaagagtaagagttgtataaaataagaaataaatacagtactcaacttcctttcatattagcatcatcaaccctctaattcaccttatgggggaaatgcttctttttgtttgtgatagctatttacnattcntcanatttccctaaacagtatcgaccggattgtccgcaacaggtactactatcctgatcgcacacgcctatgactactgggcgccacaacaaatgccaccaggctcgcgacgatactcctttggccgacagagctcctgaggtcacaccgatcacacaagggtcagagccaaacagtcatcgcgtcacacatgt

SEQ ID NO: 38154 - DNA, 1968 bp, Homo sapiens
cagattcgcttagcgggacaatcactttgctggttttgcggctgggaagagcggcgagagggttcggcatttttcgtcgggatccccgcaaggatgagtgctgccagagagtctcacccgcatggggtgaagcgttcagcctccccagacgacgatctgggatctagcaattgggaggcagcagacttgggtaatgaagagagaaaacaaaagttcttgagacttatgggtgcaggaaagaaagaacatactggtcgtcttgttataggagatcacaaatcaacatctcacttccgaaccggggaagaagacaagaaaattaatgaagaactggagtctcaatatcagcaaagtatggacagtaaattatcaggaagatatcggcgacattgtggacttggcttcagtgaggtagaagaccatgatggagaaggtgatgtggctggagatgatgatgatgacgatgatgattcacctgatcctgaaagtccagatgattctgaaagcgattcagagtcagagaaagaagaatctgctgaagaactccaagctgctgagcaccctgatgaagtggaggatcccaaaaacaaaaaagatgcaaaaagcaattataaaatgatgtttgttaaatccagtggttcataactcccaaacgcttagtctttgtattaaaagtaagccttattgttacaatgcacagtggaggactgcttatagagcacagacctttgtattataatttttaaaaaggcccttttaaataattacaaagagtgtttgctttcaaatgccatgggttacacttttatgggcatgactataaccatttttgtaaagagtaagagttgtataaaataagaaataaatacagtactcaacttcctttcatattagcatcatcaaccctctaattcaccttatgggggaaatgcttctttttgtttgtgatagctattttatcatttccttcatatttttctcttataaaaatgtatttgatactgtgatatgttcacgaaaagtattctttaattattctttgttatagtagagctgttcattatggatatttctgctgccagtcacaatctaaattaattttggcaaaagattgggtacttagtttcctgttactgagttagctctactcttttggaccaaagcaacatgagagcaagtacttttcacacttgttaagatggagttataactgtcatacatttggaatattatgatcccaagtagtctttttataatttggattgtatcgtatgttagatttttgataaaatttggccaatttttacagaagaaattctctgatcatttagttctatctatttagaaatatgtaaaactggatttttttttaagtaatatgtgaccaaagttaattttgtcccaaaggtctaaataaagagcagtttcccatatttggctgtgatacctttatcctcattatctacaaatgaggaacaggcttactgataagaagctgaaacaagaaattctcttcattttatcccagtgctattttattgattaattactaaaaagtattactttctaattttattgctgtttctgttggtgtgagattagaatcatctgactgctattaggtggttgatttgtatagctgattaacacaaattgcattatgagctagtaaatggatctttggataatggggtccaaattcttaatgtttataagtaacaagttcaaaggctttagtcacacctgtttgtgagctgagctattatacatctacatacttaaaggatgtatttggagtgttacattttttttttttttttttttttgagacggagtctcattctgtccccaggctggagtgcagtggcgcgatctcggctaactgcaacctctgcctcgcaggagaatcacttgaacccaggaagcggaggttgcagtgagccgggatcgccccattgcactccagcc

SEQ ID NO: 38155 - DNA, 1978 bp, Homo sapiens
cggggcggcgaggggccgcaacggtgacgactgtggcagagaaggcccggaggggctctgcgttctgtagtggcgctgcttgggcccgtggcggattgtaagctgctggttttgcggctgggaagagcggcgagagggttcggcatttttcgtcgggatccccgcactgggatctagcaattgggaggcagcagacttgggtaatgaagagagaaaacaaaagttcttgagacttatgggtgcaggaaagaaagaacatactggtcgtcttgttataggagatcacaaatcaacatctcacttccgaaccggggaagaagacaagaaaattaatgaagaactggagtctcaatatcagcaaagtatggacagtaaattatcaggaagatatcggcgacattgtggacttggcttcagtgaggtagaagaccatgatggagaaggtgatgtggctggagatgatgatgatgacgatgatgattcacctgatcctgaaagtccagatgattctgaaagcgattcagagtcagagaaagaagaatctgctgaagaactccaagctgctgagcaccctgatgaagtggaggatcccaaaaacaaaaaagatgcaaaaagcaattataaaatgatgtttgttaaatccagtggttcataactcccaaacgcttagtctttgtattaaaagtaagccttattgttacaatgcacagtggaggactgcttatagagcacagacctttgtattataatttttaaaaaggcccttttaaataattacaaagagtgtttgctttcaaatgccatgggttacacttttatgggcatgactataaccatttttgtaaagagtaagagttgtataaaataagaaataaatacagtactcaacttcctttcatattagcatcatcaaccctctaattcaccttatgggggaaatgcttctttttgtttgtgatagctattttatcatttccttcatatttttctcttataaaaatgtatttgatactgtgatatgttcacgaaaagtattctttaattattctttgttatagtagagctgttcattatggatatttctgctgccagtcacaatctaaattaattttggcaaaagattgggtacttagtttcctgttactgagttagctctactcttttggaccaaagcaacatgagagcaagtacttttcacacttgttaagatggagttataactgtcatacatttggaatattatgatcccaagtagtctttttataatttggattgtatcgtatgttagatttttgataaaatttggccaatttttacagaagaaattctctgatcatttagttctatctatttagaaatatgtaaaactggatttttttttaagtaatatgtgaccaaagttaattttgtcccaaaggtctaaataaagagcagtttcccatatttggctgtgatacctttatcctcattatctacaaatgaggaacaggcttactgataagaagctgaaacaagaaattctcttcattttatcccagtgctattttattgattaattactaaaaagtattactttctaattttattgctgtttctgttggtgtgagattagaatcatctgactgctattaggtggttgatttgtatagctgattaacacaaattgcattatgagctagtaaatggatctttggataatggggtccaaattcttaatgtttataagtaacaagttcaaaggctttagtcacacctgtttgtgagctgagctattatacatctacatacttaaaggatgtatttggagtgttacattttttttttttttttttttttgagacggagtctcattctgtccccaggctggagtgcagtggcgcgatctcggctaactgcaacctctgcctcgcaggagaatcacttgaacccaggaagcggaggttgcagtgagccgggatcgccccattgcactccagcc

SEQ ID NO: 38156 - DNA, 2053 bp, Homo sapiens
  misc_feature (60)..(60): n is a, c, g, or t
  misc_feature (163)..(163): n is a, c, g, or t
ggtagtggcgctgctatggcgcccctctgcgcgggattgtaagctgctggtttagcggcntgggaagcacggcgcgcagaggagcggttcgaggcagtttattcagtcgcggatcgcccagtcgaagggatgtatgtgcggtgccatgaatgatgtcgtctancccggtcagtgcgggattgaacgctgggttcatgacacttctccctcgagactgacgaatcttggtgatcgtagcaatttggcgaggcaagcgagcactgtgggtacatgagagagtagagaggacatcacgaagttcttgagacttatgggtgcaggaaagaaagaacatactggtcgtcttgttataggagatcacaaatcaacatctcacttccgaaccggggaagaagacaagaaaattaatgaagaactggagtctcaatatcagcaaagtatggacagtaaattatcaggaagatatcggcgacattgtggacttggcttcagtgaggtagaagaccatgatggagaaggtgatgtggctggagatgatgatgatgacgatgatgattcacctgatcctgaaagtccagatgattctgaaagcgattcagagtcagagaaagaagaatctgctgaagaactccaagctgctgagcaccctgatgaagtggaggatcccaaaaacaaaaaagatgcaaaaagcaattataaaatgatgtttgttaaatccagtggttcataactcccaaacgcttagtctttgtattaaaagtaagccttattgttacaatgcacagtggaggactgcttatagagcacagacctttgtattataatttttaaaaaggcccttttaaataattacaaagagtgtttgctttcaaatgccatgggttacacttttatgggcatgactataaccatttttgtaaagagtaagagttgtataaaataagaaataaatacagtactcaacttcctttcatattagcatcatcaaccctctaattcaccttatgggggaaatgcttctttttgtttgtgatagctattttatcatttccttcatatttttctcttataaaaatgtatttgatactgtgatatgttcacgaaaagtattctttaattattctttgttatagtagagctgttcattatggatatttctgctgccagtcacaatctaaattaattttggcaaaagattgggtacttagtttcctgttactgagttagctctactcttttggaccaaagcaacatgagagcaagtacttttcacacttgttaagatggagttataactgtcatacatttggaatattatgatcccaagtagtctttttataatttggattgtatcgtatgttagatttttgataaaatttggccaatttttacagaagaaattctctgatcatttagttctatctatttagaaatatgtaaaactggatttttttttaagtaatatgtgaccaaagttaattttgtcccaaaggtctaaataaagagcagtttcccatatttggctgtgatacctttatcctcattatctacaaatgaggaacaggcttactgataagaagctgaaacaagaaattctcttcattttatcccagtgctattttattgattaattactaaaaagtattactttctaattttattgctgtttctgttggtgtgagattagaatcatctgactgctattaggtggttgatttgtatagctgattaacacaaattgcattatgagctagtaaatggatctttggataatggggtccaaattcttaatgtttataagtaacaagttcaaaggctttagtcacacctgtttgtgagctgagctattatacatctacatacttaaaggatgtatttggagtgttacattttttttttttttttttttttgagacggagtctcattctgtccccaggctggagtgcagtggcgcgatctcggctaactgcaacctctgcctcgcaggagaatcacttgaacccaggaagcggaggttgcagtgagccgggatcgccccattgcactccagcc

SEQ ID NO: 38157 - DNA, 1983 bp, Homo sapiens
cggggcggcgaggggccgcaacggtgacgactgtggcagagaaggcccggaggggctctgcgttctgtagtggcgctgcttgggcccgtggcggattgtaagctgctggttttgcggctgggaagagcggcgagagggttcggcatttttcgtcgggatccccgcaaggatgagtgctgccagagagtctcacccgcatggggtgaagcgttcagcctccccagacgacgatctgggatctagcaattgggaggcagcagacttgggtaatgaagagagaaaacaaaagttcttgagacttatgggtgcaggaaaggggaagaagacaagaaaattaatgaagaactggagtctcaatatcagcaaagtatggacagtaaattatcaggaagatatcggcgacattgtggacttggcttcagtgaggtagaagaccatgatggagaaggtgatgtggctggagatgatgatgatgacgatgatgattcacctgatcctgaaagtccagatgattctgaaagcgattcagagtcagagaaagaagaatctgctgaagaactccaagctgctgagcaccctgatgaagtggaggatcccaaaaacaaaaaagatgcaaaaagcaattataaaatgatgtttgttaaatccagtggttcataactcccaaacgcttagtctttgtattaaaagtaagccttattgttacaatgcacagtggaggactgcttatagagcacagacctttgtattataatttttaaaaaggcccttttaaataattacaaagagtgtttgctttcaaatgccatgggttacacttttatgggcatgactataaccatttttgtaaagagtaagagttgtataaaataagaaataaatacagtactcaacttcctttcatattagcatcatcaaccctctaattcaccttatgggggaaatgcttctttttgtttgtgatagctattttatcatttccttcatatttttctcttataaaaatgtatttgatactgtgatatgttcacgaaaagtattctttaattattctttgttatagtagagctgttcattatggatatttctgctgccagtcacaatctaaattaattttggcaaaagattgggtacttagtttcctgttactgagttagctctactcttttggaccaaagcaacatgagagcaagtacttttcacacttgttaagatggagttataactgtcatacatttggaatattatgatcccaagtagtctttttataatttggattgtatcgtatgttagatttttgataaaatttggccaatttttacagaagaaattctctgatcatttagttctatctatttagaaatatgtaaaactggatttttttttaagtaatatgtgaccaaagttaattttgtcccaaaggtctaaataaagagcagtttcccatatttggctgtgatacctttatcctcattatctacaaatgaggaacaggcttactgataagaagctgaaacaagaaattctcttcattttatcccagtgctattttattgattaattactaaaaagtattactttctaattttattgctgtttctgttggtgtgagattagaatcatctgactgctattaggtggttgatttgtatagctgattaacacaaattgcattatgagctagtaaatggatctttggataatggggtccaaattcttaatgtttataagtaacaagttcaaaggctttagtcacacctgtttgtgagctgagctattatacatctacatacttaaaggatgtatttggagtgttacattttttttttttttttttttttgagacggagtctcattctgtccccaggctggagtgcagtggcgcgatctcggctaactgcaacctctgcctcgcaggagaatcacttgaacccaggaagcggaggttgcagtgagccgggatcgccccattgcactccagcc

SEQ ID NO: 38158 - DNA, 2521 bp, Homo sapiens
ctggattaaagacaaagtggaacatcctgagattgccacgaaagcactggaaagcctgcttccatttccaacctcctgtctttgtgaaacagggttttctgtagtgacagcagccaaacaagattacagagtagactggacataagcaacacacttagggtgtcactgtctcccatcacccctagatgggaccgtctagttgcagggaaaacaagctcagggctcccactgcttctacattatggtgagttgtacaattatttcattatatattacgatgtgataataataaagtacacaataaatgtaatacacttgaatcatctcaaaaccaccaccacccccctccatggaaaaattgttttccacaaaaccggtgcctggtgccaaaaaggttggaaactgctgctttaaactttaagttgctctgataaacttgataagcaaagaaaggcataaagaagagtcagtacatgaccattttatttagccatttgctgaacagaagtgcctagcttttttcactgttttggttcaaagatagataattctgtttgttagagagtttttattaggtgactagaaaaaaatctttcaggataacatctacttattataagtaagctaaaacatttaatacccaaagtgcttagtaataaatatttatgctatctcaacatcaggcattttattttctattaggtaaccacctatggcataaattctcaaaagtcatagtaaaattagtcacaattagataaatcagccctgagtataatagcatctgtattatgggtttttgtgtaaattattaatttgactgaaacataactaaagtatcctggacatgcagggggaagaagacaagaaaattaatgaagaactggagtctcaatatcagcaaagtatggacagtaaattatcaggaagatatcggcgacattgtggacttggcttcagtgaggtagaagaccatgatggagaaggtgatgtggctggagatgatgatgatgacgatgatgattcacctgatcctgaaagtccagatgattctgaaagcgattcagagtcagagaaagaagaatctgctgaagaactccaagctgctgagcaccctgatgaagtggaggatcccaaaaacaaaaaagatgcaaaaagcaattataaaatgatgtttgttaaatccagtggttcataactcccaaacgcttagtctttgtattaaaagtaagccttattgttacaatgcacagtggaggactgcttatagagcacagacctttgtattataatttttaaaaaggcccttttaaataattacaaagagtgtttgctttcaaatgccatgggttacacttttatgggcatgactataaccatttttgtaaagagtaagagttgtataaaataagaaataaatacagtactcaacttcctttcatattagcatcatcaaccctctaattcaccttatgggggaaatgcttctttttgtttgtgatagctattttatcatttccttcatatttttctcttataaaaatgtatttgatactgtgatatgttcacgaaaagtattctttaattattctttgttatagtagagctgttcattatggatatttctgctgccagtcacaatctaaattaattttggcaaaagattgggtacttagtttcctgttactgagttagctctactcttttggaccaaagcaacatgagagcaagtacttttcacacttgttaagatggagttataactgtcatacatttggaatattatgatcccaagtagtctttttataatttggattgtatcgtatgttagatttttgataaaatttggccaatttttacagaagaaattctctgatcatttagttctatctatttagaaatatgtaaaactggatttttttttaagtaatatgtgaccaaagttaattttgtcccaaaggtctaaataaagagcagtttcccatatttggctgtgatacctttatcctcattatctacaaatgaggaacaggcttactgataagaagctgaaacaagaaattctcttcattttatcccagtgctattttattgattaattactaaaaagtattactttctaattttattgctgtttctgttggtgtgagattagaatcatctgactgctattaggtggttgatttgtatagctgattaacacaaattgcattatgagctagtaaatggatctttggataatggggtccaaattcttaatgtttataagtaacaagttcaaaggctttagtcacacctgtttgtgagctgagctattatacatctacatacttaaaggatgtatttggagtgttacattttttttttttttttttttttgagacggagtctcattctgtccccaggctggagtgcagtggcgcgatctcggctaactgcaacctctgcctcgcaggagaatcacttgaacccaggaagcggaggttgcagtgagccgggatcgccccattgcactccagcc

SEQ ID NO: 38159 - DNA, 2046 bp, Homo sapiens
  misc_feature (22)..(22): n is a, c, g, or t
  misc_feature (29)..(29): n is a, c, g, or t
tccacttcgacggaactctctnacaaacngaagtgcctagcttttttcactgttttggttcaaagatagataattctgtttgttagagagtttttattaggtgactagaaaaaaatctttcaggataacatctacttattataagtaagctaaaacatttaatacccaaagtgcttagtaataaatatttatgctatctcaacatcaggcattttattttctattaggtaaccacctatggcataaattctcaaaagtcatagtaaaattagtcacaattagataaatcagccctgagtataatagcatctgtattatgggtttttgtgtaaattattaatttgactgaaacataactaaagtatcctggacatgcagggggaagaagacaagaaaattaatgaagaactggagtctcaatatcagcaaagtatggacagtaaattatcaggaagatatcggcgacattgtggacttggcttcagtgaggtagaagaccatgatggagaaggtgatgtggctggagatgatgatgatgacgatgatgattcacctgatcctgaaagtccagatgattctgaaagcgattcagagtcagagaaagaagaatctgctgaagaactccaagctgctgagcaccctgatgaagtggaggatcccaaaaacaaaaaagatgcaaaaagcaattataaaatgatgtttgttaaatccagtggttcataactcccaaacgcttagtctttgtattaaaagtaagccttattgttacaatgcacagtggaggactgcttatagagcacagacctttgtattataatttttaaaaaggcccttttaaataattacaaagagtgtttgctttcaaatgccatgggttacacttttatgggcatgactataaccatttttgtaaagagtaagagttgtataaaataagaaataaatacagtactcaacttcctttcatattagcatcatcaaccctctaattcaccttatgggggaaatgcttctttttgtttgtgatagctattttatcatttccttcatatttttctcttataaaaatgtatttgatactgtgatatgttcacgaaaagtattctttaattattctttgttatagtagagctgttcattatggatatttctgctgccagtcacaatctaaattaattttggcaaaagattgggtacttagtttcctgttactgagttagctctactcttttggaccaaagcaacatgagagcaagtacttttcacacttgttaagatggagttataactgtcatacatttggaatattatgatcccaagtagtctttttataatttggattgtatcgtatgttagatttttgataaaatttggccaatttttacagaagaaattctctgatcatttagttctatctatttagaaatatgtaaaactggatttttttttaagtaatatgtgaccaaagttaattttgtcccaaaggtctaaataaagagcagtttcccatatttggctgtgatacctttatcctcattatctacaaatgaggaacaggcttactgataagaagctgaaacaagaaattctcttcattttatcccagtgctattttattgattaattactaaaaagtattactttctaattttattgctgtttctgttggtgtgagattagaatcatctgactgctattaggtggttgatttgtatagctgattaacacaaattgcattatgagctagtaaatggatctttggataatggggtccaaattcttaatgtttataagtaacaagttcaaaggctttagtcacacctgtttgtgagctgagctattatacatctacatacttaaaggatgtatttggagtgttacattttttttttttttttttttttgagacggagtctcattctgtccccaggctggagtgcagtggcgcgatctcggctaactgcaacctctgcctcgcaggagaatcacttgaacccaggaagcggaggttgcagtgagccgggatcgccccattgcactccagcc

SEQ ID NO: 38160 - DNA, 1805 bp, Homo sapiens
cgacttgccatttgctgagattgctctcaaaatctcgtgggaacccgcagccctgagtataatagcatctgtattatgggtttttgtgtaaattattaatttgactgaaacataactaaagtatcctggacatgcagggggaagaagacaagaaaattaatgaagaactggagtctcaatatcagcaaagtatggacagtaaattatcaggaagatatcggcgacattgtggacttggcttcagtgaggtagaagaccatgatggagaaggtgatgtggctggagatgatgatgatgacgatgatgattcacctgatcctgaaagtccagatgattctgaaagcgattcagagtcagagaaagaagaatctgctgaagaactccaagctgctgagcaccctgatgaagtggaggatcccaaaaacaaaaaagatgcaaaaagcaattataaaatgatgtttgttaaatccagtggttcataactcccaaacgcttagtctttgtattaaaagtaagccttattgttacaatgcacagtggaggactgcttatagagcacagacctttgtattataatttttaaaaaggcccttttaaataattacaaagagtgtttgctttcaaatgccatgggttacacttttatgggcatgactataaccatttttgtaaagagtaagagttgtataaaataagaaataaatacagtactcaacttcctttcatattagcatcatcaaccctctaattcaccttatgggggaaatgcttctttttgtttgtgatagctattttatcatttccttcatatttttctcttataaaaatgtatttgatactgtgatatgttcacgaaaagtattctttaattattctttgttatagtagagctgttcattatggatatttctgctgccagtcacaatctaaattaattttggcaaaagattgggtacttagtttcctgttactgagttagctctactcttttggaccaaagcaacatgagagcaagtacttttcacacttgttaagatggagttataactgtcatacatttggaatattatgatcccaagtagtctttttataatttggattgtatcgtatgttagatttttgataaaatttggccaatttttacagaagaaattctctgatcatttagttctatctatttagaaatatgtaaaactggatttttttttaagtaatatgtgaccaaagttaattttgtcccaaaggtctaaataaagagcagtttcccatatttggctgtgatacctttatcctcattatctacaaatgaggaacaggcttactgataagaagctgaaacaagaaattctcttcattttatcccagtgctattttattgattaattactaaaaagtattactttctaattttattgctgtttctgttggtgtgagattagaatcatctgactgctattaggtggttgatttgtatagctgattaacacaaattgcattatgagctagtaaatggatctttggataatggggtccaaattcttaatgtttataagtaacaagttcaaaggctttagtcacacctgtttgtgagctgagctattatacatctacatacttaaaggatgtatttggagtgttacattttttttttttttttttttttgagacggagtctcattctgtccccaggctggagtgcagtggcgcgatctcggctaactgcaacctctgcctcgcaggagaatcacttgaacccaggaagcggaggttgcagtgagccgggatcgccccattgcactccagcc

SEQ ID NO: 38161 - DNA, 1738 bp, Homo sapiens
aagcagtgtatcaacgcatagtgcccattacggccggggagatcacaaatcaacatctcacttccgaaccggggaagaagacaagaaaattaatgaagaactggagtctcaatatcagcaaagtatggacagtaaattatcaggaagatatcggcgacattgtggacttggcttcagtgaggtagaagaccatgatggagaaggtgatgtggctggagatgatgatgatgacgatgatgattcacctgatcctgaaagtccagatgattctgaaagcgattcagagtcagagaaagaagaatctgctgaagaactccaagctgctgagcaccctgatgaagtggaggatcccaaaaacaaaaaagatgcaaaaagcaattataaaatgatgtttgttaaatccagtggttcataactcccaaacgcttagtctttgtattaaaagtaagccttattgttacaatgcacagtggaggactgcttatagagcacagacctttgtattataatttttaaaaaggcccttttaaataattacaaagagtgtttgctttcaaatgccatgggttacacttttatgggcatgactataaccatttttgtaaagagtaagagttgtataaaataagaaataaatacagtactcaacttcctttcatattagcatcatcaaccctctaattcaccttatgggggaaatgcttctttttgtttgtgatagctattttatcatttccttcatatttttctcttataaaaatgtatttgatactgtgatatgttcacgaaaagtattctttaattattctttgttatagtagagctgttcattatggatatttctgctgccagtcacaatctaaattaattttggcaaaagattgggtacttagtttcctgttactgagttagctctactcttttggaccaaagcaacatgagagcaagtacttttcacacttgttaagatggagttataactgtcatacatttggaatattatgatcccaagtagtctttttataatttggattgtatcgtatgttagatttttgataaaatttggccaatttttacagaagaaattctctgatcatttagttctatctatttagaaatatgtaaaactggatttttttttaagtaatatgtgaccaaagttaattttgtcccaaaggtctaaataaagagcagtttcccatatttggctgtgatacctttatcctcattatctacaaatgaggaacaggcttactgataagaagctgaaacaagaaattctcttcattttatcccagtgctattttattgattaattactaaaaagtattactttctaattttattgctgtttctgttggtgtgagattagaatcatctgactgctattaggtggttgatttgtatagctgattaacacaaattgcattatgagctagtaaatggatctttggataatggggtccaaattcttaatgtttataagtaacaagttcaaaggctttagtcacacctgtttgtgagctgagctattatacatctacatacttaaaggatgtatttggagtgttacattttttttttttttttttttttgagacggagtctcattctgtccccaggctggagtgcagtggcgcgatctcggctaactgcaacctctgcctcgcaggagaatcacttgaacccaggaagcggaggttgcagtgagccgggatcgccccattgcactccagcc

SEQ ID NO: 38162 - DNA, 1934 bp, Homo sapiens
cggggcggcgaggggccgcaacggtgacgactgtggcagagaaggcccggaggggctctgcgttctgtagtggcgctgcttgggcccgtggcggattgtaagctgctggttttgcggctgggaagagcggcgagagggttcggcatttttcgtcgggatccccgcaaggatgagtgctgccagagagtctcacccgcatggggtgaagcgttcagcctccccagacgacgatctgggatctagcaattgggaggcagcagacttgggtaatgaagagagaaaacaaaagttcttgagacttatgggtgcaggaaagaaagaacatactggtcgtcttgttataggagatcacaaatcaacatctcacttccgaaccggtagaagaccatgatggagaaggtgatgtggctggagatgatgatgatgacgatgatgattcacctgatcctgaaagtccagatgattctgaaagcgattcagagtcagagaaagaagaatctgctgaagaactccaagctgctgagcaccctgatgaagtggaggatcccaaaaacaaaaaagatgcaaaaagcaattataaaatgatgtttgttaaatccagtggttcataactcccaaacgcttagtctttgtattaaaagtaagccttattgttacaatgcacagtggaggactgcttatagagcacagacctttgtattataatttttaaaaaggcccttttaaataattacaaagagtgtttgctttcaaatgccatgggttacacttttatgggcatgactataaccatttttgtaaagagtaagagttgtataaaataagaaataaatacagtactcaacttcctttcatattagcatcatcaaccctctaattcaccttatgggggaaatgcttctttttgtttgtgatagctattttatcatttccttcatatttttctcttataaaaatgtatttgatactgtgatatgttcacgaaaagtattctttaattattctttgttatagtagagctgttcattatggatatttctgctgccagtcacaatctaaattaattttggcaaaagattgggtacttagtttcctgttactgagttagctctactcttttggaccaaagcaacatgagagcaagtacttttcacacttgttaagatggagttataactgtcatacatttggaatattatgatcccaagtagtctttttataatttggattgtatcgtatgttagatttttgataaaatttggccaatttttacagaagaaattctctgatcatttagttctatctatttagaaatatgtaaaactggatttttttttaagtaatatgtgaccaaagttaattttgtcccaaaggtctaaataaagagcagtttcccatatttggctgtgatacctttatcctcattatctacaaatgaggaacaggcttactgataagaagctgaaacaagaaattctcttcattttatcccagtgctattttattgattaattactaaaaagtattactttctaattttattgctgtttctgttggtgtgagattagaatcatctgactgctattaggtggttgatttgtatagctgattaacacaaattgcattatgagctagtaaatggatctttggataatggggtccaaattcttaatgtttataagtaacaagttcaaaggctttagtcacacctgtttgtgagctgagctattatacatctacatacttaaaggatgtatttggagtgttacattttttttttttttttttttttgagacggagtctcattctgtccccaggctggagtgcagtggcgcgatctcggctaactgcaacctctgcctcgcaggagaatcacttgaacccaggaagcggaggttgcagtgagccgggatcgccccattgcactccagcc

SEQ ID NO: 38163 - DNA, 2034 bp, Homo sapiens
cggggcggcgaggggccgcaacggtgacgactgtggcagagaaggcccggaggggctctgcgttctgtagtggcgctgcttgggcccgtggcggattgtaagctgctggttttgcggctgggaagagcggcgagagggttcggcatttttcgtcgggatccccgcaaggatgagtgctgccagagagtctcacccgcatggggtgaagcgttcagcctccccagacgacgatatgggactgtctagttttaggaaaacaagctcaaagcttccattgagtctacattatgctgggatctagcaattgggaggcagcagacttgggtaatgaagagagaaaacaaaagttcttgagacttatgggtgcaggaaagaaagaacatactggtcgtcttgttataggagatcacaaatcaacatctcacttccgaaccgtcaggaagatatcggcgacattgtggacttggcttcagtgaggtagaagaccatgatggagaaggtgatgtggctggagatgatgatgatgacgatgatgattcacctgatcctgaaagtccagatgattctgaaagcgattcagagtcagagaaagaagaatctgctgaagaactccaagctgctgagcaccctgatgaagtggaggatcccaaaaacaaaaaagatgcaaaaagcaattataaaatgatgtttgttaaatccagtggttcataactcccaaacgcttagtctttgtattaaaagtaagccttattgttacaatgcacagtggaggactgcttatagagcacagacctttgtattataatttttaaaaaggcccttttaaataattacaaagagtgtttgctttcaaatgccatgggttacacttttatgggcatgactataaccatttttgtaaagagtaagagttgtataaaataagaaataaatacagtactcaacttcctttcatattagcatcatcaaccctctaattcaccttatgggggaaatgcttctttttgtttgtgatagctattttatcatttccttcatatttttctcttataaaaatgtatttgatactgtgatatgttcacgaaaagtattctttaattattctttgttatagtagagctgttcattatggatatttctgctgccagtcacaatctaaattaattttggcaaaagattgggtacttagtttcctgttactgagttagctctactcttttggaccaaagcaacatgagagcaagtacttttcacacttgttaagatggagttataactgtcatacatttggaatattatgatcccaagtagtctttttataatttggattgtatcgtatgttagatttttgataaaatttggccaatttttacagaagaaattctctgatcatttagttctatctatttagaaatatgtaaaactggatttttttttaagtaatatgtgaccaaagttaattttgtcccaaaggtctaaataaagagcagtttcccatatttggctgtgatacctttatcctcattatctacaaatgaggaacaggcttactgataagaagctgaaacaagaaattctcttcattttatcccagtgctattttattgattaattactaaaaagtattactttctaattttattgctgtttctgttggtgtgagattagaatcatctgactgctattaggtggttgatttgtatagctgattaacacaaattgcattatgagctagtaaatggatctttggataatggggtccaaattcttaatgtttataagtaacaagttcaaaggctttagtcacacctgtttgtgagctgagctattatacatctacatacttaaaggatgtatttggagtgttacattttttttttttttttttttttgagacggagtctcattctgtccccaggctggagtgcagtggcgcgatctcggctaactgcaacctctgcctcgcaggagaatcacttgaacccaggaagcggaggttgcagtgagccgggatcgccccattgcactccagcc

SEQ ID NO: 38164 - DNA, 2453 bp, Homo sapiens
ctggattaaagacaaagtggaacatcctgagattgccacgaaagcactggaaagcctgcttccatttccaacctcctgtctttgtgaaacagggttttctgtagtgacagcagccaaacaagattacagagtagactggacataagcaacacacttagggtgtcactgtctcccatcacccctagatgggaccgtctagttgcagggaaaacaagctcagggctcccactgcttctacattatggtgagttgtacaattatttcattatatattacgatgtgataataataaagtacacaataaatgtaatacacttgaatcatctcaaaaccaccaccacccccctccatggaaaaattgttttccacaaaaccggtgcctggtgccaaaaaggttggaaactgctgctttaaactttaagttgctctgataaacttgataagcaaagaaaggcataaagaagagtcagtacatgaccattttatttagccatttgctgaacagaagtgcctagcttttttcactgttttggttcaaagatagataattctgtttgttagagagtttttattaggtgactagaaaaaaatctttcaggataacatctacttattataagtaagctaaaacatttaatacccaaagtgcttagtaataaatatttatgctatctcaacatcaggcattttattttctattaggtaaccacctatggcataaattctcaaaagtcatagtaaaattagtcacaattagataaatcagccctgagtataatagcatctgtattatgggtttttgtgtaaattattaatttgactgaaacataactaaagtatcctggacatgcaggtcaggaagatatcggcgacattgtggacttggcttcagtgaggtagaagaccatgatggagaaggtgatgtggctggagatgatgatgatgacgatgatgattcacctgatcctgaaagtccagatgattctgaaagcgattcagagtcagagaaagaagaatctgctgaagaactccaagctgctgagcaccctgatgaagtggaggatcccaaaaacaaaaaagatgcaaaaagcaattataaaatgatgtttgttaaatccagtggttcataactcccaaacgcttagtctttgtattaaaagtaagccttattgttacaatgcacagtggaggactgcttatagagcacagacctttgtattataatttttaaaaaggcccttttaaataattacaaagagtgtttgctttcaaatgccatgggttacacttttatgggcatgactataaccatttttgtaaagagtaagagttgtataaaataagaaataaatacagtactcaacttcctttcatattagcatcatcaaccctctaattcaccttatgggggaaatgcttctttttgtttgtgatagctattttatcatttccttcatatttttctcttataaaaatgtatttgatactgtgatatgttcacgaaaagtattctttaattattctttgttatagtagagctgttcattatggatatttctgctgccagtcacaatctaaattaattttggcaaaagattgggtacttagtttcctgttactgagttagctctactcttttggaccaaagcaacatgagagcaagtacttttcacacttgttaagatggagttataactgtcatacatttggaatattatgatcccaagtagtctttttataatttggattgtatcgtatgttagatttttgataaaatttggccaatttttacagaagaaattctctgatcatttagttctatctatttagaaatatgtaaaactggatttttttttaagtaatatgtgaccaaagttaattttgtcccaaaggtctaaataaagagcagtttcccatatttggctgtgatacctttatcctcattatctacaaatgaggaacaggcttactgataagaagctgaaacaagaaattctcttcattttatcccagtgctattttattgattaattactaaaaagtattactttctaattttattgctgtttctgttggtgtgagattagaatcatctgactgctattaggtggttgatttgtatagctgattaacacaaattgcattatgagctagtaaatggatctttggataatggggtccaaattcttaatgtttataagtaacaagttcaaaggctttagtcacacctgtttgtgagctgagctattatacatctacatacttaaaggatgtatttggagtgttacattttttttttttttttttttttgagacggagtctcattctgtccccaggctggagtgcagtggcgcgatctcggctaactgcaacctctgcctcgcaggagaatcacttgaacccaggaagcggaggttgcagtgagccgggatcgccccattgcactccagcc

SEQ ID NO: 38165 - DNA, 1869 bp, Homo sapiens
taatgagccgggggattgatgttaaaggtagaacgtcatgatggagcaggtgatgtgctggtctcaaactttgggcctcaagcaatccccctgcctctcagcctcttgagtagctggaatcccagccacaggtatgagccactgggcccagccagacagagctctttcttaaaattctactcaagtcttaaagctgttgttctaatggctacaaagtagagtgtttctaagaccgacagaacttacggtctttctcagattttgtatgggctaatgtttatttttaaaagagcctgttgattgatgttttaggtagaagaccatgatggagaaggtgatgtggctggagatgatgatgatgacgatgatgattcacctgatcctgaaagtccagatgattctgaaagcgattcagagtcagagaaagaagaatctgctgaagaactccaagctgctgagcaccctgatgaagtggaggatcccaaaaacaaaaaagatgcaaaaagcaattataaaatgatgtttgttaaatccagtggttcataactcccaaacgcttagtctttgtattaaaagtaagccttattgttacaatgcacagtggaggactgcttatagagcacagacctttgtattataatttttaaaaaggcccttttaaataattacaaagagtgtttgctttcaaatgccatgggttacacttttatgggcatgactataaccatttttgtaaagagtaagagttgtataaaataagaaataaatacagtactcaacttcctttcatattagcatcatcaaccctctaattcaccttatgggggaaatgcttctttttgtttgtgatagctattttatcatttccttcatatttttctcttataaaaatgtatttgatactgtgatatgttcacgaaaagtattctttaattattctttgttatagtagagctgttcattatggatatttctgctgccagtcacaatctaaattaattttggcaaaagattgggtacttagtttcctgttactgagttagctctactcttttggaccaaagcaacatgagagcaagtacttttcacacttgttaagatggagttataactgtcatacatttggaatattatgatcccaagtagtctttttataatttggattgtatcgtatgttagatttttgataaaatttggccaatttttacagaagaaattctctgatcatttagttctatctatttagaaatatgtaaaactggatttttttttaagtaatatgtgaccaaagttaattttgtcccaaaggtctaaataaagagcagtttcccatatttggctgtgatacctttatcctcattatctacaaatgaggaacaggcttactgataagaagctgaaacaagaaattctcttcattttatcccagtgctattttattgattaattactaaaaagtattactttctaattttattgctgtttctgttggtgtgagattagaatcatctgactgctattaggtggttgatttgtatagctgattaacacaaattgcattatgagctagtaaatggatctttggataatggggtccaaattcttaatgtttataagtaacaagttcaaaggctttagtcacacctgtttgtgagctgagctattatacatctacatacttaaaggatgtatttggagtgttacattttttttttttttttttttttgagacggagtctcattctgtccccaggctggagtgcagtggcgcgatctcggctaactgcaacctctgcctcgcaggagaatcacttgaacccaggaagcggaggttgcagtgagccgggatcgccccattgcactccagcc

SEQ ID NO: 38166 - DNA, 1616 bp, Homo sapiens
tgctactttgaacaaaaggtccccctgtggtcttttgttcaacattgtacaatgtagaactctgtccaacactaatttattttgtcttgagttttactacaagatgagactgtggatcccgcatgcctgaattcactaaagccaagggtctgtaagccacgctgctcttctgagacttccattcctttctgattggcacttgctgcccacgaagtgaagtggaggatcccaaaaacaaaaaagatgcaaaaagcaattataaaatgatgtttgttaaatccagtggttcataactcccaaacgcttagtctttgtattaaaagtaagccttattgttacaatgcacagtggaggactgcttatagagcacagacctttgtattataatttttaaaaaggcccttttaaataattacaaagagtgtttgctttcaaatgccatgggttacacttttatgggcatgactataaccatttttgtaaagagtaagagttgtataaaataagaaataaatacagtactcaacttcctttcatattagcatcatcaaccctctaattcaccttatgggggaaatgcttctttttgtttgtgatagctattttatcatttccttcatatttttctcttataaaaatgtatttgatactgtgatatgttcacgaaaagtattctttaattattctttgttatagtagagctgttcattatggatatttctgctgccagtcacaatctaaattaattttggcaaaagattgggtacttagtttcctgttactgagttagctctactcttttggaccaaagcaacatgagagcaagtacttttcacacttgttaagatggagttataactgtcatacatttggaatattatgatcccaagtagtctttttataatttggattgtatcgtatgttagatttttgataaaatttggccaatttttacagaagaaattctctgatcatttagttctatctatttagaaatatgtaaaactggatttttttttaagtaatatgtgaccaaagttaattttgtcccaaaggtctaaataaagagcagtttcccatatttggctgtgatacctttatcctcattatctacaaatgaggaacaggcttactgataagaagctgaaacaagaaattctcttcattttatcccagtgctattttattgattaattactaaaaagtattactttctaattttattgctgtttctgttggtgtgagattagaatcatctgactgctattaggtggttgatttgtatagctgattaacacaaattgcattatgagctagtaaatggatctttggataatggggtccaaattcttaatgtttataagtaacaagttcaaaggctttagtcacacctgtttgtgagctgagctattatacatctacatacttaaaggatgtatttggagtgttacattttttttttttttttttttttgagacggagtctcattctgtccccaggctggagtgcagtggcgcgatctcggctaactgcaacctctgcctcgcaggagaatcacttgaacccaggaagcggaggttgcagtgagccgggatcgccccattgcactccagcc

SEQ ID NO: 38167 - DNA, 1215 bp, Homo sapiens
catgatacgactcgagtcggacccccaatagtagggacgcatgtatacacttttatgggcatgactataaccatttttgtaaagagtaagagttgtataaaataagaaataaatacagtactcaacttcctttcatattagcatcatcaaccctctaattcaccttatgggggaaatgcttctttttgtttgtgatagctattttatcatttccttcatatttttctcttataaaaatgtatttgatactgtgatatgttcacgaaaagtattctttaattattctttgttatagtagagctgttcattatggatatttctgctgccagtcacaatctaaattaattttggcaaaagattgggtacttagtttcctgttactgagttagctctactcttttggaccaaagcaacatgagagcaagtacttttcacacttgttaagatggagttataactgtcatacatttggaatattatgatcccaagtagtctttttataatttggattgtatcgtatgttagatttttgataaaatttggccaatttttacagaagaaattctctgatcatttagttctatctatttagaaatatgtaaaactggatttttttttaagtaatatgtgaccaaagttaattttgtcccaaaggtctaaataaagagcagtttcccatatttggctgtgatacctttatcctcattatctacaaatgaggaacaggcttactgataagaagctgaaacaagaaattctcttcattttatcccagtgctattttattgattaattactaaaaagtattactttctaattttattgctgtttctgttggtgtgagattagaatcatctgactgctattaggtggttgatttgtatagctgattaacacaaattgcattatgagctagtaaatggatctttggataatggggtccaaattcttaatgtttataagtaacaagttcaaaggctttagtcacacctgtttgtgagctgagctattatacatctacatacttaaaggatgtatttggagtgttacattttttttttttttttttttttgagacggagtctcattctgtccccaggctggagtgcagtggcgcgatctcggctaactgcaacctctgcctcgcaggagaatcacttgaacccaggaagcggaggttgcagtgagccgggatcgccccattgcactccagcc

SEQ ID NO: 38168 - DNA, 2141 bp, Homo sapiens
  misc_feature (2111)..(2111): n is a, c, g, or t
cggggcggcgaggggccgcaacggtgacgactgtggcagagaaggcccggaggggctctgcgttctgtagtggcgctgcttgggcccgtggcggattgtaagctgctggttttgcggctgggaagagcggcgagagggttcggcatttttcgtcgggatccccgcaaggatgagtgctgccagagagtctcacccgcatggggtgaagcgttcagcctccccagacgacgatgtaaataataatggcggagtggctgagggttgaggcctactaaagcctggagtaggccgggaagggtggttggaggaggacgcgcctgaggtggcctgcagcgggagagcccagggaagaaaccagaagaatgagtgggaaatgcctcccttaatctttatgagggtcagaaggtttgaagaggcccacacgctgagagccggagacctgcgtaggaagggggattgaggaaggaaattctgagagggtcgaggagtgaaagagcttagtcaagggatttcgtacgtgcgttttggggggccgatgagagtgctttctcgggcctttgtactcagtatagagacggcaagactctccctgttttgggttctaaatgttcccgtgacaatgtcgaaatgttcgtgcacgtttgtacagatttttcctgcctggatgatttttacaatgtgctgttgagagttaactttagctgcactagtaagggtaaaccgagaacagtattgagccgaaaattgtgccacgggtgtaatttggtactggctctggtggtgaggtctaagacgttgagacctagaagcccattttgatgtcggatattaatacctcgttcttcttacctcgtctccccatcaaatgccgttcccttcctcagccctcacctcataggttttaatagcaaacggtttatcccttaaagtaacccgttaaatatttactgcactgccgggtgttgggaattcggagagaaatatgatgcttattttaggcctttttgtatatttgtcctagctcctagcccagtgtcatggaaacggtaggtaaccagtaaacgtaaaactaggtccttcatacaatggataagtgtcttggcaacgttgatggggaaaattgttggagagagcgcggagaggtcatctttaaggaagatgaagggatatctaggttttttttcggttttgtttaaagtactgtcaatttctgaatacatagagctttaaatttttcgatagtgcatttcaacgctcttcataaaattttaaaagcccactgaatactactttgtagcaaatgagataatgttaagacctacccctctgatgggaggtggggcgaggaccggaatattaaggatctttaaaggaatcgacttcagctctgcagaaagattagcaatcagtaaagatttggggatgaatgggcacctagagaagtttattcttgctctctgttatttctgctactggattttagatcttgttaatatggtaattcaggttttgtcaggaattgatccacacttttgagtaacctggctgccacttaaaaagctgttacattgttttcctcctgatctttaaatgtgacttgattgctaggatatcagacacctgtttggaaatatcttttagcgtgacagaaaactccaggtgatatgaaatttaacaaagttaaagggattaagtcattaagtttacagcttcggaagaggtcggtttaaactagacgaccttgaagacctttcccaatcatataagcgtatctttaagtacctgggttttgtttttgttttgagacaggtgagacagggtctctgtcgcccaggctggagtgcagtggcacgatcgatcagtgctccctgcggcctccacctccctggctcaggtgatcctcctgcttcaaccccctcttcccccaccaccactacagtagctcggactacaggtgtgcaccattacacccgactaattttttgtatttttagtagagaccagattttgccacattgcccaggctggtctccaactactagacccaagcgatctgcccacctcggcctcccaaagtgctggaattacaggtgtgagccacctcgcctcanggataaaacggtacccttggagaaaaaaag

SEQ ID NO: 38169 - DNA, 1811 bp, Homo sapiens
cggggcggcgaggggccgcaacggtgacgactgtggcagagaaggcccggaggggctctgcgttctgtagtggcgctgcttgggcccgtggcggattgtaagctgctggttttgcggctgggaagagcggcgagagggttcggcatttttcgtcgggatccccgcaaggatgagtgctgccagagagtctcacccgcatggggtgaagcgttcagcctccccagacgacgatgtaaataataatggcggagtggctgagggttgaggcctactaaagcctggagtaggccgggaagggtggttggaggaggacgcgcctgaggtggcctgcagcgggagagcccagggaagaaaccagaagaatgagtgggaaatgcctcccttaatctttatgagggtcagaaggtttgaagaggcccacacgctgagagccggagacctgcgtaggaagggggattgaggaaggaaattctgagagggtcgaggagtgaaagagcttagtcaagggatttcgtacgtgcgttttggggggccgatgagagtgctttctcgggcctttgtactcagtatagagacggcaagactctccctgttttgggttctaaatgttcccgtgacaatgtcgaaatgttcgtgcacgtttgtacagatttttcctgcctggatgatttttacaatgtgctgttgagagttaactttagctgcactagtaagggtaaaccgagaacagtattgagccgaaaattgtgccacgggtgtaatttggtactggctctggtggtgaggtctaagacgttgagacctagaagcccattttgatgtcggatattaatacctcgttcttcttacctcgtctccccatcaaatgccgttcccttcctcagccctcacctcataggttttaatagcaaacggtttatcccttaaagtaacccgttaaatatttactgcactgccgggtgttgggaattcggagagaaatatgatgcttattttaggcctttttgtatatttgtcctagctcctagcccagtgtcatggaaacggtaggtaaccagtaaacgtaaaactaggtccttcatacaatggataagtgtcttggcaacgttgatggggaaaattgttggagagagcgcggagaggtcatctttaaggaagatgaagggatatctaggttttttttcggttttgtttaaagtactgtcaatttctgaatacatagagctttaaatttttcgatagtgcatttcaacgctcttcataaaattttaaaagcccactgaatactactttgtagcaaatgagataatgttaagacctacccctctgatgggaggtggggcgaggaccggaatattaaggatctttaaaggaatcgacttcagctctgcagaaagattagcaatcagtaaagatttggggatgaatgggcacctagagaagtttattcttgctctctgttatttctgctactggattttagatcttgttaatatggtaattcaggttttgtcaggaattgatccacacttttgagtaacctggctgccacttaaaaagctgttacattgttttcctcctgatctttaaatgtgacttgattgctaggatatcagacacctgtttggaaatatcttttagcgtgacagaaaactccaggtgatatgaaatttaacaaagttaaagggattaagtcattaagtttacagcttcggaagaggtcggtttaaactagacgaccttgaagacctttcccaatcatataagcgtatctttaagtaccctgggcgacagagcgagactctgtttaa

SEQ ID NO: 38170 - DNA, 1834 bp, Homo sapiens
cggggcggcgaggggccgcaacggtgacgactgtggcagagaaggcccggaggggctctgcgttctgtagtggcgctgcttgggcccgtggcggattgtaagctgctggttttgcggctgggaagagcggcgagagggttcggcatttttcgtcgggatccccgcaaggatgagtgctgccagagagtctcacccgcatggggtgaagcgttcagcctccccagacgacgatgtaaataataatggcggagtggctgagggttgaggcctactaaagcctggagtaggccgggaagggtggttggaggaggacgcgcctgaggtggcctgcagcgggagagcccagggaagaaaccagaagaatgagtgggaaatgcctcccttaatctttatgagggtcagaaggtttgaagaggcccacacgctgagagccggagacctgcgtaggaagggggattgaggaaggaaattctgagagggtcgaggagtgaaagagcttagtcaagggatttcgtacgtgcgttttggggggccgatgagagtgctttctcgggcctttgtactcagtatagagacggcaagactctccctgttttgggttctaaatgttcccgtgacaatgtcgaaatgttcgtgcacgtttgtacagatttttcctgcctggatgatttttacaatgtgctgttgagagttaactttagctgcactagtaagggtaaaccgagaacagtattgagccgaaaattgtgccacgggtgtaatttggtactggctctggtggtgaggtctaagacgttgagacctagaagcccattttgatgtcggatattaatacctcgttcttcttacctcgtctccccatcaaatgccgttcccttcctcagccctcacctcataggttttaatagcaaacggtttatcccttaaagtaacccgttaaatatttactgcactgccgggtgttgggaattcggagagaaatatgatgcttattttaggcctttttgtatatttgtcctagctcctagcccagtgtcatggaaacggtaggtaaccagtaaacgtaaaactaggtccttcatacaatggataagtgtcttggcaacgttgatggggaaaattgttggagagagcgcggagaggtcatctttaaggaagatgaagggatatctaggttttttttcggttttgtttaaagtactgtcaatttctgaatacatagagctttaaatttttcgatagtgcatttcaacgctcttcataaaattttaaaagcccactgaatactactttgtagcaaatgagataatgttaagacctacccctctgatgggaggtggggcgaggaccggaatattaaggatctttaaaggaatcgacttcagctctgcagaaagattagcaatcagtaaagatttggggatgaatgggcacctagagaagtttattcttgctctctgttatttctgctactggattttagatcttgttaatatggtaattcaggttttgtcaggaattgatccacacttttgagtaacctggctgccacttaaaaagctgttacattgttttcctcctgatctttaaatgtgacttgattgctaggatatcagacacctgtttggaaatatcttttagcgtgacagaaaactccaggtgatatgaaatttaacaaagttaaagggattaagtcattaagtttacagcttcggaagaggtcggtttaaactagacgaccttgaagacctttcccaatcatataagcgtatctttaagtacctgggttttgtttttgttttgagcctgggcgacagagcgagactctgtttaa

SEQ ID NO: 38171 - DNA, 1232 bp, Homo sapiens
ctggattaaagacaaagtggaacatcctgagattgccacgaaagcactggaaagcctgcttccatttccaacctcctgtctttgtgaaacagggttttctgtagtgacagcagccaaacaagattacagagtagactggacataagcaacacacttagggtgtcactgtctcccatcacccctagatgggaccgtctagttgcagggaaaacaagctcagggctcccactgcttctacattatggtgagttgtacaattatttcattatatattacgatgtgataataataaagtacacaataaatgtaatacacttgaatcatctcaaaaccaccaccacccccctccatggaaaaattgttttccacaaaaccggtgcctggtgccaaaaaggttggaaactgctgctttaaactttaagttgctctgataaacttgataagcaaagaaaggcataaagaagagtcagtacatgaccattttatttagccatttgctgaacagaagtgcctagcttttttcactgttttggttcaaagatagataattctgtttgttagagagtttttattaggtgactagaaaaaaatctttcaggataacatctacttattataagtaagctaaaacatttaatacccaaagtgcttagtaataaatatttatgctatctcaacatcaggcattttattttctattaggtaaccacctatggcataaattctcaaaagtcatagtaaaattagtcacaattagataaatcagccctgagtataatagcatctgtattatgggtttttgtgtaaattattaatttgactgaaacataactaaagtatcctggacatgcagggggaagaagacaagaaaattaatgaagaactggagtctcaatatcagcaaagtatggacagtaaattatcaggaagatatcggcgacattgtggacttggcttcagtgaggtagaagaccatgatggagaaggtgatgtggctggagatgatgatgatgacgatgatgattcacctgatcctgaaagtccagatgattctgaaagcgattcagagtcagagaaagaagaatctgctgaagaactccaagctgctgagcaccctgatgaagtggaggatcccaaaaacaaaaaagatgcaaaaagcaattataaaatgatgtttgttaaaaaaaaacgtcgagcggccgcttattttgtagtagtagtagtagtagtag

SEQ ID NO: 38172 - DNA, 1022 bp, Homo sapiens
cggggcggcgaggggccgcaacggtgacgactgtggcagagaaggcccggaggggctctgcgttctgtagtggcgctgcttgggcccgtggcggattgtaagctgctggttttgcggctgggaagagcggcgagagggttcggcatttttcgtcgggatccccgcaaggatgagtgctgccagagagtctcacccgcatggggtgaagcgttcagcctccccagacgacgatctgggatctagcaattgggaggcagcagacttgggtaatgaagagagaaaacaaaagttcttgagacttatgggtgcaggaaaggtaagcatcagatggtgtgcatttttaccttttctgtgaaaatattgccatttttatgtatgctaagtaagaaggactgaatatacttggattccattttcctgttctgtgtgatttcttttggctttgggaaatacatgtggcctaaccaagcacataaaatttatattatttttgagccacttctaggattctctgtccgtatagtttgaagactgtacagagaaaaatttggttcaaggaggctgtataggagaaaagagatgtcaaagtttatgatttgccatatgttggcccagtggtttgatagaatatatttcttctgggtaggttatcttgtgggaacctctggccaaagtgaaaaggctgtcatattttatagctccctccagcccttgaagtagtaaccagaggaatatcctttatcaaaaacttaattttaagactacactttcagagattatttctatagtttgttactagatagagaagtttctctgaatgtgtagaacaccagggggaaagaaaaccttaattttaaaaatgttcaagatactttgaaatgcctgtcagtttggttaacgttaatagaaggtacagttgacccttgagcaatgtgggggttaggggtgctggttctgcaggcagtcagaagtttgcatataacttttgactccccaacaacttaactactaatagcctactg

SEQ ID NO: 38173 - DNA, 305 bp, Homo sapiens
agagacagggtctcactatgttgcccaggctggtctcaaactttgggcctcaagcaatccccctgcctctcagcctcttgagtagctggaatcccagccacaggtatgagccactgggcccagccagacagagctctttcttaaaattctactcaagtcttaaagctgttgttctaatggctacaaagtagagtgtttctaagaccgacagaacttacggtctttctcagattttgtatgggctaatgtttatttttaaaagagcctgttgattgatgttttaggtagaagaccatgatggagaa

SEQ ID NO: 38174 - DNA, 458 bp, Homo sapiens
  misc_feature (243)..(243): n is a, c, g, or t
ccactacagtagctcggactacaggtgtgcaccattacacccgactaattttttgtatttttagtagagaccagattttgccacattgcccaggctggtctccaactactagacccaagcgatctgcccacctcggcctcccaaagtgctggaattacaggtgtgagccacctcgcccagccagtacttaaaaaaaaaatttttttaaccataagtaatgcattcattaaaatacctccaagnctgttgcaagaaaaaaaaaaaaaactagcaggccgggcgcggtggctcattcctgtaatcccaacactttgggaggccaaggcaggcggatcacgaggtcaggagatccaaaccatcctggctaacacagtgaaaccccgcctctactaaaaaaatacaaaaaaattaaccgggcgtggtagcgggcgcctgtagtcccagctactagggaggct

SEQ ID NO: 38175 - DNA, 218 bp, Homo sapiens
ccagtggttcataactcccaaacgcttagtctttgtattaaaagtaagccttattgttacaatgcacagtggaggactgcttatagagcacagacctttgtattataatttttaaaaaggcccttttaaataattacaaagagtgtttgctttcaaatgccatgggttacacttttatgggcatgactataaccatttttgtaaagagtaagagttgt

SEQ ID NO: 38176 - DNA, 738 bp, Homo sapiens
cggggcggcgaggggccgcaacggtgacgactgtggcagagaaggcccggaggggctctgcgttctgtagtggcgctgcttgggcccgtggcggattgtaagctgctggttttgcggctgggaagagcggcgagagggttcggcatttttcgtcgggatccccgcaaggatgagtgctgccagagagtctcacccgcatggggtgaagcgttcagcctccccagacgacgatctgggatctagcaattgggaggcagcagacttgggtaatgaagagagaaaacaaaagttcttgagacttatgggtgcaggaaagaaagaacatactggtcgtcttgttataggagatcacaaatcaacatctcacttccgaaccggggaagaagacaagaaaattaatgaagaactggagtctcaatatcagcaaagtatggacagtaaattatcaggaagatatcggcgacattgtggacttggcttcagtgaggtagaagaccatgatggagaaggtgatgtggctggagatgatgatgatgacgatgatgattcacctgatcctgaaagtccagatgattctgaaagcgattcagagtcagagaaagaagaatctgctgaagaactccaagctgctgagcaccctgacttgcaccgcaggatctcaacaccccaacacattcacacagcacactctccactcgacctctgctctcacatgtcttcctcactccccccgccctt

SEQ ID NO: 38177 - DNA, 1560 bp, Homo sapiens
tgggccagccagcaaagcttcatctgtatttacagccactccccttggcttgcattaccacctgagctctgcctcctgttggcatttgattcttataagagcgtgaaccctggtgtgaactgcacatgcgagtgatctaggttgcacactccttatgagaatctaatgccagatgatctgtcattgtctcccattaccccccagatgggactgtctagttttaggaaaacaagctcaaagcttccattgagtctacattatggtgagttgtataattatttcattatagattacagtgtagtaataatagaaataaagtgcccaataaatgtaatgcacttgaatcatcctgaaaccatcacatcctccctctcagtggaaaaattgtcttccacgaaactggtccctgatgccagtctggtcctggagtgctgctttaaggtctttgaaaagaagaactggcaggacttaatgttatttccttaaaacattgggattagaagttgtagatgacagttatttatataaacactgaaaatgttttttaatagaagcagaatcaagaaagttggtttttacacaattttttaacttctatacatttttataactagttcatagaccactttcatctgtctcatttgatcatggacagtatgatgtggaaaaaacacaggatggtcagaggatcaaaggaagtcacttagcctctctgtgcctcagtgtcttaagacagtcttttaaaaaggcatctctttatagataaggagttaaaattaagttaaatgtcagatcctggcttacagagcaagtgatttagtgattgtcagaactgaagcttcaccattactttaactatattgagccagaaatagttaagaactaaatggcccataaaaatatatgaggggggtcacatggaaaaaagtagagatttggaacttagggaaccaaaattatgagagcatataagcccttccactaatgagaatttagaagtgcaaatgggtccaggttggtacaaatgctttaactctcatatgcccaggggaaatagtggtttttttaaatattcttttagtcttttacaaataatttttagaaataataatgggagatagtgcaaaacaactttattaggaattttaatgtgaatttaacaatagcaaaccgaaatttatattctttgttttcctgattttgatgtacatatagtcatccttcagtatgctaaatgtgggggattggttccaggacccagccacctctttggcaaatcttgcatactcaagttctgcagccagccctgtggaacctgagaataggaaaaatcagccttccatatacttgggatggatctgcatttggttgaaaaaaatccacttataagggaccttgaagttcaaacctgtctcggatttgcatcatcaaaatacaatacttgaggaatttttgaaacctattgcttacaattttgtaattgtcatccttgctccataattgcaaaacatttttatttttagattataaacttaattagaatgataaattcggtgaata

SEQ ID NO: 38178 - DNA, 1932 bp, Homo sapiens
ggaggtggagaggtaccggcttctccccgggccctcagcttgaagcagggtctcgtgcacggcgctccaggccgtgccccgtaacaacgggtaagaagaaggtactccccagacgacgatctgggatctagcaattgggaggcagcagacttgggtaatgaagagagaaaacaaaagttcttgagacttatgggtgcaggaaagaaagaacatactggtcgtcttgttataggagatcacaaatcaacatctcacttccgaaccggggaagaagacaagaaaattaatgaagaactggagtctcaatatcagcaaagtatggacagtaaattatcaggaagatatcggcgacattgtggacttggcttcagtgaggtagaagaccatgatggagaaggtgatgtggctggagatgatgatgatgacgatgatgattcacctgatcctgaaagtccagatgattctgaaagcgattcagagtcagagaaagaagaatctgctgaagaactccaagctgctgagcaccctgatgaagtggaggatcccaaaaacaaaaaagatgcaaaaagcaattataaaatgatgtttgttaaatccagtggttcataactcccaaacgcttagtctttgtattaaaagtaagccttattgttacaatgcacagtggaggactgcttatagagcacagacctttgtattataatttttaaaaaggcccttttaaataattacaaagagtgtttgctttcaaatgccatgggttacacttttatgggcatgactataaccatttttgtaaagagtaagagttgtataaaataagaaataaatacagtactcaacttcctttcatattagcatcatcaaccctctaattcaccttatgggggaaatgcttctttttgtttgtgatagctattttatcatttccttcatatttttctcttataaaaatgtatttgatactgtgatatgttcacgaaaagtattctttaattattctttgttatagtagagctgttcattatggatatttctgctgccagtcacaatctaaattaattttggcaaaagattgggtacttagtttcctgttactgagttagctctactcttttggaccaaagcaacatgagagcaagtacttttcacacttgttaagatggagttataactgtcatacatttggaatattatgatcccaagtagtctttttataatttggattgtatcgtatgttagatttttgataaaatttggccaatttttacagaagaaattctctgatcatttagttctatctatttagaaatatgtaaaactggatttttttttaagtaatatgtgaccaaagttaattttgtcccaaaggtctaaataaagagcagtttcccatatttggctgtgatacctttatcctcattatctacaaatgaggaacaggcttactgataagaagctgaaacaagaaattctcttcattttatcccagtgctattttattgattaattactaaaaagtattactttctaattttattgctgtttctgttggtgtgagattagaatcatctgactgctattaggtggttgatttgtatagctgattaacacaaattgcattatgagctagtaaatggatctttggataatggggtccaaattcttaatgtttataagtaacaagttcaaaggctttagtcacacctgtttgtgagctgagctattatacatctacatacttaaaggatgtatttggagtgttacattttttttttttttttttttttgagacggagtctcattctgtccccaggctggagtgcagtggcgcgatctcggctaactgcaacctctgcctcgcaggagaatcacttgaacccaggaagcggaggttgcagtgagccgggatcgccccattgcactccagcc

SEQ ID NO: 38179 - DNA, 1976 bp, Homo sapiens
cggggcggcgaggggccgcaacggtgacgactgtggcagagaaggcccggaggggctctgcgttctgtagtggcgctgcttgggcccgtggcggattgtaagctgctggttttgcggctgggaagagcggcgagagggttcggcatttttcgtcgggatccccgcaaggatgagtgctgccagagagtctcacccgcatggggtgaagcgttcagcctccccagacgacgatctgggatctagcaattgggaggcagcagacttgggtaatgaagagagaaaacaaaagttcttgagacttatgggtgcaggaaagaaagaacatactggtcgtcttgttataggagatcacaaatcaacatctcacttccgaaccgtcaggaagatatcggcgacattgtggacttggcttcagtgaggtagaagaccatgatggagaaggtgatgtggctggagatgatgatgatgacgatgatgattcacctgatcctgaaagtccagatgattctgaaagcgattcagagtcagagaaagaagaatctgctgaagaactccaagctgctgagcaccctgatgaagtggaggatcccaaaaacaaaaaagatgcaaaaagcaattataaaatgatgtttgttaaatccagtggttcataactcccaaacgcttagtctttgtattaaaagtaagccttattgttacaatgcacagtggaggactgcttatagagcacagacctttgtattataatttttaaaaaggcccttttaaataattacaaagagtgtttgctttcaaatgccatgggttacacttttatgggcatgactataaccatttttgtaaagagtaagagttgtataaaataagaaataaatacagtactcaacttcctttcatattagcatcatcaaccctctaattcaccttatgggggaaatgcttctttttgtttgtgatagctattttatcatttccttcatatttttctcttataaaaatgtatttgatactgtgatatgttcacgaaaagtattctttaattattctttgttatagtagagctgttcattatggatatttctgctgccagtcacaatctaaattaattttggcaaaagattgggtacttagtttcctgttactgagttagctctactcttttggaccaaagcaacatgagagcaagtacttttcacacttgttaagatggagttataactgtcatacatttggaatattatgatcccaagtagtctttttataatttggattgtatcgtatgttagatttttgataaaatttggccaatttttacagaagaaattctctgatcatttagttctatctatttagaaatatgtaaaactggatttttttttaagtaatatgtgaccaaagttaattttgtcccaaaggtctaaataaagagcagtttcccatatttggctgtgatacctttatcctcattatctacaaatgaggaacaggcttactgataagaagctgaaacaagaaattctcttcattttatcccagtgctattttattgattaattactaaaaagtattactttctaattttattgctgtttctgttggtgtgagattagaatcatctgactgctattaggtggttgatttgtatagctgattaacacaaattgcattatgagctagtaaatggatctttggataatggggtccaaattcttaatgtttataagtaacaagttcaaaggctttagtcacacctgtttgtgagctgagctattatacatctacatacttaaaggatgtatttggagtgttacattttttttttttttttttttttgagacggagtctcattctgtccccaggctggagtgcagtggcgcgatctcggctaactgcaacctctgcctcgcaggagaatcacttgaacccaggaagcggaggttgcagtgagccgggatcgccccattgcactccagcc

SEQ ID NO: 38180 - DNA, 1966 bp, Homo sapiens
ggctttcttgcggaatcaccatggctgctggttttgcggctgggaagagcggcgagagggttcggcatttttcgtcgggatccccgcaaggatgagtgctgccagagagtctcacccgcatggggtgaagcgttcagcctccccagacgacgatctgggatctagcaattgggaggcagcagacttgggtaatgaagagagaaaacaaaagttcttgagacttatgggtgcaggaaagaaagaacatactggtcgtcttgttataggagatcacaaatcaacatctcacttccgaaccggggaagaagacaagaaaattaatgaagaactggagtctcaatatcagcaaagtatggacagtaaattatcaggaagatatcggcgacattgtggacttggcttcagtgaggtagaagaccatgatggagaaggtgatgtggctggagatgatgatgatgacgatgatgattcacctgatcctgaaagtccagatgattctgaaagcgattcagagtcagagaaagaagaatctgctgaagaactccaagctgctgagcaccctgatgaagtggaggatcccaaaaacaaaaaagatgcaaaaagcaattataaaatgatgtttgttaaatccagtggttcataactcccaaacgcttagtctttgtattaaaagtaagccttattgttacaatgcacagtggaggactgcttatagagcacagacctttgtattataatttttaaaaaggcccttttaaataattacaaagagtgtttgctttcaaatgccatgggttacacttttatgggcatgactataaccatttttgtaaagagtaagagttgtataaaataagaaataaatacagtactcaacttcctttcatattagcatcatcaaccctctaattcaccttatgggggaaatgcttctttttgtttgtgatagctattttatcatttccttcatatttttctcttataaaaatgtatttgatactgtgatatgttcacgaaaagtattctttaattattctttgttatagtagagctgttcattatggatatttctgctgccagtcacaatctaaattaattttggcaaaagattgggtacttagtttcctgttactgagttagctctactcttttggaccaaagcaacatgagagcaagtacttttcacacttgttaagatggagttataactgtcatacatttggaatattatgatcccaagtagtctttttataatttggattgtatcgtatgttagatttttgataaaatttggccaatttttacagaagaaattctctgatcatttagttctatctatttagaaatatgtaaaactggatttttttttaagtaatatgtgaccaaagttaattttgtcccaaaggtctaaataaagagcagtttcccatatttggctgtgatacctttatcctcattatctacaaatgaggaacaggcttactgataagaagctgaaacaagaaattctcttcattttatcccagtgctattttattgattaattactaaaaagtattactttctaattttattgctgtttctgttggtgtgagattagaatcatctgactgctattaggtggttgatttgtatagctgattaacacaaattgcattatgagctagtaaatggatctttggataatggggtccaaattcttaatgtttataagtaacaagttcaaaggctttagtcacacctgtttgtgagctgagctattatacatctacatacttaaaggatgtatttggagtgttacattttttttttttttttttttttgagacggagtctcattctgtccccaggctggagtgcagtggcgcgatctcggctaactgcaacctctgcctcgcaggagaatcacttgaacccaggaagcggaggttgcagtgagccgggatcgccccattgcactccagcc

SEQ ID NO: 38181 - DNA, 1481 bp, Homo sapiens
  misc_feature (1428)..(1428): n is a, c, g, or t
  misc_feature (1435)..(1435): n is a, c, g, or t
  misc_feature (1438)..(1438): n is a, c, g, or t
  misc_feature (1444)..(1444): n is a, c, g, or t
cggggcggcgaggggccgcaacggtgacgactgtggcagagaaggcccggaggggctctgcgttctgtagtggcgctgcttgggcccgtggcggattgtaagctgctggttttgcggctgggaagagcggcgagagggttcggcatttttcgtcgggatccccgcaaggatgagtgctgccagagagtctcacccgcatggggtgaagcgttcagcctccccagacgacgatctgggatctagcaattgggaggcagcagacttgggtaatgaagagagaaaacaaaagttcttgagacttatgggtgcaggaaagaaagaacatactggtcgtcttgttataggagatcacaaatcaacatctcacttccgaaccggggaagaagacaagaaaattaatgaagaactggagtctcaatatcagcaaagtatggacagtaaattatcaggaagatatcggcgacattgtggacttggcttcagtgaggtagaagaccatgatggagaaggtgatgtggctggagatgatgatgatgacgatgatgattcacctgatcctgaaagtccagatgattctgaaagcgattcagagtcagagaaagaagaatctgctgaagaactccaagctgctgagcaccctgatgaagtggaggatcccaaaaacaaaaaagatgcaaaaagcaattataaaatgatgtttgttaaatccagtggttcataactcccaaacgcttagtctttgtattaaaagtaagccttattgttacaatgcacagtggaggactgcttatagagcacagacctttgtattataatttttaaaaaggcccttttaaataattacaaagagtgtttgctttcaaatgccatgggttacacttttatgggcatgactataaccatttttgtaaagagtaagagttgtataaaataagaaataaatacagtactcaacttcctttcatattagcatcatcaaccctctaattcaccttatgggggaaatgcttctttttgtttgtgatagctattttatcatttccttcatatttttctcttataaaaatgtatttgatactgtgatatgttcacgaaaagtattctttaattattctttgttatagtagagctgttcattatggatatttctgctgccagtcacaatctaaattaattttggcaaaagattgggtacttagtttcctgttactgagttagctctactcttttggaccaaagcaacatgagagcaagtacttttcacacttgttaagatggagttataactgtcatacatttggaatattatgatcccaagtagtctttttataatttggattgtatcgtatgttagatttttgataaaatttggccaatttttacagaagaaattctctgatcattaggtatctattagaatttgtaacnggttttnagnaatggnccaggttatttgtccaagggtaatagagagtccgaag

SEQ ID NO: 38182 - DNA, 1541 bp, Homo sapiens
cggggcggcgaggggccgcaacggtgacgactgtggcagagaaggcccggaggggctctgcgttctgtagtggcgctgcttgggcccgtggcggattgtaagctgctggttttgcggctgggaagagcggcgagagggttcggcatttttcgtcgggatccccgcaaggatgagtgctgccagagagtctcacccgcatggggtgaagcgttcagcctccccagacgacgatctgggatctagcaattgggaggcagcagacttgggtaatgaagagagaaaacaaaagttcttgagacttatgggtgcaggaaagaaagaacatactggtcgtcttgttataggagatcacaaatcaacatctcacttccgaaccggggaagaagacaagaaaattaatgaagaactggagtctcaatatcagcaaagtatggacagtaaattatcaggaagatatcggcgacattgtggacttggcttcagtgaggtagaagaccatgatggagaaggtgatgtggctggagatgatgatgatgacgatgatgattcacctgatcctgaaagtccagatgattctgaaagcgattcagagtcagagaaagaagaatctgctgaagaactccaagctgctgagcaccctgatgaagtggaggatcccaaaaacaaaaaagatgcaaaaagcaattataaaatgatgtttgttaaatccagtggttcataactcccaaacgcttagtctttgtattaaaagtaagccttattgttacaatgcacagtggaggactgcttatagagcacagacctttgtattataatttttaaaaaggcccttttaaataattacaaagagtgtttgctttcaaatgccatgggttacacttttatgggcatgactataaccatttttgtaaagagtaagagttgtataaaataagaaataaatacagtactcaacttcctttcatattagcatcatcaaccctctaattcaccttatgggggaaatgcttctttttgtttgtgatagctattttatcatttccttcatatttttctcttataaaaatgtatttgatactgtgatatgttcacgaaaagtattctttaattattctttgttatagtagagctgttcattatggatatttctgctgccagtcacaatctaaattaattttggcaaaagattgggtacttagtttcctgttactgagttagctctactcttttggaccaaagcaacatgagagcaagtacttttcacacttgttaagatggagttataactgtcatacatttggaatattatgatcccaagtagtctttttataatttggattgtatcgtatgttagatttttgataaaatttggccaatttttacagaagaaattctctgatcatttagttctatctatttagaaatatgtaaaactggatttttttttaagtaatatgtgaccaaagttaattttgtcccaaaggtctaaataaagagcagtttcccattaaaaaaaaaagaagacaagcagcagaaacaac

SEQ ID NO: 38183 - DNA, 1508 bp, Homo sapiens
cggggcggcgaggggccgcaacggtgacgactgtggcagagaaggcccggaggggctctgcgttctgtagtggcgctgcttgggcccgtggcggattgtaagctgctggttttgcggctgggaagagcggcgagagggttcggcatttttcgtcgggatccccgcaaggatgagtgctgccagagagtctcacccgcatggggtgaagcgttcagcctccccagacgacgatctgggatctagcaattgggaggcagcagacttgggtaatgaagagagaaaacaaaagttcttgagacttatgggtgcaggaaagaaagaacatactggtcgtcttgttataggagatcacaaatcaacatctcacttccgaaccggggaagaagacaagaaaattaatgaagaactggagtctcaatatcagcaaagtatggacagtaaattatcaggaagatatcggcgacattgtggacttggcttcagtgaggtagaagaccatgatggagaaggtgatgtggctggagatgatgatgatgacgatgatgattcacctgatcctgaaagtccagatgattctgaaagcgattcagagtcagagaaagaagaatctgctgaagaactccaagctgctgagcaccctgatgaagtggaggatcccaaaaacaaaaaagatgcaaaaagcaattataaaatgatgtttgttaaatccagtggttcataactcccaaacgcttagtctttgtattaaaagtaagccttattgttacaatgcacagtggaggactgcttatagagcacagacctttgtattataatttttaaaaaggcccttttaaataattacaaagagtgtttgctttcaaatgccatgggttacacttttatgggcatgactataaccatttttgtaaagagtaagagttgtataaaataagaaataaatacagtactcaacttcctttcatattagcatcatcaaccctctaattcaccttatgggggaaatgcttctttttgtttgtgatagctattttatcatttccttcatatttttctcttataaaaatgtatttgatactgtgatatgttcacgaaaagtattctttaattattctttgttatagtagagctgttcattatggatatttctgctgccagtcacaatctaaattaattttggcaaaagattgggtacttagtttcctgttactgagttagctctactcttttggaccaaagcaacatgagagcaagtacttttcacacttgttaagatggagttataactgtcatacatttggaatattatgatcccaagtagtctttttataatttggattgtatcgtatgttagatttttgataaaatttggccaatttttacagaagaaattctctgatcatttagttctatctatttagaaatatgtaaaactggatttttttttaagtaatatgtgaccaaagttaattttgtcccaaaggtctaaataaagagcagtttcccat

SEQ ID NO: 38184 - DNA, 2044 bp, Homo sapiens
cggggcggcgaggggccgcaacggtgacgactgtggcagagaaggcccggaggggctctgcgttctgtagtggcgctgcttgggcccgtggcggattgtaagctgctggttttgcggctgggaagagcggcgagagggttcggcatttttcgtcgggatccccgcaaggatgagtgctgccagagagtctcacccgcatggggtgaagcgttcagcctccccagacgacgatctgggatctagcaattgggaggcagcagacttgggtaatgaagagagaaaacaaaagttcttgagacttatgggtgcaggaaagaaagaacatactggtcgtcttgttataggagatcacaaatcaacatctcacttccgaaccggggaagaagacaagaaaattaatgaagaactggagtctcaatatcagcaaagtatggacagtaaattatcaggaagatatcggcgacattgtggacttggcttcagtgaggtagaagaccatgatggagaaggtgatgtggctggagatgatgatgatgacgatgatgattcacctgatcctgaaagtccagatgattctgaaagcgattcagagtcagagaaagaagaatctgctgaagaactccaagctgctgagcaccctgatgaagtggaggatcccaaaaacaaaaaagatgcaaaaagcaattataaaatgatgtttgttaaatccagtggttcataactcccaaacgcttagtctttgtattaaaagtaagccttattgttacaatgcacagtggaggactgcttatagagcacagacctttgtattataatttttaaaaaggcccttttaaataattacaaagagtgtttgctttcaaatgccatgggttacacttttatgggcatgactataaccatttttgtaaagagtaagagttgtataaaataagaaataaatacagtactcaacttcctttcatattagcatcatcaaccctctaattcaccttatgggggaaatgcttctttttgtttgtgatagctattttatcatttccttcatatttttctcttataaaaatgtatttgatactgtgatatgttcacgaaaagtattctttaattattctttgttatagtagagctgttcattatggatatttctgctgccagtcacaatctaaattaattttggcaaaagattgggtacttagtttcctgttactgagttagctctactcttttggaccaaagcaacatgagagcaagtacttttcacacttgttaagatggagttataactgtcatacatttggaatattatgatcccaagtagtctttttataatttggattgtatcgtatgttagatttttgataaaatttggccaatttttacagaagaaattctctgatcatttagttctatctatttagaaatatgtaaaactggatttttttttaagtaatatgtgaccaaagttaattttgtcccaaaggtctaaataaagagcagtttcccatatttggctgtgatacctttatcctcattatctacaaatgaggaacaggcttactgataagaagctgaaacaagaaattctcttcattttatcccagtgctattttattgattaattactaaaaagtattactttctaattttattgctgtttctgttggtgtgagattagaatcatctgactgctattaggtggttgatttgtatagctgattaacacaaattgcattatgagctagtaaatggatctttggataatggggtccaaattcttaatgtttataagtaacaagttcaaaggctttagtcacacctgtttgtgagctgagctattatacatctacatacttaaaggatgtatttggagtgttacattttttttttttttttttttttgagacggagtctcattctgtccccaggctggagtgcagtggcgcgatctcggctaactgcaacctctgcctcgcaggagaatcacttgaacccaggaagcggaggttgcagtgagccgggatcgccccattgcactccagcc

SEQ ID NO: 38185 - DNA, 501 bp, Homo sapiens
gcttcctagtattggctgctatgatttgccgggcactcgctctgaaccaggtcatgggctggacccatcatgtgcatcccctcatttgatctacccagcagcctcaccaactgggggttgctgttgtcaccccacctcatagatgaagaaactgaggctcggagacattaagtgacttgcccaagatcaaacagcttaagagacccagagctgcggcctgaactcatgcccagctagcatcaaacactgtgttcttgcttttttttttttctttttgagacagagtctcactcttttacccaggctggagtgcagtagcagaatctcagctcactgcaacctctgcctcccaggttcaagggattctcctgcttcagcctcctgagtagctgggactacaggcacccacccccatgcccagctaataaaacactgtgttcttaaccactaagaggctcagggtaccccaggtgcctcccagtagagcatgcttcccttttg

SEQ ID NO: 38186 - DNA, 364 bp, Homo sapiens
tgacccagtgcaatcctggtggtggtgataaggatgtttgtgtcacccttcccacaactccagacagctcagcatggaaagagatattccatttgtttgggaaagtaagagaagagaacaaaagtctttgctgggtaatccatgaaattgtactggatcttacctaagaccaccaaagcagtgatgaaggagttttctcttgacccctttgttggatttgcaccaggggtgcctgatatggtttggctgtgtccccaccaaaatctcaacttgaattctatctcccagaactcccatgtgttctgggagggacaaagggggaggtaaatcatggaggtctatctttccagtgctattctcataa

SEQ ID NO: 38187 - DNA, 2316 bp, Homo sapiens
agcgggtctcgctcgctcgcgcagcggcggcagcagaggtcgcgcacagatgcgggttagactggcggggggaggaggcggaggagggaaggaagctgcatgcatgagacccacagactcttgcaagctggatgccctctgtggatgaaagatgtatcatggaatgaacccgagcaatggagatggatttctagagcagcagcagcagcagcagcaacctcagtccccccagagactcttggccgtgatcctgtggtttcagctggcgctgtgcttcggccctgcacagctcacgggcgggttcgatgaccttcaagtgtgtgctgaccccggcattcccgagaatggcttcaggacccccagcggaggggttttctttgaaggctctgtagcccgatttcactgccaagacggattcaagctgaagggcgctacaaagagactgtgtttgaagcattttaatggaaccctaggctggatcccaagtgataattccatctgtgtgcaagaagattgccgtatccctcaaatcgaagatgctgagattcataacaagacatatagacatggagagaagctaatcatcacttgtcatgaaggattcaagatccggtaccccgacctacacaatatggtttcattatgtcgcgatgatggaacgtggaataatctgcccatctgtcaaggacctctagccccccagcataccccggctcaggggacacggacacaggcccaggggagtcagaaacctgtgacagcgtctcaggctcttctgagctgctccaaagtctgtattcacctcccaggtgccaagagagcacccaccctgcttcggacaaccctgacataattgccagcacggcagaggaggtggcatccaccagcccaggcatcgacattgcagatgagattcctctaatggaagaagatccctaatatgggtcaagatccagatgactctcctgctccttcggggaaaggaccttgtatcttggagtgaggtcacagaaggatagagcctgggggcaaaatgtctaacttgtctacatggggaccacagttcacattatgcatctcaggctccacagtgaggctgacaaactgcaatggcagtgcttttaaatgagatttgaggattcaccaagacccatggggaaccggggcagcagggaagccctcgcgtggtcttggatgaggggtgttaaatgtgtatcgtgctgtggaacatgggacaattccacgcacatcccaccgaatcatcacgcatcccattgactggcaagtactccccgccccctctgaaagcatgtcacatcatgtaaatttgcttctaacatctgcttcaaactgtctctggactccaaatttggatgggtcagcctctgcagaaagtttgtgttgagatgctggaagaacagcagagcctcctgcaccctcagcaagggaccagctcccaaaggaaaggtccttgtgtgacatttggagaatcttccttcatccagacaactctactcgaagcaagacgaaagcaggatgtggcagttgcagtgagaaaggaaaggaaagatgggcagactctgctttctggaaatttcttcacaaagtagagctcatgaactctgtgctgtcttctggtaacatatcatcagtgtttgtattcatggtgtggcacatggatccatggcattgggtaaatctggtggtttttacacatggtcagaatgtgttcaaatacatctcatgatggagacagtaaccaaggtaatgttttgtttcagcattttaaaaagactccacttaacatttatctcagaatcatgagcctctctctagttgacaattgtcattgttcccccagccccaaattgaaccatacatttattttccaaaacagaaattgtttctgtaaacatatccgaccttcaaaagaagtgtgaggttggatttttcccccttttatttgtcctaagattccaggaggctggcctcccagcccagatagctcagccacctcacctgcctatcattcctgcattcctactttgagggtctcatcatgcccactgggtgttgttcctaagaaactgattgattaaaaaatttcccaaagtgtcctgaagtgtctcttcaaatacatgttgatctgtggagttgattcctttccttctcttggttttagacaaatgtaaacaaagctctgatccttaaaattgctatgctgatagagtggtgagggctggaagcttgatcaagtcctgtttcttcttgacacagactgattaaaaattaaaagaaaatgacaaaaagaagcgt

SEQ ID NO: 38188 - DNA, 1066 bp, Homo sapiens
agcgggtctcgctcgctcgcgcagcggcggcagcagaggtcgcgcacagatgcgggttagactggcggggggaggaggcggaggagggaaggaagctgcatgcatgagacccacagactcttgcaagctggatgccctctgtggatgaaagatgtatcatggaatgaacccgagcaatggagatggatttctagagcagcagcagcagcagcagcaacctcagtccccccagagactcttggccgtgatcctgtggtttcagctggcgctgtgcttcggccctgcacagctcacgggcgggttcgatgaccttcaagtgtgtgctgaccccggcattcccgagaatggcttcaggacccccagcggaggggttttctttgaaggctctgtagcccgatttcactgccaagacggattcaagctgaagggcgctacaaagagactgtgtttgaagcattttaatggaaccctaggctggatcccaagtgataattccatctgtgtgcaagaagattgccgtatccctcaaatcgaagatgctgagattcataacaagacatatagacatggagagaagctaatcatcacttgtcatgaaggattcaagatccggtaccccgacctacacaatatggtttcattatgtcgcgatgatggaacgtggaataatctgcccatctgtcaaggctgcctgagacctctagcctcttctaatggctatgtaaacatctctgagctccagacctccttcccggtggggactgtgatctcctatcgctgctttcccggatttaaacttgatgggtctgcgtatcttgagtgcttacaaaaccttatctggtcgtccagcccaccccggtgccttgctctggaaggaggaagacctgaacatcttttccctgtcctttatttcccacacatcaggttggcagctgctgtgctttatttttgccctgtgttaaagtcctctcccaccccagcacctacctgttcctcaactagcaccaccacatctctgttctaaatgttgttctcctgcaataaaggacgtttgaattaaacattc

SEQ ID NO: 38189 - DNA, 984 bp, Homo sapiens
  misc_feature (966)..(966): n is a, c, g, or t
  misc_feature (974)..(974): n is a, c, g, or t
agcgggtctcgctcgctcgcgcagcggcggcagcagaggtcgcgcacagatgcgggttagactggcggggggaggaggcggaggagggaaggaagctgcatgcatgagacccacagactcttgcaagctggatgccctctgtggatgaaagatgtatcatggaatgaacccgagcaatggagatggatttctagagcagcagcagcagcagcagcaacctcagtccccccagagactcttggccgtgatcctgtggtttcagctggcgctgtgcttcggccctgcacagctcacgggcgggttcgatgaccttcaagtgtgtgctgaccccggcattcccgagaatggcttcaggacccccagcggaggggttttctttgaaggctctgtagcccgatttcactgccaagacggattcaagctgaagggcgctacaaagagactgtgtttgaagcattttaatggaaccctaggctggatcccaagtgataattccatctgtgtgcaagaagattgccgtatccctcaaatcgaagatgctgagattcataacaagacatatagacatggagagaagctaatcatcacttgtcatgaaggattcaagatccggtaccccgacctacacaatatggtttcattatgtcgcgatgatggaacgtggaataatctgcccatctgtcaaggacctctagccccccagcataccccggctcaggggacacggacacaggcccaggggagtcagaaacctgtgacagcgtctcaggctcttctgagctgctccaaagtctgtattcacctcccaggtgccaagagagcacccaccctgcttcggacaaccctgacataattgccagcacggcagaggaggtggcatccaccagcccaggcatcgacattgcagatgaaaattccttcttaatgggaagaagaatcccttaaaaatggggtcaaggatccccnatgaattnttctggttcc

SEQ ID NO: 38190 - DNA, 1595 bp, Homo sapiens
agcgggtctcgctcgctcgcgcagcggcggcagcagaggtcgcgcacagatgcgggttagactggcggggggaggaggcggaggagggaaggaagctgcatgcatgagacccacagactcttgcaagctggatgccctctgtggatgaaagatgtatcatggaatgaacccgagcaatggagatggatttctagagcagcagcagcagcagcagcaacctcagtccccccagagactcttggccgtgatcctgtggtttcagctggcgctgtgcttcggccctgcacagctcacgggcgggttcgatgaccttcaagtgtgtgctgaccccggcattcccgagaatggcttcaggacccccagcggaggggttttctttgaaggctctgtagcccgatttcactgccaagacggattcaagctgaagggcgctacaaagagactgtgtttgaagcattttaatggaaccctaggctggatcccaagtgataattccatctgtgtgcaagaagattgccgtatccctcaaatcgaagatgctgagattcataacaagacatatagacatggagagaagctaatcatcacttgtcatgaaggattcaagatccggtaccccgacctacacaatatggtttcattatgtcgcgatgatggaacgtggaataatctgcccatctgtcaaggctgcctgagacctctagcctcttctaatggctatgtaaacatctctgagctccagacctccttcccggtggggactgtgatctcctatcgctgctttcccggatttaaacttgatgggtctgcgtatcttgagtgcttacaaaaccttatctggtcgtccagcccaccccggtgccttgctctggaaggtaacacatctcattctttcggaagttgtattttgtattattaaagggaggaagaagatcagtaggaggaagagctgtgaattatgatgggcaataacttttcttctctgaatacatctttctcacttttctccagagcagagatcagctgccgtgaagccatatttacaattagatgtaaaacttgcttccctcatccttaggcttaaagaggagagcagataaaagaaaaagttgcgaacattaaaggttaaattacaaaatattgcaaagttaaatgaaatgtcttcaaaaattaattttctctgcaccaaatgggaacagattgtatcatgtcattaatcttacccctcgttttattgttgtgtcgctgtttcctccatatttccatgcactttatggcttagctgtaaatgttttgctgcaagcacacccttggatgcctgaaagcaagagctctttcctccctgtttttattaaatctctatgactatagattgtgattcacgaaagaccactaatcagtagtatgaagtagtgagaaggacagggcttccactggcggagtcaaggcagtgtctgcaggggaaaagcctgtaaacacttctgctaggcaagttggacatgctggttcagctcttgctttaactcagatcttgaaagtatgcccgaagagaacaagctccaatgtgtttctcagcatctgagtatagtgggtag

SEQ ID NO: 38191 - DNA, 582 bp, Homo sapiens
ggggggcaatgaaactaccctgcatgataacttgaatggtggatacatgtcactacacatttatccaaacccatagaatgtacaacaccaagagtgaaccctaatgtaaactcgactctgagtgataatgatgtatcaatgtaggttcatcagcagtaacaaatgcaccactctggtggggatgtgaataatgggggaggctgtgcatgcgtgggagcagggagtatacgggaacttcctgtaccttctgctcaatattgctgtgaacctaaaactgctcttaaaaataaagtctttattttttttagaaagaaaagggctttaggtttttttttttcaatcaagagaaatagtcttcttatgttttcatatttacacttctttttttcaggaggaagacctgaacatcttttccctgtcctttatttcccacacatcaggttggcagctgctgtgctttatttttgccctgtgttaaagtcctctcccaccccagcacctacctgttcctcaactagcaccaccacatctctgttctaaatgttgttctcctgcaataaaggacgtttgaattaaacattc

SEQ ID NO: 38192 - DNA, 418 bp, Homo sapiens
tctgagtgactgccctgtgtcatcttattatcctcaacttatgtgcatttagtctccgccccctgcctcctgaactccttgccctaggctttgatgccagaaactgtccttggcctttcaatctgtgccatcatttcagcatcagtctgcattcttgaactggaacctagcactaagttcatatcattcatcacttttctgtttggggagcctcttggtctttgtgttattaaaaaagaaaatcttggctgggcacagtggctcaggtctgtaatcccagcactttcagaggccaaggcaggaggatcgcttgagcccaggagttccagatcagcctgggaaatatagtgagactctgtctctaccagaaaccaaaaaaaaaaaaaaaaaacttagccaggtgtggtggcacacaccc

SEQ ID NO: 38193 - DNA, 274 bp, Homo sapiens
tactctcacctagcaatgaagggttgtaagagttctcatttaattcaatctcctcatctgacagataggaaaactgaggaccagaaagggaaagggattgatccaaggttcacctccagggctcagtctcccataatgggagaacttggacaaaatatcaaattagtctactttatttttttttcttcctgttgcactacactgactcttagaaggaattaaatagtgaactcgtaacggggcttgaagtttggaaagcatgcccacacccgtc

SEQ ID NO: 38194 - DNA, 413 bp, Homo sapiens
ccagccagctactgaaccttatgtgtgcctagggccattttgagacaatttgctgaatattaaaagtacaaccaataatgtttctctccacatccacaatagcgcttagaggaagcatctgggattgagccatctcacatctgtctaatcacattcattcaaatgtgatgggcccaactggcctacgtacatggctgcatatcaccatgggtggaaattaaatcagaatttggctcaggagagagatgaagagaaaatgcacgtagataattggctcagataacattctgtttctggaagtcacaaagagtggaaattggaatatgtaaattaaagaaaaacaggtaaggaatttcacatggaacccccaacccaccacaccctgtgtatgttctcattctcattctctctat

SEQ ID NO: 38195 - DNA, 410 bp, Homo sapiens
aaaagaaaagaaaacaagtgtaagcaaggatatgaagaagagaacccttgtacactgttggtgaaaatgaaaatcagtgcaaccactatggaaaatagtatggaggcacctcaaaaaatttaaatcagaaataccatacgatccagcaatcctacttctggatatatattcaaaggagttgaaatcagggtcttgaagagagatctgcacttttacatttattgcagcattattcacaataggcaagatatggaatcaacttcagtgtccatcaatgaataaatggacaacgaaattgtgatattaaaaaaagtatatacttatggtatatgatacaatgttttgatatatgtataccttgtagaaagtctaaatcaagctaactaacaatgaattaccttgtttttatc

SEQ ID NO: 38196 - DNA, 553 bp, Homo sapiens
accagtcgggggttgttggtgttaggtgttgggagggtgaggcattagactttgactctgccttctgagcttgcagcctagtctgggagggaagaggaatgcaccagaatccaaagcaaaaaacataaatggttaagggctagtggagaggaataggaagcaacttgtgaaagaaggtgcaggaaaggcagcaggaccaagctaggcctggacctggatgaatgggtaggatttggccaggtggagggagcaagagggcacaggagggaatggaacagcaagggcaaaagcctggagtgggaagaatgctggtgtgcccagctcacaggctgtggggagaaaggcctggccagacccgaggctactaagtagggggtagtaggaaatgggctcacatgggtaaaaaggaaccatgttacagggcctgaaacaagccctgtggaggagtttaagagttgttgaaggctgggttgggtgtctcacacctgtaatcccagtgctttgggagaccaaggcaggaggatcgcttgagcccaggagtttgagaccagcc

SEQ ID NO: 38197 - DNA, 2965 bp, Homo sapiens
  misc_feature (625)..(625): n is a, c, g, or t
  misc_feature (921)..(921): n is a, c, g, or t
  misc_feature (1028)..(1028): n is a, c, g, or t
  misc_feature (1527)..(1527): n is a, c, g, or t
ctgccactgtggaagccaatccactgaatagcagcatttcccatttgggtattgagggatctataggagttcaccaaactgaggcaagtggaaaggcattctacacagaagaaattaactttgcaaaagtgttgagctggagaagggagtccctggagcagggacttagctccaggtggcagggctgccctgaggtgaggagggaaggaaatgactggaaagtgagttgtgggcaggttgaaaaaagttttgcgtgtagggtttgtacttaatcctgtaggttccaggatgtccttctgtttctcaggcagcaatatgagaggcttgagtaccatcatgaggaagccatttctgagggcaaatcaacaggatctggggagatactggacttgggggtgtagggagaggtcaggactgatggggctcacacccaggtgtttggcgcgggtcatttacatcagttttgaatgtgatacacatacctaccctggcttgctttccctcctcttccagtaaattagaaacttcatgattgttctctgctcagattggctctttggtaggggagggtggaagtgtaactcccttggcagaggggtctggaggagcctagcagggccggtgncctcctcctctgcccccagccctgtctgtggagagcggctcctgctctctcaccctctcctctcccagcacccctccccactctgatcacagcctcagagtccaaatggaacaggccagactgttcaggtggctgttgccacgtctccctgagcccctgctctggagccccgagcaccagcctggagccctggcccagccaaaggcttcacccctggagcaggtgactctgagcgaggccatggcccgagtccctgtttccaggatgtttgtgtccctgtggacctgtctttgtanggctccatgtacttctgggagcctgtatgcttgcgccagtgtgcccactcatgtcacctgtgtctgtccgtgaatatgtgccctatgtctttttggatgtctctgtntgttcgcatgtgtttgcacaagtatgaggtgggcctcttaggctctctcagggcccccatggttatcttgtcataaatggcagtcaggttagggtgctctgaaaggggctaagtgcgaggaggggccgagccagggtatagcccttgcccctgggggcctgtggtctgagggaagatccagacctcaccaatgtggcaaactcagcagaaatacaagttcccagatttgagaaacctctttgggacccctcatgctgcacttggcctcggtgttggggacccagggtcagatcagaccctgcccctaccttccagagccagcccaggcagtcagctatgcagttggacactagcgtggctgctgaatggatggctgtacagggcacaagaaaacaggtgaaggcatgcccaggcctgctggagagtcagggagggcttcctacaggaggagtttgagtggtgactacagagctgtttgggggatgagaggaaggagatngagaacagagctgggcttggcgtcagatggcactggcgggtttgaagaaaagggagatggggagggtgattctcatcttccaggcctggaggttggagggaatggaggtgtcttgaaatgcgtggaaaggaagaggagttcccatttggccactgtgggtatgagcttcctgtgggatgtccaggtgcagatgaccagagggttgcaggatacttgagtcttgaacttggtccagccagagatgggtggttgaaaccgtggggtggatgatactgccaagaaggatgtgatgggcaagggagggaaagggggcttaggattgagagcagcagcattcaggcctgggcagagaggatccagcgaaggggctggtgaggtggggccagaaagggggacaaacaaccaggcaatcagtggctgaggatggagaagtgccccatggatttacccacacagaagccattgttgaacttggtggcagcagagggtaatgggttttgcagtgggtgggacgaagtggagatatgggtgcagacaactctcagaagtttggatgagaagggaggagagaaagggaggagagctgggaaggggtgcaggggatgaactgcatgagccccaggcctgctcactgctgattggaaggagccagaagaggagagaggagaggccagagggaggagggagggtgaagtggtcatctgtagacacccgcctagtcctctgccaggggcagggagggtgcctggagggggtggtgctttctggaggaatggctgtggagggctgagggtgaaggaggtgcagtgctgggcaggcagccttcagtcttgccctgacctctgccagtcttcatatctgcagggtatggtggtagcagccaccctggggtgtggggaggatcccaggaggcagaagctccactagctcagagcatcctcgtaaaccaggttcaggtcaggagttgaagctcagggctgggcggggttggcctctggtggtttttgcatcttcagtgctcaccaaagctgtttcgtagacactgcaaacaagaaaggcctaggaaggtcaggacgtggatggcctgcttccaaagaggccacacccaaccccatctctgggcccagctctcaattacagggaagttcttcctttgggtctagcctaagtctttcccgctgtgtgttcccttctggtgaacttgttcaaccctgctccatggagccaagcctatcagctggccacttggagtggcggtcagtatttttacaacttgttttcatgaagatgatttgaagtctccttgcattcccagaatgtcagacccgccctgattcacaaggattgaccaaaacagggtctgagccaaccagaggaatttgaagacttagtcatcccccttggatcatctgcacattcttctcctttccttccagtt

SEQ ID NO: 38198 - DNA, 214 bp, Homo sapiens
gactctgagaactggaccatcccaaggctgtagctttcttcaagcctggcaggctctgtcgtggtgaagagtctgaaggctttttcttttccagtaacacaggaggtgattgaatggaaggagtggccagtcactctttggcgtccaggatccaagaagaaacagatgaggaggaaggaggataaacaacttctggacaaagcgagtaagtgaa

SEQ ID NO: 38199 - DNA, 299 bp, Homo sapiens
ctcttagtttgcagttagctgagaaataggtgttctgcttccttacatggtgactgttgagtagataaaacacagaggtctaccccccctgccccaatatacctgtttagtagtgaagcaatttacatagtaactccatgtgggggtgtacttttactctctactctcactacacatccaagaagcctcccctagacttttggttaatgtgttgttgcaaaaatatgaaatgtaatgtactttctgacacatgtagggacatacttagaactagcattgcccagagtttatcaagcgta

SEQ ID NO: 38200 - DNA, 746 bp, Homo sapiens
agggttctaaatcttacagagtaaaaaaattattgaagcaaaaacaaatgtataaaaagtacatataaacgtacagtttgatgaattttcataaattcaataggctcatggaactagcactcagattaaaaaaatacagttatgagtacccctgaagtcctccctaacaccccatcagccattacctactcaccttcttgcccaagataaccattattttgatttcttacagcatattttttgcttatttttgaactttacataaatggaattattggtcatgtgtctagcttctttcacttgaaattatgtttgtgagattcatttatattgttgtgtgtactattattgtagatcatttattctcattggtgtatagaattccactgtgtgaatattccacaatatatttattccagtcttggtgggcatttgggtagattccagtttggaacaattataaataaagctttgatgaatattctaaagacaaaacaacacagcaaaacacagaaaaaacaatgtgtgggccgcaccggccccaaaaaaagttccaaacaccacaccgtgggggcgcgcgcccccagagtaacgcggcccgtggccaaagcgggcccaaaagaaaccggcccagaacacgtcgcggggccccaccaaaaaaaacgccgggaaccggggtctgcaccacccatggggccgaggccacggccaccaccggaccacgaccgaaaaaggccccggagaat

SEQ ID NO: 38201 - DNA, 332 bp, Homo sapiens
ggggccttggagatgctcttgactgggaacctcagtccttctgaacatggcctagtcctctctgcatggcccctcattctctggggcctctttctcctgtggcttctctctgtagcagaacagcctgatttctttgcatgtggcaggaacctgcctctgcaaagtggaagctgcaagatcacgtcaagcccagaaggtcattggtgccacattctgttggtcagaacaaacctcatggccagtccagattcagggggagggaaacataacccaccttttgatagactatttccaaagacagccacagcaatctcctatcaaaagtcgacgcg

SEQ ID NO: 38202 - DNA, 373 bp, Homo sapiens
ttttttggctagtcatggtcttttgagataccacatgaactttaggatagtcttttttacttctgaaaaaaagcctttggaattttaatagagatttcaaggaatctgtagattacagtacaaatattttaacactattaagtctttcaacccatgatcacgggatgtcttcccctttatttgtgtcttgtttaatttttttcagcaatgttttagaattctcagtgtatacgtttttttcctcctggagcaactatatctataagtatgctattctttttgatatcattgtaaattatatttgttttcttaataatttccttgtcaggtattttgctgataatgtacagaaatgcaactaatttttgtgtgt

SEQ ID NO: 38203 - DNA, 347 bp, Homo sapiens
catccttcccctacccccaccttccctcccttctcctggagcccaggaaaaaaccatctgctgagttggctttcagaagatttttttttaaataccaatttccctttgttccgaggcaacctccaatcagggctggtgtctgctgggtttggcgaaaggctggtattgtgtttcatgctcccggaggaaaggttgtccacttgcttttctttttgattcgattccctgccattctgcaggagagtcagtggttgcagctgctgctgtcagctataagtgggggatccccttgtttaagaccctatacgttaatcccttggcaggaggagaaaaacaaaacaaaacaa

SEQ ID NO: 38204 - DNA, 375 bp, Homo sapiens
acaaagtaggatgatagatgttaaataccaagcactccagataccctggggtcaaatctggctctatcagttactactgctgatgtgtcagtgtgcataacatgcttggaaccgtgcctggcacataagtgtctgcgaaataaaatgaatcaatatgttaaaggtaaacaaactacgtgtttcaattaaaagatattctcagaatggaccaaaaaattaaaaacccaatacacaaagcaatgtatgctatctacaaaagacacatctaacttataagctctagaaatgtagaagtaaaaaaatgggagagaagatataccatgcaagggccaatcaaaaggaaactggtgttacaaggctggcttttgggctgaa

SEQ ID NO: 38205 - DNA, 684 bp, Homo sapiens
agaggcccacagcagggagtgagatgagaccaggtttaaacgtcactttcccctaagtccttgttcattcacagcttccttcagtagctctgaccagctttctcagcacctgccgaccgacaaaccaaccaaccaatggaggctggtgctgggggtggagatggccaagagccggtggtgagaagtgagggagaatggggaagaaggggctccacagagggcacttgatccgggacggctttccggaggaggtgatttcctaggcctaaggggctccgggcagaggggccagcatgagggaagctcggaggtgggggagcatggattggaggagagaataagcagttgcttgctggggtgtcataagatgcggcagtgcactcaacgctacaggagcaggcacgggcctttttcaccagcctaaggattttggaatgactcttctatcagccaacagtttccaaccttatttatgtacttgtttctttgattccagcgatgcaggagagatgatattcagacagccgacttctgctgtgggtgtgccccaggttataaatcatttccatcaggctagctggagtcccggcccttcctttccactgaagaaagcaaatcagagtaccagatagcgagagtgatattatcacaggatagccttgaaactgccataacaaaaaaaaa

SEQ ID NO: 38206 - DNA, 1546 bp, Homo sapiens
cctccaaaacaccctaacagttaaatttcctcagtccagaagctgattgcagtccagttcgcaattggccaggctctagtttatataggacctgaggctccacccatgtgcaggcaccgcccccgtggcgtcacgagcgagcaatggcgtcattggaacgacatgagcatgcgcacttccccagcacaatcagggaagacacgcgtgacccggaaggtcttcccgccacactccagagcggatgtgaggggcgccgatggcggagggaacggcggaggctcctctagagaatggtggtggtggcgactcgggagccggagctttggaacgaggagtggcgcccattaagcgtcaatacctcaccaccaaggagcagtttcaccaattcctggaagccaaagggcaggagaagacttgccgggaaaccgagctggacatccgtggcaaactttacctggcccccctcaccacgtgtgggaacctgcccttccgacggatctgcaagcgcttcggggcggatgtgacatgtggagagatggccgtctgcaccaacctgctgcagggccagatgtccgagtgggccctactcaaacgccaccagtgtgaggacatctttggcgtccagctggagggcgccttccccgacaccatgaccaagtgtgccgagctgctgagccgcaccgtggaggtggactttgtggacatcaacgtcggctgccccatcgacctcgtgtacaagaagggtgggggctgtgccctcatgaatcgctccaccaagttccagcagatcgtccgtggcatgaaccaggtgctggatgtgccgctgactgtgaagatccgcacaggcgtccaggagcgtgtgaacctggcgcaccgcctgctgcccgagctgcgggactggggcgtggcactcgtcacgctccacggccgctctcgggagcagcgctacaccaagctagccgactggcagtacatcgaggagtgcgtgcaggccgccagccccatgcccctgttcggaaatggggacatcttgtcatttgaggatgccaaccgcgccatgcagactggtgtcaccgggatcatgattgcccgtggcgccctgctcaagccgtggctcttcacggagatcaaggagcagcggcactgggacatctcgtcgtccgagcgcctggacatcctgcgggacttcaccaactacggcctggagcactggggctcggacacgcagggcgtggagaagacccggcgctttctgctcgagtggctgtccttcctgtgccggtacgtgcccgtggggctgctggagcggctcccacagaggatcaacgagcggccgccctactacctgggccgcgactacctggagacgctgatggccagccagaaggcagccgactggatccgcatcagcgagatgctccttgggccagtgccccccagcttcgccttcttgccgaagcacaaggccaacgcgtacaagtagcctcaggctttcccaggggcaccctggggcgaggagagtacaataaattttattcttttaaaa

SEQ ID NO: 38207 - DNA, 973 bp, Homo sapiens
tgcaggctggtaccggtccgaagcgttgtgaggggcgccgatggcggagggaacggcggaggctcctctagagaatggtggtggtggcgactcgggagccggagctttggaacgaggagtggcgcccattaagcgtcaatacctcaccaccaaggagcagtttcaccaattcctggaagccaaagggcaggagaagacttgccgggaaaccgaggtaggagaccctgctggcaatgagctggctgagcctgaggctaagcggatccgactggaggatggacagacggcggacgggcagacggaggaggcagcagagcccggggagcagctacagactcagaagagggcccggggacaaaacaagggccggccccatgtgaagcccacgaactacgacaagaacaggctgtgtccctccctaatccaggagtcggctgctaagtgtttcttcggtgatcgctgccgctttctgcacgacgtggggcgctacctggagaccaagccggccgacctgggcccccgctgcgtgctcttcgagaccttcggccggtgcccctacggcgtgacctgccgcttcgctggggcccacctgaggcccgagggacagaacctggtgcaggaggagttggcggcccgcgggacccagcccccgtccatccgcaacggcctggacaaagccctgcagcagcagctgcggaagcgcgaggtccgcttcgagcgagctgagcaggccctgcgccggttcagccagggccccacacccgctgccgctgtccccgagggcacggcagccgagggcgctcccaggcaggaaaactgtggtgcccagcaggtccccgcagggccgggcactagcaccttccagagcccgggggaactggggcctggaggtgagactgccagctgcggcgtgaaaaaggggggatcgtggaatctggcctacaggggacggctcgagagaggacggggggag

SEQ ID NO: 38208 - DNA, 2379 bp, Homo sapiens
cctccaaaacaccctaacagttaaatttcctcagtccagaagctgattgcagtccagttcgcaattggccaggctctagtttatataggacctgaggctccacccatgtgcaggcaccgcccccgtggcgtcacgagcgagcaatggcgtcattggaacgacatgagcatgcgcacttccccagcacaatcagggaagacacgcgtgacccggaaggtcttcccgccacactccagagcggatgtgaggggcgccgatggcggagggaacggcggaggctcctctagagaatggtggtggtggcgactcgggagccggagctttggaacgaggagtggcgcccattaagcgtcaatacctcaccaccaaggagcagtttcaccaattcctggaagccaaagggcaggagaagacttgccgggaaaccgaggtaggagaccctgctggcaatgagctggctgagcctgaggctaagcggatccgactggaggatggacagacggcggacgggcagacggaggaggcagcagagcccggggagcagctacagactcagaagagggcccggggacaaaacaagggccggccccatgtgaagcccacgaactacgacaagaacaggctgtgtccctccctaatccaggagtcggctgctaagtgtttcttcggtgatcgctgccgctttctgcacgacgtggggcgctacctggagaccaagccggccgacctgggcccccgctgcgtgctcttcgagaccttcggccggtgcccctacggcgtgacctgccgcttcgctggggcccacctgaggcccgagggacagaacctggtgcaggaggagttggcggcccgcgggacccagcccccgtccatccgcaacggcctggacaaagccctgcagcagcagctgcggaagcgcgaggtccgcttcgagcgagctgagcaggccctgcgccggttcagccagggccccacacccgctgccgctgtccccgagggcacggcagccgagggcgctcccaggcaggaaaactgtggtgcccagcaggtccccgcagggccgggcactagcacccctcccagcagccccgtgcggacctgcgggcccctgacggatgaggacgtggtcaggctgcggccctgtgagaagaagcggctggacatccgtggcaaactttacctggcccccctcaccacgtgtgggaacctgcccttccgacggatctgcaagcgcttcggggcggatgtgacatgtggagagatggccgtctgcaccaacctgctgcagggccagatgtccgagtgggccctactcaaacgccaccagtgtgaggacatctttggcgtccagctggagggcgccttccccgacaccatgaccaagtgtgccgagctgctgagccgcaccgtggaggtggactttgtggacatcaacgtcggctgccccatcgacctcgtgtacaagaagggtgggggctgtgccctcatgaatcgctccaccaagttccagcagatcgtccgtggcatgaaccaggtgctggatgtgccgctgactgtgaagatccgcacaggcgtccaggagcgtgtgaacctggcgcaccgcctgctgcccgagctgcgggactggggcgtggcactcgtcacgctccacggccgctctcgggagcagcgctacaccaagctagccgactggcagtacatcgaggagtgcgtgcaggccgccagccccatgcccctgttcggaaatggggacatcttgtcatttgaggatgccaaccgcgccatgcagactggtgtcaccgggatcatgattgcccgtggcgccctgctcaagccgtggctcttcacggagatcaaggagcagcggcactgggacatctcgtcgtccgagcgcctggacatcctgcgggacttcaccaactacggcctggagcactggggctcggacacgcagggcgtggagaagacccggcgctttctgctcgagtggctgtccttcctgtgccggtacgtgcccgtggggctgctggagcggctcccacagaggatcaacgagcggccgccctactacctgggccgcgactacctggagacgctgatggccagccagaaggcagccgactggatccgcatcaggtgcctgggtgggctggagttggggagctgcagtcgggggcccggggtcacggagggtactttgcaggtcctgggcctgacctcgctttccacctgctctcccacagcgagatgctccttgggccagtgccccccagcttcgccttcttgccgaagcacaaggccaacgcgtacaagtagcctcaggctttcccaggggcaccctggggcgaggagagtacaataaattttattcttttaaaa

SEQ ID NO: 38209 - DNA, 2079 bp, Homo sapiens
  misc_feature (11)..(11): n is a, c, g, or t
  misc_feature (40)..(40): n is a, c, g, or t
  misc_feature (47)..(47): n is a, c, g, or t
gggaaagaaanagaacttaggctaggtcgaggctggtgtnaatcggncgagtgaggggcgccgatggcggagggaacggcggaggctcctctagagaatggtggtggtggcgactcgggagccggagctttggaacgaggagtggcgcccattaagcgtcaatacctcaccaccaaggagcagtttcaccaattcctggaagccaaagggcaggagaagacttgccgggaaaccgaggtaggagaccctgctggcaatgagctggctgagcctgaggctaagcggatccgactggaggatggacagacggcggacgggcagacggaggaggcagcagagcccggggagcagctacagactcagaagagggcccggggacaaaacaagggccggccccatgtgaagcccacgaactacgacaagaacaggctgtgtccctccctaatccaggagtcggctgctaagtgtttcttcggtgatcgctgccgctttctgcacgacgtggggcgctacctggagaccaagccggccgacctgggcccccgctgcgtgctcttcgagaccttcggccggtgcccctacggcgtgacctgccgcttcgctggggcccacctgaggcccgagggacagaacctggtgcaggaggagttggcggcccgcgggacccagcccccgtccatccgcaacggcctggacaaagccctgcagcagcagctgcggaagcgcgaggtccgcttcgagcgagctgagcaggccctgcgccggttcagccagggccccacacccgctgccgctgtccccgagggcacggcagccgagggcgctcccaggcaggaaaactgtggtgcccagcaggtccccgcagggccgggcactagcacccctcccagcagccccgtgcggacctgcgggcccctgacggatgaggacgtggtcaggctgcggccctgtgagaagaagcggctggacatccgtggcaaactttacctggcccccctcaccacgtgtgggaacctgcccttccgacggatctgcaagcgcttcggggcggatgtgacatgtggagagatggccgtctgcaccaacctgctgcagggccagatgtccgagtgggccctactcaaacgccaccagtgtgaggacatctttggcgtccagctggagggcgccttccccgacaccatgaccaagtgtgccgagctgctgagccgcaccgtggaggtggactttgtggacatcaacgtcggctgccccatcgacctcgtgtacaagaagggtgggggctgtgccctcatgaatcgctccaccaagttccagcagatcgtccgtggcatgaaccaggtgctggatgtgccgctgactgtgaagatccgcacaggcgtccaggagcgtgtgaacctggcgcaccgcctgctgcccgagctgcgggactggggcgtggcactcgtcacgctccacggccgctctcgggagcagcgctacaccaagctagccgactggcagtacatcgaggagtgcgtgcaggccgccagccccatgcccctgttcggaaatggggacatcttgtcatttgaggatgccaaccgcgccatgcagactggtgtcaccgggatcatgattgcccgtggcgccctgctcaagccgtggctcttcacggagatcaaggagcagcggcactgggacatctcgtcgtccgagcgcctggacatcctgcgggacttcaccaactacggcctggagcactggggctcggacacgcagggcgtggagaagacccggcgctttctgctcgagtggctgtccttcctgtgccggtacgtgcccgtggggctgctggagcggctcccacagaggatcaacgagcggccgccctactacctgggccgcgactacctggagacgctgatggccagccagaaggcagccgactggatccgcatcagcgagatgctccttgggccagtgccccccagcttcgccttcttgccgaagcacaaggccaacgcgtacaagtagcctcaggctttcccaggggcaccctggggcgaggagagtacaataaattttattcttttaaaa

SEQ ID NO: 38210 - DNA, 2173 bp, Homo sapiens
  misc_feature (2172)..(2172): n is a, c, g, or t
cctccaaaacaccctaacagttaaatttcctcagtccagaagctgattgcagtccagttcgcaattggccaggctctagtttatataggacctgaggctccacccatgtgcaggcaccgcccccgtggcgtcacgagcgagcaatggcgtcattggaacgacatgagcatgcgcacttccccagcacaatcagggaagacacgcgtgacccggaaggtcttcccgccacactccagagcggatgtgaggggcgccgatggcggagggaacggcggaggctcctctagagaatggtggtggtggcgactcgggagccggagctttggaacgaggagtggcgcccattaagcgtcaatacctcaccaccaaggagcagtttcaccaattcctggaagccaaagggcaggagaagacttgccgggaaaccgaggtaggagaccctgctggcaatgagctggctgagcctgaggctaagcggatccgactggaggatggacagacggcggacgggcagacggaggaggcagcagagcccggggagcagctacagactcagaagagggcccggggacaaaacaagggccggccccatgtgaagcccacgaactacgacaagaacaggctgtgtccctccctaatccaggagtcggctgctaagtgtttcttcggtgatcgctgccgctttctgcacgacgtggggcgctacctggagaccaagccggccgacctgggcccccgctgcgtgctcttcgagaccttcggccggtgcccctacggcgtgacctgccgcttcgctggggcccacctgaggcccgagggacagaacctggtgcaggaggagttggcggcccgcgggacccagcccccgtccatccgcaacggcctggacaaagccctgcagcagcagctgcggaagcgcgaggtccgcttcgagcgagctgagcaggccctgcgccggttcagccagggccccacacccgctgccgctgtccccgagggcacggcagccgagggcgctcccaggcaggaaaactgtggtgcccagcaggtccccgcagggccgggcactagcacccctcccagcagccccgtgcggacctgcgggcccctgacggatgaggacgtggtcaggctgcggccctgtgagaagaagcggctggacatccgtggcaaactttacctggcccccctcaccacgtgtgggaacctgcccttccgacggatctgcaagcgcttcggggcggatgtgacatgtggagagatggccgtctgcaccaacctgctgcagggccagatgtccgagtgggccctactcaaacgccaccagtgtgaggacatctttggcgtccagctggagggcgccttccccgacaccatgaccaagtgtgccgagctgctgagccgcaccgtggaggtggactttgtggacatcaacgtcggctgccccatcgacctcgtgtacaagaagggtgggggctgtgccctcatgaatcgctccaccaagttccagcagatcgtccgtggcatgaaccaggtgctggatgtgccgctgactgtgaagatccgcacaggcgtccaggagcgtgtgaacctggcgcaccgcctgctgcccgagctgcgggactggggcgtggcactcgtcacgctccacggccgctctcgggagcagcgctacaccaagctagccgactggcagtacatcgaggagtgcgtgcaggccgccagccccatgcccctgttcggaaatggggacatcttgtcatttgaggatgccaaccgcgccatgcagactggtgtcaccgggatcatgattgcccgtggcgccctgctcaagccgtggctcttcacggagatcaaggagcagcggcactgggacatctcgtcgtccgagcgcctggacatcctgcgggacttcaccaactacggcctggagcactggggctcggacacgcagggcgtggagaagacccggcgctttctgctcgagtggctgtccttcctgtgccggtacgtgcccgtggggctgctggagcggctcccacagaggatcaacgagcggccgccctactacctgggccgcgactacctggagacgctgatggccagccagaaggcagccgactggatccgcatcagcaatgctccttgtcgtgcattgaatcctctaagtanc

SEQ ID NO: 38211 - DNA, 2396 bp, Homo sapiens
cctccaaaacaccctaacagttaaatttcctcagtccagaagctgattgcagtccagttcgcaattggccaggctctagtttatataggacctgaggctccacccatgtgcaggcaccgcccccgtggcgtcacgagcgagcaatggcgtcattggaacgacatgagcatgcgcacttccccagcacaatcagggaagacacgcgtgacccggaaggtcttcccgccacactccagagcggatgtgaggggcgccgatggcggagggaacggcggaggctcctctagagaatggtggtggtggcgactcgggagccggagctttggaacgaggagtggcgcccattaagcgtcaatacctcaccaccaaggagcagtttcaccaattcctggaagccaaagggcaggagaagacttgccgggaaaccgaggtaggagaccctgctggcaatgagctggctgagcctgaggctaagcggatccgactggaggatggacagacggcggacgggcagacggaggaggcagcagagcccggggagcagctacagactcagaagagggcccggggacaaaacaagggccggccccatgtgaagcccacgaactacgacaagaacaggctgtgtccctccctaatccaggagtcggctgctaagtgtttcttcggtgatcgctgccgctttctgcacgacgtggggcgctacctggagaccaagccggccgacctgggcccccgctgcgtgctcttcgagaccttcggccggtgcccctacggcgtgacctgccgcttcgctggggcccacctgaggcccgagggacagaacctggtgcaggaggagttggcggcccgcgggacccagcccccgtccatccgcaacggcctggacaaagccctgcagcagcagctgcggaagcgcgaggtccgcttcgagcgagctgagcaggccctgcgccggttcagccagggccccacacccgctgccgctgtccccgagggcacggcagccgagggcgctcccaggcaggaaaactgtggtgcccagcaggtccccgcagggccgggcactagcacccctcccagcagccccgtgcggacctgcgggcccctgacggatgaggacgtggtcaggctgcggccctgtgagaagaagcggctggacatccgtggcaaactttacctggcccccctcaccacgtgtgggaacctgcccttccgacggatctgcaagcgcttcggggcggatgtgacatgtggagagatggccgtctgcaccaacctgctgcagggccagatgtccgagtgggccctactcaaacgccaccagtgtgaggacatctttggcgtccagctggagggcgccttccccgacaccatgaccaagtgtgccgagctgctgagccgcaccgtggaggtggactttgtggacatcaacgtcggctgccccatcgacctcgtgtacaagaagggtgggggctgtgccctcatgaatcgctccaccaagttccagcagatcgtccgtggcatgaaccaggtacggccagccacatcctcgcactggctcccaaacaactcccccgggccctgtctcccaccacctcccaccgtctcccaccacctcccaccatctcccaccacctcccaccaccgtcctgtaggtgctggatgtgccgctgactgtgaagatccgcacaggcgtccaggagcgtgtgaacctggcgcaccgcctgctgcccgagctgcgggactggggcgtggcactcgtcacgctccacggccgctctcgggagcagcgctacaccaagctagccgactggcagtacatcgaggagtgcgtgcaggccgccagccccatgcccctgttcggaaatggggacatcttgtcatttgaggatgccaaccgcgccatgcagactggtgtcaccgggatcatgattgcccgtggcgccctgctcaagccgtggctcttcacggagatcaaggagcagcggcactgggacatctcgtcgtccgagcgcctggacatcctgcgggacttcaccaactacggcctggagcactggggctcggacacgcagggcgtggagaagacccggcgctttctgctcgagtggctgtccttcctgtgccggtacgtgcccgtggggctgctggagcggctcccacagaggatcaacgagcggccgccctactacctgggccgcgactacctggagacgctgatggccagccagaaggcagccgactggatccgcatcagcgagatgctccttgggccagtgccccccagcttcgccttcttgccgaagcacaaggccaacgcgtacaagtagcctcaggctttcccaggggcaccctggggcgaggagagtacaataaattttattcttttaaaa

SEQ ID NO: 38212 - DNA, 2499 bp, Homo sapiens
cctccaaaacaccctaacagttaaatttcctcagtccagaagctgattgcagtccagttcgcaattggccaggctctagtttatataggacctgaggctccacccatgtgcaggcaccgcccccgtggcgtcacgagcgagcaatggcgtcattggaacgacatgagcatgcgcacttccccagcacaatcagggaagacacgcgtgacccggaaggtcttcccgccacactccagagcggatgtgaggggcgccgatggcggagggaacggcggaggctcctctagagaatggtggtggtggcgactcgggagccggagctttggaacgaggagtggcgcccattaagcgtcaatacctcaccaccaaggagcagtttcaccaattcctggaagccaaagggcaggagaagacttgccgggaaaccgaggtaggagaccctgctggcaatgagctggctgagcctgaggctaagcggatccgactggaggatggacagacggcggacgggcagacggaggaggcagcagagcccggggagcagctacagactcagaagagggcccggggacaaaacaagggccggccccatgtgaagcccacgaactacgacaagaacaggctgtgtccctccctaatccaggagtcggctgctaagtgtttcttcggtgatcgctgccgctttctgcacgacgtggggcgctacctggagaccaagccggccgacctgggcccccgctgcgtgctcttcgagaccttcggccggtgcccctacggcgtgacctgccgcttcgctggggcccacctgaggcccgagggacagaacctggtgcaggaggagttggcggcccgcgggacccagcccccgtccatccgcaacggcctggacaaagccctgcagcagcagctgcggaagcgcgaggtccgcttcgagcgagctgagcaggccctgcgccggttcagccagggccccacacccgctgccgctgtccccgagggcacggcagccgagggcgctcccaggcaggaaaactgtggtgcccagcaggtccccgcagggccgggcactagcacccctcccagcagccccgtgcggacctgcgggcccctgacggatgaggacgtggtcaggctgcggccctgtgagaagaagcggctggacatccgtggcaaactttacctggcccccctcaccacgtgtgggaacctgcccttccgacggatctgcaagcgcttcggggcggatgtgacatgtggagagatggccgtctgcaccaacctgctgcagggccagatgtccgagtgggccctactcaaacgccaccagtgtgaggacatctttggcgtccagctggagggcgccttccccgacaccatgaccaagtgtgccgagctgctgagccgcaccgtggaggtggactttgtggacatcaacgtcggctgccccatcgacctcgtgtacaagaaggtagcggccctggacgtgtgcctcggtttccccatctgggcagggaggcactgacccagccggcgatgtctcggtggagggtcaggggtttgggctcaagtgtggccctggagtccctgcctttcctgcaggtcggcgtctcctggtgggggcctccgggcagcaggggtgaggggtcttgggtcagcccacgtcctgccctccctccacccgcctgtctcttccagggtgggggctgtgccctcatgaatcgctccaccaagttccagcagatcgtccgtggcatgaaccaggtgctggatgtgccgctgactgtgaagatccgcacaggcgtccaggagcgtgtgaacctggcgcaccgcctgctgcccgagctgcgggactggggcgtggcactcgtcacgctccacggccgctctcgggagcagcgctacaccaagctagccgactggcagtacatcgaggagtgcgtgcaggccgccagccccatgcccctgttcggaaatggggacatcttgtcatttgaggatgccaaccgcgccatgcagactggtgtcaccgggatcatgattgcccgtggcgccctgctcaagccgtggctcttcacggagatcaaggagcagcggcactgggacatctcgtcgtccgagcgcctggacatcctgcgggacttcaccaactacggcctggagcactggggctcggacacgcagggcgtggagaagacccggcgctttctgctcgagtggctgtccttcctgtgccggtacgtgcccgtggggctgctggagcggctcccacagaggatcaacgagcggccgccctactacctgggccgcgactacctggagacgctgatggccagccagaaggcagccgactggatccgcatcagcgagatgctccttgggccagtgccccccagcttcgccttcttgccgaagcacaaggccaacgcgtacaagtagcctcaggctttcccaggggcaccctggggcgaggagagtacaataaattttattcttttaaaa

SEQ ID NO: 38213 - DNA, 2552 bp, Homo sapiens
cctccaaaacaccctaacagttaaatttcctcagtccagaagctgattgcagtccagttcgcaattggccaggctctagtttatataggacctgaggctccacccatgtgcaggcaccgcccccgtggcgtcacgagcgagcaatggcgtcattggaacgacatgagcatgcgcacttccccagcacaatcagggaagacacgcgtgacccggaaggtcttcccgccacactccagagcggatgtgaggggcgccgatggcggagggaacggcggaggctcctctagagaatggtggtggtggcgactcgggagccggagctttggaacgaggagtggcgcccattaagcgtcaatacctcaccaccaaggagcagtttcaccaattcctggaagccaaagggcaggagaagacttgccgggaaaccgaggtaggagaccctgctggcaatgagctggctgagcctgaggctaagcggatccgactggaggatggacagacggcggacgggcagacggaggaggcagcagagcccggggagcagctacagactcagaagagggcccggggacaaaacaagggccggccccatgtgaagcccacgaactacgacaagaacaggctgtgtccctccctaatccaggagtcggctgctaagtgtttcttcggtgatcgctgccgctttctgcacgacgtggggcgctacctggagaccaagccggccgacctgggcccccgctgcgtgctcttcgagaccttcggccggtgcccctacggcgtgacctgccgcttcgctggggcccacctgaggcccgagggacagaacctggtgcaggaggagttggcggcccgcgggacccagcccccgtccatccgcaacggcctggacaaagccctgcagcagcagctgcggaagcgcgaggtccgcttcgagcgagctgagcaggccctgcgccggttcagccagggccccacacccgctgccgctgtccccgagggcacggcagccgagggcgctcccaggcaggaaaactgtggtgcccagcaggtccccgcagggccgggcactagcacccctcccagcagccccgtgcggacctgcgggcccctgacggatgaggacgtggtcaggctgcggccctgtgagaagaagcggctggacatccgtggcaaactttacctggcccccctcaccacgtgtgggaacctgcccttccgacggatctgcaagcgcttcggggcggatgtgacatgtggagagatggccgtctgcaccaacctgctgcagggccagatgtccgagtgggccctactcaaacgccaccagtgtgaggacatctttggcgtccagctggagggcgccttccccgacaccatgaccaagtgtgccgagctgctgagccgcaccgtggaggtggactttgtggacatcaacgtcggctgccccatcgacctcgtgtacaagaagggtgggggctgtgccctcatgaatcgctccaccaagttccagcagatcgtccgtggcatgaaccaggtgctggatgtgccgctgactgtgaagatccgcacaggcgtccaggagcgtgtgaacctggcgcaccgcctgctgcccgagctgcgggactggggcgtggcactcgtcacgcctggctctcttggtctcttcctctctgcgtctcactctctgcctcctaccctgcgtggcggcttctcccccagctccacggccgctctcgggagcagcgctacaccaagctagccgactggcagtacatcgaggagtgcgtgcaggccgccagccccatgcccctgttcggtgggtgttccgggaagccacctccctctcccctaccacccttggtcactcacacctctgggctgttcgccttcccacttgggaccccctcgtaccaccctgatgggagccactgggtcagccaaaactcctgaagggctggtgagcagaactccagggtcccacctgcccatgtctccctgagaccccagcctctgtctcctcaggaaatggggacatcttgtcatttgaggatgccaaccgcgccatgcagactggtgtcaccgggatcatgattgcccgtggcgccctgctcaagccgtggctcttcacggagatcaaggagcagcggcactgggacatctcgtcgtccgagcgcctggacatcctgcgggacttcaccaactacggcctggagcactggggctcggacacgcagggcgtggagaagacccggcgctttctgctcgagtggctgtccttcctgtgccggtacgtgcccgtggggctgctggagcggctcccacagaggatcaacgagcggccgccctactacctgggccgcgactacctggagacgctgatggccagccagaaggcagccgactggatccgcatcagcgagatgctccttgggccagtgccccccagcttcgccttcttgccgaagcacaaggccaacgcgtacaagtagcctcaggctttcccaggggcaccctggggcgaggagagtacaataaattttattcttttaaaa

SEQ ID NO: 38214 - DNA, 2175 bp, Homo sapiens
cctccaaaacaccctaacagttaaatttcctcagtccagaagctgattgcagtccagttcgcaattggccaggctctagtttatataggacctgaggctccacccatgtgcaggcaccgcccccgtggcgtcacgagcgagcaatggcgtcattggaacgacatgagcatgcgcacttccccagcacaatcagggaagacacgcgtgacccggaaggtcttcccgccacactccagagcggatgtgaggggcgccgatggcggagggaacggcggaggctcctctagagaatggtggtggtggcgactcgggagccggagctttggaacgaggagtggcgcccattaagcgtcaatacctcaccaccaaggagcagtttcaccaattcctggaagccaaagggcaggagaagacttgccgggaaaccgaggtaggagaccctgctggcaatgagctggctgagcctgaggctaagcggatccgactggaggatggacagacggcggacgggcagacggaggaggcagcagagcccggggagcagctacagactcagaagagggcccggggacaaaacaagggccggccccatgtgaagcccacgaactacgacaagaacaggctgtgtccctccctaatccaggagtcggctgctaagtgtttcttcggtgatcgctgccgctttctgcacgacgtggggcgctacctggagaccaagccggccgacctgggcccccgctgcgtgctcttcgagaccttcggccggtgcccctacggcgtgacctgccgcttcgctggggcccacctgaggcccgagggacagaacctggtgcaggaggagttggcggcccgcgggacccagcccccgtccatccgcaacggcctggacaaagccctgcagcagcagctgcggaagcgcgaggtccgcttcgagcgagctgagcaggccctgcgccggttcagccagggccccacacccgctgccgctgtccccgagggcacggcagccgagggcgctcccaggcaggaaaactgtggtgcccagcaggtccccgcagggccgggcactagcacccctcccagcagccccgtgcggacctgcgggcccctgacggatgaggacgtggtcaggctgcggccctgtgagaagaagcggctggacatccgtggcaaactttacctggcccccctcaccacgtgtgggaacctgcccttccgacggatctgcaagcgcttcggggcggatgtgacatgtggagagatggccgtctgcaccaacctgctgcagggccagatgtccgagtgggccctactcaaacgccaccagtgtgaggacatctttggcgtccagctggagggcgccttccccgacaccatgaccaagtgtgccgagctgctgagccgcaccgtggaggtggactttgtggacatcaacgtcggctgccccatcgacctcgtgtacaagaagggtgggggctgtgccctcatgaatcgctccaccaagttccagcagatcgtccgtggcatgaaccaggtgctggatgtgccgctgactgtgaagatccgcacaggcgtccaggagcgtgtgaacctggcgcaccgcctgctgcccgagctgcgggactggggcgtggcactcgtcacggaaatggggacatcttgtcatttgaggatgccaaccgcgccatgcagactggtgtcaccgggatcatgattgcccgtggcgccctgctcaagccgtggctcttcacggagatcaaggagcagcggcactgggacatctcgtcgtccgagcgcctggacatcctgcgggacttcaccaactacggcctggagcactggggctcggacacgcagggcgtggagaagacccggcgctttctgctcgagtggctgtccttcctgtgccggtacgtgcccgtggggctgctggagcggctcccacagaggatcaacgagcggccgccctactacctgggccgcgactacctggagacgctgatggccagccagaaggcagccgactggatccgcatcagcgagatgctccttgggccagtgccccccagcttcgccttcttgccgaagcacaaggccaacgcgtacaagtagcctcaggctttcccaggggcaccctggggcgaggagagtacaataaattttattcttttaaaa

SEQ ID NO: 38215 - DNA, 2156 bp, Homo sapiens
cctccaaaacaccctaacagttaaatttcctcagtccagaagctgattgcagtccagttcgcaattggccaggctctagtttatataggacctgaggctccacccatgtgcaggcaccgcccccgtggcgtcacgagcgagcaatggcgtcattggaacgacatgagcatgcgcacttccccagcacaatcagggaagacacgcgtgacccggaaggtcttcccgccacactccagagcggatgtgaggggcgccgatggcggagggaacggcggaggctcctctagagaatggtggtggtggcgactcgggagccggagctttggaacgaggagtggcgcccattaagcgtcaatacctcaccaccaaggagcagtttcaccaattcctggaagccaaagggcaggagaagacttgccgggaaaccgaggtaggagaccctgctggcaatgagctggctgagcctgaggctaagcggatccgactggaggatggacagacggcggacgggcagacggaggaggcagcagagcccggggagcagctacagactcagaagagggcccggggacaaaacaagggccggccccatgtgaagcccacgaactacgacaagaacaggctgtgtccctccctaatccaggagtcggctgctaagtgtttcttcggtgatcgctgccgctttctgcacgacgtggggcgctacctggagaccaagccggccgacctgggcccccgctgcgtgctcttcgagaccttcggccggtgcccctacggcgtgacctgccgcttcgctggggcccacctgaggcccgagggacagaacctggtgcaggaggagttggcggcccgcgggacccagcccccgtccatccgcaacggcctggacaaagccctgcagcagcagctgcggaagcgcgaggtccgcttcgagcgagctgagcaggccctgcgccggttcagccagggccccacacccgctgccgctgtccccgagggcacggcagccgagggcgctcccaggcaggaaaactgtggtgcccagcaggtccccgcagggccgggcactagcacccctcccagcagccccgtgcggacctgcgggcccctgacggatgaggacgtggtcaggctgcggccctgtgagaagaagcggctggacatccgtggcaaactttacctggcccccctcaccacgtgtgggaacctgcccttccgacggatctgcaagcgcttcggggcggatgtgacatgtggagagatggccgtctgcaccaacctgctgcagggccagatgtccgagtgggccctactcaaacgccaccagtgtgaggacatctttggcgtccagctggagggcgccttccccgacaccatgaccaagtgtgccgagctgctgagccgcaccgtggaggtggactttgtggacatcaacgtcggctgccccatcgacctcgtgtacaagaagggtgggggctgtgccctcatgaatcgctccaccaagttccagcagatcgtccgtggcatgaaccaggtgctggatgtgccgctgactgtgaagatccgcacaggcgtccaggagcgtgtgaacctggcgcaccgcctgctgcccgagctgcgggactggggcgtggcactcgtcacgctccacggccgctctcgggagcagcgctacaccaagctagccgactggcagtacatcgaggagtgcgtgcaggccgccagccccatgcccctgttcggtgggtgttccgggaagccacctccctctcccctaccacccttggtcactcacacctctgggctgttcgccttcccacttgggaccccctcgtaccaccctgatgggagccactgggtcagccaaaactcctgaagggctggtgagcagaactccagggtcccacctgcccatgtctccctgagaccccagcctctgtctcctcaggaaatggggacatcttgtcatttgaggatgccaaccgcgccatgcagactggtgtcaccgggatcatgattgcccggtaagtgcccagggatgttagagatccagcttcatgcacagcagcagtgccctgaacccaacacgccgtcacccacccctgttctgtggtgggctgttggtcccaagatgggaggagcagagagcgatgtca

SEQ ID NO: 38216 - DNA, 1189 bp, Homo sapiens
cctccaaaacaccctaacagttaaatttcctcagtccagaagctgattgcagtccagttcgcaattggccaggctctagtttatataggacctgaggctccacccatgtgcaggcaccgcccccgtggcgtcacgagcgagcaatggcgtcattggaacgacatgagcatgcgcacttccccagcacaatcagggaagacacgcgtgacccggaaggtcttcccgccacactccagagcggatgtgaggggcgccgatggcggagggaacggcggaggctcctctagagaatggtggtggtggcgactcgggagccggagctttggaacgaggagtggcgcccattaagcgtcaatacctcaccaccaaggagcagtttcaccaattcctggaagccaaagggcaggagaagacttgccgggaaaccgaggtaggagaccctgctggcaatgagctggctgagcctgaggctaagcggatccgactggaggatggacagacggcggacgggcagacggaggaggcagcagagcccggggagcagctacagactcagaagagggcccggggacaaaacaagggccggccccatgtgaagcccacgaactacgacaagaacaggctgtgtccctccctaatccaggagtcggctgctaagtgtttcttcggtgatcgctgccgctttctgcacgacgtggggcgctacctggagaccaagccggccgacctgggcccccgctgcgtgctcttcgagaccttcggccggtgcccctacggcgtgacctgccgcttcgctggggcccacctgaggcccgagggacagaacctggtgcaggaggagttggcggcccgcgggacccagcccccgtccatccgcaacggcctggacaaagccctgcagcagcagctgcggaagcgcgaggtccgcttcgagcgagctgagcaggccctgcgccggttcagccagggccccacacccgctgccgctgtccccgagggcacggcagccgagggcgctcccaggcaggaaaactgtggtgcccagcaggtccccgcagggccgggcactagcaccttccagagcccgggggaactggggcctggaggtgagactgccagctgcggcgtgaaaaaggggggatcgtggaatctggcctacaggggacggctcgagagaggacggggggag

SEQ ID NO: 38217 - DNA, 1174 bp, Homo sapiens
cctccaaaacaccctaacagttaaatttcctcagtccagaagctgattgcagtccagttcgcaattggccaggctctagtttatataggacctgaggctccacccatgtgcaggcaccgcccccgtggcgtcacgagcgagcaatggcgtcattggaacgacatgagcatgcgcacttccccagcacaatcagggaagacacgcgtgacccggaaggtcttcccgccacactccagagcggatgtgaggggcgccgatggcggagggaacggcggaggctcctctagagaatggtggtggtggcgactcgggagccggagctttggaacgaggagtggcgcccattaagcgtcaatacctcaccaccaaggagcagtttcaccaattcctggaagccaaagggcaggagaagacttgccgggaaaccgaggtaggagaccctgctggcaatgagctggctgagcctgaggctaagcggatccgactggaggatggacagacggcggacgggcagacggaggaggcagcagagcccggggagcagctacagactcagaagagggcccggggacaaaacaagggccggccccatgtgaagcccacgaactacgacaagaacaggctgtgtccctccctaatccaggagtcggctgctaagtgtttcttcggtgatcgctgccgctttctgcacgacgtggggcgctacctggagaccaagccggccgacctgggcccccgctgcgtgctcttcgagaccttcggccggtgcccctacggcgtgacctgccgcttcgctggggcccacctgaggcccgagggacagaacctgctggagcactggggctcggacacgcagggcgtggagaagacccggcgctttctgctcgagtggctgtccttcctgtgccggtacgtgcccgtggggctgctggagcggctcccacagaggatcaacgagcggccgccctactacctgggccgcgactacctggagacgctgatggccagccagaaggcagccgactggatccgcatcagcgagatgctccttgggccagtgccccccagcttcgccttcttgccgaagcacaaggccaacgcgtacaagtagcctcaggctttcccaggggcaccctggggcgaggagagtacaataaattttattcttttaaaa

SEQ ID NO: 38218 - DNA, 684 bp, Homo sapiens
gccgagatcttaccactgcaccccagcctgggcgacagagccagactccgtctcagaaaaaacaaaagaaagtcctgtgctttgaaggttgtgtgcatgcagctgggaggcttactaggcttgtaggttttgtggtctgggctccggctcaggccaggccatggaagcagaggccacacgatcccaggcaggctggtggctgggcccactgatcgtcacccgtcccacagtggcgccctgctcaagccgtggctcttcacggagatcaaggagcagcggcactgggacatctcgtcgtccgagcgcctggacatcctgcgggacttcaccaactacggcctggagcactggggctcggacacgcagggcgtggagaagacccggcgctttctgctcgagtggctgtccttcctgtgccggtacgtgcccgtggggctgctggagcggctcccacagaggatcaacgagcggccgccctactacctgggccgcgactacctggagacgctgatggccagccagaaggcagccgactggatccgcatcagcgagatgctccttgggccagtgccccccagcttcgccttcttgccgaagcacaaggccaacgcgtacaagtagcctcaggctttcccaggggcaccctggggcgaggagagtacaataaattttattcttttaaaa

SEQ ID NO: 38219 - DNA, 518 bp, Homo sapiens
ctactacctgggccgcgactacctggagacgctgatggccagccagaaggcagccgactggatccgcatcaggtgcctgggtgggctggagttggggagctgcagtcgggggcccggggtcacggagggtactttgcaggtcctgggcctgacctcgctttccacctgctctcccacagcgagatgctccttgggccagtgccccccagcttcgccttcttgccgaagcacaaggccaacgcgtacaagtagcctcaggctttcccaggggcaccctggggcgaggagagtacaataaattttattcttttaaaatccaggcctttctgtgaccctgaagcagcccctcctcggcccccaccttccccaaacctcttagctgcctccatgggccctgccccaagctgggtgctgctggtgcccagagaggccttgacccccaagaaggtagcgggttgaggacccggggggcctcagcctgtgtgggtgtggatcagggcagcctgcctggaggaggc

SEQ ID NO: 38220 - DNA, 2272 bp, Homo sapiens
cctccaaaacaccctaacagttaaatttcctcagtccagaagctgattgcagtccagttcgcaattggccaggctctagtttatataggacctgaggctccacccatgtgcaggcaccgcccccgtggcgtcacgagcgagcaatggcgtcattggaacgacatgagcatgcgcacttccccagcacaatcagggaagacacgcgtgacccggaaggtcttcccgccacactccagagcggatgtgaggggcgccgatggcggagggaacggcggaggctcctctagagaatggtggtggtggcgactcgggagccggagctttggaacgaggagtggcgcccattaagcgtcaatacctcaccaccaaggagcagtttcaccaattcctggaagccaaagggcaggagaagacttgccgggaaaccgaggtaggagaccctgctggcaatgagctggctgagcctgaggctaagcggatccgactggaggatggacagacggcggacgggcagacggaggaggcagcagagcccggggagcagctacagactcagaagagggcccggggacaaaacaagggccggccccatgtgaagcccacgaactacgacaagaacaggctgtgtccctccctaatccaggagtcggctgctaagtgtttcttcggtgatcgctgccgctttctgcacgacgtggggcgctacctggagaccaagccggccgacctgggcccccgctgcgtgctcttcgagaccttcggccggtgcccctacggcgtgacctgccgcttcgctggggcccacctgaggcccgagggacagaacctggtgcaggaggagttggcggcccgcgggacccagcccccgtccatccgcaacggcctggacaaagccctgcagcagcagctgcggaagcgcgaggtccgcttcgagcgagctgagcaggccctgcgccggttcagccagggccccacacccgctgccgctgtccccgagggcacggcagccgagggcgctcccaggcaggaaaactgtggtgcccagcaggtccccgcagggccgggcactagcacccctcccagcagccccgtgcggacctgcgggcccctgacggatgaggacgtggtcaggctgcggccctgtgagaagaagcggctggacatccgtggcaaactttacctggcccccctcaccacgtgtgggaacctgcccttccgacggatctgcaagcgcttcggggcggatgtgacatgtggagagatggccgtctgcaccaacctgctgcagggccagatgtccgagtgggccctactcaaacgccaccagtgtgaggacatctttggcgtccagctggagggcgccttccccgacaccatgaccaagtgtgccgagctgctgagccgcaccgtggaggtggactttgtggacatcaacgtcggctgccccatcgacctcgtgtacaagaagggtgggggctgtgccctcatgaatcgctccaccaagttccagcagatcgtccgtggcatgaaccaggtgctggatgtgccgctgactgtgaagatccgcacaggcgtccaggagcgtgtgaacctggcgcaccgcctgctgcccgagctgcgggactggggcgtggcactcgtcacgctccacggccgctctcgggagcagcgctacaccaagctagccgactggcagtacatcgaggagtgcgtgcaggccgccagccccatgcccctgttcggaaatggggacatcttgtcatttgaggatgccaaccgcgccatgcagactggtgtcaccgggatcatgattgcccgtggcgccctgctcaagccgtggctcttcacggagatcaaggagcagcggcactgggacatctcgtcgtccgagcgcctggacatcctgcgggacttcaccaactacggcctggagcactggggctcggacacgcagggcgtggagaagacccggcgctttctgctcgagtggctgtccttcctgtgccggtacgtgcccgtggggctgctggagcggctcccacagaggatcaacgagcggccgccctactacctgggccgcgactacctggagacgctgatggccagccagaaggcagccgactggatccgcatcagcgagatgctccttgggccagtgccccccagcttcgccttcttgccgaagcacaaggccaacgcgtacaagtagcctcaggctttcccaggggcaccctggggcgaggagagtacaataaattttattcttttaaaa

SEQ ID NO: 38221 - DNA, 2590 bp, Homo sapiens
cctccaaaacaccctaacagttaaatttcctcagtccagaagctgattgcagtccagttcgcaattggccaggctctagtttatataggacctgaggctccacccatgtgcaggcaccgcccccgtggcgtcacgagcgagcaatggcgtcattggaacgacatgagcatgcgcacttccccagcacaatcagggaagacacgcgtgacccggaaggtcttcccgccacactccagagcggatgtgaggggcgccgatggcggagggaacggcggaggctcctctagagaatggtggtggtggcgactcgggagccggagctttggaacgaggagtggcgcccattaagcgtcaatacctcaccaccaaggagcagtttcaccaattcctggaagccaaagggcaggagaagacttgccgggaaaccgaggtaggagaccctgctggcaatgagctggctgagcctgaggctaagcggatccgactggaggatggacagacggcggacgggcagacggaggaggcagcagagcccggggagcagctacagactcagaagagggcccggggacaaaacaagggccggccccatgtgaagcccacgaactacgacaagaacaggctgtgtccctccctaatccaggagtcggctgctaagtgtttcttcggtgatcgctgccgctttctgcacgacgtggggcgctacctggagaccaagccggccgacctgggcccccgctgcgtgctcttcgagaccttcggccggtgcccctacggcgtgacctgccgcttcgctggggcccacctgaggcccgagggacagaacctggtgcaggaggagttggcggcccgcgggacccagcccccgtccatccgcaacggcctggacaaagccctgcagcagcagctgcggaagcgcgaggtccgcttcgagcgagctgagcaggccctgcgccggttcagccagggccccacacccgctgccgctgtccccgagggcacggcagccgagggcgctcccaggcaggaaaactgtggtgcccagcaggtccccgcagggccgggcactagcacccctcccagcagccccgtgcggacctgcgggcccctgacggatgaggacgtggtcaggctgcggccctgtgagaagaagcggctggacatccgtggcaaactttacctggcccccctcaccacgtgtgggaacctgcccttccgacggatctgcaagcgcttcggggcggatgtgacatgtggagagatggccgtctgcaccaacctgctgcagggccagatgtccgagtgggccctactcaaacgccaccagtgtgaggacatctttggcgtccagctggagggcgccttccccgacaccatgaccaagtgtgccgagctgctgagccgcaccgtggaggtggactttgtggacatcaacgtcggctgccccatcgacctcgtgtacaagaagggtgggggctgtgccctcatgaatcgctccaccaagttccagcagatcgtccgtggcatgaaccaggtgctggatgtgccgctgactgtgaagatccgcacaggcgtccaggagcgtgtgaacctggcgcaccgcctgctgcccgagctgcgggactggggcgtggcactcgtcacgctccacggccgctctcgggagcagcgctacaccaagctagccgactggcagtacatcgaggagtgcgtgcaggccgccagccccatgcccctgttcggaaatggggacatcttgtcatttgaggatgccaaccgcgccatgcagactggtgtcaccgggatcatgattgcccgtggcgccctgctcaagccgtggctcttcacggagatcaaggagcagcggcactgggacatctcgtcgtccgagcgcctggacatcctgcgggacttcaccaactacggcctggagcactggggctcggacacgcagggcgtggagaagacccggcgctttctgctcgagtggctgtccttcctgtgccggtacgtgcccgtggggctgctggagcggctcccacagaggatcaacgagcggccgccctactacctgggccgcgactacctggagacgctgatggccagccagaaggcagccgactggatccgcatcagcgagatgctccttgggccagtgccccccagcttcgccttcttgccgaagcacaaggccaacgcgtacaagtagcctcaggctttcccaggggcaccctggggcgaggagagtacaataaattttattcttttaaaaaaaaaaaaaaaaaaaactcgagactagttcctcgtgccgaattcggcacgagcttggagcttccacaaacttaaaaccatgaaacatctattattgctactattgtgtgtttttctagttaagtcccaaggtgtcaacgacaatgaggagggtttcttcagtgcccgtggtcatcgaccccttgacaagaagagagaagaggctcccagcctgaggccttgcccaccggccatcagtggaagtggctatcgggctcgttcagccaaagcagctgccacttcaaaagaaagtagaaggtgtctacaagatgcaagtggt

SEQ ID NO: 38222 - DNA, 2178 bp, Homo sapiens
  misc_feature (2138)..(2138): n is a, c, g, or t
cctccaaaacaccctaacagttaaatttcctcagtccagaagctgattgcagtccagttcgcaattggccaggctctagtttatataggacctgaggctccacccatgtgcaggcaccgcccccgtggcgtcacgagcgagcaatggcgtcattggaacgacatgagcatgcgcacttccccagcacaatcagggaagacacgcgtgacccggaaggtcttcccgccacactccagagcggatgtgaggggcgccgatggcggagggaacggcggaggctcctctagagaatggtggtggtggcgactcgggagccggagctttggaacgaggagtggcgcccattaagcgtcaatacctcaccaccaaggagcagtttcaccaattcctggaagccaaagggcaggagaagacttgccgggaaaccgaggtaggagaccctgctggcaatgagctggctgagcctgaggctaagcggatccgactggaggatggacagacggcggacgggcagacggaggaggcagcagagcccggggagcagctacagactcagaagagggcccggggacaaaacaagggccggccccatgtgaagcccacgaactacgacaagaacaggctgtgtccctccctaatccaggagtcggctgctaagtgtttcttcggtgatcgctgccgctttctgcacgacgtggggcgctacctggagaccaagccggccgacctgggcccccgctgcgtgctcttcgagaccttcggccggtgcccctacggcgtgacctgccgcttcgctggggcccacctgaggcccgagggacagaacctggtgcaggaggagttggcggcccgcgggacccagcccccgtccatccgcaacggcctggacaaagccctgcagcagcagctgcggaagcgcgaggtccgcttcgagcgagctgagcaggccctgcgccggttcagccagggccccacacccgctgccgctgtccccgagggcacggcagccgagggcgctcccaggcaggaaaactgtggtgcccagcaggtccccgcagggccgggcactagcacccctcccagcagccccgtgcggacctgcgggcccctgacggatgaggacgtggtcaggctgcggccctgtgagaagaagcggctggacatccgtggcaaactttacctggcccccctcaccacgtgtgggaacctgcccttccgacggatctgcaagcgcttcggggcggatgtgacatgtggagagatggccgtctgcaccaacctgctgcagggccagatgtccgagtgggccctactcaaacgccaccagtgtgaggacatctttggcgtccagctggagggcgccttccccgacaccatgaccaagtgtgccgagctgctgagccgcaccgtggaggtggactttgtggacatcaacgtcggctgccccatcgacctcgtgtacaagaagggtgggggctgtgccctcatgaatcgctccaccaagttccagcagatcgtccgtggcatgaaccaggtgctggatgtgccgctgactgtgaagatccgcacaggcgtccaggagcgtgtgaacctggcgcaccgcctgctgcccgagctgcgggactggggcgtggcactcgtcacgctccacggccgctctcgggagcagcgctacaccaagctagccgactggcagtacatcgaggagtgcgtgcaggccgccagccccatgcccctgttcggaaatggggacatcttgtcatttgaggatgccaaccgcgccatgcagactggtgtcaccgggatcatgattgcccgtggcgccctgctcaagccgtggctcttcacggagatcaaggagcagcggcactgggacatctcgtcgtccgagcgcctggacatcctgcgggacttcaccaactacggcctggagcactggggctcggacacgcagggcgtggagaagacccggcgctttctgctcgagtggctgtccttcctgtgccggtacgtgcccgtggggctgctggagcggctcccacagaggatcaacgagcggccgccctactacctgggccgcgactacctggagacgctgatggccagccagaaggcagccgactggatccgcatcagcnaatgctccttgtcgtgcgattgggatactctaggtcaccc

SEQ ID NO: 38223 - DNA, 2487 bp, Homo sapiens
cctccaaaacaccctaacagttaaatttcctcagtccagaagctgattgcagtccagttcgcaattggccaggctctagtttatataggacctgaggctccacccatgtgcaggcaccgcccccgtggcgtcacgagcgagcaatggcgtcattggaacgacatgagcatgcgcacttccccagcacaatcagggaagacacgcgtgacccggaaggtcttcccgccacactccagagcggatgtgaggggcgccgatggcggagggaacggcggaggctcctctagagaatggtggtggtggcgactcgggagccggagctttggaacgaggagtggcgcccattaagcgtcaatacctcaccaccaaggagcagtttcaccaattcctggaagccaaagggcaggagaagacttgccgggaaaccgaggtaggagaccctgctggcaatgagctggctgagcctgaggctaagcggatccgactggaggatggacagacggcggacgggcagacggaggaggcagcagagcccggggagcagctacagactcagaagagggcccggggacaaaacaagggccggccccatgtgaagcccacgaactacgacaagaacaggctgtgtccctccctaatccaggagtcggctgctaagtgtttcttcggtgatcgctgccgctttctgcacgacgtggggcgctacctggagaccaagccggccgacctgggcccccgctgcgtgctcttcgagaccttcggccggtgcccctacggcgtgacctgccgcttcgctggggcccacctgaggcccgagggacagaacctggtgcaggaggagttggcggcccgcgggacccagcccccgtccatccgcaacggcctggacaaagccctgcagcagcagctgcggaagcgcgaggtccgcttcgagcgagctgagcaggccctgcgccggttcagccagggccccacacccgctgccgctgtccccgagggcacggcagccgagggcgctcccaggcaggaaaactgtggtgcccagcaggtccccgcagggccgggcactagcacccctcccagcagccccgtgcggacctgcgggcccctgacggatgaggacgtggtcaggctgcggccctgtgagaagaagcggctggacatccgtggcaaactttacctggcccccctcaccacgtgtgggaacctgcccttccgacggatctgcaagcgcttcggggcggatgtgacatgtggagagatggccgtctgcaccaacctgctgcagggccagatgtccgagtgggccctactcaaacgccaccagtgtgaggacatctttggcgtccagctggagggcgccttccccgacaccatgaccaagtgtgccgagctgctgagccgcaccgtggaggtggactttgtggacatcaacgtcggctgccccatcgacctcgtgtacaagaagggtgggggctgtgccctcatgaatcgctccaccaagttccagcagatcgtccgtggcatgaaccaggtgctggatgtgccgctgactgtgaagatccgcacaggcgtccaggagcgtgtgaacctggcgcaccgcctgctgcccgagctgcgggactggggcgtggcactcgtcacggtgggtcttgggacgcctcgggcattggggcctcgcggtcgaccccgcgtcccttcctaatggctcctctcctcccatccctccctcttcacctccacacctccctctgtctccgcctgtgtctctctctgtctctctcagcctggctctcttggtctcttcctctctgcgtctcactctctgcctcctaccctgcgtggcggcttctcccccagctccacggccgctctcgggagcagcgctacaccaagctagccgactggcagtacatcgaggagtgcgtgcaggccgccagccccatgcccctgttcggaaatggggacatcttgtcatttgaggatgccaaccgcgccatgcagactggtgtcaccgggatcatgattgcccgtggcgccctgctcaagccgtggctcttcacggagatcaaggagcagcggcactgggacatctcgtcgtccgagcgcctggacatcctgcgggacttcaccaactacggcctggagcactggggctcggacacgcagggcgtggagaagacccggcgctttctgctcgagtggctgtccttcctgtgccggtacgtgcccgtggggctgctggagcggctcccacagaggatcaacgagcggccgccctactacctgggccgcgactacctggagacgctgatggccagccagaaggcagccgactggatccgcatcagcgagatgctccttgggccagtgccccccagcttcgccttcttgccgaagcacaaggccaacgcgtacaagtagcctcaggctttcccaggggcaccctggggcgaggagagtacaataaattttattcttttaaaa

SEQ ID NO: 38224 - DNA, 2346 bp, Homo sapiens
cctccaaaacaccctaacagttaaatttcctcagtccagaagctgattgcagtccagttcgcaattggccaggctctagtttatataggacctgaggctccacccatgtgcaggcaccgcccccgtggcgtcacgagcgagcaatggcgtcattggaacgacatgagcatgcgcacttccccagcacaatcagggaagacacgcgtgacccggaaggtcttcccgccacactccagagcggatgtgaggggcgccgatggcggagggaacggcggaggctcctctagagaatggtggtggtggcgactcgggagccggagctttggaacgaggagtggcgcccattaagcgtcaatacctcaccaccaaggagcagtttcaccaattcctggaagccaaagggcaggagaagacttgccgggaaaccgaggtaggagaccctgctggcaatgagctggctgagcctgaggctaagcggatccgactggaggatggacagacggcggacgggcagacggaggaggcagcagagcccggggagcagctacagactcagaagagggcccggggacaaaacaagggccggccccatgtgaagcccacgaactacgacaagaacaggctgtgtccctccctaatccaggagtcggctgctaagtgtttcttcggtgatcgctgccgctttctgcacgacgtggggcgctacctggagaccaagccggccgacctgggcccccgctgcgtgctcttcgagaccttcggccggtgcccctacggcgtgacctgccgcttcgctggggcccacctgaggcccgagggacagaacctggtgcaggaggagttggcggcccgcgggacccagcccccgtccatccgcaacggcctggacaaagccctgcagcagcagctgcggaagcgcgaggtccgcttcgagcgagctgagcaggccctgcgccggttcagccagggccccacacccgctgccgctgtccccgagggcacggcagccgagggcgctcccaggcaggaaaactgtggtgcccagcaggtccccgcagggccgggcactagcacccctcccagcagccccgtgcggacctgcgggcccctgacggatgaggacgtggtcaggctgcggccctgtgagaagaagcggctggacatccgtggcaaactttacctggcccccctcaccacgtgtgggaacctgcccttccgacggatctgcaagcgcttcggggcggatgtgacatgtggagagatggccgtctgcaccaacctgctgcagggccagatgtccgagtgggccctactcaaacgccaccagtgtgaggacatctttggcgtccagctggagggcgccttccccgacaccatgaccaagtgtgccgagctgctgagccgcaccgtggaggtggactttgtggacatcaacgtcggctgccccatcgacctcgtgtacaagaagggtgggggctgtgccctcatgaatcgctccaccaagttccagcagatcgtccgtggcatgaaccaggtgctggatgtgccgctgactgtgaagatccgcacaggcgtccaggagcgtgtgaacctggcgcaccgcctgctgcccgagctgcgggactggggcgtggcactcgtcacgcctggctctcttggtctcttcctctctgcgtctcactctctgcctcctaccctgcgtggcggcttctcccccagctccacggccgctctcgggagcagcgctacaccaagctagccgactggcagtacatcgaggagtgcgtgcaggccgccagccccatgcccctgttcggaaatggggacatcttgtcatttgaggatgccaaccgcgccatgcagactggtgtcaccgggatcatgattgcccgtggcgccctgctcaagccgtggctcttcacggagatcaaggagcagcggcactgggacatctcgtcgtccgagcgcctggacatcctgcgggacttcaccaactacggcctggagcactggggctcggacacgcagggcgtggagaagacccggcgctttctgctcgagtggctgtccttcctgtgccggtacgtgcccgtggggctgctggagcggctcccacagaggatcaacgagcggccgccctactacctgggccgcgactacctggagacgctgatggccagccagaaggcagccgactggatccgcatcagcgagatgctccttgggccagtgccccccagcttcgccttcttgccgaagcacaaggccaacgcgtacaagtagcctcaggctttcccaggggcaccctggggcgaggagagtacaataaattttattcttttaaaa

SEQ ID NO: 38225 - DNA, 2623 bp, Homo sapiens
cctccaaaacaccctaacagttaaatttcctcagtccagaagctgattgcagtccagttcgcaattggccaggctctagtttatataggacctgaggctccacccatgtgcaggcaccgcccccgtggcgtcacgagcgagcaatggcgtcattggaacgacatgagcatgcgcacttccccagcacaatcagggaagacacgcgtgacccggaaggtcttcccgccacactccagagcggatgtgaggggcgccgatggcggagggaacggcggaggctcctctagagaatggtggtggtggcgactcgggagccggagctttggaacgaggagtggcgcccattaagcgtcaatacctcaccaccaaggagcagtttcaccaattcctggaagccaaagggcaggagaagacttgccgggaaaccgaggtaggagaccctgctggcaatgagctggctgagcctgaggctaagcggatccgactggaggatggacagacggcggacgggcagacggaggaggcagcagagcccggggagcagctacagactcagaagagggcccggggacaaaacaagggccggccccatgtgaagcccacgaactacgacaagaacaggctgtgtccctccctaatccaggagtcggctgctaagtgtttcttcggtgatcgctgccgctttctgcacgacgtggggcgctacctggagaccaagccggccgacctgggcccccgctgcgtgctcttcgagaccttcggccggtgcccctacggcgtgacctgccgcttcgctggggcccacctgaggcccgagggacagaacctggtgcaggaggagttggcggcccgcgggacccagcccccgtccatccgcaacggcctggacaaagccctgcagcagcagctgcggaagcgcgaggtccgcttcgagcgagctgagcaggccctgcgccggttcagccagggccccacacccgctgccgctgtccccgagggcacggcagccgagggcgctcccaggcaggaaaactgtggtgcccagcaggtccccgcagggccgggcactagcacccctcccagcagccccgtgcggacctgcgggcccctgacggatgaggacgtggtcaggctgcggccctgtgagaagaagcggctggacatccgtggcaaactttacctggcccccctcaccacgtgtgggaacctgcccttccgacggatctgcaagcgcttcggggcggatgtgacatgtggagagatggccgtctgcaccaacctgctgcagggccagatgtccgagtgggccctactcaaacgccaccagtgtgaggacatctttggcgtccagctggagggcgccttccccgacaccatgaccaagtgtgccgagctgctgagccgcaccgtggaggtggactttgtggacatcaacgtcggctgccccatcgacctcgtgtacaagaaggtagcggccctggacgtgtgcctcggtttccccatctgggcagggaggcactgacccagccggcgatgtctcggtggagggtcaggggtttgggctcaagtgtggccctggagtccctgcctttcctgcaggtcggcgtctcctggtgggggcctccgggcagcaggggtgaggggtcttgggtcagcccacgtcctgccctccctccacccgcctgtctcttccagggtgggggctgtgccctcatgaatcgctccaccaagttccagcagatcgtccgtggcatgaaccaggtacggccagccacatcctcgcactggctcccaaacaactcccccgggccctgtctcccaccacctcccaccgtctcccaccacctcccaccatctcccaccacctcccaccaccgtcctgtaggtgctggatgtgccgctgactgtgaagatccgcacaggcgtccaggagcgtgtgaacctggcgcaccgcctgctgcccgagctgcgggactggggcgtggcactcgtcacgctccacggccgctctcgggagcagcgctacaccaagctagccgactggcagtacatcgaggagtgcgtgcaggccgccagccccatgcccctgttcggaaatggggacatcttgtcatttgaggatgccaaccgcgccatgcagactggtgtcaccgggatcatgattgcccgtggcgccctgctcaagccgtggctcttcacggagatcaaggagcagcggcactgggacatctcgtcgtccgagcgcctggacatcctgcgggacttcaccaactacggcctggagcactggggctcggacacgcagggcgtggagaagacccggcgctttctgctcgagtggctgtccttcctgtgccggtacgtgcccgtggggctgctggagcggctcccacagaggatcaacgagcggccgccctactacctgggccgcgactacctggagacgctgatggccagccagaaggcagccgactggatccgcatcagcgagatgctccttgggccagtgccccccagcttcgccttcttgccgaagcacaaggccaacgcgtacaagtagcctcaggctttcccaggggcaccctggggcgaggagagtacaataaattttattcttttaaaa

SEQ ID NO: 38226 - DNA, 2054 bp, Homo sapiens
ggctgagggcgagaagccaccggctcttcattccgggccgttcttccgcctgcagggtggtcagcggaggtacctgagatcgtgcacgttggggcctgtcacatgcgcgaaggacaccacgtgcatgctagggcagatacctcaccaccaaggagcagtttcaccaattcctggaagccaaagggcaggagaagacttgccgggaaaccgaggtaggagaccctgctggcaatgagctggctgagcctgaggctaagcggatccgactggaggatggacagacggcggacgggcagacggaggaggcagcagagcccggggagcagctacagactcagaagagggcccggggacaaaacaagggccggccccatgtgaagcccacgaactacgacaagaacaggctgtgtccctccctaatccaggagtcggctgctaagtgtttcttcggtgatcgctgccgctttctgcacgacgtggggcgctacctggagaccaagccggccgacctgggcccccgctgcgtgctcttcgagaccttcggccggtgcccctacggcgtgacctgccgcttcgctggggcccacctgaggcccgagggacagaacctggtgcaggaggagttggcggcccgcgggacccagcccccgtccatccgcaacggcctggacaaagccctgcagcagcagctgcggaagcgcgaggtccgcttcgagcgagctgagcaggccctgcgccggttcagccagggccccacacccgctgccgctgtccccgagggcacggcagccgagggcgctcccaggcaggaaaactgtggtgcccagcaggtccccgcagggccgggcactagcacccctcccagcagccccgtgcggacctgcgggcccctgacggatgaggacgtggtcaggctgcggccctgtgagaagaagcggctggacatccgtggcaaactttacctggcccccctcaccacgtgtgggaacctgcccttccgacggatctgcaagcgcttcggggcggatgtgacatgtggagagatggccgtctgcaccaacctgctgcagggccagatgtccgagtgggccctactcaaacgccaccagtgtgaggacatctttggcgtccagctggagggcgccttccccgacaccatgaccaagtgtgccgagctgctgagccgcaccgtggaggtggactttgtggacatcaacgtcggctgccccatcgacctcgtgtacaagaagggtgggggctgtgccctcatgaatcgctccaccaagttccagcagatcgtccgtggcatgaaccaggtgctggatgtgccgctgactgtgaagatccgcacaggcgtccaggagcgtgtgaacctggcgcaccgcctgctgcccgagctgcgggactggggcgtggcactcgtcacgctccacggccgctctcgggagcagcgctacaccaagctagccgactggcagtacatcgaggagtgcgtgcaggccgccagccccatgcccctgttcggaaatggggacatcttgtcatttgaggatgccaaccgcgccatgcagactggtgtcaccgggatcatgattgcccgtggcgccctgctcaagccgtggctcttcacggagatcaaggagcagcggcactgggacatctcgtcgtccgagcgcctggacatcctgcgggacttcaccaactacggcctggagcactggggctcggacacgcagggcgtggagaagacccggcgctttctgctcgagtggctgtccttcctgtgccggtacgtgcccgtggggctgctggagcggctcccacagaggatcaacgagcggccgccctactacctgggccgcgactacctggagacgctgatggccagccagaaggcagccgactggatccgcatcagcgagatgctccttgggccagtgccccccagcttcgccttcttgccgaagcacaaggccaacgcgtacaagtagcctcaggctttcccaggggcaccctggggcgaggagagtacaataaattttattcttttaaaa

SEQ ID NO: 38227 - DNA, 1028 bp, Homo sapiens
  misc_feature (11)..(11): n is a, c, g, or t
  misc_feature (40)..(40): n is a, c, g, or t
  misc_feature (47)..(47): n is a, c, g, or t
gggaaagaaanagaacttaggctaggtcgaggctggtgtnaatcggncgaatgtccgagtgggccctactcaaacgccaccagtgtgaggacatctttggcgtccagctggagggcgccttccccgacaccatgaccaagtgtgccgagctgctgagccgcaccgtggaggtggactttgtggacatcaacgtcggctgccccatcgacctcgtgtacaagaagggtgggggctgtgccctcatgaatcgctccaccaagttccagcagatcgtccgtggcatgaaccaggtgctggatgtgccgctgactgtgaagatccgcacaggcgtccaggagcgtgtgaacctggcgcaccgcctgctgcccgagctgcgggactggggcgtggcactcgtcacgctccacggccgctctcgggagcagcgctacaccaagctagccgactggcagtacatcgaggagtgcgtgcaggccgccagccccatgcccctgttcggaaatggggacatcttgtcatttgaggatgccaaccgcgccatgcagactggtgtcaccgggatcatgattgcccgtggcgccctgctcaagccgtggctcttcacggagatcaaggagcagcggcactgggacatctcgtcgtccgagcgcctggacatcctgcgggacttcaccaactacggcctggagcactggggctcggacacgcagggcgtggagaagacccggcgctttctgctcgagtggctgtccttcctgtgccggtacgtgcccgtggggctgctggagcggctcccacagaggatcaacgagcggccgccctactacctgggccgcgactacctggagacgctgatggccagccagaaggcagccgactggatccgcatcagcgagatgctccttgggccagtgccccccagcttcgccttcttgccgaagcacaaggccaacgcgtacaagtagcctcaggctttcccaggggcaccctggggcgaggagagtacaataaattttattcttttaaaa

SEQ ID NO: 38228 - DNA, 1379 bp, Homo sapiens
cctccaaaacaccctaacagttaaatttcctcagtccagaagctgattgcagtccagttcgcaattggccaggctctagtttatataggacctgaggctccacccatgtgcaggcaccgcccccgtggcgtcacgagcgagcaatggcgtcattggaacgacatgagcatgcgcacttccccagcacaatcagggaagacacgcgtgacccggaaggtcttcccgccacactccagagcggatgtgaggggcgccgatggcggagggaacggcggaggctcctctagagaatggtggtggtggcgactcgggagccggagctttggaacgaggagtggcgcccattaagcgtcaatacctcaccaccaaggagcagtttcaccaattcctggaagccaaagggcaggagaagacttgccgggaaaccgaggtaggagaccctgctggcaatgagctggctgagcctgaggctaagcggatccgactggaggatggacagacggcggacgggcagacggaggaggcagcagagcccggggagcagctacagactcagaagagggcccggggacaaaacaagggccggccccatgtgaagcccacgaactacgacaagaacaggctgtgtccctccctaatccaggagtcggctgctaagtgtttcttcggtgatcgctgccgctttctgcacgacgtggggcgctacctggagaccaagccggccgacctgggcccccgctgcgtgctcttcgagaccttcggccggtgcccctacggcgtgacctgccgcttcgctggggcccacctgaggcccgagggacagaacctgcccagcctctgtctcctcaggaaatggggacatcttgtcatttgaggatgccaaccgcgccatgcagactggtgtcaccgggatcatgattgcccgtggcgccctgctcaagccgtggctcttcacggagatcaaggagcagcggcactgggacatctcgtcgtccgagcgcctggacatcctgcgggacttcaccaactacggcctggagcactggggctcggacacgcagggcgtggagaagacccggcgctttctgctcgagtggctgtccttcctgtgccggtacgtgcccgtggggctgctggagcggctcccacagaggatcaacgagcggccgccctactacctgggccgcgactacctggagacgctgatggccagccagaaggcagccgactggatccgcatcagcgagatgctccttgggccagtgccccccagcttcgccttcttgccgaagcacaaggccaacgcgtacaagtagcctcaggctttcccaggggcaccctggggcgaggagagtacaataaattttattcttttaaaa

SEQ ID NO: 38229 - DNA, 804 bp, Homo sapiens
gccgagatcttaccactgcaccccagcctgggcgacagagccagactccgtctcagaaaaaacaaaagaaagtcctgtcccccttttttttttgggaaaaagggggggctttgaaggttgtgtgcatgcagctgggaggcttactaggcttgtaggttttgtggtctgggctccggctcaggccaggccatggaagcagaggccacacgatcccaggcaggctggtggctgggcccactgatcgtcacccgtcccacagtggcgccctgctcaagccgtggctcttcacggagatcaaggagcagcggcactgggacatctcgtcgtccgagcgcctggacatcctgcgggacttcaccaactacggcctggagcactggggctcggacacgcagggcgtggagaagacccggcgctttctgctcgagtggctgtccttcctgtgccggtgggcaccggggctggctggggtgggcggcgcgtgggccgcggctggttagagctgactcaagcctgtcctgcccgcccacccgccgcaggtacgtgcccgtggggctgctggagcggctcccacagaggatcaacgagcggccgccctactacctgggccgcgactacctggagacgctgatggccagccagaaggcagccgactggatccgcatcagcgagatgctccttgggccagtgccccccagcttcgccttcttgccgaagcacaaggccaacgcgtacaagtagcctcaggctttcccaggggcaccctggggcgaggagagtacaataaattttattcttttaaaa

SEQ ID NO: 38230 - DNA, 329 bp, Homo sapiens
agggattgattggcacatgcagaggcccagcaaaggagccagaccatttgggccaagtgtgtcctagactgtgggtagaagggaggctccagggcctcagcagctggggtggaggccaagctccacttgtgtgtatttttttccctccagctggacatccgtggcaaactttacctggcccccctcaccacggtaggacctgggtcaggtggctggtcgggtggcagggtggcagtgtggtcattccaacagggcttagtgtctgtccccacctactggattgtggggctggggcgcatattcagggttctgctgtgtgtgtgtgtgtg

SEQ ID NO: 38231 - DNA, 650 bp, Homo sapiens
agaaatgaggcaacttgtccaaggtcgcgcacctagtaagtggtggagctcggtccagctgactcctagacatgctcatagcagtcatactgtgctaggctctggggatatggcagagaatagaaaggaggaggatctctgtccttcctgagggagacacaaagcgggatggtaaaaattcggattgggggaaactgggttctatgggaagacactggcaggaaccctcaacaagggcttccctagggcttttcctcccataccttcccaaagtatttaatcttctcataaaacataaggtcccggaggttctcatccaggacttctccaggatgtcaaccattatcccatcacctgtggccagagtcgccatagttactgcagcgcagtggggctcagcttaaggcacctccagtttcctcgctcttccatgcccattcttgtgcctttgcgtgaactgatctttacttttcagccagattttattagaaatgatttaggaatttcaagcaggggcatttccctagcaaccgatgacataagcacaaggcccaaatctgtgctgttaacagggaatggcgttctgtgggctccgatctgcgtctctgaccctcgtaaaccttgtcttctaaaggaggaggctgagagca

SEQ ID NO: 38232 - DNA, 324 bp, Homo sapiens
tcacatctgtaataccagcattttgggatgccgaggtgtgtggattgcttgaggccaggagtttgaaactatcgtcggcaacatagcaagacttcatctttacagaattaaaatttaatattagccagaaatgatggcacacacctgtagtgtcagctactcacgaggcagaggcaggaggattgtttgagccaaggaggactgcttgagcttgggaggtcaaggctgggtgagccatgatagtgccactgcacttcagcctgtgcaacagaccaagaccaggtctcaaaaaaggccgggcaccatggcttaagcctgtaatcc

SEQ ID NO: 38233 - DNA, 442 bp, Homo sapiens
tgaggtctttccgtgctgtcatagaagggcctgccctttttctcttgtaggaagttagcttctggtaattgaacctgaagagggtagttgtgaagctgaagctgaggagtaggctgaggacattccttcctacacaaaagttcttgcactcatattgtttatctaattgaaccctgtgggccgggtacggcacgttacgcctataatcccaaagtgctgggattacaggcgtgagctaccacacctggccccatttcagtagttctatctttaatttctgaaaattctatttggtttgttttcacatctccttggtatttttttctagttccttgtggcttgtctatttcaaaattctgtcttttatttctttaagcaatttatgaagttattttatattctgatatcagatacaataaaaccttggtggttaaaaaaaaaa

SEQ ID NO: 38234 - DNA, 735 bp, Homo sapiens
acaataatctgagttatatgttaatttctaaaagaataaatgaacccattacttcccagatttcacagaagccacttgcttggagcagactaccatgacaagccagtctcaggggatccaccagcttcttcaggcagaaaaacgggccaaggacaagctagaggaagccaagaagagaaaaggaaagcgattgaagcaagccaaggaggaagcaatggtagaaattgaccagtacagaatgcagagagataaagagtttcgactaaaacaatctaagataatgggctctcagaataatctctcagatgaaatagaagaacaaacactagggaagatacaagaacttaatggacactacaataagtatatggaaagtgtgatgaaccagctcttgagcatggtctgtgacatgaaaccagaaatccatgtgaactacagagccaccaactaaatgtacatcacagttttcaagaaaaaaaaaggtgtgtgagtgccacctggttgcttatggcttcgtatttttatgttgagaaatttgaaatgagaaccttaaatttacatttacaggaaatgtgacataactcatacatcggcactgaattaaacaaaacaaaatacaactgttgctatatcttttctagtaataattatgaccttgtcacttaacttggagtaagtcaagaatgcaaaatagtaacatgttttttaacacttgaaagaaaaacatggtcatga

SEQ ID NO: 38235 - DNA, 802 bp, Homo sapiens
tattcattatttataagtagatgcaacacctcatttatacctccttatctcatacagaagagctaagattggcagaaatgatttcacagaagccacttgcttggagcagactaccatgacaagccagtctcaggggatccaccagcttcttcaggcagaaaaacgggccaaggacaagctagaggaagccaagaagattctgcatctacttttcctaaaacgaagagactgggactgcttctggaaaaggaaagcgattgaagcaagccaaggaggaagcaatggtagaaattgaccagtacagaatgcagagagataaagagtttcgactaaaacaatctaagataatgggctctcagaataatctctcagatgaaatagaagaacaaacactagggaagatacaagaacttaatggacactacaataagtatatggaaagtgtgatgaaccagctcttgagcatggtctgtgacatgaaaccagaaatccatgtgaactacagagccaccaactaaatgtacatcacagttttcaagaaaaaaaaaggtgtgtgagtgccacctggttgcttatggcttcgtatttttatgttgagaaatttgaaatgagaaccttaaatttacatttacaggaaatgtgacataactcatacatcggcactgaattaaacaaaacaaaatacaactgttgctatatcttttctagtaataattatgaccttgtcacttaacttggagtaagtcaagaatgcaaaatagtaacatgttttttaacacttgaaagaaaaacatggtcatga

SEQ ID NO: 38236 - DNA, 640 bp, Homo sapiens
tattcattatttataagtagatgcaacacctcatttatacctccttatctcatacagaagagctaagattggcagaaatgatttcacagaagccacttgcttggagcagactaccatgacaagccagtctcaggggatccaccagcttcttcaggcagaaaaacgggccaaggacaagctagaggaagccaagaagagaaaaggaaagcgattgaagcaagccaaggaggaagcaatggtagaaattgaccagtacagaatgcagagagataaagagtttcgactaaaacaatctaagataatgggctctcagaataatctctcagatgaaatagaagaacaaacactagggaagatacaagaacttaatggacactacaataagtatatggaaagtgtgatgaaccagctcttgagcatggttcccgacatgtgaccagtgagtcatttgtgttccgtagccaccaaagaagtgagcatctcagttgtcaggaagtgagaacggtgtgtgagggccgtttgggtgtgtaaggtttaggatttgtaagatgagccagttgaaatgagaacctgttttttacgttggcaggaaatgtgccacaaatcaatcataggctttggatcaaacaaaacaaaaaac

SEQ ID NO: 38237 - DNA, 1233 bp, Homo sapiens
gaggcctgtctcaaacttgagatgtggcaataacttgctttgtcacctcggcaagtcatttccaaatcaggaaggggtcagtttcaggaaacagaaacttctccagctgtttttggcagaaggggatttaagggaatcagggtacttaaagtacatgggaaggctggagaagtcgcctccaggaagctcccactggagctgggatcagaacgtactgtcctgcctgccatcccctgtaagcacccaggaagctgggcttgggccctgggacatggggtgggactgccactcctgcctcctgacacccacaaagccagaagcgtggtgctgctgcagaaggactgaacatctccaaggctgggcccgcagagcaaacttccttggccctgtgtcctccatccatatccttcaaaggacacctcattagtggactccatttctctcttccacggaactccagtggcaagggaatccagaaacgttttctttttgcctggagatgctaatccttagcctaagaataaggaaactggtccatgtaaggactgaccatcctttcacccatctgtctgcccacttgtgtatccatcccattttatccatccattcctccagttgtggacaccagatgactttcagctccccctaccccaaccagaactttgctgcaatggccattcttatatgcccctatggacccatgggacaattctctgggatacatgctaggagcagaattgctgaatcatagggaatgcatgtgcttagcttggctaagcaatgttggagtaaaagcttttggttttgcatcttctcagcacttctagggaggcaccaaaagggaggatggcactgactgagcccacctgagatagctcctagaccccagccctctgtgtcctcagaatcacacactgctgctcatcacttcagcttcccgaagatcatggcaatagcagcatgcctgtaactgtcccaagtacaaccaaaaattcttcctaaagagagggaaccaaagtcacacgggtcaccttgtccacctgtgtggacgttgctcatgttcacatacccttccttgcctccttcaaggcaggtctggccacaagcccagctctggctaatgaaatgtgaagggagtcaagggccgggggcggtggctcacacctgtaatcccagcattttgggaggccgaggtgggttgattacctgaggtgaagaatttgagaccagcct

SEQ ID NO: 38238 - DNA, 1295 bp, Homo sapiens
gaggcctgtctcaaacttgagatgtggcaataacttgctttgtcacctcggcaagtcatttccaaatcaggaaggggtcagtttcaggaaacagaaacttctccagctgtttttggcagaaggggatttaagggaatcagggtacttaaagtacatgggaaggctggagaagtcgcctccaggaagctcccactggagctgggatcagaacgtactgtcctgcctgccatcccctgtaagcacccaggaagctgggcttgggccctgggacatggggtgggactgccactcctgcctcctgacacccacaaagccagaagcgtggtgctgctgcagaaggactgaacatctccaaggctgggcccgcagagcaaacttccttggccctgtgtcctccatccatatccttcaaaggacacctcattagtggactccatttctctcttccacggaactccagtggcaagggaatccagaaacgttttctttttgcctggagatgctaatccttagcctaagaataaggaaactggtccatgtaaggactgaccatcctttcacccatctgtctgcccacttgtgtatccatcccattttatccatccattcctccagttgtggacaccagatgactttcagctccccctaccccaaccagaactttgctgcaatggccattcttatatgcccctatggacccatgggacaattctctgggatacatgctaggagcagaattgctgaatcatagggaatgcatgtgcttagcttggctaagcaatgttggagtaaaagcttttggttttgcatcttctcagcacttctagggaggcaccaaaagggaggatggcactgactgagcccacctgagatagctcctagaccccagccctctgtgtcctcagaatcacacactgctgctcatcacttcagcttcccgaagatcatggcaatagcagcatgcctgtaactgtcccaagtacaaccaaaaattcttcctaaagagagggaaccaaagtcacacgggtcaccttgtccacctgtgtggacgttgctcatgttcacatacccttccttgcctccttcaaggcaggtctggccacaagcccagacctggctaatttgtaaaattttttgtagagatgggttcttactatgttgtccaggctggttaaggcctcctgggttcaagtgatcctcctgccttggcctcccaaagtgctgggattataggtgtgagccaccaggcccagcctaaccctttataagaaataaagtctcctctcaaaatttat

SEQ ID NO: 38239 - DNA, 865 bp, Homo sapiens
cgttcccatatgtcgacctgcaggcggcgcgaattcactagtgattgtgagctgagatcgcacccggtccaagcactggctttgagataagcaatattaaaaacattttcagcttcatcagatgctgactaactgacctccaaccactgttccaccagccataactacagctttgattggacaagtgactgatttcagtaactttttcctgacaaggtgactacccatcatggactggttctggctggcttacagagctcctgcacttgcatgtctttgtgtcctgaaaagaccttttgccatatagggcctaattataatacatttaaatgttaagtctccaccccaaagtgaccatgggttgtatgttgcatgcatgtttgttcaatatgcatgtgtcagaaccactttcatgaatattcatagctcctcatgtaacctgttgaatgtgtatgtttagtcaatccattgagcatgaagctcctaccctaacccctccttctttgaagtgcctgtctctggtcttggctggagacatgcttcccagcaggtctcactccctttctgaggctggagtgcagtggtgcgatcatagctcactacaacctcaaactcctgggcaaaagtgatcctcctgcctcagcctccggggtggctaagactacaggtgcatgccaccacacctggctaatttgtaaaattttttgtagagatgggttcttactatgttgtccaggctggttaaggcctcctgggttcaagtgatcctcctgccttggcctcccaaagtgctgggattataggtgtgagccaccaggcccagcctaaccctttataagaaataaagtctcctctcaaaatttat

SEQ ID NO: 38240 - DNA, 282 bp, Homo sapiens
gtacacttaaaatggttaaaatggcaaatttcatgttatatatattttatcacaataaacagttataccactgttaaaatattaatcagtattttgagaaaaatgcttatagcttagaaggcaatactcacagtttttggggattcttgttaaattcctgtcacaaactttgagggcctgttataaatgaaaaggcacaagctgggcatggtggctcacgcctgtaatcccagcactttgggaggccaaggcgggtagatcacctgaggtcagcagtttgac

SEQ ID NO: 38241 - DNA, 217 bp, Homo sapiens
aagtgactacaggtgaagtatcccttaaccaaaatgtttgggaccagaagtgttttaaactttggattttggaggattttgaaatatttgcattatacttacctgttgaccatctctaatccaaaaatatgaaatttgaaatgctccaatgagcactttctttgactgttcaaaagtttcaaattttagagcatttcaggatttcaggtttgggata

SEQ ID NO: 38242 - DNA, 1008 bp, Homo sapiens
gttcatccgggtgcttcatgctgtgaccacaaatgggtaaggaacagggaccaggaagcccctcatccccttagcacgtgggtcttctccattaggcacattcagtccactcttgcgttctctctccactcccgggagtggagagagaaagggatgttacaaaccatctcagagtacaaagaaccttctctgacaacagagaattatctggcccaaaattcagtagtgccaaggttgagaaacctgaccttaaatgaataatttaacctttctgggcttcagtttcctcatctgtaaaatagggctattaatagtatctaccttgtagagctattgtattggtccaacaaaataatgcaagtacctagtgcctaataataaaggtagtccataaatattccctacacgaatggttcttagcatgcctctggaatccctcctggcttcatcactgggctgaacccaccggaccctagtttggcttatttcttgccaaggccagtgctcctgactctttcttcactggtcttgatgctttccttctctccttgacctcaaggcctatcaagcagctggaagcctctccctcaggccccatcccagcaccaggcccctgcctccacctcccacttctcccttcccgtctctcttccccctctttccagccttacctctagtggctccccatgccccttggcaggtcagagcacactcagctttttcccacttcagcatctctgcacagacttcctccagccagagtggcagaagacagagaagcatgtccaggatttggaccagactgcctggtcccagttctgcactgggcctgttacttacggcctagttttaggaaagtcagcctcatctgcaaagcagggaaataatttccaacccatgaggttgttgtatggacccagttgagaatgtatgaaaacatgcaacaactataaagattgttaaaatgtaagttattcactgtgtgagcattattctgctaaatgtatg

SEQ ID NO: 38243 - DNA, 1265 bp, Homo sapiens
ctataaagagattcccaaaccatgtcccagaatctgtacatcacctccacctcctcagaccctcctccaaagagtcgcctgtctctgactcctacctgtccagggttctagccacctgatggtaagatcttggctttccgattcaggcaggagagtcgcttgaattcgggaggtgcaggttgcagtgagctgagatcgtgccattgcactccagcccaggcaacgggcggggctccatctcaaaaaaaaaaaaatccagttctgttactaaccatatgaccttagacaagtgattctcaataaggggtaattttatcccccaggggatgttaggcaatgcctgaagatatttttgattgtcataactgggaatggaagtgctactggcctaaagtcgggagaggctagggatgttacaaaccatctcagagtacaaagaaccttctctgacaacagagaattatctggcccaaaattcagtagtgccaaggttgagaaacctgaccttaaatgaataatttaacctttctgggcttcagtttcctcatctgtaaaatagggctattaatagtatctaccttgtagagctattgtattggtccaacaaaataatgcaagtacctagtgcctaataataaaggtagtccataaatattccctacacgaatggttcttagcatgcctctggaatccctcctggcttcatcactgggctgaacccaccggaccctagtttggcttatttcttgccaaggccagtgctcctgactctttcttcactggtcttgatgctttccttctctccttgacctcaaggcctatcaagcagctggaagcctctccctcaggccccatcccagcaccaggcccctgcctccacctcccacttctcccttcccgtctctcttccccctctttccagccttacctctagtggctccccatgccccttggcaggtcagagcacactcagctttttcccacttcagcatctctgcacagacttcctccagccagagtggcagaagacagagaagcatgtccaggatttggaccagactgcctggtcccagttctgcactgggcctgttacttacggcctagttttaggaaagtcagcctcatctgcaaagcagggaaataatttccaacccatgaggttgttgtatggacccagttgagaatgtatgaaaacatgcaacaactataaagattgttaaaatgtaagttattcactgtgtgagcattattctgctaaatgtatg

SEQ ID NO: 38244 - DNA, 491 bp, Homo sapiens
cgtttgtagagccagaggacacccttgcaaaacagccactgtgagaggccagttgctgcaaatcacaggtcagccacttctacacttgtccttcaagcacatcagccggacatttggagttttctatagtcttcatttcaaactcgatcatcctgagtgttgtggtggacactactagtgtcacaaagagtccagcaccctctccttccaggtatataaacggtgcattgctgggctcctttgcagttggataggtcaggtaatttgtctgttgtgaagagttactatgtttcacttctaagccgaagcatttgattgtcaatggaataccctccagctctctccttccctgcagaagtaatcttggaagcatgtgttgagatgacagagttcccaatagcctagattcctgaatgacttagtggagctgagtcctccacaggtccatgttggacatgcacaatcagtgagaataaacttttgttggatta

SEQ ID NO: 38245 - DNA, 1018 bp, Homo sapiens
tcatctgtgggaaggaggggagcatctagttgtctactgctagtgagctaggagttctaggattgtcaggttctaggattgttaggttgggcttagctgctagattttattctgtctgtattccggcattgttacccctttctggctaatcatccagcaccatttccctccatttgaggatttatagtcataattgggctgggggatgggggactccctttttatcaggtgatgctgcccttgaagcctccaatagcttattagtttcaagattctcagaattcttaggcctctcaaattaaattttccagtactacataaaacatttctatacactgcgggggtgaaaaactaccactctctatacctaactgaaaccttgctatggccaggcacagtggctcatgcctgtaatgccaacactttggcattcagcctttgggaggctgaagtgggaggatagcttgagcccacgagtttgagaccagccctggcaacatagcgagaccctgtctctacataatattttttgaaaattagctaggcatggtggcacatgcctgtaatcccagctacttgggaggctgaggtgggaggactgcttgagcctgggaggttgggagtgcagtgagccatggtgacgccactgcactccagatgggctgacctgtctccaaaaaataaaaccctgccatggcacttaaactccattgtatgtgagatgatactctaaaatttaatcataacataatacttatttagcattagctctgtgccaagacactgttctaagtacttcttctattttcattaattctgtgattgtcataggtagatgctattcttacctattttataaatgagaacagtgaggcacagaagtgttaacatactgtctttaagggaaatttgaaaaaatacattaaaaccatttaaacagctcctcacattttgatgtatttcctttagtctttaaaaaaaatcatagattaaaaatgtcatcgtaaacatagttgta

SEQ ID NO: 38246 - DNA, 92 bp, Homo sapiens
attttccagtggttgtcaatggaaggtttccattctcttgggggaattaaggaaatttgtaaggtcatttttggctatcaaaatcactaggg

SEQ ID NO: 38247 - DNA, 383 bp, Homo sapiens
gtaaattcagtctttagtgttgatagtcttttatgttggagaaaagcaaaagagaacgaggtagaaaataaaggttgggtcatgcagcctatagcttctgttgcacttggtatgttaacttccttaagaaatgtcaagttgaaatacaagcatttctgcagccaacagtgagaacaaaagaccagggatccttcattttctgaactgtgtaagactctggaatcttcatatctcagaggcaaaaaaggaggaatatttcaacaatgactgtagttgttattccaggtaatcagaatccttattagaagtataatataagagtgtggtttttatctttactccataaattaaatgcaaccggtatcatgtgactacattttgac

SEQ ID NO: 38248 - DNA, 992 bp, Homo sapiens
ctaaataaagatctaaataactgatctaaataaagcagcccccacagattcccactcactgggcccacagaagccaactcaatgtcagactgcagggcaggaggtacaaagccgctagaaggctgcaaaaccaagagtgctaactcaccccagcaccactaccaaccacactgggctgaaaggcacagccacaggacctggcccactcagagaagcaccaagtctggctctgctctcactcagcactcatagctcagggctagggcagccaggtaaccagggctcaagcccagagccagggctcaaacactcactcattggttcagaaataatggcaaggtcccatacagcctcagcctctgcttccccaagccttcctctctacaccacccatcaccgcccccaccacccatacacggccaggcagaaccccaaagcaccgaaaggggccctaaggaagctgccaggcatccccacacaccccgtcagtccctctgccccgactccctctcctgctcaccactcagtccctatccaaacgggactgcacacaacgtggaatgcacatcctctcccctgctcccttctacctggaggatgcctgaaggggtctgccggggaatgcccgaatttttcgtcatcacagtcacactgggccacagaaccccatattctctaccctcaaggctcctgaaagtgcccccagacacacagcaggaagtgcccctgcgtccctcctcagacccaggagaaagccaaggctcccactctggggggtggaggcgggtctggcgtcccaccgccccagaaaccctcacccgggccctttccacacccggccgtgcccgcgctcccggtccacgccagcccgcaaggagcccccgccccactcacaggacgcagagcgcgaaggcccccgccacgctctcgctgtctcggaccaggaagctgccatcgcggcccgcccgggccagcagctcctccgcggccgc

SEQ ID NO: 38249 - DNA, 300 bp, Homo sapiens
cgaatagctgggatacaggcgtttgctaccatgcccaactaattatttgttatttttaatttttttttgtagagatgagctctctctatgttgccaggctggtctcaaactcctgggctcaagtagtcctcccacctcagcctcccaaagtgaggtactgtgcctgcctacaaatttattttgtaaccaaccattatactctgctacgtctgactgttacatagagacatagttttctatcatcaacttcattatggaagggttattttctactgaatttaatccaaattacgagaagaa

SEQ ID NO: 38250 - DNA, 353 bp, Homo sapiens
aggtactgtactcattaattttggcctcaatgtccttattctcatcagctcattgagcatttaaaagatgatcccctccctattttatttaacatttttagttttttttttctgagaggggccagtaatggtacctagccctcccagtgctggaaatgaaagtcctgattgccttttgagcctccctatcacacagttgttcacagtgtttttgtgccaacagtacttaaagtcacaatcatttaattgttggagattataattttaacaacctgtaaagaaagtttttttaggaatcagtaaaccactcttcttaaggataaagataactgtagtaagtccagtttttaagt

SEQ ID NO: 38251 - DNA, 576 bp, Homo sapiens
aggctgaatttgtaaaaataatccacaaagaaaaacccatgcccagatgtctttacttgtaagttctaccaaacaaaagaaaaattaatatcaattcttaaaagcctcttccaaaaagcagaagaggaagaaacacttcctaaatcattctgaggccaatatcaaaaccagacaatgacatcacaggaaaagaaaactacagaccaatatctcttatgaatatgaatgcaaaaatcctattttaaaaaacaagttaaatccagcaacatataaaaagcaacatataaaaagaattatacaccctgactgtgtgggatttatgccaggaatacaaggttggtttaacatctgaaagtcaggtagtgtaaccctatcaatacaataaaaaacaaaaaccacatggcagcctcaataaatgcagaaaaagcatctgacaaaatcgacaaccctttcaggataaaaacattcaataaaccaagaaggtaagaaaacttcctcaacctgataaaggacatctatcttaaaaacaaaagcaaaagcctacagctaatgtcatacttgacagtgaaagattgg

SEQ ID NO: 38252 - DNA, 453 bp, Homo sapiens
ctcaagcaattctcctgcctcagcctcctgagaagctgggaatacaaatacacaccactgaataatttttaattctttttttttaaattaagatggggtcttgctatgttgcccaggctagatttgaactcctaggctcaagtgatcctctcacctcagcctcctgactagctgggactacaggtgcatgtcactgcacctcgctataacagttatttaaaaaccttccatttggaatagggagaagagaatacaatggtcactaatctacagcatataacacatccttctggacagtggagtgaatttcttggccaacaaaacctattgtttttggtcctttccactgggacatatctcctttgtccattgttgtttatggacatccctgagaggatggacctttggaactgaagcatcccacttcccttttgacatggttttgagttattt

SEQ ID NO: 38253 - DNA, 189 bp, Homo sapiens
aaaaaatacaaaaattggctgagtgtggtggcacatgcctgcagtcccagctactggaaggctgaagtgggagaatcacttgagcccaggtcgaggcttctgagccatgattgctcccactgcactccagcttggaaggaaaaaaaaatgttgggaggaaaggacaggggagctacaggggatggaggt

SEQ ID NO: 38254 - DNA, 481 bp, Homo sapiens
acaaaccatcctaaaactcaaacacttaaaacaagggttgggaaaccatggcctgtgggacaaattcagctgctgcttatttttgtacagcctatgagctaagaatggtgctacaaatggaatgtttgtgtgttcccaaaattcgtatttcaaaacctagtcccagtgtggaggtatttggaggtgatcagatcatgagggcagagcccatctcatgaatgggattagtcccctcataaaagatgcttcaaggagctcccttgccccttctgtcaagtgagaacgccacaaaaaaaatggctgtctgtgaaccagaaagtgggccctcatcagacaccaaatttgacagtgctttgatcttggacttcccagcctccagagctgtgagaaataaatttctgttgtttatgagccacccagtctatggtattcttttatagcagcctgatcagactaagacaaatagtttttacattttaaa

SEQ ID NO: 38255 - DNA, 520 bp, Homo sapiens
tgagtctcgtaaacataaatttgagtcaaagaagccatagcaaaagagtccataatttatgattccatttatttaagtacaaagagaggcaaaaccaatctattttgtcaggaggtaggataacccttgggaaggggtggtgattaaaaaggaatagaaggaaggctactggggtgctggttgattctttttaatgtttgtaaagtttacatggtgtcttcagcttatgaaaattccttgagctctgaccttatatgtacacttgtcaatatgcatgttagagtttaatacacttgtgcaaatgcaaacatatgttcacttattaaagacagcaacacaacagaaaaattcatttaaaacttacttaaagaaaaaaaaaaaaaaaactagtcggttgtgatgacacacgcctgtagtcccagatacacaggaggttgaggcaggaggatctcttgagcagagaggttgaggccagcctgggcaacatagtgagacccaccccccctacccccaattccta

SEQ ID NO: 38256 - DNA, 445 bp, Homo sapiens
tgtgtcccccactgcgtcgacccccactcatctactgcagaccgacatctcacgagggcctgcgggaagtggctttaggtttctgtatgtctgtgaatctaggaaatgatgagaaagcggataaagcggggccaccaggagccaggaggccccttcacccctgcctctgagctctgcacaggtccctctgcgtggacggtcacttcctcctcgcccagctccctcctcctgtccttcacagcaccactgatgtctgaagtgtagaccacctcttgtgtcccgtgagtccccaggccggtgcttgtggcacctaaagaagctccatgtctatcttaaggggaatgttctttttgattaatcagaggtattaacatgcccctaatgagtccatttgctaattgtattgtttaggggttgagaaaacaaaataaagagttgatatgtc

SEQ ID NO: 38257 - DNA, 178 bp, Homo sapiens
gacttttgggaatttgcatcaagcagatagaagcaggcgggggctcagcttttgaagttggatcatccagctgtctcactttgccacttatgggatctgtgacttgaagcaggtgactgacctctccactcctcagttatctatgaaatggggataatactagcatctacttcgaagg

SEQ ID NO: 38258 - DNA, 349 bp, Homo sapiens
gcagggctgaggaggacataaattcttaattagtggccactgtccttctaatcccaatgcaatggaaatatttgaaattcatctctacattctatgtatgaaagatttatttgggactccatctcaaaaaaaaaagaaagatttactttggcttgtcacataccttttttacgtctatggattctattaaattgtaggaattctactatgattgctgaattgcctggctcactgatgcctaatctatttttcatatttctgttaacatgaaattactgaagcccttattctaaaaatgaaatttgaattatctatcctagaacatcttctcagttactatcctcaccaa

SEQ ID NO: 38259 - DNA, 761 bp, Homo sapiens
tgccagcttgctgagtccaaaccccaagcacagaggggcatgatcagacagctctggggcacagactgagaggaggaactcagcacacccttcctttccaaggccagtgacattgtctgacagtggttgccttcaagcaggcagcatcttggttgcttccagcggcagaaagctggccagtgcttacacacgtgtttccagttggagtgttatcagccatggttctgacaatattctagggtccttagatgagcacacttcctgtatctgcattatttttatagcattagtggggttgatccccaggctcacctttccttaccaaataccatcccatcagactgggattaatgggaggagaagctttgaagtcacatgctcaatttcttgagttgattttccccgacctcatcctttgatgctaagcaagaagggctctgaaattctcattcctatttcttacatgaatgagtagtgaagaggggagatgctggttttggtgcagggcaaaattagtctttctggtttaaacacgaatcacgataacccaaacccaggaaggtccatgctgcgattccctggcacttcttctttgtagtcacttcggtgaccggcttgtgctgcaccctccattgactagccttggcatattgacaagagcaggatgcccctccatccatcccatcctcaccatctctccttccaaccttctcactacggggtgggggaggggaaagccccaaatcttaaaaaaaaaaaaa

SEQ ID NO: 38260 - DNA, 823 bp, Homo sapiens
tgccagcttgctgagtccaaaccccaagcacagaggggcatgatcagacagctctggggcacagactgagaggaggaactcagcacacccttcctttccaaggccagtgacattgtctgacagtggttgccttcaagcaggcagcatcttggttgcttccagcggcagaaagctggccagtgcttacacacgtgtttccagttggagtgttatcagccatggttctgacaatattctagggtccttagatgagcacacttcctgtatctgcattatttttatagcattagtggggttgatccccaggctcacctttccttaccaaataccatcccatcagactgggattaatgggaggagaagctttgaagtcacatgctcaatttcttgagttgattttccccgacctcatcctttgatgctaagcaagaagggctctgaaattctcattcctatttcttacatgaatgagtagtgaagaggggagatgctggttttggtgcagggcaaaattagtctttctggtttaaacacgaatcacgataacccaaacccaggaaggtccatgctgcgattccctggcacttcttctttgtagtcacttcggtgaccggcttgtgctgcaccctccattgactagccttggcatattgacaagagcaggatgcccctccatccatcccatcctcaccatctctccttccaacctttgtttatcctcttctacctgtttttggtggtttcttttttttgtttcgttttttgttttttgtttttgttttaagtttattttgttttatttttgtttcccttcctcccttct

SEQ ID NO: 38261 - DNA, 879 bp, Homo sapiens
ctccttggagtcagtctaaatggatgtgaagccacttcgtccaagtcccctcctttttatccatccctgttcataatccccaactcagaaggcattttccaggtcaggaatgggatcgattttcaacattgaggtttggggtgggccatagacaggccagcaccgtggagtcagtcccaaccttcagttttggaagggtcaaagaagatacaattgggccctgcctcaagaaggctagtggggagaacgtggactccatgaataactcatcatagctgtgtcttctctgccgcactctggggaaggataaatggactcagagagaataggatggggatggtctagaaaagttttagggtgaggtgtgatcatatcacatacaaccagtcaggacttgctggctaatgaaagcctgggcatgcccatctctgctcccaagttcttagagttcagatgtcttagctctgggttaggacccaaccactcaccttacccccaaccccagggtaaagagatagggttatggggcatgtggagaatggaatggacgaaaggtgactcagccccagagaggtgttttcctcctaccaattgaaagggagatgctagggaagagaccaggtcctcctcttcttgctgcgtcacctccccagtccaacttcaggctgcccacgctccttgtctctacaaaaggactgcagaagccggaaagagtgacaactgctgacgtgcacgggatcctagtaactgctggtttctaggtgactaaacctggcagagagaatcatggaaccacaggctgacagagttaaagggcccttaagacagccctgaacctgactccatcttacaatggaggagctggagccccagcaaagg

SEQ ID NO: 38262 - DNA, 1911 bp, Homo sapiens
ggctagaaaactattttagaaagcacatattactttgaaacagcagtaggcaaagtaataccaaattgtgatgtaatcatcaagaaacccatatttgtaataaggttaattaaatttgctgcagtcttgggacaagcctcctgtaagtgtgccagtaaatctggtcttgctttatcaaactgaagggcaccccctccttctcccagaatgagtagctcattgccagtggacacacgcaggctggcaacaataactaatatgttatgagaggttagacaagtttaaataggattcgtctctgaactgaagggcaaattgtaagaaatttctttgtctgcttgtgatgctgttaaattgaaagcacaatgggaggtttggtggaagcaacaaaggttgaaatgatggcctgctgcttggagcaagcatcatggtttccccagtggtccagacatctgctgacaacagccactcctggtcaggttctgctccacatagggcgtgagaacactttacaccatttaactcatcagagtcttcgagctcaacactgtgctccacatcaagaatgtttttgtaataaaacagagctaattaaacatttcaaagggaaacattattttaactctaattagatatgattacaattctctttttttttcctgtgccagtgctgaagtgcagtaaagccccctcattttgttttctgtgctcaattttataacaaagtcttatcaaataaaacaatactatcctgtcctatggcattgcttccagtatgatgacatgttcaaaaacctttatcaaatttaagatgatttttttttcaaaaacagaacaactatggtaacaacaataaatcgaatgtgttcatgttggtgggtaagcatgttaacttttattcatgtatagctttttttctgaaacactttaaaggtgatgttctgttattgttttattttaaacctgtcaggtctgtacaagcaaaaagtatctccatttcacaggtggggaatccagggcacagataagataagcaggtcaggagcaaagcaaggctggctaagatgtatgactcactcagagctcactttctgggggcaccccactctgagggtcatgaaagaacttttgctcaaggtagctaaaacctaccggataaaaactcataaaatgttcatgaaagtcatgctggattgggaatacacagacaaaatacctctttaatcaatgacgtgtgaaatgctgtaatatgcttttaactaattaatgaacaaaaatctttgaactctaaaaatattagttgtacccatgacatatgtcaactttcatttttatttaaaaacataggatagtaatgaaagcctaaagaatttcataaagatttgagataagatttctacagaatagaaaatgctggtgtgttggaaaacagatcagttgaaagcccttcagtgatagaggaagactgggagttttaaatgtttgaatactttttaatgaattcaatgagacattttctttgcttcttcaaagccagaaataagatatagggggactatcaaacatattatgatagaataaatatattttatatggtcttgagaaatagtaagcttattttatttatttatttatttatttttttacttcttgcatcgtattctatgaactcactttcaagagagagagacgttgtctatccacaggttttctgcagtcctaattaaaaagaactgcagtgagaagtttttcatttcaacttccaacccaagcttgagggcatagcagtaactgcagagtatattgtgttcattttgctgtttgagtagttcaggaaaaaggagttgcctttcaaacaccaaacaactaatatgattccctgcggacactgctatcacatcaagatttctt

SEQ ID NO: 38263 - DNA, 447 bp, Homo sapiens
taaaggaactggatttacccttccacttgcaacaacttaaaaaaaaatcactttcagacattgcaaatcaaatggcaaaagacagtgattcctgagatggagaagtaaataagatgagccctacaaatattatgccttactgcctggagagttttcaggctgcaagcacaggaaggggaaaatcaggcaacaggcagtatggatattcttcctgaattgagaagaaggagctgattgtctggagaggtcaagacagccagtgttcatagggcagagtgtcacaaaacagataactgcacagagtaaaccccagaggtctgtaaagggtcccatttgagtcttcagctgacttcatgcaagtgaagaaactacctgagaccacagaaagaacaacctggaaggatcagagggaacaatctatggtgctcacacaagactgacaattgt

SEQ ID NO: 38264 - DNA, 355 bp, Homo sapiens
tttttttttaaacagggtctcactctgtcacccaagctggagtgcagaggcacgatctcgattcattgcatcctccacttcctgggctcaagcaattctcccacttcagcctctggagtcgctgggactacaggtgcccaccaccatgcctgcccaattcttgtatttttgtagagacagggtttcaccatgttgcccaggctggtctcaaactcctgggctcaagcaatctactcgtgttggcctcccaaagtgctgggattacaggtgtgagccaccgcacccagcaataatttttaaagtatgtttaaaaaagcaaagaatttttccaataagtgggaatgtttttgtataa

SEQ ID NO: 38265 - DNA, 129 bp, Homo sapiens
tcaggtcaaatagatggaagttgaagtttgaagatttgggttaaagtactggttctgctaattgtttctctggctttgcatgagtgattctgtcactcttaaatttcagttttctcatctgtaaaggga

SEQ ID NO: 38266 - DNA, 285 bp, Homo sapiens
agaagttaattccaaccctcatagattactttgaggggttttagatttcagtggagaaagtccctgcagatgttgtggaaatagcaggagaactagaattagaagtaaagcctgcctgggaggggaaggacacgcaccggagcctgttaggggatgggaagtaataggagggagagtattaggaccaatacctaatgcatgcggggcttaaaacctagatgacaggttaataggtgcaggaaaccatcatggcacatgtatacttatgtaaacaatcccacactt

SEQ ID NO: 38267 - DNA, 386 bp, Homo sapiens
tttgagacagagttttgctcttgttgcccaggctggagtgcaatggcatgatctcggctcactgcaatgtccacctcctgggttcaagcaattcttctgcctcaggctcctgagtagctgggattacaggcacacaccaccacgcctgtctagttttgtatttttagtagatatggggtttcaccatgtcggtcaggctggtcgtgaactcctgacctcaggtgatccacccacctcagcctcccaaagtgctgggattacaggcgttgagccaccgcacccagccaagaatactcttctgactctcaaaaataaatctgtatagaatgcaagtcaaaaaaagggatgacatgtacagaacttccagagaaagttgctagaagcag

SEQ ID NO: 38268 - DNA, 517 bp, Homo sapiens
agtgtcttggggctcagggggtaatcctgtgtcggcagatggatgaagagtgtaaatcctagtggatctgcctgagttagggaatcaagttaacaaaacaatcagatgagcaagagatagtctgttgggcttaatggagaacagaacatttggacagaaaagttttctggacatttctggcttctttgaaagacaagtttaatgagcctcccagcaagattgctggctcagggtggagcaataaggccacttttgttgttattttattcttgtgttgtccatggcaataatgtcatcattttcatttggtgggacatcagggtgtcagtaagtcttgttactataatagtaaattaaattatctgtgatttggttacaggacttttgcatcaagattttgtaaaggaacaagatgatggtagggtggttccccacatctgtctaaatatttgttaaaaaaaggacaaagagttgtgatttttaagtgctttgaataattcatgtctttccattaaag

SEQ ID NO: 38269 - DNA, 345 bp, Homo sapiens
ctccttatgttatagataaaatgactctggcacactgaggtcaaattttgatcaccctctcccacccaagatccagacaccaaaggtagagacagtgtccttgtgttcttggtagactgaggttaggctcactttcattttttccagccccttcttatgctaatagatgttgctgatctcaccatatgctgagtccatatatcattatctttaataaacattaattgagagtttctcctattgtatacaaggttctgttctgcgcacaggcaaattcagtgacaaaaaagacataacccattcatttaaagaccttaaaatcttcaagaaataacatcagggttc

SEQ ID NO: 38270 - DNA, 1333 bp, Homo sapiens
gaatctggcgcggcctttgtctcacttcagccagagagcggggttagggcttcattgccttgtgtcctctgctccgggagacttcggtgattctgccactccctccgtcgctctgtgacctgctggcattgaatgatttatagctaagactccaggacacccctgaagccgagaaatgaaatcccaagttgaccgtcaagtccaacgctcgctgcagacatctagtggacccggcgctcgcggacggaagcggacagacctagttggatccttatcccaccaatctggcccacctttgctgccatctaactccgctgaccggcccaccgttcctccactgtccgctggttgacccgggcagcggagagaggaggttcttgtgtactatgtttaacattgacaagaagataattaggaaataaatatatataaatacaggaacataaagagaaataaagaggaagcaccacagtcaactaaaaaagagagattcccagcaacctacacaaccatttctataggctctcagctgatgcttagtgtttggacaactcacacatgcagattgacagatgaccaacttataaaagagatttttaataattcttaatgatttcacagggtgttgtcaatggaaatatggattcttctacagcaaacatgtacatctatatcatgtggaacaaggatagtgggaaaacctctgattgtgaggacgtagaactgagaagagcatatgaaatgtcataagaaaaacacttctggagcatgtcgtcttcaagaaaatggtgcccagacagtcaggattgtgttacattttaataggaatggggatatttgtgatatactgacaaaccaagacaggtgactataaaactgcaatgtaaagtgtcagcttctcctcacacctttatagtagacatctgagaacctcactcctgtcagcatattcttggggttgaatctcaagtgatccatagaatcttagataaagcagatgaaaataggcttttctgtcttcctaagtaaacagcaatgaagttgagagaaagaagatattgctggaagtcatgataaagtctatcttctgtgaccatatgtttccttagagagttttagacattgaccctcatctaaaaaattgtgaaaaaggactctcaccagtctgttaatatgtatgtatatgaaagaaattactggtaaacttctaaggcaggcattggtgttacttttttttatctttattgtgtctgtgaaatgattgtgtgtattttttctttgattagacaatgagattcccaaataaattttattaaagccaaaaaaaccttta

SEQ ID NO: 38271 - DNA, 1085 bp, Homo sapiens
gaatctggcgcggcctttgtctcacttcagccagagagcggggttagggcttcattgccttgtgtcctctgctccgggagacttcggtgattctgccactccctccgtcgctctgtgacctgctggcattgaatgatttatagctaagactccaggacacccctgaagccgagaaatgaaatcccaagttgaccgtcaagtccaacgctcgctgcagacatctagtggacccggcgctcgcggacggaagcggacagacctagttggatccttatcccaccaatctggcccacctttgctgccatctaactccgctgaccggcccaccgttcctccactgtccgctggttgacccgggcagcggagagaggagggtgttgtcaatggaaatatggattcttctacagcaaacatgtacatctatatcatgtggaacaaggatagtgggaaaacctctgattgtgaggacgtagaactgagaagagcatatgaaatgtcataagaaaaacacttctggagcatgtcgtcttcaagaaaatggtgcccagacagtcaggattgtgttacattttaataggaatggggatatttgtgatatactgacaaaccaagacaggtgactataaaactgcaatgtaaagtgtcagcttctcctcacacctttatagtagacatctgagaacctcactcctgtcagcatattcttggggttgaatctcaagtgatccatagaatcttagataaagcagatgaaaataggcttttctgtcttcctaagtaaacagcaatgaagttgagagaaagaagatattgctggaagtcatgataaagtctatcttctgtgaccatatgtttccttagagagttttagacattgaccctcatctaaaaaattgtgaaaaaggactctcaccagtctgttaatatgtatgtatatgaaagaaattactggtaaacttctaaggcaggcattggtgttacttttttttatctttattgtgtctgtgaaatgattgtgtgtattttttctttgattagacaatgagattcccaaataaattttattaaagccaaaaaaaccttta

SEQ ID NO: 38272 - DNA, 551 bp, Homo sapiens
gaatctggcgcggcctttgtctcacttcagccagagagcggggttagggcttcattgccttgtgtcctctgctccgggagacttcggtgattctgccactccctccgtcgctctgtgacctgctggcattgaatgatttatagctaagactccaggacacccctgaagccgagaaatgaaatcccaagttgaccgtcaagtccaacgctcgctgcagacatctagtggacccggcgctcgcggacggaagcggacagacctagttggatccttatcccaccaatctggcccacctttgctgccatctaactccgctgaccggcccaccgttcctccactgtccgctggttgacccgggcagcggagagaggaggcggcaccaacagaaggcttctgcaaagctgagagctccttttacccatggatcaggagcagagtttgcagctacactgtcaggctgtgtttggatgttagcagttagtttagctttgcgtcttcagagcaattgttcttagctacttaaaaaaagaaaagaaaagaaaggaaaattt

SEQ ID NO: 38273 - DNA, 501 bp, Homo sapiens
aatcactctgacagttttgtgaattttaaccctctgttaaaatcacaagggacaacgctaagttttaatatctaaactggaattttagggggcaagatcagccccttagattgaaagagacctatggagttgggtgatgtcaggtgcctcggagtcttggggacagcaccgatctctgtccccacatgggcacacactcttgtcaggcctatctggcattcagtgatgacttctgtgttgacaggaaaatattgatgggatgaatggaaagggtataaaacatggaagaagaaactattctttcatcagtgattaaaggcagcggaaataaagccaagtaaagttcagtgtacaaattaataaggcaatcagtctctattgattactagatgcctggttgaagtggatcttgaattggtttcccatgggaaggatttggagattttaagtggctgagtggtaatgattaaaatccaactttattctaaagctaccatacat

SEQ ID NO: 38274 - DNA, 253 bp, Homo sapiens
gcgtgagccaccgtgcctggcctgcctttctcttaacgtgtgtattacatttactgatatgcatatgtagaacccggaatgtcagaaaatgccaagtattttccccatttaatggggagtgaaaccacagtgagaccaaaagcgccatggactgatgctggcccaggatcgaggactcctcattctgaacatcgactcaagatgatcttccactatatttttctccctggtgttttcatctccccacctccag

SEQ ID NO: 38275 - DNA, 294 bp, Homo sapiens
ggcaccttttccgtgacagcctgtgcgtcttcagaacacaatgcagtgaataatcagccatagatgggcaagggggaggcctggtcgggcttttgacacagccctctgtaggcgtgatggatgtggagaaactcaacccttcccaggggggtcaggtggcaccatcaaaacaaagagtgcaaacagttcagtcctggaaaagaactccccccacacttacccccctttctttttgctgtttgtgccaaaaagttacagtatccagccattcctgattaagttggaaatctatgc

SEQ ID NO: 38276 - DNA, 1947 bp, Homo sapiens
tgcaaaaaacctttcaaaaggctttcctggattagagaaagaaagggagtgagggaggagagatgagtggctattccagaacgacataaagaatttccagccttggacggacagctgggaacgtcttccaatttggactggtgtttacaagcgggaagctaggtggaccttggattttggcgggtgaagaggctaggttgtttaaggaggtggggcgcgtttcagtggctctctttgaaaaagcccagcaagatgtcagacctgctctcagtcttcctccacctcctccttctcttcaagttggttgccccggtgacctttcgccaccaccgctatgatgatcttgtgcggacgctgtacaaggtgcaaaacgaatgccccggcatcacgcgggtctacagcattgggcgcagcgtggaggggagacacctctacgtgctggagttcagcgaccaccctggaatccacgagcccttggaaccagaggtcaagtatgtggggaacatgcacggcaacgaagcgttgggccgcgagctgatgctgcagctgtcggagtttctgtgcgaggagttccggaacaggaaccagcgcatcgtccagctcatccaggacacgcgcattcacatcctgccatccatgaaccccgacggctacgaggtggctgctgcccagggcccaaacaagcctgggtatctagttggcaggaacaatgcaaatggagtggacctgaaccgcaacttccctgatctcaatacctatatctactataacgagaagtacggaggccccaaccaccacctgccccttccagacaactggaaaagtcaggtggaacccgagacccgggcggtgatccggtggatgcactccttcaactttgttctttcagccaatctccacggaggggcggtggtggccaattacccgtatgacaagtcctttgagcaccgggtccgaggggtccgccgcaccgccagcacccccacgcctgacgacaagctcttccagaagctggccaaggtctactcctatgcacatggatggatgttccaaggttggaactgcggagattacttcccagatggcatcaccaatggggcttcctggtattctctcagcaagggaatgcaagactttaattatctccataccaactgctttgagatcacgctggaactgagttgcgacaagtttccccccgaagaggagttacagcgggagtggctgggtaatcgggaagccctaatccagttcctggaacaggttcaccagggcatcaagggaatggtgcttgatgagaattacaataatctcgccaatgctgtcatttctgtcagtgggattaaccatgatgtcacttcaggtgaccatggtgattacttccggctgctgcttccaggtatctacactgttagtgccacagcacctgggtatgacccagagacagtaactgtgaccgtgggtcctgcggaaccaacgttggttaacttccacctcaaaagaagcatccctcaagtaagccctgtgaggagagctcccagcagaaggcacggagtcagagccaaagtgcagccccaagccagaaagaaagaaatggagatgaggcagctgcagagaggccctgcctgaaacccacagtgccaggcaacccttcagaaaggctttgctcctgctctcagatcagatcaagcattctttctattttattatctgggacatatttaaatacaaacatattcagaacaattcagaatggtctccatctgttccaggggtaagccatctctaggtcatcatgaaaaaaattaggatctattgaaaggtgatgtggtggccgggtgtggtggctcacatctgtaatcctagcactttgggaggccgaggcaggtggatcacctaagttcaagagttcggaaccagcctggccaacatggtgaaaccctgtct

SEQ ID NO: 38277 - DNA, 1892 bp, Homo sapiens
tgcaaaaaacctttcaaaaggctttcctggattagagaaagaaagggagtgagggaggagagatgagtggctattccagaacgacataaagaatttccagccttggacggacagctgggaacgtcttccaatttggactggtgtttacaagcgggaagctaggtggaccttggattttggcgggtgaagaggctaggttgtttaaggaggtggggcgcgtttcagtggctctctttgaaaaagcccagcaagatgtcagacctgctctcagtcttcctccacctcctccttctcttcaagttggttgccccggtgacctttcgccaccaccgctatgatgatcttgtgcggacgctgtacaaggtgggagacacctctacgtgctggagttcagcgaccaccctggaatccacgagcccttggaaccagaggtcaagtatgtggggaacatgcacggcaacgaagcgttgggccgcgagctgatgctgcagctgtcggagtttctgtgcgaggagttccggaacaggaaccagcgcatcgtccagctcatccaggacacgcgcattcacatcctgccatccatgaaccccgacggctacgaggtggctgctgcccagggcccaaacaagcctgggtatctagttggcaggaacaatgcaaatggagtggacctgaaccgcaacttccctgatctcaatacctatatctactataacgagaagtacggaggccccaaccaccacctgccccttccagacaactggaaaagtcaggtggaacccgagacccgggcggtgatccggtggatgcactccttcaactttgttctttcagccaatctccacggaggggcggtggtggccaattacccgtatgacaagtcctttgagcaccgggtccgaggggtccgccgcaccgccagcacccccacgcctgacgacaagctcttccagaagctggccaaggtctactcctatgcacatggatggatgttccaaggttggaactgcggagattacttcccagatggcatcaccaatggggcttcctggtattctctcagcaagggaatgcaagactttaattatctccataccaactgctttgagatcacgctggaactgagttgcgacaagtttccccccgaagaggagttacagcgggagtggctgggtaatcgggaagccctaatccagttcctggaacaggttcaccagggcatcaagggaatggtgcttgatgagaattacaataatctcgccaatgctgtcatttctgtcagtgggattaaccatgatgtcacttcaggtgaccatggtgattacttccggctgctgcttccaggtatctacactgttagtgccacagcacctgggtatgacccagagacagtaactgtgaccgtgggtcctgcggaaccaacgttggttaacttccacctcaaaagaagcatccctcaagtaagccctgtgaggagagctcccagcagaaggcacggagtcagagccaaagtgcagccccaagccagaaagaaagaaatggagatgaggcagctgcagagaggccctgcctgaaacccacagtgccaggcaacccttcagaaaggctttgctcctgctctcagatcagatcaagcattctttctattttattatctgggacatatttaaatacaaacatattcagaacaattcagaatggtctccatctgttccaggggtaagccatctctaggtcatcatgaaaaaaattaggatctattgaaaggtgatgtggtggccgggtgtggtggctcacatctgtaatcctagcactttgggaggccgaggcaggtggatcacctaagttcaagagttcggaaccagcctggccaacatggtgaaaccctgtct

SEQ ID NO: 38278 - DNA, 484 bp, Homo sapiens
ggagttccggaacaggaaccagcgcatcgtccagctcatccaggacacgcgcattcacatcctgccatccatgaaccccgacggctacgaggtggctgctgcccaggtacgaggtccaagggagatgccggggagagatcaaggccttcttaggaaataaagtccagtggacaagattccctctctgtcccactgtaaatatcacaaatgttaaaagtaaaagatgaaatggccaagagaaaaaatccatcagaaatataagaaaggatgaagaggtgggttcagtcctacagcacctcaggcaataaacatgggctctctctgagcctgcattccctcaacacctttccagatgacctcagggttttattgtgaggattaatgtggcaatatctgtgataacactttgtaacctggaaaatactcaacagatgtggagggatattgcaaaataaagctcctttcctggactttcagcatcaaa

SEQ ID NO: 38279 - DNA, 387 bp, Homo sapiens
  misc_feature (321)..(321): n is a, c, g, or t
caatatgggtggggaagccatcagggttaaacccctaggaagatccttctgtcaattcaagctagctccctgaacactgttttgtcctatcttacaaggacaagaccattcagctgggttccttttctttccactctggcgattcctctcccctcccctccccttcccttttctttctttctttttttttgagacactgccaaaaaaaaaaaaaaaaattagctggatgtggtgccggcgcctgtaattccacctactcaggagactgaagcaggagaattgcttgaccctgggaggcggaggttgcagtgagctgagatntctgccactgcactactccagcctgggcaacagagcaagactccatctccaaaaagaagaaattaa

SEQ ID NO: 38280 - DNA, 668 bp, Homo sapiens
agtttagagtagaagttcctaaaggaatcttacatgggtatttttatgtggacaccagcaagtgtgtgtgtacatgcacatgcatgtgtgtgtgtgtgcttttttgttttttgacttctcaatcattgtctcatcgacatcccttttgtctcatctgaaaaaatatcttggagatcattccacatcagtacacagagcttcctcagtctttgtttttttaaaacactaactgctacttgattcttttttttttttaaaatttatttatttattttgagatggagttttgctcttgttgtccggactggagtgcaatggtgtgatctagagtcactgcaacctctgccttctgggtttgagcaattctcctgcctcagcctaagctgggcttacaggcatctgccactatgcctggctaattttgtatttttagtagagacggggtttcatcatgttggtcaggcttgtcttgaactcctgacctcaagtgatccacctgcctcggcctccgaaaatcttgggattacggcgtcagccaccgtgcctggccatgactgttttttaaattaaaagaataattttgttttgtgaaatgtatcatgcataatagaatagaaaatgtttatgtaagagcagaagaagaataaaattaattcccgcatacactt

SEQ ID NO: 38281 - DNA, 539 bp, Homo sapiens
gtttgtcttttaggaaaaggcaggcagcattaaagaggtgctctgagacaaacattttttaaatccagaacatctaaaatacagggatagactcttatcaaagccatgtggctccatcctgagattgctgttgcagtccatccattggtcttgttctgtttgctataatagcatcacttctcccccagggctggtacccgagctggacaaagtgagtggataacagcatcaagcagtgtattgcatagcatccttgttctgaaaactttaagactttaatgtcatttaacttttaaaaggtttttgtcaagtaattcattttccatagaaacatgtttcagagatttaatcgccaatttatttttgtttcctttttagattttgaaatttagaaaaaatagaaccctctttgaagtgagaattgtgccagaagcaattcattactaagaagtaaacatttttaagaagtttgtttaaattattgaaaatatagaactcttgggctgggtgctttagaattacctttgaacacacctacc

SEQ ID NO: 38282 - DNA, 361 bp, Homo sapiens
gtccacctcttattcactctgtgactttgggtaggacatttaaccatagttaataagaatcatcacaactgtttgcctttctcacatactggtttcaaaatcaataaagtatttaaggcaatgctttaaaaaccatacagcactgtacaaatatgctatcccatggttaagtagaatttagtgggaaaattgataccatcaacatttgattgcaatgattttatctaatagaaaattatctttcctgggcacagtggctcacacctgtaatcccagcacttcgggaggccgaagtgggaggactgcttgaaaccaggagtttcagatcatcatgggcaatgtagggagactccatctctaa

SEQ ID NO: 38283 - DNA, 389 bp, Homo sapiens
ttcctcacctcaagtgatctgccctcctgggcctcccaaaatgctaggattacaggtgtgagccactgcacccaacccctccaccacttgttttgattcatcctttggcagattacttttcctaaatgctgaagaccagggggtgctcagtgtctacaaagtccttgttcctggatggatactaacttactgacacctctcaagtgccagcaaactctggtagcagggattgtcttcattttacatgtgaagtaacagaccagatgggtagcactgcttggggccacatagctaatactctaatgctcctgccgtgggcactgtgccaccctctgcagggcctcatgtgttgggactgcactggcattgcaccttttcatccctctgtg

SEQ ID NO: 38284 - DNA, 585 bp, Homo sapiens
gctgggactacaggcacccgccaccgcgcccagctaattttttgtatttttagtagagatggggtttcactgtgttagccaggatggtctcgatctcctgacctcgtgatccaccctcctcagcctcccaaagtgctgggattacaggtgtgagccaccgcgcctgacctgtttactactttttcttatgtttactaatgatggtatgattgacatactaaacaaattattgtggttatttaattatttccttagaataaataaaatgagttaatacatataaaacacttagaagaagacctggcatgtacaatttctcaataagaaatttccttgaactagtgttattggtcaaagggtatagatgcttgtaggcttcttgtgcctattgccaaactgtcctccagaaaggttatgccgatttctactttcacctacagtgtccacttttagttccctgcatcctcccaatctaaggtattattaaccagcccctaccaaaacaaacaaaaactgttaatctgtagataagtcagtattaccaccaaaagacatacccaagcctgttcatggcagcatttttca

SEQ ID NO: 38285 - DNA, 639 bp, Homo sapiens
agtaaaactgagggcaaacctgagttgggaacattttagctctaaatacatacagtacatttagctgccttggctaatttaacttttagacagggcaaatggaataaggcagatgttgaggtgctacattgttggttcagaaaaatggttgtgagttttgaaagaaggcatgattctggtaagatctgactgtgggcaaggggctgttgaaacaaacagtgcagtgtttccagggcagtggtgaaggacttgacctccgttgtagctgaaaatgaagtccttctctaacaaagccatagtagcagcagcagcagctgttgccactgccacctgcgttcagtggctgtgtgaggtggctagaccaggaaatgattccatggcactaggcatgtataaggaaagacttactttggctctggcaaagtggttgtacaggttgtgggtgtcactttaaacatacaaagatctgcttgctggaggaggggcagcttcttgaggatcaggtgtgcatctgaaagggatgagctcatccttctaaccagacctgctctagacgctgactgaatgttttcctagttccaagtcctgcagctgggagaagcaggaaatgattgacacttcaggcacttggtgagtagc

SEQ ID NO: 38286 - DNA, 564 bp, Homo sapiens
ggcaaagaggggagtgcactgagccatgtacgcaaaatagttgaaaaacattttagagacgtggaaagccaaaagatactgcaacgttcacaagcccagcaaccacagaaggaggctgccctgtcatcctgagtccgtacacatggaggactcttccagcatccagccaaggaggcgctggtggtggcttcagcggaggcaggccgggggagggaagggatcctatatgtcctgttggctcttaacaaagggtcagcatttccaaatcttagacttgaacaaacaaaacacccaacaaaaaagaacaagagaataatttaaaagttgaatcattacttgactaacagacttcggtccaccatgtccttttcacagccctcttctggaacagtcaccttgttaattttatttttgaaaattattttcccactctgccctttacttctgactttcctttcctagtttgttcctgccattctgtttttataagtggctacacttgccttctgaatgattgaaagaaacttttacatcttttcttccaaaataaaagtaacaagctga

SEQ ID NO: 38287 - DNA, 409 bp, Homo sapiens
ggcgccactgcactccagcctgggcaacagtaaaactctgtctcaaaacataaaaataaaatgaaataaacatgtttatgaaggacaacgggggcccctccaagtgaaatcaggatgccaggggaggagctgggcccagatgataagccaccgagttagtcactgggcccacggacgcggcaggcagtctcaccagcttcactgggttactcttaaatggctttgcaggaggctgggccacagtctcatatgacaaggagccgtgtaggtgattttcattcctcaagcacagtttctgctggttctgttctgccttctcggttttcctgatctctttcatcctctttgttatccctaagatgacacaaagcaaggccagccagagcttcccccgaaataacccatcatc

SEQ ID NO: 38288 - DNA, 171 bp, Homo sapiens
aaagtgggttaaggatagtgtaatgaaatagatcgatttcacttatgactatgtagtcaaggatcctaagtaaaatattagcaaactgaatacagcagtgtttttttaaaaaaagtataggcccaaactaaataggatgcattccagtatttccagaatggtcaacattag

SEQ ID NO: 38289 - DNA, 396 bp, Homo sapiens
atcagtaagagaaattatctgaagtggatttgaagactcttcctttgattctagtgaagagatcctttaagaccctgagaaaacatgtggcaattctctgtgaatttggaaaggaagcattcacctatgaaagaaaatgcttccatcaggtacttcaaggttgaagaggcagaggacgagttatccacaaggaatttggaagagaagcttgtttcaaagttggatgagccatgagaacaactaccaaataaatcattgtgtggaaaagaattgatttgggaatcaattgtctgggaaagaaaatcacaaagaagtgattgtgaagacattcatttgttcttcagatatgtaactgtttaatctgaagtaaactttgggatggaaaactattaggaa

SEQ ID NO: 38290 - DNA, 421 bp, Homo sapiens
atatatccctgttaattttttttttacaaataatatggtttaattgtgcatatgtaataacaattctacaataacacttacttcctacaacattagaccctgagaaaacatgtggcaattctctgtgaatttggaaaggaagcattcacctatgaaagaaaatgcttccatcaggtacttcaaggttgaagaggcagaggacgagttatccacaaggaatttggaagagaagcttgtttcaaagttggatgagccatgagaacaactaccaaataaatcattgtgtggaaaagaattgatttgggaatcaattgtctgggaaagaaaatcacaaagaagtgattgtgaagacattcatttgttcttcagatatgtaactgtttaatctgaagtaaactttgggatggaaaactattaggaa

SEQ ID NO: 38291 - DNA, 126 bp, Homo sapiens
gtccacaatcaagttccaaatgaagaaggtgttatgtctggctgtagctgttggtcacgtgaagatgacagacgatgagcttgtgtataacattcacctggctgtcaacttcttggtgtcattgct

SEQ ID NO: 38292 - DNA, 382 bp, Homo sapiens
aacttgaggctgtatttgtaaaagggatatttaatgaagaaaatgttttgcaccttgtcccactggcttgggttgaaatacgataatgtttccttttgtatttaaaaaacacaaacaggatctcatccggagatatcatgaccttagacattcctgagacgtctgaaagggaagtgaacatatgtcagcatgcttgggtttaaaatataccaacttcatttctctcatcattcaaatctgcatgaggctcatgtgactttgaacaagctgtgctggaggattaaagacgggtcctaatgagaacctctctcttccagtaaaatctaggaattgaaaagcagttactacctcttccatttttttcctaaaaaaaaaaaataac

SEQ ID NO: 38293 - DNA, 515 bp, Homo sapiens
gttcatcagctatcaatagtgtatgttatgtgtggcctaagacaattcttcaatgtggccccaggaagccaaattttatacatacctggcatagactctggagccagattatatgagttcaaaacttgactgcacccctcttactagctgtgtgaccctggccatttcccttccctgtgcctcagtttcccctgtggtacgaagtggcattaagaatacctacctctggaccaggcacggtggctcatgcctgtagtcccaccaccctgggaggctgaggtgggcagattgcttgatctcaggaattcgagaccagcctgggcaacatggtgaaaccctgtctctaccaaaaatacaaaaaaatagtcgggtgtggtggtttgcacctgtggtcccagctactcatgaggctaaggcaggaggatcacttgaaccctggggtggggcggaggttgcagtaagccgagattgtgccaccacactgcagcctgggtgacagagtgagacctcgtctc

SEQ ID NO: 38294 - DNA, 430 bp, Homo sapiens
gggctggcctgctgcgggacggcttctccaccagcctcccgttcaaggcctccatttctgccactgcggcgtctgcatggttcctgagcatcccaagcacattcccacctcaaggccttggtgcttgcagttcatctgcttctctcctggtctatgcctggctggttcttatttcttttgaattcggacgaggtgcacctcatgagagaggccttccttgacctccctcctccattcctctcacaggccccatctgacatgcttgccctccccctcccctacccccatccccttgtgagccccatgagagaagggcctctgtccttaggtagatgtgattccccagaacccaggacaggacagccacacaggaggaaactgacacacttttcttaaatgatggaataaagtactgactgtgtttcaagca

SEQ ID NO: 38295 - DNA, 301 bp, Homo sapiens
taaacagctgatattgacattatggtgagttttaaaaatagaaatccagtaagagaagacaattagtagagaaatggtttaaattatttgctgtgggaggtggaggggtgccccaggagtggaggacagagacattccagatgctgaagggtcttgatgcattccatgtcaccccaaacgtcaaacaaagcaaagctcttgtcctgacaatgcataatgctttagaacttacttctaattgtaaaaatagtgtatgttcttggtaaaataaaaatttgcatggtatagaagtttataagtt

SEQ ID NO: 38296 - DNA, 389 bp, Homo sapiens
cttaatacgaggaaaagcaatcagtatgctccgaaaggttaactattctggtcattaccatcatccaattctctgctctcaacaatcacattagctttcttcaacagctgccttctgcagctgataaaaactgcactatctgtaatatctttgagagaggaagtaaaaaatacaaatcactgcttaaagtcctcactgctaataccagaaactaagcagaaaagggaaagctaatcttattaaaacccttgcagttctggtctctaattacaaacacacatttattagaaggtaggcacattactgggcacaacactatgaccttccaggtatttctttaacccagaacaataataaaagtgttacaaggtgccttccatattgtcctg

SEQ ID NO: 38297 - DNA, 1169 bp, Homo sapiens
aatgaaatttgaagtttggataggagacattgtaaaactcaagaatgggaaaaaaaaattttaacagaagtatgtatgaaggaaatattttaagtataatctacccaaagaaaataactgctacagccaacattaaaggttttattccctgttttgttaagtaacttcactccaaattgtgacattctttagagaaaatattttccttaagagtagttatttacgtgttttattgggggagcatattttcaggggggcaacatcttgctaagaacatttgattagcctcacttctgtcctcaccttctatattgcttacttttcaagatatttcttctgagcccttttctttgtatgcccagctccctgttatgtaattaagtagttgattaccattccaaatgcttcccctacacaaggctgttgtccaccctgtttcatgaatttgtgaattaagtaggtgcctaatattttcctactattagggtgaaaaggaataagaaactaaagtggcttccaaatgtttgtgtcttggtttcttcaccctagtgcaaaataggaaatgtttattggcagtcatttcttttccattactccttttaaccacattacaaaaagctaggattttgtgtctagaaggagacttgtattaaaagacaagattcttagtagttattcatcaggcttaagtttcctggtgtatttcttgtgggagaggtagaaggacattttgtagtagtattctaactattaatataatgctgcttgggttatcagaaagtattgaatacttcagataagtcaagttagtatttagtatagcagctgttcttcagagcacaggaaactgggatagtatgtagtattatgctgtttccattattgtttctcattgcataacacttttaatttatatgttggtatacaatttgcccctttactaaaaaaaaaaatctagtttcattcttgttccttgccacattaagcagttttttcatttacgttttaaattttcttaatattagaagaaaaagaaaacagaacaaaagagaaatgtcatgacttagaaaaggaaattttaagttttatggaatactgtagctttattttctgacatttctgcttatagatagattagaaaatccttgtttcttttgtttgctttgttt

SEQ ID NO: 38298 - DNA, 2580 bp, Homo sapiens
tatttgcacctagaaattttaggcaagtgatagctgcgtaatcatactgcggcaccgtttttttcttgcagcagtagctgcttgcggaggaggtctgcccactgcagctctctgcagtctccggctctctcctgcaggatcggtcaacgcagccgtcgccgccctctgcacccagcccaggtcgccactgcttcagtccggttctcaaagcctcagcaccatcttttatccccgagcagcctggatcgtcgttccctcagtccggacgccactgctaggtccgaccaccgccgcttctgatatttcggtgagtcttttcctgtggaggtttggtctcccgatctctgtggtagccaccttaggcgtgtacggtcctttgaaaaatggccgagtcagagaaccgcaaggagctgtcagaatccagtcaagaagaggctggtaatcagataatggtggaagggctcggggaacatctggagcgcggtgaagatgccgctgctgggcttggagacgatgggaagtgcggtgaagaagctgccgctgggcttggggaagaaggggaaaacggtgaagatactgctgctgggtccggggaagatgggaaaaaaggtggcgatactgatgaggactcagaggcagaccgtccaaaaggacttatcggttatgttttagatacagactttgttgaaagtctacctgtgaaagttaagtaccgtgtgttagcccttaaaaagcttcaaactagagcggccaatttagaatccaaattcctgagggaatttcatgacattgaaagaaagtttgctgaaatgtaccaacccttactggaaaaaagacgtcagatcatcaatgcaatctatgaacctacagaagaggaatgtgaatataaatcagactctgaggactgtgatgatgaggaaatgtgtcatgaagagatgtatggtaatgaggagggtatggtacatgaatatgtggatgaggacgatggttatgaggactattattatgattatgctgtggaagaggaggaggaggaggaggaggaggacgacattgaggctactggagaagagaataaagaagaggaggatcctaagggaattcctgatttttggctaactgttttaaaaaacgttgatacactcactcctttgattaagaaatatgatgagcctattctgaagctcctgacagatattaaagttaagctttcagatcctggcgagcccctcagtttcacactagaatttcacttcaaacccaatgaatatttcaaaaatgagttgttgacaaagacctatgtgctgaagtcaaagctagcatattatgatccccatccctataggggaactgcgattgagtattccacaggctgtgagatagattggaatgaaggaaagaatgtcactttgaaaaccatcaagaagaaacagaaacatcggatctggggaacaatccgaactgtaactgaagattttcccaaggattcatttttcaattttttctctcctcatggaatcacctcaaatggaagggatggaaatgatgattttttacttggtcacaatttacgtacttacataattccaagatcagtattatttttctcaggtgatgcactggaatctcagcaggagggggtagttagagaagttaatgatgcaatttatgacaaaattatttatgataattggatggctgcaattgaggaagttaaagcttgttgcaaaaaccttgaggcattagtagaagacattgatcgttagagcagagtatacatggccctgaaattaactgccctagatatagttactcaaggtataagaagccttgtgttctgtatttttcttgtagtgttagttaaaacatatgtttcaaaaatataagaaaagttcaaaaactaattaatttgaccttgagttttagtagtagaatgttttcaagaaatgtacactgtggtaaatgatttaaaacactagtatagtgttgtgtagcttaatccttctgaagtctttttgtcatgtagctattaatctgtggctatgaaatgatcagaaatgctaagtgagatcaatatttgtttggaaaaaaaatcttgggaaacaacccaagggttttcgctgttgttgtttttctttttctatttttgtttacttagtcctttagctagtggatttaattttgttgtgcctgcttcattttgcaataacaatgcagtagaatttaaaacttggatgcttaagaggcctgcatatagataagaatttcaggcaaaactacatttattgttaataacagcttgttcataggctcttgtattttatgtaactgtgataaataatgaaacttagttatattgaggttattgtttgtcggtgaagtgttagtcacagtattttcaaaagtttgcacatattgttctgtgtaattgtgtaagccataattacagtgtttaattctcttttcctattacatcattcattgaaagtgatcactttaccattttgaaaagatatttcgtgttctttcactgcaaaataaaaagaataaaaatttaaatgtctcatgtttaaaacttaa

SEQ ID NO: 38299 - DNA, 2526 bp, Homo sapiens
tatttgcacctagaaattttaggcaagtgatagctgcgtaatcatactgcggcaccgtttttttcttgcagcagtagctgcttgcggaggaggtctgcccactgcagctctctgcagtctccggctctctcctgcaggatcggtcaacgcagccgtcgccgccctctgcacccagcccaggtcgccactgcttcagtccggttctcaaagcctcagcaccatcttttatccccgagcagcctggatcgtcgttccctcagtccggacgccactgctaggtccgaccaccgccgcttctgatatttcggtgagtcttttcctgtggaggtttggtctcccgatctctgtggtagccaccttaggcgtgtacggtcctttgaaaaatggccgagtcagagaaccgcaaggagctgtcagaatccagtcaagaagaggctggtaatcagataatggtggaagggctcggggaacatctggagcgcggtgaagatgccgctgctgggcttggagacgatgggaagtgcggtgaagaagctgccgctgggcttggggaagaaggggaaaacggtgaagatactgctgctgggtccggggaagatgggaaaaaaggtggcgatactgatgaggactcagaggcagaccgtccaaaaggacttatcggttatgttttagatacagactttgttgaaagtctacctgtgaaagttaagtaccgtgtgttagcccttaaaaagcttcaaactagagcggccaatttagaatccaaattcctgagggaatttcatgacattgaaagaaagtttgctgaaatgtaccaacccttactggaaaaaagacgtcagatcatcaatgcaatctatgaacctacagaagaggaatgtgaatataaatcagactctgaggactgtgatgatgaggaaatgtgtcatgaagagatgtatggtaatgaggagggtatggtacatgaatatgtggatgaggacgatggttatgaggactattattatgattatgctgtggaagaggaggaggaggaggaggaggaggacgacattgaggctactggagaagagaataaagaagaggaggatcctaagggaattcctgatttttggctaactgttttaaaaaacgttgatacactcactcctttgattaagaaatatgatgagcctattctgaagctcctgacagatattaaagttaagctttcagatcctggcgagcccctcagtttcacactagaatttcacttcaaacccaatgaatatttcaaaaatgagttgttgacaaagacctatgtgctgaagtcaaagctagcatattatgatccccatccctataggggaactgcgattgagtattccacaggctgtgagatagattggaatgaaggaaagaatgtcactttgaaaaccatcaagaagaaacagaaacatcggatctggggaacaatccgaactgtaactgaagattttcccaaggattcatttttcaattttttctctcctcatggaatcacctcaaatggaagggatggaaatgatgattttttacttggtcacaatttacgtacttacataattccaagatcagtattatttttctcaggtgatgcactggaatctcagcaggagggggtagttagagaagttaatgatgcaatttatgacaaaattatttatgataattggatggctgcaattgaggaagttaaagcttgttgcaaaaaccttgaggcattagtagaagacattgatcgttagagcagagtatacatggccctgaaattaactgccctagatatagttactcaaggtataagaagccttgtgttctgtatttttcttgtagtgttagttaaaacatatgtttcaaaaatataagaaaagttcaaaaactaattaatttgaccttgagttttagtagtagaatgttttcaagaaatgtacactgtggtaaatgatttaaaacactagtatagtgttgtgtagcttaatccttctgaagtctttttgtcatgtagctattaatctgtggctatgaaatgatcagaaatgctaagtgagatcaatatttgtttggaaaatttttgtttacttagtcctttagctagtggatttaattttgttgtgcctgcttcattttgcaataacaatgcagtagaatttaaaacttggatgcttaagaggcctgcatatagataagaatttcaggcaaaactacatttattgttaataacagcttgttcataggctcttgtattttatgtaactgtgataaataatgaaacttagttatattgaggttattgtttgtcggtgaagtgttagtcacagtattttcaaaagtttgcacatattgttctgtgtaattgtgtaagccataattacagtgtttaattctcttttcctattacatcattcattgaaagtgatcactttaccattttgaaaagatatttcgtgttctttcactgcaaaataaaaagaataaaaatttaaatgtctcatgtttaaaacttaa

SEQ ID NO: 38300 - DNA, 1125 bp, Homo sapiens
tatttgcacctagaaattttaggcaagtgatagctgcgtaatcatactgcggcaccgtttttttcttgcagcagtagctgcttgcggaggaggtctgcccactgcagctctctgcagtctccggctctctcctgcaggatcggtcaacgcagccgtcgccgccctctgcacccagcccaggtcgccactgcttcagtccggttctcaaagcctcagcaccatcttttatccccgagcagcctggatcgtcgttccctcagtccggacgccactgctaggtccgaccaccgccgcttctgatatttcggtgagtcttttcctgtggaggtttggtctcccgatctctgtggtagccaccttaggcgtgtacggtcctttgaaaaatggccgagtcagagaaccgcaaggagctgtcagaatccagtcaagaagaggctggtaatcagataatggtggaagggctcggggaacatctggagcgcggtgaagatgccgctgctgggcttggagacgatgggaagtgcggtgaagaagctgccgctgggcttggggaagaaggggaaaacggtgaagatactgctgctgggtccggggaagatgggaaaaaaggtggcgatactgatgaggactcagaggcagaccgtccaaaaggacttatcggttatgttttagatacagactttgttgaaagtctacctgtgaaagttaagtaccgtgtgttagcccttaaaaagcttcaaactagagcggccaatttagaatccaaattcctgagggaatttcatgacattgaaagaaagtttgctgaaatgtaccaacccttactggaaaaaagacgtcagatcatcaatgcaatctatgaacctacagaagaggaatgtgaatataaatcagactctgaggactgtgatgatgaggaaatgtgtcatgaagagatgtatggtaatgaggagggtatggtacatgaatatgtggatgaggacgatggttatgaggactattattatgattatgctgtggaagaggtagagttattttatgatttttttatttgttgtggtttgaatttatgtttatttttttgtttattattatatttaaaggtattatttttattaattttgt

SEQ ID NO: 38301 - DNA, 1041 bp, Homo sapiens
ggtagtacgggaagggtataaccaacattttcggggtatgggcccgatagcttatttagcctcgtgccgaattcggcacgatggaatctcagcaggagggggtagttagagaagttaatgatgcaatttatgacaaaattatttatgataattggatggctgcaattgaggaagttaaagcttgttgcaaaaaccttgaggcattagtagaagacattgatcgttagagcagagtatacatggccctgaaattaactgccctagatatagttactcaaggtataagaagccttgtgttctgtatttttcttgtagtgttagttaaaacatatgtttcaaaaatataagaaaagttcaaaaactaattaatttgaccttgagttttagtagtagaatgttttcaagaaatgtacactgtggtaaatgatttaaaacactagtatagtgttgtgtagcttaatccttctgaagtctttttgtcatgtagctattaatctgtggctatgaaatgatcagaaatgctaagtgagatcaatatttgtttggaaaaaaaatcttgggaaacaacccaagggttttcgctgttgttgtttttctttttctatttttgtttacttagtcctttagctagtggatttaattttgttgtgcctgcttcattttgcaataacaatgcagtagaatttaaaacttggatgcttaagaggcctgcatatagataagaatttcaggcaaaactacatttattgttaataacagcttgttcataggctcttgtattttatgtaactgtgataaataatgaaacttagttatattgaggttattgtttgtcggtgaagtgttagtcacagtattttcaaaagtttgcacatattgttctgtgtaattgtgtaagccataattacagtgtttaattctcttttcctattacatcattcattgaaagtgatcactttaccattttgaaaagatatttcgtgttctttcactgcaaaataaaaagaataaaaatttaaatgtctcatgtttaaaacttaa

SEQ ID NO: 38302 - DNA, 784 bp, Homo sapiens
agaaacttaaattctcccaagataggcatgatttgtaaatgagctagctgggaagctgggataaaatatttaagattcattgattttggctggtcaaacatgccccattcaaatagggccgccttcaagttctcaggctgagaccccactatgattttagcttttaaaaacttagttgacatctcaagtatgttctcacttcatgcttccagttatatatattattctattgtcccaaacgtaataggtccagaacaaaaatattataatatcttactccacaatagctcataatcagaactacaaagtttggaattttatcgtttgtcagttgtttccatgataaattataaaatctttggaaaaccaaaattatattttactccatttatatattttccataatatctagaacagggccgggtacataaaaatcacttatgggaccagtggtggcactttgggaggcactttggggacgcctgatcaacatagtgagaccccatctctacaaaaaatttaaaaactagctgggcatggtggctactcaaaacgctgaagtggaaggatcgcttgagcccaggagttcaaggctgcagtgagctatgattgtgccactgcactgtagcctgggtgacagagcaagactctgtctctaaaaaaaaaaaaaaaaagaaagaaacaaattgcttatgaataaatacttgttcactagttttattagaaacttaaattctcccaagataggcatgatttgtaaatgagctagctgggaagctgggat

SEQ ID NO: 38303 - DNA, 1600 bp, Homo sapiens
ctgggccgcggctacccagagtcagggccacggagcttaggagaccttgggtcagctctgcaaaggggttgtttactgaatgcttctggtatctgcagccccgctggggttcggacagggggtctggaatagggcttcacaactacagcagggctaggaccctcttgggctggaaggagctggagaggcctctgcaagctgtcacaggctcttggtgctggcactggctcaggctttcacacacacacacgcgcacacacacacacacacacacacggacaggcacccccttggtggccttcacagtttcaccttcaggctcaaagctggctctgcaggggacatgagaggcacaccgaagacccacctcctggccttctccctcctctgcctcctctcaaaggtgcgtacccagctgtgcccgacaccatgtacctgcccctggccacctccccgatgcccgctgggagtacccctggtgctggatggctgtggctgctgccgggtatgtgcacggcggctgggggagccctgcgaccaactccacgtctgcgacgccagccagggcctggtctgccagcccggggcaggacccggtggccggggggccctgtgcctcttggcagaggacgacagcagctgtgaggtgaacggccgcctgtatcgggaaggggagaccttccagccccactgcagcatccgctgccgctgcgaggacggcggcttcacctgcgtgccgctgtgcagcgaggatgtgcggctgcccagctgggactgcccccaccccaggagggtcgaggtcctgggcaagtgctgccctgagtgggtgtgcggccaaggagggggactggggacccagccccttccagcccaaggaccccagttttctggccttgtctcttccctgccccctggtgtcccctgcccagaatggagcacggcctggggaccctgctcgaccacctgtgggctgggcatggccacccgggtgtccaaccagaaccgcttctgccgactggagacccagcgccgcctgtgcctgtccaggccctgcccaccctccaggggtcgcagtccacaaaacagtgccttctagagccgggctgggaatggggacacggtgtccaccatccccagctggtggccctgtgcctgggccctgggctgatggaagatggtccgtgcccaggcccttggctgcaggcaacactttagcttgggtccaccatgcagaacaccaatattaacacgctgcctggtctgtctggatcccgaggtatggcagaggtgcaagacctagtcccctttcctctaactcactgcctaggaggctggccaaggtgtccagggtcctctagcccactccctgcctacacacacagcctatatcaaacatgcacacgggcgagctttctctccgacttcccctgggcaagagatgggacaagcagtcccttaatattgaggctgcagcaggtgctgggctggactggccatttttctgggggtaggatgaagagaaggcacacagagattctggatctcctgctgccttttctggagtttgtaaaattgttcctgaatacaagcctatgcgtga

SEQ ID NO: 38304 - DNA, 1953 bp, Homo sapiens
ctgggccgcggctacccagagtcagggccacggagcttaggagaccttgggtcagctctgcaaaggggttgtttactgaatgcttctggtatctgcagccccgctggggttcggacagggggtctggaatagggcttcacaactacagcagggctaggaccctcttgggctggaaggagctggagaggcctctgcaagctgtcacaggctcttggtgctggcactggctcaggctttcacacacacacacgcgcacacacacacacacacacacacggacaggcacccccttggtggccttcacagtttcaccttcaggctcaaagctggctctgcaggggacatgagaggcacaccgaagacccacctcctggccttctccctcctctgcctcctctcaaaggtgcgtacccagctgtgcccgacaccatgtacctgcccctggccacctccccgatgcccgctgggagtacccctggtgctggatggctgtggctgctgccgggtatgtgcacggcggctgggggagccctgcgaccaactccacgtctgcgacgccagccagggcctggtctgccagcccggggcaggacccggtggccggggggccctgtgcctcttggcagaggacgacagcagctgtgaggtgaacggccgcctgtatcgggaaggggagaccttccagccccactgcagcatccgctgccgctgcgaggacggcggcttcacctgcgtgccgctgtgcagcgaggatgtgcggctgcccagctgggactgcccccaccccaggagggtcgaggtcctgggcaagtgctgccctgagtgggtgtgcggccaaggagggggactggggacccagccccttccagcccaaggaccccagttttctggccttgtctcttccctgccccctggtgtcccctgcccagaatggagcacggcctggggaccctgctcgaccacctgtgggctgggcatggccacccgggtgtccaaccagaaccgcttctgccgactggagacccagcgccgcctgtgcctgtccaggccctgcccaccctccaggggtcgcagtccacaaaacagtgccttctagagccgggctgggaatggggacacggtgtccaccatccccagctggtggccctgtgcctgggccctgggctgatggaagatggtccgtgcccaggcccttggctgcaggcaacactttagcttgggtccaccatgcagaacaccaatattaacacgctgcctggtctgtctggatcccgaggtatggcagaggtgcaagacctagtcccctttcctctaactcactgcctaggaggctggccaaggtgtccagggtcctctagcccactccctgcctacacacacagcctatatcaaacatgcacacgggcgagctttctctccgacttcccctgggcaagagatgggacaagcagtcccttaatattgaggctgcagcaggtgctgggctggactggccatttttctgggggtaggatgaagagaaggcacacagagattctggatctcctgctgccttttctggagtttgtaaaattgttcctgaatacaagcctatgcgtgatcttgtgtgtcaggcctgtgttttctgagaaagccctcccattatccggggcagaattcaggggcagagttctctgtgaacctcacaaggtgaaatcacatggtcttaaagaaagccagaagacaggccttcaagtgatccaagaaacccaattcatattaataataattaacttttttatttatttatttttttgagatggagttttgctcttgttgcccaggctggagctggagtacaatagcacgatctcgactcactgcagcctcccgggttcaagtgattctcctgcctcaagactcctgagtagctgggattataggcgcatgccaccatgctcggctttttttttt

SEQ ID NO: 38305 - DNA, 1800 bp, Homo sapiens
ctgggccgcggctacccagagtcagggccacggagcttaggagaccttgggtcagctctgcaaaggggttgtttactgaatgcttctggtatctgcagccccgctggggttcggacagggggtctggaatagggcttcacaactacagcagggctaggaccctcttgggctggaaggagctggagaggcctctgcaagctgtcacaggctcttggtgctggcactggctcaggctttcacacacacacacgcgcacacacacacacacacacacacggacaggcacccccttggtggccttcacagtttcaccttcaggtaaatgggctcatcctttgagccatgaggatgggaagcgaagcaaggaatgaaaaagctagtgtgtttgtgtgtgtgtgtgtgtgtgtgtgtgtgtgtgcacgcgcgcgcgcgcgtgtgtacgcgtgcgtgtgcctgtgtgtgcctgggagtgacctcacagctgccggaacataaagactcacaggtccgtctcccaggctcaaagctggctctgcaggggacatgagaggcacaccgaagacccacctcctggccttctccctcctctgcctcctctcaaaggtgcgtacccagctgtgcccgacaccatgtacctgcccctggccacctccccgatgcccgctgggagtacccctggtgctggatggctgtggctgctgccgggtatgtgcacggcggctgggggagccctgcgaccaactccacgtctgcgacgccagccagggcctggtctgccagcccggggcaggacccggtggccggggggccctgtgcctcttggcagaggacgacagcagctgtgaggtgaacggccgcctgtatcgggaaggggagaccttccagccccactgcagcatccgctgccgctgcgaggacggcggcttcacctgcgtgccgctgtgcagcgaggatgtgcggctgcccagctgggactgcccccaccccaggagggtcgaggtcctgggcaagtgctgccctgagtgggtgtgcggccaaggagggggactggggacccagccccttccagcccaaggaccccagttttctggccttgtctcttccctgccccctggtgtcccctgcccagaatggagcacggcctggggaccctgctcgaccacctgtgggctgggcatggccacccgggtgtccaaccagaaccgcttctgccgactggagacccagcgccgcctgtgcctgtccaggccctgcccaccctccaggggtcgcagtccacaaaacagtgccttctagagccgggctgggaatggggacacggtgtccaccatccccagctggtggccctgtgcctgggccctgggctgatggaagatggtccgtgcccaggcccttggctgcaggcaacactttagcttgggtccaccatgcagaacaccaatattaacacgctgcctggtctgtctggatcccgaggtatggcagaggtgcaagacctagtcccctttcctctaactcactgcctaggaggctggccaaggtgtccagggtcctctagcccactccctgcctacacacacagcctatatcaaacatgcacacgggcgagctttctctccgacttcccctgggcaagagatgggacaagcagtcccttaatattgaggctgcagcaggtgctgggctggactggccatttttctgggggtaggatgaagagaaggcacacagagattctggatctcctgctgccttttctggagtttgtaaaattgttcctgaatacaagcctatgcgtga

SEQ ID NO: 38306 - DNA, 454 bp, Homo sapiens
cagttgtagcagtgtacacctgtggtcccagtaacttggcaagctgaagtgaaaggattgcttgaacctaggagttcaaggctgcaatgaaccataatcacaccacttcactccagcctaggcaacagtgagatcctacctcaaaaaaaaggcaactgcaatactgttgtgtctctgaaacatacgcatgcactatgggctgtgggagaacatggcactcagatcttcctcccagggttggattaaggtgaatctggaggaatcttggtctgagttaactcagagaaagtgtgatgagctgctcaaacagtgggtaaagagattgagcaatgggggaggactggccatggatgacacagccagattttgaggagagcctgggtggctgacaaggatggtggagagctggttttgctagggtggtaaacctgcctttcctggagccaagacacca

SEQ ID NO: 38307 - DNA, 1261 bp, Homo sapiens
agatacatgcatctgatttggtattgtgatttacttcagaccctgaaaccaaatatctgatcttccattagacttaggggtcatgatatgagtggaatttacattttagatactataggggaaagaaaagtctcaaaaagaagtattgcatgtctaaaagctagtgccctgagtactcatgaattcgattccaagagtagtggtgtaaattgccttggagccctgcatccacgtcttgtaactaacttttgaattttgcctgacatgattctctcttgatgaagaaatgacatatattatctttgaatatctacaaggaaagttaccaacttatgtaggggtgaaatttggataggcggtatgctcaaagcagccagcaatgagtgctctgttttgatccttcttcttattatggaaaggagtacaggacctcttcagtcttccccttaccagaggtagcctctgcaaatggcataccagatgggactctaagatgcttgtgtggtggcttcttgtccttctctttgacttctgtggcatggtgctagtgcatgtaccctgtggtattgcccctctgtccgtagtgtgaactgtcctgtgagctttatgtcaggagactgtgaccttcatgtccagcttcaaagagttgtgcatgaactcggtaatacacatcacacggctgagagtcccctttccaggcagggccagcatgtgtagaatatctttcagaatatggtttcaccatgaaacaggggtggtagatttattcccttgtgtcaggccaaagaagttcttacaaagtacagtgggtagtgtctaaagcgacactttactcacagcctggcttgagtcaacaggaacaccatagcacccacaaatacttctacttgaatcatattctgtgctttttcaatcactagtgcagaataggctgcatttgacacagactgttaggcaatattgatttttttgttttgtttttatttggttttatctgagataacttatgttcaaggtgagaataagaaatagccaactagttaaaatgtatgaaaagaaaactttcccctgctgtatttgttgtgtaacataaataagccttctgagaagcagggtgaataaagtttagggagctgggacacctggtcctgctagctggaccactggctcatcatgcaatgaaaaggtgagcagacttaacccctccgtgcctcagctttttccccacagacacctacctcacaggggcattgagaaaaaa

SEQ ID NO: 38308 - DNA, 656 bp, Homo sapiens
ctgaagtgccacatgcatgccaggtatttgatagctgtgaggtcagaggtggcatctctatggcccatatgggcagtggcgtgattgggacaccctcacagaccctgcatttgtattgctcagttcatcgtcctatttcagaacccagagtcccttatgacagagcctttcagacctaagcagctcagctccacatagaaaattctttctgagtcttcagccacactcaggccccccacacacctcacccactcctgtctctgtgtctttcccccttctcagaggaccactggacctgctctaaaggagagcgtgtggtgtacgtcaccccctccacaacttcccagcctcgagccaggagcgtccatgcatttattttctaagggaaaaaaaaataagtattttagggaactatactgtctacatttagctctcctgggtgtctatgttcttttctaaatatttgtttttctcgatcctcgggtgttagcatatggtctgcacttcctttgtagtgtatttggtattttcaacattaccgaaacccctttcttgttgttttttattgttttgttttgtttgagacaaagtctcattgtatagcccactgcactccagcctgaaaaaacagggcaagaccgtttctgaaaaaaaaa

SEQ ID NO: 38309 - DNA, 1067 bp, Homo sapiens
gaaacttttctatagttggctcaaatttagtataattcttgtcttgtgcatatatgtcatataactcatggtcctgaataatgaaataacacacaaagcctagtatattaaaacttgacctgtaaaaagcacatgcggctgggcgcagtggctcatgcctgtaatcctagcactttgggaggccgagacgggtggatcacgaggtcaagagatcgagaccatcctggcaaacatggtgaaaccccatctctactaaaaatacaaaaaatgagctgggcatggtggtgggcttctgtagtcccagctacttgggaggctgaggcaggagaatcacttgaacacgggaggtggaggttgcagtgagccaagattgcaccactgcactccagcgtggtgacaaagggagactccgactcaaaaaaaaaaagcagcacatgcctattagccttgtcctttcaccatttctcattataaaagagtgccctggcataagcctgtgaatgtttagggaaatataatgctttaacttggattagagtttagctttttggaattttcagttcttaatattaaggtaatgcttactaaagcacaaaaagtaaatgtcctgtggtaattatgttcaagtggaattgtacattgattcttaccttagagggtagtgtgactgatggtcataagagctgattaaaagctaaaatggaggcaacgatttaaagtactggttttcatttgaatgtgaaaaagaataaaccactggtttggataaatcttataaaaatattgtgcgtagtcatcgtaaaaaggagaaagaaaatgtgacaaaagatagaggaaagttaaaatcatttgtaatctcacacagaaatagctacccaaccactgttaacactttggagtttttctattttgtttcacgaataagtttgctttttaaaggcaaaatttagatgtggagtttttgtaataatgatactggtaatgataatgcttataattaatatcatttgttaaatatttaccttacgcctagccttttattaaatgctttgtatttagtagctcat

SEQ ID NO: 38310 - DNA, 436 bp, Homo sapiens
tttttttgagatggaatcttgctctgctgcccaggctggagtgcagtggcacaatcccagctcactgcaacctccgcttcctgggttcaagcaattctcctgcctcagtctcccgagtagctgggattacaggcgcgcgccaccacacccggctaatttttgaatttttagtagatgcacggttttaccacgttggccaggctggcctcgaactcctgacctcaagtgatctgcttgcctcagcctcttaaagtgctgggattacaggcatgagccaccacggctggccctaggcaacattctaaccaccctgcaaggatgttatctttcccctcccaaattcccatgccttttgcattttgctgatagctactatgttctctttgacatatatttattggcatacctggtttacatactcctttctgacagaaat

SEQ ID NO: 38311 - DNA, 669 bp, Homo sapiens
gcaaagactcatttcctaatgacagccttttgtaactgaagatctaaataaggtaaaaaataaaaatgcttctccatttctacaagaagtggccagccaggaaagggacttcttgtctaaccctcctgtgaaaatgaggctcattcagtcagatttcaacccagccttctccactttctgcctccatcacccttccgggggcagaatttagcagtggtctgccaccccgagcagccgctcccacaggaactgcctcattaagctctgtgaccagtaactcccaacttaggaaaagctcaagaaggaccactctgctttgtttgcacttttccaagaacccttactacataaaacgttctaaacttgggaacactaacttttgcactgtttcccaccgagccacagagctcgcaccagcatcacgctctccctttgccaggatctgagctcgctggaggaaaatacaagttcctctttcagcttctttccttcacttctggagacaagctttccagctaccaaaacagaacgtttcccaggttttcctcccacacctatgaactttgttccttgattaaatcctagtttcccctctaaacagaactggactatgtccaaccaatgtcttcagtttctgcaaacattaactctgatgttttttttcaagag

SEQ ID NO: 38312 - DNA, 383 bp, Homo sapiens
gctagaaagtgggcttggcagggatacagcaaaactccatgccctagtttccaccatgggtacagctgccccttgtccagaggtgtccacagcgtaggtacctggtggatgggtcaaggggaaggaagtcaatggccagtccagaagctttccccacagcgtcttttgatgttgtgctgaccgggaagtggtgttgtgccctggtggtcaagacctttgcctgtggagacatgctgcctggccagcctccatgctgggcaggtttcttgactgacacggaagtgaagtagatagtacctacctcaaagggtggttgtgaggcccaaatgagataatacatgtaaatcctgtggcagtgtgcccagctgtgcaagatcttaaaa

SEQ ID NO: 38313 - DNA, 384 bp, Homo sapiens
aaggaatgaaattccactgaaaccttttttgcctgtttggattgtgcctcattgacagtgataccactctggggctaagtctgatgtgtcacaacccaacagggtggggctttatctctttttcaattgattacatgaaataattgtattaaatagaaaatataaaggtataaatgccttgatatttatttcttatcagtccttatattccttagtagatctctatttaaagctctaaaattatttatcttctcctcccctgatacttcttttcagtctaaactctccaaattttgtgaatgtgaagaaacttacaaactctgaatatttctgaaaacaatcttctattgtaaaagtaatatgatcccattaaacaaaatttgt

SEQ ID NO: 38314 - DNA, 1853 bp, Homo sapiens
gaagaaatagacaaattcacaattgtggtcagatttcagcacccttccttcaatagataatagatcaagtagttggaaaaccaagaaggctatagaagacttgaacagtgctatcaaccacattgacttaattggcgtttatagaacgctactcaacagcaaactgcacactttttccaagcatagccagaacatttttcaagatagaccatattctgggtgggaaaataagtcaattaattctgaaggatttaaatcatacaaagagtgttcactgaccataatggaattaaattagaaaggaatctggaaaaatatcttgtaactgaacatcacacttccaaataacccaggggcacatcctgagacattaaaaacatcttaacaaatttaaaagaatagaaaccatacaaaatactttctgagactacagaattaaactaaaagttaatactgaaaaaagtgctggaaattttccaaatatttggaaattaaacagtatgcttctaaataacccatggatcaaagaaaaatctcaagaaaaatgtttaaatatttttaattttaatgaaaatacagtttatgaaaccatgtgggatacagctgaaacagtgcttcaaaatttgtagcattaaatgatgtattagaaaagaaaaagaacctaaaatcaataacctcagtttccacctttggaaactagaaaaagagaaacaaattaaacctgcagtgagcagaagaaagtaaatactgaaaattagagcggaaatcaacaaagttgaaaacaggaaaacaatggagaaaatcaacaaaataaaaagctggttctttgaaaagatcagtaaaatgataaatctctagccaggcaaccaaggaaaaatgagtacaccaattgccaatattaggaatgaaagaggtgttattctgctaatcccatggataaaatacaggattagtaagagaatagtataaataagctctcactcacatatttgataaattagataaaatagactagttccttgaaatacacatataaacttaaaacagcttctagacagcagacccagatggttgtactggtgaattctaccagccagccagtgtgacacaaacgaaatcaatcagcaccaaaaagaaatgagctggccgggtgcagtggctcacacctataaccccagcacctttggaggccgagatgggtggatcactgaaagttgggagttcgagaccagcctggccaacatggtgaaactgtgtctctactaaaaatacaaaaattagcctggcatgatggtgggcgcctgtaatctcaggtatacagactatacctgtagtcccagctactcgagaggctgaggtggagaattgctttaacctgggaggtggaggttacagtgagccgagattgccctactgcaccccagtctgggcgattgagccagactccatctcaaaaaaaaaaaaaaaaaaaaagaagaagaagaagaaaaaaataaaaaaaaaagaagtgagctatcaagccatgaaaaggcatggaagaaaattaaatgtgtattactaaagtaaaagaagccagtctcaaaaggctgcatactatataatttcaactatatgacattttagaaaatgcaaaactagacagtaaaaagatcggcaaaacttctctgtatgatgttataatgatggagaactgtcataaattttttcaaacccatagaatgtacaacaccaagagtgaactctaaaccatggattctgggtgataatgatgtgtcaatggaagtttatcagttgtaacaaatgtaccactctagtgggggatgtcgataatggagaaggctaagtgtgttggg

SEQ ID NO: 38315 - DNA, 318 bp, Homo sapiens
acagatagtaagtgaagtgaggctcaagagatgttgagttacttatccacggtcacacaggaattggcagagctaggcctggaacgtaggtcttctgtcatctgtaaatccagtgctgccctttgcacgtgacatcactgagggtgagaggccccgtgttccaatcacaacatgcattgcagcttcctgggggaaatgaagcaaaaacaaaactaaaaaacctgattatgtaagtttcctttggacaaccgaagagcttccatcattttcaactagcttccagtcttggtgtcagctgaactaagtcctatacaatgc

SEQ ID NO: 38316 - DNA, 2455 bp, Homo sapiens
ctcatcagacgggatgctggactgtgggttgggggcagcctcagcctctccaacctggcacccactgcccgtggcccttaggcacctgcttggggtcctggagccccttaaggccaccagcaaatcctaggagaccgagtcttggcacgtgaacagagccagatttcacactgagcagctgcagtcggagaaatcagagaaagcgtcacccagccccagattccgaggggcctgccagggactctctcctcctgctccttggaaaggaagaccccgaaagacccccaagccaccggctcagacctgcttctgggctgccatgggacttgcggccaccgccccccggctgtcctccacgctgccgggcagataagggcagctgctgcccttggggcacctgctcactcccgcagcccagccactcctccagggccagcccttccctgactcagtgaccacctctgctgccccgaggccatgtaggccgtgcttaggcctctgtggacacactgctggggacggcgcctgagctctcagggggacgaggaacaccaccatgccccggggcttcacctggctgcgctatcttgggatcttccttggcgtggccttggggaatgagcctttggagatgtggcccttgacgcagaatgaggagtgcactgtcacgggttttctgcgggacaagctgcagtacaggagccgacttcagtacatgaaacactacttccccatcaactacaagatcagtgtgccttacgagggggtgttcagaatcgccaacgtcaccaggctgcagagggcccaggtgagcgagcgggagctgcggtatctgtgggtcttggtgagcctcagtgccactgagtcggtgcaggacgtgctgctcgagggccacccatcctggaagtacctgcaggaggtgcagacgctgctgctgaatgtccagcagggcctcacggatgtggaggtcagccccaaggtggaatccgtgttgtccctcttgaatgccccagggccaaacctgaagctggtgcggcccaaagccctgctggacaactgcttccgggtcatggagctgctgtactgctcctgctgtaaacaaagctccgtcctaaactggcaggactgtgaggtgccaagtcctcagtcttgcagcccagagccctcattgcagtatgcggccacccagctgtaccctccgcccccgtggtcccccagctccccgcctcactccacgggctcggtgaggccggtcagggcacagggcgagggcctcttgccctgagcaccctggatggtgactgcggataggggcagccagaccagctcccacaggagttcaactgggtctgagacttcaaggggtggtggtgggagccccccttgggagaggacccctgggaagggtgtttttcctttgagggggattctgtgccacagcagggctcagcttcctgccttccatagctgtcatggcctcacctggagcggaggggacctggggacctgaaggtggatggggacacagctcctggcttctcctggtgctgccctcactgtccccccgcctaaagggggtactgagcctcctgtggcccgcagcagtgagggcacagctgtgggttgcaggggagacagccagcacggcgtggccattctatgaccccccagcctggcagactggggagctgggggcagagggcggtgccaagtgccacatcttgccatagtggatgctcttccagtttcttttttctattaaacaccccacttcctttgaaaaaaaaaaaaaacaaaaaaaaaaagaaaaaaaaaaaaaacaacacaaaaaaaaaaaaaacacgataaatacataaaaaacaaacaaaaaaaaaacaaaaaaaaaaaggggcgcgcggcgcccccaataatctcccctcgctggggtggcgcgcccctattcgccgcgcccccccgcctcgtcgtctttctgacgaagcgggcgcggctcccctcttctggagggggtgtctattctattctctgcgcgcagtagcttgcgtggtctgcttctaaacaaacccgcgctgcgtcgcggtgggtactcttcgtgtgtgtcgtggcggtttcttgtgtgggcggggcgccctcctctcttcctctgggggtgggggggtcgacctctgtctggggggcgggccccactcctctcgccatgcatgtttttttgtcgtccgtcgtgctgggtagtctatctcatgctttccttgctggccgcgcttagtactcaggtgtcgtggtctcctcaccgcggtctctacgctcgtgtgggccgtccgagtcacaagaatttgtctgctgctgcgcgtgttgacggttgtctatccctcggctgatcgatgacttctttttctctatgcgccgaggagcgacgctgtcgtgtcagtatacacagccgcacgcgaccgcccgggtt

SEQ ID NO: 38317 - DNA, 1831 bp, Homo sapiens
  misc_feature (1831)..(1831): n is a, c, g, or t
ctcatcagacgggatgctggactgtgggttgggggcagcctcagcctctccaacctggcacccactgcccgtggcccttaggcacctgcttggggtcctggagccccttaaggccaccagcaaatcctaggagaccgagtcttggcacgtgaacagagccagatttcacactgagcagctgcagtcggagaaatcagagaaagcgtcacccagccccagattccgaggggcctgccagggactctctcctcctgctccttggaaaggaagaccccgaaagacccccaagccaccggctcagacctgcttctgggctgccatgggacttgcggccaccgccccccggctgtcctccacgctgccgggcagataagggcagctgctgcccttggggcacctgctcactcccgcagcccagccactcctccagggccagcccttccctgactcagtgaccacctctgctgccccgaggccatgtaggccgtgcttaggcctctgtggacacactgctggggacggcgcctgagctctcagggggacgaggaacaccaccatgccccggggcttcacctggctgcgctatcttgggatcttccttggcgtggccttggggaatgagcctttggagatgtggcccttgacgcagaatgaggagtgcactgtcacgggttttctgcgggacaagctgcagtacaggagccgacttcagtacatgaaacactacttccccatcaactacaagatcagtgtgccttacgagggggtgttcagaatcgccaacgtcaccaggctgcagagggcccaggtgagcgagcgggagctgcggtatctgtgggtcttggtgagcctcagtgccactgagtcggtgcaggacgtgctgctcgagggccacccatcctggaagtacctgcaggaggtgcagacgctgctgctgaatgtccagcagggcctcacggatgtggaggtcagccccaaggtggaatccgtgttgtccctcttgaatgccccagggccaaacctgaagctggtgcggcccaaagccctgctggacaactgcttccgggtcatggagctgctgtactgctcctgctgtaaacaaagctccgtcctaaactggcaggactgtgaggtgccaagtcctcagtcttgcagcccagagccctcattgcagtatgcggccacccagctgtaccctccgcccccgtggtcccccagctccccgcctcactccacgggctcggtgaggccggtcagggcacagggcgagggcctcttgccctgagcaccctggatggtgactgcggataggggcagccagaccagctcccacaggagttcaactgggtctgagacttcaaggggtggtggtgggagccccccttgggagaggacccctgggaagggtgtttttcctttgagggggattctgtgccacagcagggctcagcttcctgccttccatagctgtcatggcctcacctggagcggaggggacctggggacctgaaggtggatggggacacagctcctggcttctcctggtgctgccctcactgtccccccgcctaaagggggtactgagcctcctgtggcccgcagcagtgagggcacagctgtgggttgcaggggagacagccagcacggcgtggccattctatgaccccccagcctggcagactggggagctgggggcagagggcggtgccaagtgccacatcttgccatagttgtactgctttataaaaaccaggtgtgcgtttttttttcgtaagttaaaccacccccccacgttccattcctcctctctcctcctcgctccccccctctn

SEQ ID NO: 38318 - DNA, 1779 bp, Homo sapiens
ctcatcagacgggatgctggactgtgggttgggggcagcctcagcctctccaacctggcacccactgcccgtggcccttaggcacctgcttggggtcctggagccccttaaggccaccagcaaatcctaggagaccgagtcttggcacgtgaacagagccagatttcacactgagcagctgcagtcggagaaatcagagaaagcgtcacccagccccagattccgaggggcctgccagggactctctcctcctgctccttggaaaggaagaccccgaaagacccccaagccaccggctcagacctgcttctgggctgccatgggacttgcggccaccgccccccggctgtcctccacgctgccgggcagataagggcagctgctgcccttggggcacctgctcactcccgcagcccagccactcctccagggccagcccttccctgactcagtgaccacctctgctgccccgaggccatgtaggccgtgcttaggcctctgtggacacactgctggggacggcgcctgagctctcagggggacgaggaacaccaccatgccccggggcttcacctggctgcgctatcttgggatcttccttggcgtggccttggggaatgagcctttggagatgtggcccttgacgcagaatgaggagtgcactgtcacgggttttctgcgggacaagctgcagtacaggagccgacttcagtacatgaaacactacttccccatcaactacaagatcagtgtgccttacgagggggtgttcagaatcgccaacgtcaccaggctgcagagggcccaggtgagcgagcgggagctgcggtatctgtgggtcttggtgagcctcagtgccactgagtcggtgcaggacgtgctgctcgagggccacccatcctggaagtacctgcaggaggtgcagacgctgctgctgaatgtccagcagggcctcacggatgtggaggtcagccccaaggtggaatccgtgttgtccctcttgaatgccccagggccaaacctgaagctggtgcggcccaaagccctgctggacaactgcttccgggtcatggagctgctgtactgctcctgctgtaaacaaagctccgtcctaaactggcaggactgtgaggtgccaagtcctcagtcttgcagcccagagccctcattgcagtatgcggccacccagctgtaccctccgcccccgtggtcccccagctccccgcctcactccacgggctcggtgaggccggtcagggcacagggcgagggcctcttgccctgagcaccctggatggtgactgcggataggggcagccagaccagctcccacaggagttcaactgggtctgagacttcaaggggtggtggtgggagccccccttgggagaggacccctgggaagggtgtttttcctttgagggggattctgtgccacagcagggctcagcttcctgccttccatagctgtcatggcctcacctggagcggaggggacctggggacctgaaggtggatggggacacagctcctggcttctcctggtgctgccctcactgtccccccgcctaaagggggtactgagcctcctgtggcccgcagcagtgagggcacagctgtgggttgcaggggagacagccagcacggcgtggccattctatgaccccccagcctggcagactggggagctgggggcagagggcggtgccaagtgccacatcttgccatagtggatgctcttccagtttcttttttctattaaacaccccacttcctttg

SEQ ID NO: 38319 - DNA, 1689 bp, Homo sapiens
agagatgtctgcatgaggaacagaggctgctttgtggattggggagctccccattagcggaggcagagccagatttcacactgagcagctgcagtcggagaaatcagagaaagcgtcacccagccccagattccgaggggcctgccagggactctctcctcctgctccttggaaaggaagaccccgaaagacccccaagccaccggctcagacctgcttctgggctgccatgggacttgcggccaccgccccccggctgtcctccacgctgccgggcagataagggcagctgctgcccttggggcacctgctcactcccgcagcccagccactcctccagggccagcccttccctgactcagtgaccacctctgctgccccgaggccatgtaggccgtgcttaggcctctgtggacacactgctggggacggcgcctgagctctcagggggacgaggaacaccaccatgccccggggcttcacctggctgcgctatcttgggatcttccttggcgtggccttggggaatgagcctttggagatgtggcccttgacgcagaatgaggagtgcactgtcacgggttttctgcgggacaagctgcagtacaggagccgacttcagtacatgaaacactacttccccatcaactacaagatcagtgtgccttacgagggggtgttcagaatcgccaacgtcaccaggctgcagagggcccaggtgagcgagcgggagctgcggtatctgtgggtcttggtgagcctcagtgccactgagtcggtgcaggacgtgctgctcgagggccacccatcctggaagtacctgcaggaggtgcagacgctgctgctgaatgtccagcagggcctcacggatgtggaggtcagccccaaggtggaatccgtgttgtccctcttgaatgccccagggccaaacctgaagctggtgcggcccaaagccctgctggacaactgcttccgggtcatggagctgctgtactgctcctgctgtaaacaaagctccgtcctaaactggcaggactgtgaggtgccaagtcctcagtcttgcagcccagagccctcattgcagtatgcggccacccagctgtaccctccgcccccgtggtcccccagctccccgcctcactccacgggctcggtgaggccggtcagggcacagggcgagggcctcttgccctgagcaccctggatggtgactgcggataggggcagccagaccagctcccacaggagttcaactgggtctgagacttcaaggggtggtggtgggagccccccttgggagaggacccctgggaagggtgtttttcctttgagggggattctgtgccacagcagggctcagcttcctgccttccatagctgtcatggcctcacctggagcggaggggacctggggacctgaaggtggatggggacacagctcctggcttctcctggtgctgccctcactgtccccccgcctaaagggggtactgagcctcctgtggcccgcagcagtgagggcacagctgtgggttgcaggggagacagccagcacggcgtggccattctatgaccccccagcctggcagactggggagctgggggcagagggcggtgccaagtgccacatcttgccatagtggatgctcttccagtttcttttttctattaaacaccccacttcctttg

SEQ ID NO: 38320 - DNA, 802 bp, Homo sapiens
  misc_feature (776)..(776): n is a, c, g, or t
  misc_feature (795)..(795): n is a, c, g, or t
caaagcatcccaactccgcccgggacgcggttccagtccgcaccaacttggcgtaattgacatgggtaggtggggccgggacgcgtcccctgcccctctgcggcaacgacatggagcgctggggcggcctccgcgcccgcggcgtgcggaccgcggttcctgaaaaattacccgcgctgtgcggtacggtaagacccggcgtccgcgtctggatctcaaggctgagcgagcgctcatcgggctcaagaatctcgctctatggcccaggctggagtacagtgacacgatcacggctcactgcagtctctgcctcccagatggaaatcctgtatgaatgtggaagccattagcagagtaattgctgtctgttaccatgacaaccagccgctgcagtcacctgcccgaagtcctgccagactgcaccagctcagctgcacccgtggtgaagacggtggaggattgtggcagcctagtgaatgggcagccgcagtatgtcatgcaagtttcagccaaggacgggcagctgctgtcaacagtagtgcggactcttgccacccagagccccttcaatgaccggccgatgtgcaggatctgccacgagggcagcagccaagaggacttgctctctccatgtgaatgtacagggaccttggggacaattcatcggagctgcctggagcactggctgtcatcctcaaacaccagctactgtgaactctgccacttcaggtttgcagtcgagcgcaaacccaggccgttagtggagtggcttgaanaaacccttggccccccaancattgaa

SEQ ID NO: 38321 - DNA, 1820 bp, Homo sapiens
ataaggctaggtacgaggctgggtgagcaggtccgtgaattgtcagcgcgctgtgggcgactgtgtggccgcggcggccgccaggcttgccgcactccccctgaggtgcccgccggaaccaatgtgccctggtccactgggccgtgagcagccaccgactgggggcaacttggcacttagaaccgcagcagggacgtcggtttgctatcgggactcggcgaggacgatggaaatcctgtatgaatgtggaagccattagcagagtaattgctgtctgttaccatgacaaccagccgctgcagtcacctgcccgaagtcctgccagactgcaccagctcagctgcacccgtggtgaagacggtggaggattgtggcagcctagtgaatgggcagccgcagtatgtcatgcaagtttcagccaaggacgggcagctgctgtcaacagtagtgcggactcttgccacccagagccccttcaatgaccggccgatgtgcaggatctgccacgagggcagcagccaagaggacttgctctctccatgtgaatgtacagggaccttggggacaattcatcggagctgcctggagcactggctgtcatcctcaaacaccagctactgtgaactctgccacttcaggtttgcagtcgagcgcaaacccaggccgttagtggagtggctgagaaaccctggcccccagcatgagaagcggactctgtttggcgacatggtgtgcttcttgtttataactcccctggccaccatctcgggctggctgtgcctgcggggcgccgtggaccacctgcactttagtagtcggctggaagccgtcggactgattgcactcactgtcgcactcttcactatttacctcttttggacactagtgtcatttaggtaccactgtcgattgtacaacgagtggcgtcggaccaatcagagggtgattctcctcattccaaagtctgtcaatgtaccttctaaccagccgtccttgctgggcctccattcggtcaagaggaactcaaaggagacagttgtttgatgtttgtatggttggttggttgtttgattcattgtttggggtttggaagtgtctgcactggggtcatgcactgagcgacccccaagcccttccttaagcctgtgggtctaagaacatccagagcatattagcacatcactccaagcaacaacctccgccagaagaaagcaaatgctgttttacttcaaatgatggatgctgcaatcatatgatatttgctaagctgccaaacatgtttatttagcagatactgtatggaattttctgaacacctctttaacgtatgaggaaggttgtcctgctacggatgcaattcaattcttccttttttattactatttcaaacacacacacatatatatatatattaaacttagatgataatcaaaatcaaaaagtcaacgtaaaaactggtttcttggtttggttgggtcttatttgagttagtttgtttctcagtttctcgtatggattctttggggtactttggtagcctgagtggtctttttcatctctttcgcgtccattactcaaggagacagcataacagatgcagaacaagtcatatttgaagaatgttttgtactaaacttcatttaattattcagtttttaaagggaaaaagggcgtgagctcacacagtgagctgtttatttaaatatcattaaggagaaaaaaaaatatggtgagaagctcgctcctttcaacttgtttggtactgacagctgatagaagctattttctaataataaacatccagtgtgtgaaagacaaaa

SEQ ID NO: 38322 - DNA, 3070 bp, Homo sapiens
tattccaggctgttcggctgcgagtgacccctgagaggtcgggatctccgagctcgtccgatgtctccatcccagccaggagcttgcgaaggggaaggagggcggaagcagagtgggacagatgtggttcgttctggggcttcctgtccacgaagatggataattctagcgacccgcctgggattttggaatcctggcggacccaaaagacagcagaagtcaccgcagaggatgccaccccgcacggcagcccgcccagagcgacggtctcacaggttccggcgccgtcgagcgcccaagcctcctgttggccgccagctgtgtccgcgacgcgctgggtcgggaggaggagacccgaggcgccggtaagtcccccgctgcaggtggcccggagggcaggggtgaggacggggacgtgtactgaactttgggaggtttgcggggctggagttttgtttcagagatagccagatcgagatcagaacgttttccagagagcccaggtttccacttgtggctgggcgacccggtccggaattcatcctttctcggccctcagcttcctccgggcggggttccgatggggcagctaagttccgcgcctcctgccggtgccagatactggcgtgtcgacccgcgctgcggttggcttcttgctccacagcgctatgcgcgcggcggctccgagggctcctggtctctctcagccaacggccttctggggccgccgcctccctctagagctgctcgggtcccattgcagagagtcccgcagcgcccgccggcagccacggcacttcgcaataaccaacttccccgccgccggcgcgtcccgccagcctgccctcggccgcaggcgactggacggcggttacggggcggtcccagcgccaccacgactggctgtcggctccgccagtcatgggctgatgacgccccggggctggctccgcccctagcggcagccccgcctcccctccagagcctggtcggcttagccctgctttccgcctcactcgttgagcaggtccgtgaattgtcagcgcgctgtgggcgactgtgtggccgcggcggccgccaggcttgccgcactccccctgaggtgcccgccggaaccaatgtgccctggtccactgggccgtgagcagccaccgactgggggcaacttggcacttagaaccgcagcagggacgtcggtttgctatcgggactcggcgaggacgatggaaatcctgtatgaatgtggaagccattagcagagtaattgctgtctgttaccatgacaaccagccgctgcagtcacctgcccgaagtcctgccagactgcaccagctcagctgcacccgtggtgaagacggtggaggattgtggcagcctagtgaatgggcagccgcagtatgtcatgcaagtttcagccaaggacgggcagctgctgtcaacagtagtgcggactcttgccacccagagccccttcaatgaccggccgatgtgcaggatctgccacgagggcagcagccaagaggacttgctctctccatgtgaatgtacagggaccttggggacaattcatcggagctgcctggagcactggctgtcatcctcaaacaccagctactgtgaactctgccacttcaggtttgcagtcgagcgcaaacccaggccgttagtggagtggctgagaaaccctggcccccagcatgagaagcggactctgtttggcgacatggtgtgcttcttgtttataactcccctggccaccatctcgggctggctgtgcctgcggggcgccgtggaccacctgcactttagtagtcggctggaagccgtcggactgattgcactcactgtcgcactcttcactatttacctcttttggacactagtgtcatttaggtaccactgtcgattgtacaacgagtggcgtcggaccaatcagagggtgattctcctcattccaaagtctgtcaatgtaccttctaaccagccgtccttgctgggcctccattcggtcaagaggaactcaaaggagacagttgtttgatgtttgtatggttggttggttgtttgattcattgtttggggtttggaagtgtctgcactggggtcatgcactgagcgacccccaagcccttccttaagcctgtgggtctaagaacatccagagcatattagcacatcactccaagcaacaacctccgccagaagaaagcaaatgctgttttacttcaaatgatggatgctgcaatcatatgatatttgctaagctgccaaacatgtttatttagcagatactgtatggaattttctgaacacctctttaacgtatgaggaaggttgtcctgctacggatgcaattcaattcttccttttttattactatttcaaacacacacacatatatatatatattaaacttagatgataatcaaaatcaaaaagtcaacgtaaaaactggtttcttggtttggttgggtcttatttgagttagtttgtttctcagtttctcgtatggattctttggggtactttggtagcctgagtggtctttttcatctctttcgcgtccattactcaaggagacagcataacagatgcagaacaagtcatatttgaagaatgttttgtactaaacttcatttaattattcagtttttaaagggaaaaagggcgtgagctcacacagtgagctgtttatttaaatatcattaaggagaaaaaaaaatatggtgagaagctcgctcctttcaacttgtttggtactgacagctgatagaagctattttctaataataaacatccagtgtgtgaaagacaaaacccactgattgcaatactctttttttaatgataaaacctgtgaagtttcccaaagcaggttttaaaaggaaaaaaaggaaaagcaaaaaggttgctgttctcactcccatctcatttagtgcatgtcttaattcgggattcgtaatgaattggaggatcattagacatttctaggaaccctagacctgttttgcatgtcaattagcattcccattgctctattgaatttctagcttgacaggtagatgtggca

SEQ ID NO: 38323 - DNA, 1224 bp, Homo sapiens
tatgtggggaaaagacgggtacaggagagggaaaacagaggttaggctgcagcgactctcttaattatccaccgctcagtggctgagaaaccctggcccccagcatgagaagcggactctgtttggcgacatggtgtgcttcttgtttataactcccctggccaccatctcgggctggctgtgcctgcggggcgccgtggaccacctgcactttagtagtcggctggaagccgtcggactgattgcactcactgtcgcactcttcactatttacctcttttggacactagtgtcatttaggtaccactgtcgattgtacaacgagtggcgtcggaccaatcagagggtgattctcctcattccaaagtctgtcaatgtaccttctaaccagccgtccttgctgggcctccattcggtcaagaggaactcaaaggagacagttgtttgatgtttgtatggttggttggttgtttgattcattgtttggggtttggaagtgtctgcactggggtcatgcactgagcgacccccaagcccttccttaagcctgtgggtctaagaacatccagagcatattagcacatcactccaagcaacaacctccgccagaagaaagcaaatgctgttttacttcaaatgatggatgctgcaatcatatgatatttgctaagctgccaaacatgtttatttagcagatactgtatggaattttctgaacacctctttaacgtatgaggaaggttgtcctgctacggatgcaattcaattcttccttttttattactatttcaaacacacacacatatatatatatattaaacttagatgataatcaaaatcaaaaagtcaacgtaaaaactggtttcttggtttggttgggtcttatttgagttagtttgtttctcagtttctcgtatggattctttggggtactttggtagcctgagtggtctttttcatctctttcgcgtccattactcaaggagacagcataacagatgcagaacaagtcatatttgaagaatgttttgtactaaacttcatttaattattcagtttttaaagggaaaaagggcgtgagctcacacagtgagctgtttatttaaatatcattaaggagaaaaaaaaatatggtgagaagctcgctcctttcaacttgtttggtactgacagctgatagaagctattttctaataataaacatccagtgtgtgaaagacaaaa

SEQ ID NO: 38324 - DNA, 1224 bp, Homo sapiens
cggaaaggtgagcaaaattaagagaaaagaaaagaaagagatttatctgcaacgactctcttaatttccaccgctacactggctgagaaaccctggcccccagcatgagaagcggactctgtttggcgacatggtgtgcttcttgtttataactcccctggccaccatctcgggctggctgtgcctgcggggcgccgtggaccacctgcactttagtagtcggctggaagccgtcggactgattgcactcactgtcgcactcttcactatttacctcttttggacactagtgtcatttaggtaccactgtcgattgtacaacgagtggcgtcggaccaatcagagggtgattctcctcattccaaagtctgtcaatgtaccttctaaccagccgtccttgctgggcctccattcggtcaagaggaactcaaaggagacagttgtttgatgtttgtatggttggttggttgtttgattcattgtttggggtttggaagtgtctgcactggggtcatgcactgagcgacccccaagcccttccttaagcctgtgggtctaagaacatccagagcatattagcacatcactccaagcaacaacctccgccagaagaaagcaaatgctgttttacttcaaatgatggatgctgcaatcatatgatatttgctaagctgccaaacatgtttatttagcagatactgtatggaattttctgaacacctctttaacgtatgaggaaggttgtcctgctacggatgcaattcaattcttccttttttattactatttcaaacacacacacatatatatatatattaaacttagatgataatcaaaatcaaaaagtcaacgtaaaaactggtttcttggtttggttgggtcttatttgagttagtttgtttctcagtttctcgtatggattctttggggtactttggtagcctgagtggtctttttcatctctttcgcgtccattactcaaggagacagcataacagatgcagaacaagtcatatttgaagaatgttttgtactaaacttcatttaattattcagtttttaaagggaaaaagggcgtgagctcacacagtgagctgtttatttaaatatcattaaggagaaaaaaaaatatggtgagaagctcgctcctttcaacttgtttggtactgacagctgatagaagctattttctaataataaacatccagtgtgtgaaagacaaaa

SEQ ID NO: 38325 - DNA, 2817 bp, Homo sapiens
tattccaggctgttcggctgcgagtgacccctgagaggtcgggatctccgagctcgtccgatgtctccatcccagccaggagcttgcgaaggggaaggagggcggaagcagagtgggacagatgtggttcgttctggggcttcctgtccacgaagatggataattctagcgacccgcctgggattttggaatcctggcggacccaaaagacagcagaagtcaccgcagaggatgccaccccgcacggcagcccgcccagagcgacggtctcacaggttccggcgccgtcgagcgcccaagcctcctgttggccgccagctgtgtccgcgacgcgctgggtcgggaggaggagacccgaggcgccggtaagtcccccgctgcaggtggcccggagggcaggggtgaggacggggacgtgtactgaactttgggaggtttgcggggctggagttttgtttcagagatagccagatcgagatcagaacgttttccagagagcccaggtttccacttgtggctgggcgacccggtccggaattcatcctttctcggccctcagcttcctccgggcggggttccgatggggcagctaagttccgcgcctcctgccggtgccagatactggcgtgtcgacccgcgctgcggttggcttcttgctccacagcgctatgcgcgcggcggctccgagggctcctggtctctctcagccaacggccttctggggccgccgcctccctctagagctgctcgggtcccattgcagagagtcccgcagcgcccgccggcagccacggcacttcgcaataaccaacttccccgccgccggcgcgtcccgccagcctgccctcggccgcaggcgactggacggcggttacggggcggtcccagcgccaccacgactggctgtcggctccgccagtcatgggctgatgacgccccggggctggctccgcccctagcggcagccccgcctcccctccagagcctggtcggcttagccctgctttccgcctcactcgttgagcaggtccgtgaattgtcagcgcgctgtgggcgactgtgtggccgcggcggccgccaggcttgccgcactccccctgaggtgcccgccggaaccaatgtgccctggtccactgggccgtgagcagccaccgactgggggcaacttggcacttagaaccgcagcagggacgtcggtttgctatcgggactcggcgaggacgatggaaatcctgtatgaatgtggaagccattagcagagtaattgctgtctgttaccatgacaaccagccgctgcagtcacctgcccgaagtcctgccagactgcaccagctcagctgcacccgtggtgaagacggtggaggattgtggcagcctagtgaatgggcagccgcagtatgtcatgcaagtttcagccaaggacgggcagctgctgtcaacagtagtgcggactcttgccacccagagccccttcaatgaccggccgatgtgcaggatctgccacgagggcagcagccaagaggacttgctctctccatgtgaatgtacagggaccttggggacaattcatcggagctgcctggagcactggctgtcatcctcaaacaccagctactgtgaactctgccacttcaggtttgcagtcgagcgcaaacccaggccgttagtggagtggctgagaaaccctggcccccagcatgagaagcggactctgtttggcgacatggtgtgcttcttgtttataactcccctggccaccatctcgggctggctgtgcctgcggggcgccgtggaccacctgcactttagtagtcggctggaagccgtcggactgattgcactcactgtcgcactcttcactatttacctcttttggacactagtgtcatttaggtaccactgtcgattgtacaacgagtggcgtcggaccaatcagagggtgattctcctcattccaaagtctgtcaatgtaccttctaaccagccgtccttgctgggcctccattcggtcaagaggaactcaaaggagacagttgtttgatgtttgtatggttggttggttgtttgattcattgtttggggtttggaagtgtctgcactggggtcatgcactgagcgacccccaagcccttccttaagcctgtgggtctaagaacatccagagcatattagcacatcactccaagcaacaacctccgccagaagaaagcaaatgctgttttacttcaaatgatggatgctgcaatcatatgatatttgctaagctgccaaacatgtttatttagcagatactgtatggaattttctgaacacctctttaacgtatgaggaaggttgtcctgctacggatgcaattcaattcttccttttttattactatttcaaacacacacacatatatatatatattaaacttagatgataatcaaaatcaaaaagtcaacgtaaaaactggtttcttggtttggttgggtcttatttgagttagtttgtttctcagtttctcgtatggattctttggggtactttggtagcctgagtggtctttttcatctctttcgcgtccattactcaaggagacagcataacagatgcagaacaagtcatatttgaagaatgttttgtactaaacttcatttaattattcagtttttaaagggaaaaagggcgtgagctcacacagtgagctgtttatttaaatatcattaaggagaaaaaaaaatatggtgagaagctcgctcctttcaacttgtttggtactgacagctgatagaagctattttctaataataaacatccagtgtgtgaaagacaaaa

SEQ ID NO: 38326 - DNA, 3139 bp, Homo sapiens
tattccaggctgttcggctgcgagtgacccctgagaggtcgggatctccgagctcgtccgatgtctccatcccagccaggagcttgcgaaggggaaggagggcggaagcagagtgggacagatgtggttcgttctggggcttcctgtccacgaagatggataattctagcgacccgcctgggattttggaatcctggcggacccaaaagacagcagaagtcaccgcagaggatgccaccccgcacggcagcccgcccagagcgacggtctcacaggttccggcgccgtcgagcgcccaagcctcctgttggccgccagctgtgtccgcgacgcgctgggtcgggaggaggagacccgaggcgccggtaagtcccccgctgcaggtggcccggagggcaggggtgaggacggggacgtgtactgaactttgggaggtttgcggggctggagttttgtttcagagatagccagatcgagatcagaacgttttccagagagcccaggtttccacttgtggctgggcgacccggtccggaattcatcctttctcggccctcagcttcctccgggcggggttccgatggggcagctaagttccgcgcctcctgccggtgccagatactggcgtgtcgacccgcgctgcggttggcttcttgctccacagcgctatgcgcgcggcggctccgagggctcctggtctctctcagccaacggccttctggggccgccgcctccctctagagctgctcgggtcccattgcagagagtcccgcagcgcccgccggcagccacggcacttcgcaataaccaacttccccgccgccggcgcgtcccgccagcctgccctcggccgcaggcgactggacggcggttacggggcggtcccagcgccaccacgactggctgtcggctccgccagtcatgggctgatgacgccccggggctggctccgcccctagcggcagccccgcctcccctccagagcctggtcggcttagccctgctttccgcctcactcgttgagcaggtccgtgaattgtcagcgcgctgtgggcgactgtgtggccgcggcggccgccaggcttgccgcactccccctgaggtgcccgccggaaccaatgtgccctggtccactgggccgtgagcagccaccgactgggggcaacttggcacttagaaccgcagcagggacgtcggtttgctatcgggactcggcgaggacgatggaaatcctgtatgaatgtggaagccattagcagagtaattgctgtctgttaccatgacaaccagccgctgcagtcacctgcccgaagtcctgccagactgcaccagctcagctgcacccgtggtgaagacggtggaggattgtggcagcctagtgaatgggcagccgcagtatgtcatgcaagtttcagccaaggacgggcagctgctgtcaacagtagtgcggactcttgccacccagagccccttcaatgaccggccgatgtgcaggatctgccacgagggcagcagccaagaggacttgctctctccatgtgaatgtacagggaccttggggacaattcatcggagctgcctggagcactggctgtcatcctcaaacaccagctactgtgaactctgccacttcaggtttgcagtcgagcgcaaacccaggccgttagtggagtggctgagaaaccctggcccccagcatgagaagcggactctgtttggcgacatggtgtgcttcttgtttataactcccctggccaccatctcgggctggctgtgcctgcggggcgccgtggaccacctgcactttagtagtcggctggaagccgtcggactgattgcactcactgtcgcactcttcactatttacctcttttggacactagtgtcatttaggtaccactgtcgattgtacaacgagtggcgtcggaccaatcagagggtgattctcctcattccaaagtctgtcaatgtaccttctaaccagccgtccttgctgggcctccattcggtcaagaggaactcaaaggagacagttgtttgatgtttgtatggttggttggttgtttgattcattgtttggggtttggaagtgtctgcactggggtcatgcactgagcgacccccaagcccttccttaagcctgtgggtctaagaacatccagagcatattagcacatcactccaagcaacaacctccgccagaagaaagcaaatgctgttttacttcaaatgatggatgctgcaatcatatgatatttgctaagctgccaaacatgtttatttagcagatactgtatggaattttctgaacacctctttaacgtatgaggaaggttgtcctgctacggatgcaattcaattcttccttttttattactatttcaaacacacacacatatatatatatattaaacttagatgataatcaaaatcaaaaagtcaacgtaaaaactggtttcttggtttggttgggtcttatttgagttagtttgtttctcagtttctcgtatggattctttggggtactttggtagcctgagtggtctttttcatctctttcgcgtccattactcaaggagacagcataacagatgcagaacaagtcatatttgaagaatgttttgtactaaacttcatttaattattcagtttttaaagggaaaaagggcgtgagctcacacagtgagctgtttatttaaatatcattaaggagaaaaaaaaatatggtgagaagctcgctcctttcaacttgtttggtactgacagctgatagaagctattttctaataataaacatccagtgtgtgaaagacaaaaaaaaaaaaaaaaaaaaaaaaaaaactttgggggccgcggggctggaaaaagctttttaaacccatccccggtggggcgcgccgccccaaatagtgatacgcgcgccagtgggccatagcgatggtccccaaggagagccccgcggcggcaaagaccctagcgtgcggggcgttcccccccaaataaaaaaagcgccccgggcgacaacacgggcgtctcccggcaacaactccccgaggtgcgcggcacagcaggcacaacacggggctcaccaacgggcggcccagcggagggcaaaataaaaataccgcgcaggggtgat

SEQ ID NO: 38327 - DNA, 1182 bp, Homo sapiens
  misc_feature (25)..(25): n is a, c, g, or t
acttaagctacgggcctctgtctanaagaccaacaagtggctgagaaaccctggcccccagcatgagaagcggactctgtttggcgacatggtgtgcttcttgtttataactcccctggccaccatctcgggctggctgtgcctgcggggcgccgtggaccacctgcactttagtagtcggctggaagccgtcggactgattgcactcactgtcgcactcttcactatttacctcttttggacactagtgtcatttaggtaccactgtcgattgtacaacgagtggcgtcggaccaatcagagggtgattctcctcattccaaagtctgtcaatgtaccttctaaccagccgtccttgctgggcctccattcggtcaagaggaactcaaaggagacagttgtttgatgtttgtatggttggttggttgtttgattcattgtttggggtttggaagtgtctgcactggggtcatgcactgagcgacccccaagcccttccttaagcctgtgggtctaagaacatccagagcatattagcacatcactccaagcaacaacctccgccagaagaaagcaaatgctgttttacttcaaatgatggatgctgcaatcatatgatatttgctaagctgccaaacatgtttatttagcagatactgtatggaattttctgaacacctctttaacgtatgaggaaggttgtcctgctacggatgcaattcaattcttccttttttattactatttcaaacacacacacatatatatatatattaaacttagatgataatcaaaatcaaaaagtcaacgtaaaaactggtttcttggtttggttgggtcttatttgagttagtttgtttctcagtttctcgtatggattctttggggtactttggtagcctgagtggtctttttcatctctttcgcgtccattactcaaggagacagcataacagatgcagaacaagtcatatttgaagaatgttttgtactaaacttcatttaattattcagtttttaaagggaaaaagggcgtgagctcacacagtgagctgtttatttaaatatcattaaggagaaaaaaaaatatggtgagaagctcgctcctttcaacttgtttggtactgacagctgatagaagctattttctaataataaacatccagtgtgtgaaagacaaaa

SEQ ID NO: 38328 - DNA, 2242 bp, Homo sapiens
tattccaggctgttcggctgcgagtgacccctgagaggtcgggatctccgagctcgtccgatgtctccatcccagccaggagcttgcgaaggggaaggagggcggaagcagagtgggacagatgtggttcgttctggggcttcctgtccacgaagatggataattctagcgacccgcctgggattttggaatcctggcggacccaaaagacagcagaagtcaccgcagaggatgccaccccgcacggcagcccgcccagagcgacggtctcacaggttccggcgccgtcgagcgcccaagcctcctgttggccgccagctgtgtccgcgacgcgctgggtcgggaggaggagacccgaggcgccggtaagtcccccgctgcaggtggcccggagggcaggggtgaggacggggacgtgtactgaactttgggaggtttgcggggctggagttttgtttcagagatagccagatcgagatcagaacgttttccagagagcccaggtttccacttgtggctgggcgacccggtccggaattcatcctttctcggccctcagcttcctccgggcggggttccgatggggcagctaagttccgcgcctcctgccggtgccagatactggcgtgtcgacccgcgctgcggttggcttcttgctccacagcgctatgcgcgcggcggctccgagggctcctggtctctctcagccaacggccttctggggccgccgcctccctctagagctgctcgggtcccattgcagagagtcccgcagcgcccgccggcagccacggcacttcgcaataaccaacttccccgccgccggcgcgtcccgccagcctgccctcggccgcaggcgactggacggcggttacggggcggtcccagcgccaccacgactggctgtcggctccgccagtcatgggctgatgacgccccggggctggctccgcccctagcggcagccccgcctcccctccagagcctggtcggcttagccctgctttccgcctcactcgttgagcaggtccgtgaattgtcagcgcgctgtgggcgactgtgtggccgcggcggccgccaggcttgccgcactccccctgaggtgcccgccggaaccaatgtgccctggtccactgggccgtgagcagccaccgactgggggcaacttggcacttagaaccgcagcagggacgtcggtttgctatcgggactcggcgaggacgatggaaatcctgtatgaatgtggaaccgtcggactgattgcactcactgtcgcactcttcactatttacctcttttggacactagtgtcatttaggtaccactgtcgattgtacaacgagtggcgtcggaccaatcagagggtgattctcctcattccaaagtctgtcaatgtaccttctaaccagccgtccttgctgggcctccattcggtcaagaggaactcaaaggagacagttgtttgatgtttgtatggttggttggttgtttgattcattgtttggggtttggaagtgtctgcactggggtcatgcactgagcgacccccaagcccttccttaagcctgtgggtctaagaacatccagagcatattagcacatcactccaagcaacaacctccgccagaagaaagcaaatgctgttttacttcaaatgatggatgctgcaatcatatgatatttgctaagctgccaaacatgtttatttagcagatactgtatggaattttctgaacacctctttaacgtatgaggaaggttgtcctgctacggatgcaattcaattcttccttttttattactatttcaaacacacacacatatatatatatattaaacttagatgataatcaaaatcaaaaagtcaacgtaaaaactggtttcttggtttggttgggtcttatttgagttagtttgtttctcagtttctcgtatggattctttggggtactttggtagcctgagtggtctttttcatctctttcgcgtccattactcaaggagacagcataacagatgcagaacaagtcatatttgaagaatgttttgtactaaacttcatttaattattcagtttttaaagggaaaaagggcgtgagctcacacagtgagctgtttatttaaatatcattaaggagaaaaaaaaatatggtgagaagctcgctcctttcaacttgtttggtactgacagctgatagaagctattttctaataataaacatccagtgtgtgaaagacaaaa

SEQ ID NO: 38329 - DNA, 490 bp, Homo sapiens
caccagcccagaagcagactcacagctctgacattttcaacaggtagataggagcagcgaacagattcaaactccctctcatcctcatctctcaccagctggacaacactgctgtgcagggacagcgtctcagacacagacggtgcttcttgaatcatttgtctttctggggccttccaagttgggttattttgtcctatcctttctagcgactgcatactgatactttctttcccctttttctcttgcttcctgccaacttaactttatccaggatggtctttgcatttgttgtgcccacaactctccaaccgctattcttttgtagattttatctgacagatttcattttaccttctgcacaggcatctgaccatcccctgacgtctgatgtcttctcccctcccaggcctgagtgcctgatcattccctcaagaatcttgcagaaaggccatcttccctggctactcccaaatggagttcaaagctc

SEQ ID NO: 38330 - DNA, 807 bp, Homo sapiens
actgtcagggaatgcagtccagtaggtttcagcctcattttacccagctcctattcaagatggagttgctctggttcacgtgcctctgacactgctagataaaatataggatgcaaataatacatcctgtaatatcctaaaatattatcctaaaaattaatttttgtgtatctgatattcaaatttaactgaacctcctatattttaatttgataattctagcaatccttcatataacatttctgagaggtaggtatttcttatatacagagttttatagataaggaaactgaggctcagaggcattggataatttttccaaaattggacttcagatgaaatctgctggtctgcagaggcatatgctctctaagcattattcctggcttggtgaatgtgaagtaagatgctgcatactgtgacatggcattctttgggacagcctagattctatctgtttaaaggagtgaattacatggcctctgggtcatcttcagatctgctgctcctaagataaaagtcctatccaatagttggaaaatgcaatactctgaatattatcttaatgtagggatggaactcttttgagcacaaaagcaaaatctgggccaaaagcctagtcactgtaagtactactggaagcagtgaagataaaatacattgtgcacgataaggtaccttttaaataatcttttaacagttttttgttttgcttaatatactcccctgtaaatattggtttcctttattagactattatagtaaaattaaattagcactttgcagaatatttttttcaaaaaaaaa

SEQ ID NO: 38331 - DNA, 261 bp, Homo sapiens
gactcagaagaaatgctctctgactcggttatgtctgggtttggattattcaacagttgcattgttttctgttagtcattttgtcccctcctcattatgtggaacccatagcttcagactggaaatgtagatcagagctctgggacagctgggatctgtttacctatgtacctgtttcccctgccgctcactgccagatatcctagactgagcctaacaacccatctaagagaaaaaggtagactcaagaaaaacgagaaa

SEQ ID NO: 38332 - DNA, 409 bp, Homo sapiens
gatgagttggcagtaagaagtagaaaccaggaaagagggcctgaagagacacagccagaccaatgatgtggaaaaatttaagtgtccacagaaggaagacacttggaaatagaaccttcaaggggcacaggtaagaataacactggagctgtctccaccattctgcccctagtacctactgtagtaggattagtattgacagtcacaactcagacatgttcatatctgaatgtgatggagtaacagcaactaactatatcctcacacctccttaaaaaaggcaaaatttggccaggcagggtgactcatgcctgtaatcccagcactttgggaggctgagggggtgtggatcaggaggtcaggagattgagactatcctggttaacgtggtgaaaccccttctctacta

SEQ ID NO: 38333 - DNA, 420 bp, Homo sapiens
cagaatcgacctgaccttgctgacagatggtacaaaatctggcagggtccttgcagggccagccacagattttctggggctgggtgcaagctgaaacttcaggctcttctgagcctggaaccctctgggacagcccagttcgcgcacctgccaaaccggccctgggtccgggatactgatgctggagtcttcaagagcctgggactagaggttcaaagacaccagctcagccccccgctaagctctgacatcccaaggctgcccttccccctctctgtgtctcaattttctcatctgtaaaatgggtatgatccaccaggtgggaggtgggggctggaggcttgcccagcatctcgtctggctcctgggggcaccagcatgggccccaaccagcgatgggagaggggatgggactgcttc

SEQ ID NO: 38334 - DNA, 398 bp, Homo sapiens
ttgggctcagaacctgcgaggatggcagcggtgtccagcagtgaagactgaaggtgtccacagctgtgataggggcttctgggtcctcttgcttgcttttcttcacaggaagaagtccctcctagctcctagggggtttgattgtgagcggcaagggtgtggcagagattatgctccaagacactgaatctgaaaggatgcatccagtcttgccaagtggtttcactaccaaggccagtctccatctatgatagacccaaggaagatcatttacaactagaatctagtcatttaggagattgtgtgctccctggaatgggccatctgcactgggtgtgaggtttatctcatttgaagggaaaaccaaaggaatcttctttgaatatcagcaccaggaa

SEQ ID NO: 38335 - DNA, 369 bp, Homo sapiens
cacagggctgtgagagacatgagggcagagtttgtggcttctaggtccattatgttcactgctccatggtcagaacttggtgcagagcccgacatatggtaggcatgaaatatacaaatttagaatacataatggagattagttgtatcacacattgctgttattacctctctgtctccttcatacccttttatccccagttgaagtgcttgtataccccagtgccctagcctctctcaaagtctcttctgacacaacactctctctctggtaatatatttccagaatttcaaatgtcttccatagctgtgtttacagcccagatgggccctcaagatttaggccaagaataacccaccacctacctgt

SEQ ID NO: 38336 - DNA, 854 bp, Homo sapiens
agcggaaatgcttgaggagagagagagagtaaggagccagccatgaatcctttccagaaaaatgagtccaaggaaactcttttttcacctgtctccattgaagaggtaccacctcgaccacctagccctccaaagaagccatctccgacaatctgtggctccaactatccactgagcattgccttcattgtggtgaatgaattctgcgagcgcttttcctattatggaatgaaagctgtgctgatcctgtatttcctgtatttcctgcactggaatgaagatacctccacatctatataccatgccttcagcagcctctgttattttactcccatcctgggagcagccattgctgactcgtggttgggaaaattcaaagtcctatcattgatcggcctgagtctaatagctttggggacaggaggcatcaaaccctgtgtggcagcttttggtggagaccagtttgaagaaaaacatgcagaggaacggactagatacttctcagtcttctacctgtccatcaatgcagggagcttgatttctacatttatcacacccatgctgagaggagatgtgcaatgttttggagaagactgctatgcattggcttttggagttccaggactgctcatggtaattgcacttgtacgtgtagccaatgggaacgcaagaatatacaataaaacaccccctgaaggacaccatagttggctcaagttttcaaattgtctctggtcgctaattacccaatcgctctcaaggaaccggtcggagacttccaaagcgacacgcatggctaacacgggcggtgccaaattccaaagcagccatcaggctgtcacgcctgacaagta

SEQ ID NO: 38337 - DNA, 3751 bp, Homo sapiens
agcggaaatgcttgaggagagagagagagtaaggagccagccatgaatcctttccagaaaaatgagtccaaggaaactcttttttcacctgtctccattgaagaggtaccacctcgaccacctagccctccaaagaagccatctccgacaatctgtggctccaactatccactgagcattgccttcattgtggtgaatgaattctgcgagcgcttttcctattatggaatgaaagctgtgctgatcctgtatttcctgtatttcctgcactggaatgaagatacctccacatctatataccatgccttcagcagcctctgttattttactcccatcctgggagcagccattgctgactcgtggttgggaaaattcaagacaatcatctatctctccttggtgtatgtgcttggccatgtgatcaagtccttgggtgccttaccaatactgggaggacaagtggtacacacagtcctatcattgatcggcctgagtctaatagctttggggacaggaggcatcaaaccctgtgtggcagcttttggtggagaccagtttgaagaaaaacatgcagaggaacggactagatacttctcagtcttctacctgtccatcaatgcagggagcttgatttctacatttatcacacccatgctgagaggagatgtgcaatgttttggagaagactgctatgcattggcttttggagttccaggactgctcatggtaattgcacttgttgtgtttgcaatgggaagcaaaatatacaataaaccaccccctgaaggaaacatagtggctcaagttttcaaatgtatctggtttgctatttccaatcgtttcaagaaccgttctggagacattccaaagcgacagcactggctagactgggcagctgagaaatatccaaagcagctcattatggatgtaaaggcactgaccagggtactattcctttatatcccattgcccatgttctgggctcttttggatcagcagggttcacgatggactttgcaagccatcaggatgaataggaatttggggttttttgtgcttcagccggaccagatgcaggttctaaatccccttctggttcttatcttcatcccgttgtttgactttgtcatttatcgtctggtctccaagtgtggaattaacttctcatcacttaggaaaatggctgttggtatgatcctagcgtgcctggcatttgcagttgcggcagctgtagagataaaaataaatgaaatggccccagcccagccaggtccccaggaggttttcctacaagtcttgaatctggcagatgatgaggtgaaggtgacagtggtgggaaatgaaaacaattctctgttgatagagtccatcaaatcctttcagaaaacaccacactattccaaactgcacctgaaaacaaaaagccaggattttcacttccacctgaaatatcacaatttgtctctctacactgagcattctgtgcaggagaagaactggtacagtcttgtcattcgtgaagatgggaacagtatctccagcatgatggtaaaggatacagaaagcagaacaaccaatgggatgacaaccgtgaggtttgttaacactttgcataaagatgtcaacatctccctgagtacagatacctctctcaatgttggtgaagactatggtgtgtctgcttatagaactgtgcaaagaggagaataccctgcagtgcactgtagaacagaagataagaacttttctctgaatttgggtcttctagactttggtgcagcatatctgtttgttattactaataacaccaatcagggtcttcaggcctggaagattgaagacattccagccaacaaaatgtccattgcgtggcagctaccacaatatgccctggttacagctggggaggtcatgttctctgtcacaggtcttgagttttcttattctcaggctccctctagcatgaaatctgtgctccaggcagcttggctattgacaattgcagttgggaatatcatcgtgcttgttgtggcacagttcagtggcctggtacagtgggccgaattcattttgttttcctgcctcctgctggtgatctgcctgatcttctccatcatgggctactactatgttcctgtaaagacagaggatatgcggggtccagcagataagcacattcctcacatccaggggaacatgatcaaactagagaccaagaagacaaaactctgatgactccctagattctgtcctgaccccaattcctggccctgtcttgaagcattttttttcttctactggattagacaagagagatagcagcatatcagagctgatctcctccacctttctccaatgacagaagttccaggactggttttccagtacatctttaaacaaggccccagagactctatgtctgcccgtccatcagtgaactcattaaaacttgtgcagtgttgctggagctggcctggtgtctccaaatgaccatgaaaatacacacgtataatggagatcattctctgtgggtatgcaaagttatgggaattcctttataggtaactgccatttaggactgatggccctaatttttgaggtgctgatttagaggcaaaattgcagaataacaaagaaatggtatttcaagtttttttttttataagcaatgtaattatgctattcacaggggcctcaagaattggtatgtatgatgtgatctggtccagccagggcctggcttgtcagctctctaggtttgatatgactttagtaaatttgtcaatatagatggtaggaagcagaatgccattttattaaaacacaggagaagttatatctctctgattatgatagtattttatttacttatccaaaccctcctttctcagtatggatagatcatggaaaccagattagagatagtaagcattagtaaacattgttctggagaacaggaacaggtgtaagttgtagaaatcctgaagagccagtcattcttttacagagtacattcttcttagcctctatggcgctggtctatgcccttcagtgaacagttgtataaacaataattataatttgcaaccttgtcttgtcaaccttgctgatccagctttttcttattattacaccttgtcttgcttattgcagcaaatattcaataacaacaatgtttctataagtccaacttcctttattaatgtttccatttagcctcaaaaatatcaaagtagttcctttttgatgttgttttcctgatttacttttcccataagttttaaataccatttctgccttgaagcctagaaattttctttttattcaaaaaaagttacattaatgctctaggtttgaggttctaaaatggaaatgtcaatagaggagcatggtcctatgtgaggttcctatcaaaatttgtgggagtagggatggtagagcatgagggttttgtttgtgtatgtgtatggtcatgaaaaaaaattgagaaacattactcatacacaatgaatgaatcagaggacagacacgggaatggcacgactgtctagtgtgttactaggaaaaaagttcagaatcactgttctagagagcttcatttccattggttttaaaacattattctcatgtagaacagtgttgggtctcatactgttaatgttaatacgtaacaatgttcatgttaacaggcacctgttaatattaacagataatgttactgttaacaggtaagagaaattgctctaagtgc

SEQ ID NO: 38338 - DNA, 2467 bp, Homo sapiens
agcggaaatgcttgaggagagagagagagtaaggagccagccatgaatcctttccagaaaaatgagtccaaggaaactcttttttcacctgtctccattgaagaggtaccacctcgaccacctagccctccaaagaagccatctccgacaatctgtggctccaactatccactgagcattgccttcattgtggtgaatgaattctgcgagcgcttttcctattatggaatgaaagctgtgctgatcctgtatttcctgtatttcctgcactggaatgaagatacctccacatctatataccatgccttcagcagcctctgttattttactcccatcctgggagcagccattgctgactcgtggttgggaaaattcaagacaatcatctatctctccttggtgtatgtgcttggccatgtgatcaagtccttgggtgccttaccaatactgggaggacaagtggtacacacagtcctatcattgatcggcctgagtctaatagctttggggacaggaggcatcaaaccctgtgtggcagcttttggtggagaccagtttgaagaaaaacatgcagaggaacggactagatacttctcagtcttctacctgtccatcaatgcagggagcttgatttctacatttatcacacccatgctgagaggagatgtgcaatgttttggagaagactgctatgcattggcttttggagttccaggactgctcatggtaattgcacttgttgtgtttgcaatgggaagcaaaatatacaataaaccaccccctgaaggaaacatagtggctcaagttttcaaatgtatctggtttgctatttccaatcgtttcaagaaccgttctggagacattccaaagcgacagcactggctagactgggcagctgagaaatatccaaagcagctcattatggatgtaaaggcactgaccagggtactattcctttatatcccattgcccatgttctgggctcttttggatcagcagggttcacgatggactttgcaagccatcaggatgaataggaatttggggttttttgtgcttcagccggaccagatgcaggttctaaatccccttctggttcttatcttcatcccgttgtttgactttgtcatttatcgtctggtctccaagtgtggaattaacttctcatcacttaggaaaatggctgttggtatgatcctagcgtgcctggcatttgcagttgcggcagctgtagagataaaaataaatgaaatggccccagcccagccaggtccccaggaggttttcctacaagtcttgaatctggcagatgatgaggtgaaggtgacagtggtgggaaatgaaaacaattctctgttgatagagtccatcaaatcctttcagaaaacaccacactattccaaactgcacctgaaaacaaaaagccaggattttcacttccacctgaaatatcacaatttgtctctctacactgagcattctgtgcaggagaagaactggtacagtcttgtcattcgtgaagatgggaacagtatctccagcatgatggtaaaggatacagaaagcagaacaaccaatgggatgacaaccgtgaggtttgttaacactttgcataaagatgtcaacatctccctgagtacagatacctctctcaatgttggtgaagactatggtgtgtctgcttatagaactgtgcaaagaggagaataccctgcagtgcactgtagaacagaagataagaacttttctctgaatttgggtcttctagactttggtgcagcatatctgtttgttattactaataacaccaatcagggtcttcaggcctggaagattgaagacattccagccaacaaaatgtccattgcgtggcagctaccacaatatgccctggttacagctggggaggtcatgttctctgtcacaggtcttgagttttcttattctcaggctccctctagcatgaaatctgtgctccaggcagcttggctattgacaattgcagttgggaatatcatcgtgcttgttgtggcacagttcagtggcctggtacagtgggccgaattcattttgttttcctgcctcctgctggtgatctgcctgatcttctccatcatgggctactactatgttcctgtaaagacagaggatatgcggggtccagcagataagcacattcctcacatccaggggaacatgatcaaactagagaccaagaagacaaaactctgatgactccctagattctgtcctgaccccaattcctggccctgtcttgaagcattttttttcttctactggattagacaagagagatagcagcatatcagagctgatctcctccacctttctccaatgacagaagttccaggactggttttccagtacatctttaaacaaggccccagagactctatgtctgcccgtccatcagtgaactcattaaaacttgtgcagtgttgctgga

SEQ ID NO: 38339 - DNA, 2819 bp, Homo sapiens
agcggaaatgcttgaggagagagagagagtaaggagccagccatgaatcctttccagaaaaatgagtccaaggaaactcttttttcacctgtctccattgaagaggtaccacctcgaccacctagccctccaaagaagccatctccgacaatctgtggctccaactatccactgagcattgccttcattgtggtgaatgaattctgcgagcgcttttcctattatggaatgaaagctgtgctgatcctgtatttcctgtatttcctgcactggaatgaagatacctccacatctatataccatgccttcagcagcctctgttattttactcccatcctgggagcagccattgctgactcgtggttgggaaaattcaagacaatcatctatctctccttggtgtatgtgcttggccatgtgatcaagtccttgggtgccttaccaatactgggaggacaagtggtacacacagtcctatcattgatcggcctgagtctaatagctttggggacaggaggcatcaaaccctgtgtggcagcttttggtggagaccagtttgaagaaaaacatgcagaggaacggactagatacttctcagtcttctacctgtccatcaatgcagggagcttgatttctacatttatcacacccatgctgagaggagatgtgcaatgttttggagaagactgctatgcattggcttttggagttccaggactgctcatggtaattgcacttgttgtgtttgcaatgggaagcaaaatatacaataaaccaccccctgaaggaaacatagtggctcaagttttcaaatgtatctggtttgctatttccaatcgtttcaagaaccgttctggagacattccaaagcgacagcactggctagactgggcagctgagaaatatccaaagcagctcattatggatgtaaaggcactgaccagggtactattcctttatatcccattgcccatgttctgggctcttttggatcagcagggttcacgatggactttgcaagccatcaggatgaataggaatttggggttttttgtgcttcagccggaccagatgcaggttctaaatccccttctggttcttatcttcatcccgttgtttgactttgtcatttatcgtctggtctccaagtgtggaattaacttctcatcacttaggaaaatggctgttggtatgatcctagcgtgcctggcatttgcagttgcggcagctgtagagataaaaataaatgaaatggccccagcccagccaggtccccaggaggttttcctacaagtcttgaatctggcagatgatgaggtgaaggtgacagtggtgggaaatgaaaacaattctctgttgatagagtccatcaaatcctttcagaaaacaccacactattccaaactgcacctgaaaacaaaaagccaggattttcacttccacctgaaatatcacaatttgtctctctacactgagcattctgtgcaggagaagaactggtacagtcttgtcattcgtgaagatgggaacagtatctccagcatgatggtaaaggatacagaaagcagaacaaccaatgggatgacaaccgtgaggtttgttaacactttgcataaagatgtcaacatctccctgagtacagatacctctctcaatgttggtgaagactatggtgtgtctgcttatagaactgtgcaaagaggagaataccctgcagtgcactgtagaacagaagataagaacttttctctgaatttgggtcttctagactttggtgcagcatatctgtttgttattactaataacaccaatcagggtcttcaggcctggaagattgaagacattccagccaacaaaatgtccattgcgtggcagctaccacaatatgccctggttacagctggggaggtcatgttctctgtcacaggtcttgagttttcttattctcaggctccctctagcatgaaatctgtgctccaggcagcttggctattgacaattgcagttgggaatatcatcgtgcttgttgtggcacagttcagtggcctggtacagtgggccgaattcattttgttttcctgcctcctgctggtgatctgcctgatcttctccatcatgggctactactatgttcctgtaaagacagaggatatgcggggtccagcagataagcacattcctcacatccaggggaacatgatcaaactagagaccaagaagacaaaactctgatgactccctagattctgtcctgaccccaattcctggccctgtcttgaagcattttttttcttctactggattagacaagagagatagcagcatatcagagctgatctcctccacctttctccaatgacagaagttccaggactggttttccagtacatctttaaacaaggccccagagactctatgtctgcccgtccatcagtgaactcattaaaacttgtgcagtgttgctggagctggcctggtgtctccaaatgaccatgaaaatacacacgtataatggagatcattctctgtgggtatgcaaagttatgggaattcctttataggtaactgccatttaggactgatggccctaatttttgaggtgctggtgctggcagggaacgctgttgtgtgtgttgactctgcttggctatacaagctggtgggttctccactgatgctggagcttctcatgctggcaggtgagagtgtttggtctggtgatctggagctactgtaaagaatgcccccttttgcacttaggcctggtgttgtggtagaaatggctaatgttgtttccattgagcctgcaaggtaggctt

SEQ ID NO: 38340 - DNA, 1812 bp, Homo sapiens
agcggaaatgcttgaggagagagagagagtaaggagccagccatgaatcctttccagaaaaatgagtccaaggaaactcttttttcacctgtctccattgaagaggtaccacctcgaccacctagccctccaaagaagccatctccgacaatctgtggctccaactatccactgagcattgccttcattgtggtgaatgaattctgcgagcgcttttcctattatggaatgaaagctgtgctgatcctgtatttcctgtatttcctgcactggaatgaagatacctccacatctatataccatgccttcagcagcctctgttattttactcccatcctgggagcagccattgctgactcgtggttgggaaaattcaagacaatcatctatctctccttggtgtatgtgcttggccatgtgatcaagtccttgggtgccttaccaatactgggaggacaagtggtacacacagtcctatcattgatcggcctgagtctaatagctttggggacaggaggcatcaaaccctgtgtggcagcttttggtggagaccagtttgaagaaaaacatgcagaggaacggactagatacttctcagtcttctacctgtccatcaatgcagggagcttgatttctacatttatcacacccatgctgagaggagatgtgcaatgttttggagaagactgctatgcattggcttttggagttccaggactgctcatggtaattgcacttgttgtgtttgcaatgggaagcaaaatatacaataaaccaccccctgaaggaaacatagtggctcaagttttcaaatgtatctggtttgctatttccaatcgtttcaagaaccgttctggagacattccaaagcgacagcactggctagactgggcagctgagaaatatccaaagcagctcattatggatgtaaaggcactgaccagggtactattcctttatatcccattgcccatgttctgggctcttttggatcagcagggttcacgatggactttgcaagccatcaggatgaataggaatttggggttttttgtgcttcagccggaccagatgcaggttctaaatccccttctggttcttatcttcatcccgttgtttgactttgtcatttatcgtctggtctccaagtgtggaattaacttctcgtaagtgttcactatgtctgtatggattactctaaattgactcagtctttgcccagtttgaaaaagattcaatgtcagtatttttcttagtgaggattggttttagtttatcatctatctgcttctatttttccatgttagactaactgcctattgaccctgaaaaatgtgaattagatataattaatgagagtcaaagccattactgtggacttaactgtgtaatggtggtggaggggcaggtctaggtttcatgccaaaccaaaaatatgtgaaatttagctcctaaaccaactttcttctttgttcttgaatgttgtctcttcaaagaaactcaaggcctttgatgactactaatccctttaaatctcctgttgtccctacaaaacaaatggggaacctagtaggactggggactgaattattcccaattactgcctgaaattttttctaaatagaaggactagtcttttttagagtttggcaaaagaaagtttcaagccttctttcattcttgatttaatagcaatttcattgtgatgaccactttaccagatgaaaatggccctttgtcatttgttcattgagcaaatgttgggaagtttaggaccaagtgtcatgaaaatataaatcaagcaaaaaaaaa

SEQ ID NO: 38341 - DNA, 2905 bp, Homo sapiens
gccagtggctctagagagggcagttttctaggtcagtgtagaagatctaaagtctagaatcaacattcagactctaaagggaaatgtccttcttattcctggggccagagaccaaatcaaaagctatcaaaacagaaatgtaccaaaacccatcctgagaggacaatctaggtgccaggttcagaaaaatagaaagatggtcttggaagggtccaaagtttctgcagactccaaaacaattataataacctactctgggctgggagtctgagttttgcataggtcacattggacttcatttataagaggataagatatcagttttatgtaaatactatcatatctttatatatgcataattatcttatttttcttagtaaagtctcagttgatagattccaccattataagggaaataaattagatgcacctaagctggattagtgaggaaactcagatttccatgaatgatcatgatagtgtccgtctagctagaggtctggtgaggatgtggcagataaaagttcaagaaaaagaaacttagggacagctaagactatggattactttttacgtgtgggttcattcgtctagttaacaatatacattaggtaccttttatgtgccagccactatcctaggcacctgggcactggggatatagttatacccaaaacataaaaggcccctaacctcttttatcaggtgttcctgtttgtttgatatgtaaataatatctctaccctcaggtttgttaacactttgcataaagatgtcaacatctccctgagtacagatacctctctcaatgttggtgaagactatggtgtgtctgcttatagaactgtgcaaagaggagaataccctgcagtgcactgtagaacagaagataagaacttttctctgaatttgggtcttctagactttggtgcagcatatctgtttgttattactaataacaccaatcagggtcttcaggcctggaagattgaagacattccagccaacaaaatgtccattgcgtggcagctaccacaatatgccctggttacagctggggaggtcatgttctctgtcacaggtcttgagttttcttattctcaggctccctctagcatgaaatctgtgctccaggcagcttggctattgacaattgcagttgggaatatcatcgtgcttgttgtggcacagttcagtggcctggtacagtgggccgaattcattttgttttcctgcctcctgctggtgatctgcctgatcttctccatcatgggctactactatgttcctgtaaagacagaggatatgcggggtccagcagataagcacattcctcacatccaggggaacatgatcaaactagagaccaagaagacaaaactctgatgactccctagattctgtcctgaccccaattcctggccctgtcttgaagcattttttttcttctactggattagacaagagagatagcagcatatcagagctgatctcctccacctttctccaatgacagaagttccaggactggttttccagtacatctttaaacaaggccccagagactctatgtctgcccgtccatcagtgaactcattaaaacttgtgcagtgttgctggagctggcctggtgtctccaaatgaccatgaaaatacacacgtataatggagatcattctctgtgggtatgcaaagttatgggaattcctttataggtaactgccatttaggactgatggccctaatttttgaggtgctgatttagaggcaaaattgcagaataacaaagaaatggtatttcaagtttttttttttataagcaatgtaattatgctattcacaggggcctcaagaattggtatgtatgatgtgatctggtccagccagggcctggcttgtcagctctctaggtttgatatgactttagtaaatttgtcaatatagatggtaggaagcagaatgccattttattaaaacacaggagaagttatatctctctgattatgatagtattttatttacttatccaaaccctcctttctcagtatggatagatcatggaaaccagattagagatagtaagcattagtaaacattgttctggagaacaggaacaggtgtaagttgtagaaatcctgaagagccagtcattcttttacagagtacattcttcttagcctctatggcgctggtctatgcccttcagtgaacagttgtataaacaataattataatttgcaaccttgtcttgtcaaccttgctgatccagctttttcttattattacaccttgtcttgcttattgcagcaaatattcaataacaacaatgtttctataagtccaacttcctttattaatgtttccatttagcctcaaaaatatcaaagtagttcctttttgatgttgttttcctgatttacttttcccataagttttaaataccatttctgccttgaagcctagaaattttctttttattcaaaaaaagttacattaatgctctaggtttgaggttctaaaatggaaatgtcaatagaggagcatggtcctatgtgaggttcctatcaaaatttgtgggagtagggatggtagagcatgagggttttgtttgtgtatgtgtatggtcatgaaaaaaaattgagaaacattactcatacacaatgaatgaatcagaggacagacacgggaatggcacgactgtctagtgtgttactaggaaaaaagttcagaatcactgttctagagagcttcatttccattggttttaaaacattattctcatgtagaacagtgttgggtctcatactgttaatgttaatacgtaacaatgttcatgttaacaggcacctgttaatattaacagataatgttactgttaacaggtaagagaaattgctctaagtgc

SEQ ID NO: 38342 - DNA, 2094 bp, Homo sapiens
cttttccaagccttgatatttattctaacctaaattcatcctgttccagataccctgcagtgcactgtagaacagaagataagaacttttctctgaatttgggtcttctagactttggtgcagcatatctgtttgttattactaataacaccaatcagggtcttcaggcctggaagattgaagacattccagccaacaaaatgtccattgcgtggcagctaccacaatatgccctggttacagctggggaggtcatgttctctgtcacaggtcttgagttttcttattctcaggctccctctagcatgaaatctgtgctccaggcagcttggctattgacaattgcagttgggaatatcatcgtgcttgttgtggcacagttcagtggcctggtacagtgggccgaattcattttgttttcctgcctcctgctggtgatctgcctgatcttctccatcatgggctactactatgttcctgtaaagacagaggatatgcggggtccagcagataagcacattcctcacatccaggggaacatgatcaaactagagaccaagaagacaaaactctgatgactccctagattctgtcctgaccccaattcctggccctgtcttgaagcattttttttcttctactggattagacaagagagatagcagcatatcagagctgatctcctccacctttctccaatgacagaagttccaggactggttttccagtacatctttaaacaaggccccagagactctatgtctgcccgtccatcagtgaactcattaaaacttgtgcagtgttgctggagctggcctggtgtctccaaatgaccatgaaaatacacacgtataatggagatcattctctgtgggtatgcaaagttatgggaattcctttataggtaactgccatttaggactgatggccctaatttttgaggtgctgatttagaggcaaaattgcagaataacaaagaaatggtatttcaagtttttttttttataagcaatgtaattatgctattcacaggggcctcaagaattggtatgtatgatgtgatctggtccagccagggcctggcttgtcagctctctaggtttgatatgactttagtaaatttgtcaatatagatggtaggaagcagaatgccattttattaaaacacaggagaagttatatctctctgattatgatagtattttatttacttatccaaaccctcctttctcagtatggatagatcatggaaaccagattagagatagtaagcattagtaaacattgttctggagaacaggaacaggtgtaagttgtagaaatcctgaagagccagtcattcttttacagagtacattcttcttagcctctatggcgctggtctatgcccttcagtgaacagttgtataaacaataattataatttgcaaccttgtcttgtcaaccttgctgatccagctttttcttattattacaccttgtcttgcttattgcagcaaatattcaataacaacaatgtttctataagtccaacttcctttattaatgtttccatttagcctcaaaaatatcaaagtagttcctttttgatgttgttttcctgatttacttttcccataagttttaaataccatttctgccttgaagcctagaaattttctttttattcaaaaaaagttacattaatgctctaggtttgaggttctaaaatggaaatgtcaatagaggagcatggtcctatgtgaggttcctatcaaaatttgtgggagtagggatggtagagcatgagggttttgtttgtgtatgtgtatggtcatgaaaaaaaattgagaaacattactcatacacaatgaatgaatcagaggacagacacgggaatggcacgactgtctagtgtgttactaggaaaaaagttcagaatcactgttctagagagcttcatttccattggttttaaaacattattctcatgtagaacagtgttgggtctcatactgttaatgttaatacgtaacaatgttcatgttaacaggcacctgttaatattaacagataatgttactgttaacaggtaagagaaattgctctaagtgc

SEQ ID NO: 38343 - DNA, 180 bp, Homo sapiens
ctgactcgtggttgggaaaattcaagtaaggaagatgggaggtcacatccctacaagtttcacaggttgtgcagaaggctatcacttctagcctcttgcttctgagtaagaacatacctatgtcatgcgtgaaaaataagaatctctgtacatctgtgtagtgtgggaaatttaaaaaaa

SEQ ID NO: 38344 - DNA, 445 bp, Homo sapiens
ccatattcttctcatatttatttccccctgcagtgggccgaattcattttgttttcctgcctcctgctggtgatctgcctgatcttctccatcatgggctactactatgttcctgtaaagacagaggatatgcggggtccagcagataagcacattcctcacatccaggggaacatgatcaaactagagaccaagaagacaaaactctgatgactccctagattctgtcctgaccccaattcctggccctgtcttgaagcattttttttcttctactggattagacaagagagatagcagcatatcagagctgatctcctccacctttctccaatgacagaagttccaggactggttttccagtacatctttaaacaaggccccagagactctatgtctgcccgtccatcagtgaactcattaaaacttgtgcagtgttgctgga

SEQ ID NO: 38345 - DNA, 3662 bp, Homo sapiens
  misc_feature (11)..(11): n is a, c, g, or t
  misc_feature (19)..(19): n is a, c, g, or t
aaaaaaagagnaaaagaanaaaaaaggaaaaaaaaaaaaaataaaaaaaatcttctttacaatctgtggctccaactatccactgagcattgccttcattgtggtgaatgaattctgcgagcgcttttcctattatggaatgaaagctgtgctgatcctgtatttcctgtatttcctgcactggaatgaagatacctccacatctatataccatgccttcagcagcctctgttattttactcccatcctgggagcagccattgctgactcgtggttgggaaaattcaagacaatcatctatctctccttggtgtatgtgcttggccatgtgatcaagtccttgggtgccttaccaatactgggaggacaagtggtacacacagtcctatcattgatcggcctgagtctaatagctttggggacaggaggcatcaaaccctgtgtggcagcttttggtggagaccagtttgaagaaaaacatgcagaggaacggactagatacttctcagtcttctacctgtccatcaatgcagggagcttgatttctacatttatcacacccatgctgagaggagatgtgcaatgttttggagaagactgctatgcattggcttttggagttccaggactgctcatggtaattgcacttgttgtgtttgcaatgggaagcaaaatatacaataaaccaccccctgaaggaaacatagtggctcaagttttcaaatgtatctggtttgctatttccaatcgtttcaagaaccgttctggagacattccaaagcgacagcactggctagactgggcagctgagaaatatccaaagcagctcattatggatgtaaaggcactgaccagggtactattcctttatatcccattgcccatgttctgggctcttttggatcagcagggttcacgatggactttgcaagccatcaggatgaataggaatttggggttttttgtgcttcagccggaccagatgcaggttctaaatccccttctggttcttatcttcatcccgttgtttgactttgtcatttatcgtctggtctccaagtgtggaattaacttctcatcacttaggaaaatggctgttggtatgatcctagcgtgcctggcatttgcagttgcggcagctgtagagataaaaataaatgaaatggccccagcccagccaggtccccaggaggttttcctacaagtcttgaatctggcagatgatgaggtgaaggtgacagtggtgggaaatgaaaacaattctctgttgatagagtccatcaaatcctttcagaaaacaccacactattccaaactgcacctgaaaacaaaaagccaggattttcacttccacctgaaatatcacaatttgtctctctacactgagcattctgtgcaggagaagaactggtacagtcttgtcattcgtgaagatgggaacagtatctccagcatgatggtaaaggatacagaaagcagaacaaccaatgggatgacaaccgtgaggtttgttaacactttgcataaagatgtcaacatctccctgagtacagatacctctctcaatgttggtgaagactatggtgtgtctgcttatagaactgtgcaaagaggagaataccctgcagtgcactgtagaacagaagataagaacttttctctgaatttgggtcttctagactttggtgcagcatatctgtttgttattactaataacaccaatcagggtcttcaggcctggaagattgaagacattccagccaacaaaatgtccattgcgtggcagctaccacaatatgccctggttacagctggggaggtcatgttctctgtcacaggtcttgagttttcttattctcaggctccctctagcatgaaatctgtgctccaggcagcttggctattgacaattgcagttgggaatatcatcgtgcttgttgtggcacagttcagtggcctggtacagtgggccgaattcattttgttttcctgcctcctgctggtgatctgcctgatcttctccatcatgggctactactatgttcctgtaaagacagaggatatgcggggtccagcagataagcacattcctcacatccaggggaacatgatcaaactagagaccaagaagacaaaactctgatgactccctagattctgtcctgaccccaattcctggccctgtcttgaagcattttttttcttctactggattagacaagagagatagcagcatatcagagctgatctcctccacctttctccaatgacagaagttccaggactggttttccagtacatctttaaacaaggccccagagactctatgtctgcccgtccatcagtgaactcattaaaacttgtgcagtgttgctggagctggcctggtgtctccaaatgaccatgaaaatacacacgtataatggagatcattctctgtgggtatgcaaagttatgggaattcctttataggtaactgccatttaggactgatggccctaatttttgaggtgctgatttagaggcaaaattgcagaataacaaagaaatggtatttcaagtttttttttttataagcaatgtaattatgctattcacaggggcctcaagaattggtatgtatgatgtgatctggtccagccagggcctggcttgtcagctctctaggtttgatatgactttagtaaatttgtcaatatagatggtaggaagcagaatgccattttattaaaacacaggagaagttatatctctctgattatgatagtattttatttacttatccaaaccctcctttctcagtatggatagatcatggaaaccagattagagatagtaagcattagtaaacattgttctggagaacaggaacaggtgtaagttgtagaaatcctgaagagccagtcattcttttacagagtacattcttcttagcctctatggcgctggtctatgcccttcagtgaacagttgtataaacaataattataatttgcaaccttgtcttgtcaaccttgctgatccagctttttcttattattacaccttgtcttgcttattgcagcaaatattcaataacaacaatgtttctataagtccaacttcctttattaatgtttccatttagcctcaaaaatatcaaagtagttcctttttgatgttgttttcctgatttacttttcccataagttttaaataccatttctgccttgaagcctagaaattttctttttattcaaaaaaagttacattaatgctctaggtttgaggttctaaaatggaaatgtcaatagaggagcatggtcctatgtgaggttcctatcaaaatttgtgggagtagggatggtagagcatgagggttttgtttgtgtatgtgtatggtcatgaaaaaaaattgagaaacattactcatacacaatgaatgaatcagaggacagacacgggaatggcacgactgtctagtgtgttactaggaaaaaagttcagaatcactgttctagagagcttcatttccattggttttaaaacattattctcatgtagaacagtgttgggtctcatactgttaatgttaatacgtaacaatgttcatgttaacaggcacctgttaatattaacagataatgttactgttaacaggtaagagaaattgctctaagtgc

SEQ ID NO: 38346 - DNA, 3235 bp, Homo sapiens
  misc_feature (11)..(11): n is a, c, g, or t
  misc_feature (19)..(19): n is a, c, g, or t
aaaaaaagagnaaaagaanaaaaaaggaaaaaaaaaaaaaataaaaaaaatcttctttacaatctgtggctccaactatccactgagcattgccttcattgtggtgaatgaattctgcgagcgcttttcctattatggaatgaaagctgtgctgatcctgtatttcctgtatttcctgcactggaatgaagatacctccacatctatataccatgccttcagcagcctctgttattttactcccatcctgggagcagccattgctgactcgtggttgggaaaattcaagacaatcatctatctctccttggtgtatgtgcttggccatgtgatcaagtccttgggtgccttaccaatactgggaggacaagtggtacacacagtcctatcattgatcggcctgagtctaatagctttggggacaggaggcatcaaaccctgtgtggcagcttttggtggagaccagtttgaagaaaaacatgcagaggaacggactagatacttctcagtcttctacctgtccatcaatgcagggagcttgatttctacatttatcacacccatgctgagaggagatgtgcaatgttttggagaagactgctatgcattggcttttggagttccaggactgctcatggtaattgcacttgatcacttaggaaaatggctgttggtatgatcctagcgtgcctggcatttgcagttgcggcagctgtagagataaaaataaatgaaatggccccagcccagccaggtccccaggaggttttcctacaagtcttgaatctggcagatgatgaggtgaaggtgacagtggtgggaaatgaaaacaattctctgttgatagagtccatcaaatcctttcagaaaacaccacactattccaaactgcacctgaaaacaaaaagccaggattttcacttccacctgaaatatcacaatttgtctctctacactgagcattctgtgcaggagaagaactggtacagtcttgtcattcgtgaagatgggaacagtatctccagcatgatggtaaaggatacagaaagcagaacaaccaatgggatgacaaccgtgaggtttgttaacactttgcataaagatgtcaacatctccctgagtacagatacctctctcaatgttggtgaagactatggtgtgtctgcttatagaactgtgcaaagaggagaataccctgcagtgcactgtagaacagaagataagaacttttctctgaatttgggtcttctagactttggtgcagcatatctgtttgttattactaataacaccaatcagggtcttcaggcctggaagattgaagacattccagccaacaaaatgtccattgcgtggcagctaccacaatatgccctggttacagctggggaggtcatgttctctgtcacaggtcttgagttttcttattctcaggctccctctagcatgaaatctgtgctccaggcagcttggctattgacaattgcagttgggaatatcatcgtgcttgttgtggcacagttcagtggcctggtacagtgggccgaattcattttgttttcctgcctcctgctggtgatctgcctgatcttctccatcatgggctactactatgttcctgtaaagacagaggatatgcggggtccagcagataagcacattcctcacatccaggggaacatgatcaaactagagaccaagaagacaaaactctgatgactccctagattctgtcctgaccccaattcctggccctgtcttgaagcattttttttcttctactggattagacaagagagatagcagcatatcagagctgatctcctccacctttctccaatgacagaagttccaggactggttttccagtacatctttaaacaaggccccagagactctatgtctgcccgtccatcagtgaactcattaaaacttgtgcagtgttgctggagctggcctggtgtctccaaatgaccatgaaaatacacacgtataatggagatcattctctgtgggtatgcaaagttatgggaattcctttataggtaactgccatttaggactgatggccctaatttttgaggtgctgatttagaggcaaaattgcagaataacaaagaaatggtatttcaagtttttttttttataagcaatgtaattatgctattcacaggggcctcaagaattggtatgtatgatgtgatctggtccagccagggcctggcttgtcagctctctaggtttgatatgactttagtaaatttgtcaatatagatggtaggaagcagaatgccattttattaaaacacaggagaagttatatctctctgattatgatagtattttatttacttatccaaaccctcctttctcagtatggatagatcatggaaaccagattagagatagtaagcattagtaaacattgttctggagaacaggaacaggtgtaagttgtagaaatcctgaagagccagtcattcttttacagagtacattcttcttagcctctatggcgctggtctatgcccttcagtgaacagttgtataaacaataattataatttgcaaccttgtcttgtcaaccttgctgatccagctttttcttattattacaccttgtcttgcttattgcagcaaatattcaataacaacaatgtttctataagtccaacttcctttattaatgtttccatttagcctcaaaaatatcaaagtagttcctttttgatgttgttttcctgatttacttttcccataagttttaaataccatttctgccttgaagcctagaaattttctttttattcaaaaaaagttacattaatgctctaggtttgaggttctaaaatggaaatgtcaatagaggagcatggtcctatgtgaggttcctatcaaaatttgtgggagtagggatggtagagcatgagggttttgtttgtgtatgtgtatggtcatgaaaaaaaattgagaaacattactcatacacaatgaatgaatcagaggacagacacgggaatggcacgactgtctagtgtgttactaggaaaaaagttcagaatcactgttctagagagcttcatttccattggttttaaaacattattctcatgtagaacagtgttgggtctcatactgttaatgttaatacgtaacaatgttcatgttaacaggcacctgttaatattaacagataatgttactgttaacaggtaagagaaattgctctaagtgc

SEQ ID NO: 38347 - DNA, 2684 bp, Homo sapiens
gaacagtctaatgcagtctttaataataggctacagagtttggatttcatcctttagagtctaaagtttagatataattgtttctcctttccaccacagatcacttaggaaaatggctgttggtatgatcctagcgtgcctggcatttgcagttgcggcagctgtagagataaaaataaatgaaatggccccagcccagccaggtccccaggaggttttcctacaagtcttgaatctggcagatgatgaggtgaaggtgacagtggtgggaaatgaaaacaattctctgttgatagagtccatcaaatcctttcagaaaacaccacactattccaaactgcacctgaaaacaaaaagccaggattttcacttccacctgaaatatcacaatttgtctctctacactgagcattctgtgcaggagaagaactggtacagtcttgtcattcgtgaagatgggaacagtatctccagcatgatggtaaaggatacagaaagcagaacaaccaatgggatgacaaccgtgaggtttgttaacactttgcataaagatgtcaacatctccctgagtacagatacctctctcaatgttggtgaagactatggtgtgtctgcttatagaactgtgcaaagaggagaataccctgcagtgcactgtagaacagaagataagaacttttctctgaatttgggtcttctagactttggtgcagcatatctgtttgttattactaataacaccaatcagggtcttcaggcctggaagattgaagacattccagccaacaaaatgtccattgcgtggcagctaccacaatatgccctggttacagctggggaggtcatgttctctgtcacaggtcttgagttttcttattctcaggctccctctagcatgaaatctgtgctccaggcagcttggctattgacaattgcagttgggaatatcatcgtgcttgttgtggcacagttcagtggcctggtacagtgggccgaattcattttgttttcctgcctcctgctggtgatctgcctgatcttctccatcatgggctactactatgttcctgtaaagacagaggatatgcggggtccagcagataagcacattcctcacatccaggggaacatgatcaaactagagaccaagaagacaaaactctgatgactccctagattctgtcctgaccccaattcctggccctgtcttgaagcattttttttcttctactggattagacaagagagatagcagcatatcagagctgatctcctccacctttctccaatgacagaagttccaggactggttttccagtacatctttaaacaaggccccagagactctatgtctgcccgtccatcagtgaactcattaaaacttgtgcagtgttgctggagctggcctggtgtctccaaatgaccatgaaaatacacacgtataatggagatcattctctgtgggtatgcaaagttatgggaattcctttataggtaactgccatttaggactgatggccctaatttttgaggtgctgatttagaggcaaaattgcagaataacaaagaaatggtatttcaagtttttttttttataagcaatgtaattatgctattcacaggggcctcaagaattggtatgtatgatgtgatctggtccagccagggcctggcttgtcagctctctaggtttgatatgactttagtaaatttgtcaatatagatggtaggaagcagaatgccattttattaaaacacaggagaagttatatctctctgattatgatagtattttatttacttatccaaaccctcctttctcagtatggatagatcatggaaaccagattagagatagtaagcattagtaaacattgttctggagaacaggaacaggtgtaagttgtagaaatcctgaagagccagtcattcttttacagagtacattcttcttagcctctatggcgctggtctatgcccttcagtgaacagttgtataaacaataattataatttgcaaccttgtcttgtcaaccttgctgatccagctttttcttattattacaccttgtcttgcttattgcagcaaatattcaataacaacaatgtttctataagtccaacttcctttattaatgtttccatttagcctcaaaaatatcaaagtagttcctttttgatgttgttttcctgatttacttttcccataagttttaaataccatttctgccttgaagcctagaaattttctttttattcaaaaaaagttacattaatgctctaggtttgaggttctaaaatggaaatgtcaatagaggagcatggtcctatgtgaggttcctatcaaaatttgtgggagtagggatggtagagcatgagggttttgtttgtgtatgtgtatggtcatgaaaaaaaattgagaaacattactcatacacaatgaatgaatcagaggacagacacgggaatggcacgactgtctagtgtgttactaggaaaaaagttcagaatcactgttctagagagcttcatttccattggttttaaaacattattctcatgtagaacagtgttgggtctcatactgttaatgttaatacgtaacaatgttcatgttaacaggcacctgttaatattaacagataatgttactgttaacaggtaagagaaattgctctaagtgc

SEQ ID NO: 38348 - DNA, 569 bp, Homo sapiens
  misc_feature (50)..(50): n is a, c, g, or t
aagagtctttatctagacaacataatttttggaaaaataaagcaaattcnactttattggagttattggacagatcagcaaattgttattttaaaaagttttcttgtttaggcaatttggtaagtggtttctagttataaactagccactgttgattaacttgagaaggtgaagcaggggagttctgaagagattacctagagctacttaaccctaagttaagtaaaattttcactttcattcttttcattctctcataaactggttgaaaaaacactgtactaccaacaaaggtgtcagttgcttgtgctgccctgtctatgttatgctctgaataggtctcggtaaagattatatggaaatactataaagaatacataaggtaaaatactagtcagaaagggttcagaagaagttagcatcaactgtatgaaaattctaggtaaagctaagtactattgagttggaaaaaagtaattctatcatgtttgcttgttttcctctactgtttttaatgtgatgttgtaatatattttaaaaataaaacttgaaaacgttgaaaaaaaaaa

SEQ ID NO: 38349 - DNA, 302 bp, Homo sapiens
gtacacagactttcctgagtctgagttaattacctgagccaatccacagaacctgtctgaacagtgcccagcatactgtaagtgctcaatacacatcgacttttgttattgcattcaagcccttcacagcaataaactgcgagagaggcactattctcattttacagattggaaaacagtttcagaaatgttgagtgacatgtaaggtcacatcacatagcatataaaggactcaatctcacgaatctgtgctcataaatatttctggaatggaagagaaatgtgtaaagtataaaaaaagc

SEQ ID NO: 38350 - DNA, 653 bp, Homo sapiens
catggcactccaggcccgggtgacagtgcgagactctgtctttaaaaacaaaaaaaaaaaagaattgctaaatgcagtattctttggtgttcgctgtgggaaatgtgttctgatgagagggaggcaatccataatgtgcccctttgtatgcagggtgggcaaaacactgcttccaactagttacgtctaagatactaggttatcccactggttaccaaacaactcaactatggtttgctgccttccatagctggccctgtccttaaatcccaacatcgtctgaaaataatataggaagcttttgaggactgtcttgtttctacccactcacattccagttatggggaccgaggcgggcgtgggagaagaaacgggatcgtcaaagtgggactgtttccgtgtggcatgatggcaatttcaagcaaggaatgttgctgaatgctcagagcctgccccgggaccaaaagcttttcatgaacttgggtttcatttgtatttgaacatcagtcatctctcttggggtcctctcttgaaagctacttttgcccagtaggctagaaagtggggcaccgtaggtttaatagcagcatgcagggatgacagagtattaaaaacactttttaaaagtcattcttactagtttttgtcatgaa

SEQ ID NO: 38351 - DNA, 758 bp, Homo sapiens
aaactaaggcttggggaagtggaataatttgcctgacatcacacagctgaggagtgccagaaccacaatgtcagcccgatctgactgggctcagctcagtccctacctctgtcctgcttcccacaccaacacctgaaaactcagagaggccctgcagtaaggggcctgttccatactgtgactcagcatgcccaaacctcagaaccctttggtcaccagccacctaccttttcttaggggctctagtgttgatctccctgatctagtctgaccccaccattctaccagtgaagaagctgaaggatattcaaggctttccagggtgtgttcaccatatgggtcagacacccagccaaggccagaccttgaaggctgctgatagctggtggtcggcctccctgggcagttagtgaaaagggcagaaagaagtccatcttggagcaagcattgtcctgagaggacctggcctcccatccagacacttgcttaatgcatagagatggttggtgttgacgtggaaccctatcactcaattcaacaaatatgcctgtatttgtacaagatgtacaagatgtatttgtagaagacgtatatttgtacaagatgtaagattttttctaagaggaagatcagtcattcttcaaaaagcaggaagatacaactctatagtcatctaaaaagttgaggaaacgttcactgtatttattttcctcatttcagaggtttattgataagaataaactatatcaatactatat

SEQ ID NO: 38352 - DNA, 1843 bp, Homo sapiens
  misc_feature (1)..(1): n is a, c, g, or t
nagacggagtctcgctctgtcacccaggctggagtgtaagggcgcgatctcggctcactgcaacctccgcctcccaggttcaagcaattctcctgcctcagccacctgaatagctaggattacaggcgcccgcccccacacccggctaatattttttgtatttttagtagagacagggtttcaccgtgttgatcaggctggtctcgaactcctgacctcacgatccgcccgcctcggcctcccaaagtgctgggattacaggcgtgagtggtggccctatttttaaaccattcgttacgctgtgtagacagagctttattgccctggaaaagattttttttttaactctcatgcagttcagtctttccatcatttcactttgtgagtcactcacataattgtcaatcattcctctgaccttcttaagaatttacaccttaccgtctctgtgattgaagcagacttctcgctttatttcccttaggctcatttttctgtgggctctcccttaaagacacatggccacagacacctccttcgcatatgtaatctgccttcccctgcggccttccgtggtcacagcaacagggactgctcaccccctccagctggggcttttctaacaagcacagtcagaaatgcgcaggcctggggttggggatgaacagaagttgattagtgggcacagaaatacagttagatagaaggaatagttccagcattcgatattacagtagggagactgcatttaacaataattgattgtatatttgaaaacagctagaagaataagaatattcccaacacaaagaaaagataagcgaggtgaaggaaatcccagttaccctcattcagtccattacacattcgatacaggtatcaaaatatcataggcacctcaaagacatgtacaactcttaatttaacatttttgaaagaaaaaaaaaccggccagagcattaaaacaaataaaataagaaacacagaggccagtgttaggtgaagaactccgctgcttcagaaagagaatagcagcgctcgcttaccgtgggaacacggccagttaacaaaatgggttttggttttttgttttgttttgttttaccattggtaataagatagttaacataagtggtcagaacttcgctgaatttgtaataaagcatttgttaagcgtgtaaaagtccaaattaaaagtcttgaagaaaaacagctatggcaatgagcctagacatttttcaaaaaaaaaagctaagccgtcctaccagcaatctctctttctcctaagaatgtcatgccttctcaagacctgatgaaaggaataagatatttgtgcctttttataaaagcatctattacgaaagtaaaattcagttgcttacagttttggccgctttgtagcactattataaacagcccaaatttatggccttggacttactgcatgacacatggcctggttacctgtcatggaatgctgcagtggtggtttgccaagcttctgtggatgtttgaagactttatttttgcagtcttaaccttgggctggacctaagtgtatgtaaaccatatgatgcctgtattgtttatagatgctgacaaaagaaaactagaccttttgttttttgttgtaagatttttgttttcatgcctatgctcatagtagatagtttgcaaatgaaagttgatttgccatacttttaaataatattgttttagcttgaatattctataatacacttttatagagtataacatgctaaatcactgttttgttgtaagaagggtgtaaacattttgttaataaaatgctatgtttacaaatataaaaaaacctcccaaa

SEQ ID NO: 38353 - DNA, 338 bp, Homo sapiens
cacagtttttatgttcatcttgcacaatgctgtctcttcctgaagacctgatgcacgtctcagaacctgtggccgccctggctgtgtgtgaaacatttggagatacctggagtacggacagtcacctctgactccccactcagaatcaccaatactacagctctggacggcacgtctgagccatccagccacaactctgcaggagctcccactggagggtacatttcctttttcggcttttgtctaaagtcaggccctctgtttttgactcaaaacggttaaacaaaagttatgggaggccattgatttggactgagctcctgcactagactccaaca

SEQ ID NO: 38354 - DNA, 555 bp, Homo sapiens
gaagcaaagtcataatgggtctgatgtcctttgctgaggagcttagactaaactgtttaggtaaaaggagccagcaaaatctttaagtgagggagtaacataagatttgcatgttagaaggctctctctggctgctatgtacagagggaggctaatggcagcagatctggtgaggatgctgggcccgtgatctgggaacttgcctgccccaaggcagcaatcatgggagtggagtcaaggaaacactaaagaagtagacatgataggactttttaagtgggaatggccagggctctggccatttggaagcctaaagagaatggaatagcatgagttcggtttgggggaaattcagtggtaagatgcttgtttgtcagaaacacacttgagatgggagatcagtttggtgtcatccatgtcctcttggtaagtggaaactataatataaaatctttcaggccaggtgcagtggctcacacctgtaatcccagcactttgggaggccaaggtgagtggatcacctgaggtcaggagttcgagaccagcctggccaac

SEQ ID NO: 38355 - DNA, 248 bp, Homo sapiens
tcaaacagtagccagttagttctttgctgaggaaagggaaccattgctgaatgcttttgagattgctcttggaaattagtctctatatgaagcacagagccatttgattttatttcaagacacatgtagaggtcttgtcatcaagagattagcaacataaataatgtaaatgactattattagaagtaataccttaatctctagactaagcaatagaaaggatggaagcaaagtcaaaatatcataga

SEQ ID NO: 38356 - DNA, 367 bp, Homo sapiens
taagagtcagttgaggaccattaatttagccccagaaaggttgctctgcagatagtatggataataaagcaggcccatgttccacagctattctgagctgcccgtgtttcactgcttctccatttctgactgaatatgctggagaaatatgtggtcctgctaactctttctttttacctctaaattttaaggcctccggattttgggctcccaccatatggcatttgttttcattgggtagggcctttagccagttctgttcacctgagtcttgcagcgtctgctcctttggcttaggtaaatcgtgtcttttcaaactgtaggctcccttacaatagtgttgacacgtggattaatgcttccagaa

SEQ ID NO: 38357 - DNA, 380 bp, Homo sapiens
tacttttttccttcatgtatcagcccacttgcagacagcatgaattgttttgtaaacttacaggatgccactgtaagaaaagacgggcctaggtgcagtagctcacgtctgtaatcccagcactttgggaggctgaggcgggtgtatcacctgtggtcaagaatttgagaccagcctggccaacatggtgaaacctcagctctactaaaaatacaaaaattagctgggtgtggtggcacacacctgcaatcccagctacttgggagcctgaggcaagagaatcacttgaacccgggaggcagaggttgcagtgagctgagatcatgccaatgcactccagcctgggcaacaagagtgaaactccatctcaaaaaaaaaaa

SEQ ID NO: 38358 - DNA, 227 bp, Homo sapiens
taagatttttcttacctaatatattatttttttaattcttggcatttgtgttttgttttgagacatagtctctttctgtcgcccaggctagagtgcagtggcgctatctctctcattgcaaactcagcctttcaggctcaagcgattctcctgcctcagcctcctgagtagccggactcacaggagcacaccaccacgtctggcatttttgtatttttggggaaatg

SEQ ID NO: 38359 - DNA, 745 bp, Homo sapiens
ggcacaaaggggtcgaggctacagagccatggccggggctacgcaggcagaggcggcgacactgtagtgagaagagactgtgatccgaggacagggaaatccaaaaagaagtccgctcccagtattttgtcaaatggacggattggacaggttggaaaattcaaaaatggaacactgattctgagcccagttgatatcaagaaaataaattcttccagagtggccaaatgaagtactttgtcaaataaaacgaggatgggaacaactgagtcaactgcagcggccctggaccctgtgcgactctagatagatcgttcttaacacgcatttcacagactgctttttcattttagaaaaaaagtcaaacagaagtaacatttctagttgccgaagtgtctgcttcatggtgctgaacgtgtcaggcccagtgcagcatgaatgtgaagtgaacccactgaaaagtgatttttaatgttctccagcaaacttcactcctgtttcatgttcactggtatttggtgcatttgcttgtaatacagttttttataactttactgttttgtaaatgctagtagtttacattaaattgccttatatttttaatgatttaatgttatgatatcatgaaagaaccaagaatctagtaatttatcagttttgtggaaaagcagttttaatttttagcctaccatgtgtacaaaatctacttcataagaagttatataaataaaataggtttgtagta

SEQ ID NO: 38360 - DNA, 1423 bp, Homo sapiens
ccggaagcgggggtgcagcgcggcagaatgagggttgattcctcggctgaccccacaatgtcgcaggagcaagggccggggtcctccacgcctcccagttctccgacacttcttgacgctctgctccagaacctttacgactttggaggtacagaaggtgaaacagaacagaagaagatcataaagaaaagggaaaacaagaagagagatgtgatggcttcagcggccttggcagcagagccatctcccctacctggttctctcataagaggccagaggaagagcgcttcgagcttcttcaaggaacttagagaagagcggcattgtgctccttctgggacccccacaggaccagagatccttgctgctgcagttcctccctcttccctaaagaacaatagggaacaagtagaagtggtagaatttcacagcaataaaaaaagaaaattgacgccagatcataacaagaacacaaagcaggctaatcctagtgttttggagagagatgtggatacacaagaatttaacctagaaaaagctcgtttagaagtgcaccggtttggtatcacgggttatggaaaaggaaaggagagaatcctggaacaggaacgtgccattatgctgggcgctaagcctcctaaaaagagttatgtgaattacaaggttttacaggagcaaattaaagaaaaaaaggcagcaaaggaagaagaaaagagactggcccaagaaacagatattttcaagaaaaagaagaggaaaggacaggaggacaggaaatccaaaaagaagtccgctcccagtattttgtcaaatggacggattggacaggttggaaaattcaaaaatggaacactgattctgagcccagttgatatcaagaaaataaattcttccagagtggccaaatgaagtactttgtcaaataaaacgaggatgggaacaactgagtcaactgcagcggccctggaccctgtgcgactctagatagatcgttcttaacacgcatttcacagactgctttttcattttagaaaaaaagtcaaacagaagtaacatttctagttgccgaagtgtctgcttcatggtgctgaacgtgtcaggcccagtgcagcatgaatgtgaagtgaacccactgaaaagtgatttttaatgttctccagcaaacttcactcctgtttcatgttcactggtatttggtgcatttgcttgtaatacagttttttataactttactgttttgtaaatgctagtagtttacattaaattgccttatatttttaatgatttaatgttatgatatcatgaaagaaccaagaatctagtaatttatcagttttgtggaaaagcagttttaatttttagcctaccatgtgtacaaaatctacttcataagaagttatataaataaaataggtttgtagta

SEQ ID NO: 38361 - DNA, 1527 bp, Homo sapiens
ccggaagcgggggtgcagcgcggcagaatgagggttgattcctcggctgaccccacaatgtcgcaggagcaagggccggggtcctccacgcctcccagttctccgacacttcttgacgctctgctccagaacctttacgactttggaggtacagaaggtgaaacagaacagaagaagatcataaagaaaagggaaaacaagaagagagatgtgatggcttcagcggccttggcagcagagccatctcccctacctggttctctcataagaggccagaggaagagcgcttcgagcttcttcaaggaacttagagaagagcggcattgtgctccttctgggacccccacaggaccagagatccttgctgctgcagttcctccctcttccctaaagaacaatagggaacaagtagaagtggtagaatttcacagcaataaaaaaagaaaattgacgccagatcataacaagaacacaaagcaggctaatcctagtgttttggagagagatgtggatacacaagaatttaacctagaaaaagctcgtttagaagtgcaccggtttggtatcacgggttatggaaaaggaaaggagagaatcctggaacaggaacgtgccattatgctgggcgctaagcctcctaaaaagagttatgtgaattacaaggttttacaggagcaaattaaagaaaaaaaggcagcaaaggaagaagaaaagagactggaatgcctgatgctgcgtaatttataaagaaaggaggctgatttggagcatggttctgcagactgcatggaaagcatagcactggcatctgctcggcctccggtgcccaagaaacagatattttcaagaaaaagaagaggaaaggacaggaggacaggaaatccaaaaagaagtccgctcccagtattttgtcaaatggacggattggacaggttggaaaattcaaaaatggaacactgattctgagcccagttgatatcaagaaaataaattcttccagagtggccaaatgaagtactttgtcaaataaaacgaggatgggaacaactgagtcaactgcagcggccctggaccctgtgcgactctagatagatcgttcttaacacgcatttcacagactgctttttcattttagaaaaaaagtcaaacagaagtaacatttctagttgccgaagtgtctgcttcatggtgctgaacgtgtcaggcccagtgcagcatgaatgtgaagtgaacccactgaaaagtgatttttaatgttctccagcaaacttcactcctgtttcatgttcactggtatttggtgcatttgcttgtaatacagttttttataactttactgttttgtaaatgctagtagtttacattaaattgccttatatttttaatgatttaatgttatgatatcatgaaagaaccaagaatctagtaatttatcagttttgtggaaaagcagttttaatttttagcctaccatgtgtacaaaatctacttcataagaagttatataaataaaataggtttgtagta

SEQ ID NO: 38362 - DNA, 1670 bp, Homo sapiens
ccggaagcgggggtgcagcgcggcagaatgagggttgattcctcggctgaccccacaatgtcgcaggagcaagggccggggtcctccacgcctcccagttctccgacacttcttgacgctctgctccagaacctttacgactttggaggtacagaaggtgaaacagaacagaagaagatcataaagaaaagggaaaacaagaagagagatgtgatggcttcagcggccttggcagcagagccatctcccctacctggttctctcataagaggccagaggaagagcgcttcgagcttcttcaaggaacttagagaagagcggcattgtgctccttctgggacccccacaggaccagagatccttgctgctgcagttcctccctcttccctaaagaacaatagggaacaagtagaagtggtagaatttcacagcaataaaaaaagaaaattgacgccagatcataacaagaacacaaagcaggctaatcctagtgttttggagagagatgtggatacacaagaatttaacctagaaaaagctcgtttagaagtgcaccggtttggtatcacgggttatggaaaaggaaaggagagaatcctggaacaggaacgtgccattatgctgggcgctaagcctcctaaaaagagttatgtgaattacaaggttttacaggagcaaattaaagaaaaaaaggcagcaaaggaagaagaaaagagactggcccaagaaacagatattttcaagaaaaagaagaggaaaggacaggaggacaggaaatccaaaaagaagtccgctcccagtattttgtcaaatggacggattggacaggttggaaaattcaaaaatggaacactgattctgagcccagttgatatcaagaaaataaattcttccagagtggccaaatgaagtactttgtcaaataaaacgaggatgggaacaactgagtcaactgcagcggccctggaccctgtgcgactctagatagatcgttcttaacacgcatttcacagactgctttttcattttagaaaaaaagtcaaacagaagtaacatttctagttgccgaagtgtctgcttcatggtgctgaacgtgtcaggcccagtgcagcatgaatgtgaagtgaacccactgaaaagtgatttttaatgttctccagcaaacttcactcctgtttcatgttcactggtatttggtgcatttgcttgtaatacagttttttataactttactgttttgtaaatgctagtagtttacattaaattgccttatatttttaatgatttaatgttatgatatcatgaaagaaccaagaatctagtaatttatcagttttgtggaaaagcagttttaatttttagcctaccatgtgtacaaaatctacttcataagaagttatataaataaaataggtttgtagtaaaaaaaaaaaaaggggggcgaataaaatatcctcgaggggcaaaattagggaaccaggtttttgtacaaacgggcccaatggaagccgactacaagacagcacgcgcgagggttacacagtcgtgacgggaaacacgcagacgggacctggaggagaccacctgggggcaactggaacacaccagaatagagccaagacaaacacaaggcggagaaagccacacgcggaaggcacacagaaatgaga

SEQ ID NO: 38363 - DNA, 1304 bp, Homo sapiens
ccggaagcgggggtgcagcgcggcagaatgagggttgattcctcggctgaccccacaatgtcgcaggagcaagggccggggtcctccacgcctcccagttctccgacacttcttgacgctctgctccagaacctttacgactttggaggtacagaaggtgaaacagaacagaagaagatcataaagaaaagggaaaacaagaagagagatgtgatggcttcagcggccttggcagcagagccatctcccctacctggttctctcataagaggccagaggaagagcgcttcgagcttcttcaaggaacttagagaagagcggcattgtgctccttctgggacccccacaggaccagagatccttgctgctgcagttcctccctcttccctaaagaacaatagggaacaagtagaagtggtagaatttcacagcaataaaaaaagaaaattgacgccagatcataacaagaacacaaagcaggctaatcctagtgttttggagagagatgtggatacacaagaatttaacctagaaaaagctcgtttagaagtgcaccggtttggtatcacgggttatggaaaaggaaaggagagaatcctggaacaggaacgtgccattatgctgggcgctaagcctcctaaaaagagttatgtgaattacaaggttttacaggagcaaattaaagaaaaaaaggcagcaaaggaagaagaaaagagactggtaggtgtgatggtctgtcctttattcaactagaatgggaagatggatgctctttgccacagtggaatgccggaagccgctgcttggagagcaatgaaggcaccagagttaaaggatcccatgctccccatttcttcgagttagctctgtttagtaataccagccaagtaatctggcgtacttacatgcaagatttgctttgaaatagcaaactccttgtcttagtccgtttttgttgctgtaaaggaatgcctgatgctgcgtaatttataaagaaaggaggctgatttggagcatggttctgcagactgcatggaaagcatagcactggcatctgctcggcctccggtgcagcatggggagacgtgccaggtcctttaacaaacaggcccatgggagtgggacgaccagcgggacctctctttccgaggaaggccaggcccaaggggcccggcggaccaaccccaaaggccggcaagggggagaaaaccgcggggggggagacacaaggcgcggcgggcagacatcgaacaggataggtaaaggacacaatcacgcggagagatatcgcaccagaacccctc

SEQ ID NO: 38364 - DNA, 568 bp, Homo sapiens
cagggtaggagaagggaaggaaaggttggagtgtgtttttccatgtaggtctatatagcacacatccaagaagggggtttggttgaaggcactctccattgacgagatatccatgtttaggcatgaaatgtacatatttgtgtcttcattagtgatgctacctctgctttcctcgctttgttctggcattcccttcctgctgtcacttacatatccccacagacacctcgtctgccccacatccccaccgctgaccccattttccagccgtctaatctaccccctctcatcgccggcaccactcctaatgcccacttgcccaaccttgatatctgggtattcccacccaaaggcctgatgctgacagtcctgagtttttcactcactgttaaatgaaacatccatagctggatctgtgggttaaactgtgggcaaattatacaaaagattatttgctgaaggatccaggcttccttttcaggagaatagtcagatcctgtcttacgtttattgctagatataaaatgactaattcccagagagagtttctaagcaagaaaaaaaaaaa

SEQ ID NO: 38365 - DNA, 463 bp, Homo sapiens
aggccagtcagggtaatatttggagtctaagatgcggttgacactcgagtcctacagcattctttgtgtgtgtgcatttgcatgcatactcagatccctgtgaagtggaaatggatttgtggtattcttctgtttgcaaacccagataaccttaaagggctaaagagattttgctctgattatttagaaagattgacctttttaatacccaatgtaggactgtctctttcaaagacatcattgagaagagtggggtaggcaatagcaaacacctggtcagagttaatgaagatgcatgatctcccgaatgtttgtgatgtgcttttaaaccacgtaaagatctgtgataaatggcaaatgtgaagagattgtaaaaggcaaaaatgtttgttattgaaaattaaaatagaaaagactagtgtttaataaattaatgtctgcacctttgaaagtaaaaaaaatt

SEQ ID NO: 38366 - DNA, 96 bp, Homo sapiens
tctattctgacatttatgtctcccttcaatcacgtctttggccttagaagattgagttactggattctttatatattctagtggtcatctctgaaa

SEQ ID NO: 38367 - DNA, 534 bp, Homo sapiens
aacggggtttcgccatgttggccaggctggtcttgaactcccgagctcaggtgatctgcctgcctctgttcatggatttgactattccctctctttctctctctccctctctctctctctctccccacttccttccagttctcgatttcttggaaaaccagaaaaacaacttagtttcagcttggtgtaaaacttccgcatgagggacttcattttggtttagtcttttgggcctagtgcaggagctcagtccaaacccatggcttcctgtaaactttatttaacaccattccttgtcccatattattgtcttcctggtgccagaaaaaggggtccctagctgggtgtggtggctcacacctgtaatcccagcactttgggaggctgaggtgggtggatcacctcttgaacacctcaggagttcaagaccagcctgaccaacatggagaaaccccgtctctactaaaaatacaaaattagccggacgtggtggcacatgcttttaatcccagctacttgggaggctgaggtagg

SEQ ID NO: 38368 - DNA, 162 bp, Homo sapiens
gtgcattttcattagaactgagccgtcccagtgtcctctcagcgttgatgttgatgtcttcatcattccggggtgcagtaacaaagtggcatccactgaatggcctataaacaacagaaatttgtttctcaccgttctggaggctagaagtctgagatcaag

SEQ ID NO: 38369 - DNA, 489 bp, Homo sapiens
aaaatctagggaatctccattccatttcaaagcctgggaaaaatcctctccagcttttagctccacccctctgggctctcctatctccgtctgagtcaccctgattcttttatgaaaagcaacacattcacatgtgagtagttttatcagcctgcttcctatcagtagaatttggggggtccaacagccctattactttctgtctctttcaatccaaactagaactgtttatgttggcataaaattctcaagaacctaatgggctgtggaagtattccacatgggtccactccattaaagttcacattcacaaataaaccaggctgcacatttaatactttgcttggaaatctcagctaaatatacaagttcatcacttgcaaatttggctttccatataaccataggatacaattctgctaaacttagttgctactatgtaacaaggatcccctttctgccagtttccaataagaaagacctcacttc

SEQ ID NO: 38370 - DNA, 483 bp, Homo sapiens
ccagtgtgttcttgaagcccttcctacactgattgtggtcaagtcagaacctgcctacacagtgcaggcccatcatgcggcattcaggacgttgctctccaagcctgcgcagcacaggaatgcctgctctctgtttcctttaccagtgctcagtgacctttaccagagacctgttcttgctgactccgattgtgtgcttctctgattagaaacgaatttttcttggctgggtacagtggcttatgcctgtattcccagcactttgggacgccaaggtggaagaattgcttgaacccaggcattcaagactagcttgggcaatatggcaaaccctgtctctacaaaagaaaaaaaaaatacaaaaattagctgggcatcgtgcgtgcctgtagtcccagctacttggtaggctgaagcaagaggattgcatgagcctgggaggttgaggctgcagtgagtcgtgttcactgagaccctatctca

SEQ ID NO: 38371 - DNA, 592 bp, Homo sapiens
  misc_feature (515)..(515): n is a, c, g, or t
  misc_feature (543)..(543): n is a, c, g, or t
  misc_feature (555)..(555): n is a, c, g, or t
ttggtcatagtagaaaattaaaacattgttatttctttaggatattaaaaaaatatgccttttgagttttaagaaggtagcctataaactaaacagtgtctagttacttaacaatgctaatcatgtaatgtaggtactttgtaaatgcttaaaatatggaaagattttcaaacatttattgagctgtttgtgatgggaaagaaacaaatgaataacacttcatttattgaagtgttaatgtgttaattaagaagtcagcaaaatttgaatagaaattctataaaagtgataaaatcaattagcacaaagattttatatccaaatcacctctggaacattaagggttgactgagctgactttggaagtcttaacatcttggtgaattagagatcaccctttaagtggacaacagggctgggcgcagtggctcatgcctataatccccaaagtgctaggggttacagggagtgagtcacccacaccccagcctcccagatgggtctttttaaggaanttgctagctttttgggcctcactacttnttcgcgctgttngggaaggggtttttgcttgctgccggaattgggctag

SEQ ID NO: 38372 - DNA, 412 bp, Homo sapiens
ttgctggtaaaatgatgtctgctgagacaatcggagcctaaagggggctaattctctctagacagggggtattggagatcatctaaaaatggaacctggcagccacacggcacactaggaaaccttggcttggcctacgtaataggctgcaagatgcataaaatcatcaggatgccatgagcccctccccaccaaattaataactccatatttagtaagctaagtactgatttgcttttgaataaaacttatgctaaacatataatttgcataaaatgtttatcaacttatattattcacagggtgggggaagatcagtgatattactgattgcacaaaaaccagaaggaataagtgtgctgaagaagtatcagcatctatttcgaaagtttgtactcattttaagatattc

SEQ ID NO: 38373 - DNA, 330 bp, Homo sapiens
gccttctcacgagagcagggaaggattgaactcaaggtctccttaagttgccaagctcaaagattcatgagtctgacttacataaccaccaggggccatttcctcattcgaaacagagggacttgctgaggaccccaagcacttccacttctagaagtcgaagccattctcggaggaggcgtaggagacacgggcggatccacaggagctccagggcatcccctggaaacggaggttccttctgtccttccgaaagcctgacgtccatgtgctttcttacaatttgcctctttctcctaaaaatagaatttttctaattcccttatttga

SEQ ID NO: 38374 - DNA, 490 bp, Homo sapiens
taatgaccacccctagagaagacagcaaggatttttaaaaagagagatgaagaatatatacccagaagaagccaagctttggcaagaaaacctttcgagtgtcatttaccatcacttgaaaaatatctaggaaattcctaggaaacaaagcttagggtgggatgaaaatggaaaaaaaaaattaaagagtttaaaattgtagtataacagcaaatactatgctcgtatagaactctgtgagtctgtttattacatttataacattggctttgcagcctctagtggaaagtgagagagtcaactatttacatgtcagctgtgcagttaacatattataatgttccagttctctctctctcaagaaaagtccctgctgggcgcagtggtgtgtgcctgtaatcccagctactagggaggctgaggcgggaagatccctgaagcccaggagtttgaggtcagcctaggccacctagtgagatgctgactcaaa

SEQ ID NO: 38375 - DNA, 343 bp, Homo sapiens
tgagacggagtctggctctgtcactcaggctggagtgcagtggcgctatcgcagctcactgcaacttctaccttccaggttcaagcaattctcttgcctcaatctcccgagtagctgggattataggtgcccaccagcacgctcagctaatttttgtatttttagtagagacggggtttcaccatgttggccaggttggtcccgaattcctgacgtcaggtgatccacccaaccaggcctcccaaagtgctgggattacaggcgtgagccaccacgcccggccagttttttctacaaaatgttttattctacaatatgttaaggtaataaagggtgctagttg

SEQ ID NO: 38376 - DNA, 458 bp, Homo sapiens
acctttctccctcccctcctctatgtctttctgaccaggtgcccccaggacgcctattgctgaatgggcataggcattccccagttccctccctggccccaagctccctggaggtgggaccacacatgacagagcgacaccccagcttgtcctctcttttgcaaagtgcaggatgagaattttgggttatcctggctcctcccatgttttttgcagctccagtgacagcaatgccaaatgatacccaaagataaaaatattgatccaagtgcagatgagctgaaaacattccttttctgatagaaaacacggtaaacagtctcacttccttcctcaaagattgtacctggaaagccatggctggttaattttttccctttagaatacataacattgtgaacttcagaaaataccataatcagggagttccatgacagagttaagtctccacactccaa

SEQ ID NO: 38377 - DNA, 856 bp, Homo sapiens
ttcccatgaaattgcattaggcctctaagtggatttcccataccttggttgtcctggtagaaggaaacttgacctaagtcagggttgttccagacttagcttagggaactgtatcttccctcgtcacctttgcactagatatcattccctttcctcttctggaacatcagggcatcaattactctgacccctctgtttattgcttcagtttctctttaaatgcttgatctttctactcaacatgtaaacataaatgagtctcatagaaaaagggaaagtaaccaatacctctcttcaggtgaaagcttctatgccatttctacctctctccctgtccactctcccattgggatactttcctcctatccctgccattctgtggagcatagcagtagagtgacctaaggacattttctcttcttgggctattgcccatgtatgtggcacttgctgtcaccaagaattccgtgctttttaaaaactttttggccttctgttttcagatgggcagtttgctgaaattaagtgcttctaatgaacaattgctttataaataattagaaaaaatcaattttaaaaataggtagatttgggctgggcgcggtggctcacgcctgtaatcccagcactttgggaggccaaggcgggtggatcacgaggtcaggagatcgagaccatcctagctaacatggtgaaaccccgtctctactaaaaatacaaaaaattagctgggtgtggtggcgggcacctgtattcccagccactcaggaggctgaggcaggagaatggcgtgaatccgggaggtggagcttgcagtgagccgagattgtgccactgcactctggcctgggcgaca

SEQ ID NO: 38378 - DNA, 1810 bp, Homo sapiens
ggcacgagcgcgtgtggttgaggatgggctggcggcgggtccgggtccgctgcctggcgctgcgggcggcgggccatggtggtttggattgagccgggcccggccggggcgccgagtcggagggggtggcagtgagcggcggcagaggctacggggctcggtttggctgactggggagtcggcaggcggcaggaaccatgcgaggccagcggagcctgctgctgggcccggcccgcctctgcctccgcctccttctgctgctgggttacaggcgccgctgtccacctctactccggggtctagtacagcgctggcgctacggcaaggtctgcctgcgctccctgctctacaactcctttgggggcagtgacaccgctgttgatgctgcctttgagcctgtctactggctggtagacaacgtgatccgctggtttggagtggtgttcgtggtcctggtgatcgtgctgacaggctccattgtagctatcgcctacctgtgtgtcctgcctctcatcctccgaacctactcagtgccacgactctgctggcatttcttctatagccactggaatctgatcctgattgtcttccactactaccaggccatcaccactccgcctgggtacccaccccagggcaggaatgatatcgccaccgtctccatctgtaagaagtgcatttaccccaagccagcccgaacacaccactgcagcatctgcaacaggtgtgtgctgaagatggatcaccactgcccctggctaaacaattgtgtgggccactataaccatcggtacttcttctctttctgctttttcatgactctgggctgtgtctactgcagctatggaagttgggaccttttccgggaggcttatgctgccattgagaaaatgaaacagctcgacaagaacaaactacaggcggttgccaaccagacttatcaccagaccccaccacccaccttctcctttcgagaaaggatgactcacaagagtcttgtctacctctggttcctgtgcagttctgtggcacttgccctgggtgccctaactgtatggcatgctgttctcatcagtcgaggtgagactagcatcgaaaggcacatcaacaagaaggagagacgtcggctacaggccaagggcagagtatttaggaatccttacaactacggctgcttggacaactggaaggtattcctgggtgtggatacaggaaggcactggcttactcgggtgctcttaccttctagtcacttgccccatgggaatggaatgagctgggagccccctccctgggtgactgctcactcagcctctgtgatggcagtgtgagctggactgtgtcagccacgactcgagcactcattctgctccctatgttatttcaagggcctccaagggcagcttttctcagaatccttgatcaaaaagagccagtgggcctgccttagggtaccatgcaggacaattcaaggaccagcctttttaccactgcagaagaaagacacaatgtggagaaatcttaggactgacatccctttactcaggcaaacagaagttccaaccccagactaggggtcaggcagctagctacctaccttgcccagtgctgacccggacctcctccaggatacagcactggagttggccaccacctcttctacttgctgtctgaaaaaacacctgactagtacagctgagatcttggcttctcaacagggcaaagataccaggcctgctgctgaggtcactgccacttctcacatgctgcttaagggagcacaaataaaggtattcgatttttaaagata

SEQ ID NO: 38379 - DNA, 1005 bp, Homo sapiens
  misc_feature (872)..(872): n is a, c, g, or t
  misc_feature (874)..(874): n is a, c, g, or t
  misc_feature (883)..(883): n is a, c, g, or t
  misc_feature (887)..(887): n is a, c, g, or t
  misc_feature (889)..(889): n is a, c, g, or t
  misc_feature (892)..(892): n is a, c, g, or t
  misc_feature (905)..(905): n is a, c, g, or t
ggcacgagcgcgtgtggttgaggatgggctggcggcgggtccgggtccgctgcctggcgctgcgggcggcgggccatggtggtttggattgagccgggcccggccggggcgccgagtcggagggggtggcagtgagcggcggcagaggctacggggctcggtttggctgactggggagtcggcaggcggcaggaaccatgcgaggccagcggagcctgctgctgggcccggcccgcctctgcctccgcctccttctgctgctgggttacaggcgccgctgtccacctctactccggggtctagtacagcgctggcgctacggcaaggtctgcctgcgctccctgctctacaactcctttgggggcagtgacaccgctgttgatgctgcctttgagcctgtctactggctggtagacaacgtgatccgctggtttggagtggtgttcgtggtcctggtgatcgtgctgacaggctccattgtagctatcgcctacctgtgtgtcctgcctctcatcctccgaacctactcagtgccacgactctgctggcatttcttctatagccactggaatctgatcctgattgtcttccactactaccaggccatcaccactccgcctgggtacccaccccagggcaggaatgatatcgccaccgtctccatctgtaagaagtgcatttaccccaagccagcccgaacacaccactgcagcatctgcaacaggtgtgtgctgaagatggatcaccactgcccctggctaaacaattgtgtgggccactataaccatcggtacttcttctctttctgctttttcatgactctgggctgtgtctactgcagctatggaagttgggaccttccggaggtatgngntggaatganagtnanaanattagggtgcacnattttaaacacacgttttgagaagtagaagttgactggcggagggtcggcaatggggtaggaataaagagggcggaaacagggtagggcaccgctggaac

SEQ ID NO: 38380 - DNA, 558 bp, Homo sapiens
tagaaactgcatagaggagatggaggcactggcagaggtgccatagaagcagtgaactgggaagtctggttgggtatcttggggctaaggcagcagctgcagagaaggttcttaaatgtctaattagactggggcagtggagtccatcagagaggtcaggacccgaggccttcatgaatcaacatggaggtcccctcccattgactccttcctgtgttctgctcagaatacctggagttgtcttggctaccatttccttggggtggggctgggaatggaattggagacaaagcattttctgtcatgcaaggggtagctggctgtcctgacaggagacagggaatctcctgctaccaggttgagttggctagcctgtgacatcagcccagagggagtaggaagaagagtatcttttgccaagacttaaatagcaccaggaaatacctcggtacaggcttctcttaatcagttgcagtatacaatactaagggcaaagctcaaatccctctgcctgcccttactacactcatgctacaggcttgtatctttacagacatg

SEQ ID NO: 38381 - DNA, 1778 bp, Homo sapiens
tacaaccccacattcggctaagtacgaggccccgtgttaatcggccgagggcgggtccgggtccgctgcctggcgctgcgggcggcgggccatggtggtttggattgagccgggcccggccggggcgccgagtcggagggggtggcagtgagcggcggcagaggctacggggctcggtttggctgactggggagtcggcaggcggcaggaaccatgcgaggccagcggagcctgctgctgggcccggcccgcctctgcctccgcctccttctgctgctgggttacaggcgccgctgtccacctctactccggggtctagtacagcgctggcgctacggcaaggtctgcctgcgctccctgctctacaactcctttgggggcagtgacaccgctgttgatgctgcctttgagcctgtctactggctggtagacaacgtgatccgctggtttggagtggtgttcgtggtcctggtgatcgtgctgacaggctccattgtagctatcgcctacctgtgtgtcctgcctctcatcctccgaacctactcagtgccacgactctgctggcatttcttctatagccactggaatctgatcctgattgtcttccactactaccaggccatcaccactccgcctgggtacccaccccagggcaggaatgatatcgccaccgtctccatctgtaagaagtgcatttaccccaagccagcccgaacacaccactgcagcatctgcaacaggtgtgtgctgaagatggatcaccactgcccctggctaaacaattgtgtgggccactataaccatcggtacttcttctctttctgctttttcatgactctgggctgtgtctactgcagctatggaagttgggaccttttccgggaggcttatgctgccattgagacttatcaccagaccccaccacccaccttctcctttcgagaaaggatgactcacaagagtcttgtctacctctggttcctgtgcagttctgtggcacttgccctgggtgccctaactgtatggcatgctgttctcatcagtcgaggtgagactagcatcgaaaggcacatcaacaagaaggagagacgtcggctacaggccaagggcagagtatttaggaatccttacaactacggctgcttggacaactggaaggtattcctgggtgtggatacaggaaggcactggcttactcgggtgctcttaccttctagtcacttgccccatgggaatggaatgagctgggagccccctccctgggtgactgctcactcagcctctgtgatggcagtgtgagctggactgtgtcagccacgactcgagcactcattctgctccctatgttatttcaagggcctccaagggcagcttttctcagaatccttgatcaaaaagagccagtgggcctgccttagggtaccatgcaggacaattcaaggaccagcctttttaccactgcagaagaaagacacaatgtggagaaatcttaggactgacatccctttactcaggcaaacagaagttccaaccccagactaggggtcaggcagctagctacctaccttgcccagtgctgacccggacctcctccaggatacagcactggagttggccaccacctcttctacttgctgtctgaaaaaacacctgactagtacagctgagatcttggcttctcaacagggcaaagataccaggcctgctgctgaggtcactgccacttctcacatgctgcttaagggagcacaaataaaggtattcgatttttaaagata

SEQ ID NO: 38382 - DNA, 1756 bp, Homo sapiens
ggcacgagcgcgtgtggttgaggatgggctggcggcgggtccgggtccgctgcctggcgctgcgggcggcgggccatggtggtttggattgagccgggcccggccggggcgccgagtcggagggggtggcagtgagcggcggcagaggctacggggctcggtttggctgactggggagtcggcaggcggcaggaaccatgcgaggccagcggagcctgctgctgggcccggcccgcctctgcctccgcctccttctgctgctgggttacaggcgccgctgtccacctctactccggggtctagtacagcgctggcgctacggcaaggtctgcctgcgctccctgctctacaactcctttgggggcagtgacaccgctgttgatgctgcctttgagcctgtctactggctggtagacaacgtgatccgctggtttggagtggtgttcgtggtcctggtgatcgtgctgacaggctccattgtagctatcgcctacctgtgtgtcctgcctctcatcctccgaacctactcagtgccacgactctgctggcatttcttctatagccactggaatctgatcctgattgtcttccactactaccaggccatcaccactccgcctgggtacccaccccagggcaggaatgatatcgccaccgtctccatctgtaagaagtgcatttaccccaagccagcccgaacacaccactgcagcatctgcaacaggtgtgtgctgaagatggatcaccactgcccctggctaaacaattgtgtgggccactataaccatcggtacttcttctctttctgctttttcatgactctgggctgtgtctactgcagctatggaagttgggaccttttccgggaggcttatgctgccattgagaaaatgaaacagctcgacaagaacaaactacaggcggttgccaaccagacttatcaccagaccccaccacccaccttctcctttcgagaaaggatgactcacaagagtcttgtctacctctggttcctgtgcagtcgaggtgagactagcatcgaaaggcacatcaacaagaaggagagacgtcggctacaggccaagggcagagtatttaggaatccttacaactacggctgcttggacaactggaaggtattcctgggtgtggatacaggaaggcactggcttactcgggtgctcttaccttctagtcacttgccccatgggaatggaatgagctgggagccccctccctgggtgactgctcactcagcctctgtgatggcagtgtgagctggactgtgtcagccacgactcgagcactcattctgctccctatgttatttcaagggcctccaagggcagcttttctcagaatccttgatcaaaaagagccagtgggcctgccttagggtaccatgcaggacaattcaaggaccagcctttttaccactgcagaagaaagacacaatgtggagaaatcttaggactgacatccctttactcaggcaaacagaagttccaaccccagactaggggtcaggcagctagctacctaccttgcccagtgctgacccggacctcctccaggatacagcactggagttggccaccacctcttctacttgctgtctgaaaaaacacctgactagtacagctgagatcttggcttctcaacagggcaaagataccaggcctgctgctgaggtcactgccacttctcacatgctgcttaagggagcacaaataaaggtattcgatttttaaagata

SEQ ID NO: 38383 - DNA, 1858 bp, Homo sapiens
ggcacgagcgcgtgtggttgaggatgggctggcggcgggtccgggtccgctgcctggcgctgcgggcggcgggccatggtggtttggattgagccgggcccggccggggcgccgagtcggagggggtggcagtgagcggcggcagaggctacggggctcggtttggctgactggggagtcggcaggcggcaggaaccatgcgaggccagcggagcctgctgctgggcccggcccgcctctgcctccgcctccttctgctgctgggttacaggcgccgctgtccacctctactccggggtctagtacagcgctggcgctacggcaaggtctgcctgcgctccctgctctacaactcctttgggggcagtgacaccgctgttgatgctgcctttgagcctgtctactggctggtagacaacgtgatccgctggtttggagtggtgttcgtggtcctggtgatcgtgctgacaggctccattgtagctatcgcctacctgtgtgtcctgcctctcatcctccgaacctactcagtgccacgactctgctggcatttcttctatagccactggaatctgatcctgattgtcttccactactaccaggccatcaccactccgcctgggtacccaccccagggcaggaatgatatcgccaccgtctccatctgtaagaagtgcatttaccccaagccagcccgaacacaccactgcagcatctgcaacaggtgtgtgctgaagatggatcaccactgcccctggctaaacaattgtgtgggccactataaccatcggtacttcttctctttctgctttttcatgactctgggctgtgtctactgcagctatggaagttgggaccttttccgggaggcttatgctgccattgagacttatcaccagaccccaccacccaccttctcctttcgagaaaggatgactcacaagagtcttgtctacctctggttcctgtgcagttctgtggcacttgccctgggtgccctaactgtatggcatgctgttctcatcagtcgaggtgagactagcatcgaaaggcacatcaacaagaaggagagacgtcggctacaggccaagggcagagtatttaggaatccttacaactacggctgcttggacaactggaaggtattcctgggtgtggatacaggaaggcactggcttactcgggtgctcttaccttctagtcacttgccccatgggaatggaatgagctgggagccccctccctgggtgactgctcactcagcctctgtgatggcagtgtgagctggactgtgtcagccacgactcgagcactcattctgctccctatgttatttcaagggcctccaagggcagcttttctcagaatccttgatcaaaaagagccagtgggcctgccttagggtaccatgcaggacaattcaaggaccagcctttttaccactgcagaagaaagacacaatgtggagaaatcttaggactgacatccctttactcaggcaaacagaagttccaaccccagactaggggtcaggcagctagctacctaccttgcccagtgctgacccggacctcctccaggatacagcactggagttggccaccacctcttctacttgctgtctgaaaaaacacctgactagtacagctgagatcttggcttctcaacagggcaaagataccaggcctgctgctgaggtcactgccacttctcacatgctgcttaagcggatcagcgctgatccgcttaaggtagcaggtgaagctgcaatagcaacctggggatgtatcatgggtacgataggaggggccattcctggcaatacacctggaagtggaattggcatgccaggaagggg

SEQ ID NO: 38384 - DNA, 1783 bp, Homo sapiens
ggcacgagcgcgtgtggttgaggatgggctggcggcgggtccgggtccgctgcctggcgctgcgggcggcgggccatggtggtttggattgagccgggcccggccggggcgccgagtcggagggggtggcagtgagcggcggcagaggctacggggctcggtttggctgactggggagtcggcaggcggcaggaaccatgcgaggccagcggagcctgctgctgggcccggcccgcctctgcctccgcctccttctgctgctgggttacaggcgccgctgtccacctctactccggggtctagtacagcgctggcgctacggcaaggtctgcctgcgctccctgctctacaactcctttgggggcagtgacaccgctgttgatgctgcctttgagcctgtctactggctggtagacaacgtgatccgctggtttggagtggtgttcgtggtcctggtgatcgtgctgacaggctccattgtagctatcgcctacctgtgtgtcctgcctctcatcctccgaacctactcagtgccacgactctgctggcatttcttctatagccactggaatctgatcctgattgtcttccactactaccaggccatcaccactccgcctgggtacccaccccagggcaggaatgatatcgccaccgtctccatctgtaagaagtgcatttaccccaagccagcccgaacacaccactgcagcatctgcaacaggtgtgtgctgaagatggatcaccactgcccctggctaaacaattgtgtgggccactataaccatcggtacttcttctctttctgctttttcatgactctgggctgtgtctactgcagctatggaagttgggaccttttccgggaggcttatgctgccattgagacttatcaccagaccccaccacccaccttctcctttcgagaaaggatgactcacaagagtcttgtctacctctggttcctgtgcagtcttcgcccctcttttcttagttctgtggcacttgccctgggtgccctaactgtatggcatgctgttctcatcagtcgaggtgagactagcatcgaaaggcacatcaacaagaaggagagacgtcggctacaggccaagggcagagtatttaggaatccttacaactacggctgcttggacaactggaaggtattcctgggtgtggatacaggaaggcactggcttactcgggtgctcttaccttctagtcacttgccccatgggaatggaatgagctgggagccccctccctgggtgactgctcactcagcctctgtgatggcagtgtgagctggactgtgtcagccacgactcgagcactcattctgctccctatgttatttcaagggcctccaagggcagcttttctcagaatccttgatcaaaaagagccagtgggcctgccttagggtaccatgcaggacaattcaaggaccagcctttttaccactgcagaagaaagacacaatgtggagaaatcttaggactgacatccctttactcaggcaaacagaagttccaaccccagactaggggtcaggcagctagctacctaccttgcccagtgctgacccggacctcctccaggatacagcactggagttggccaccacctcttctacttgctgtctgaaaaaacacctgactagtacagctgagatcttggcttctcaacagggcaaagataccaggcctgctgctgaggtcactgccacttctcacatgctgcttaagggagcacaaataaaggtattcgatttttaaagata

SEQ ID NO: 38385 - DNA, 1645 bp, Homo sapiens
ggcacgagcgcgtgtggttgaggatgggctggcggcgggtccgggtccgctgcctggcgctgcgggcggcgggccatggtggtttggattgagccgggcccggccggggcgccgagtcggagggggtggcagtgagcggcggcagaggctacggggctcggtttggctgactggggagtcggcaggcggcaggaaccatgcgaggccagcggagcctgctgctgggcccggcccgcctctgcctccgcctccttctgctgctgggttacaggcgccgctgtccacctctactccggggtctagtacagcgctggcgctacggcaaggtctgcctgcgctccctgctctacaactcctttgggggcagtgacaccgctgttgatgctgcctttgagcctgtctactggctggtagacaacgtgatccgctggtttggagtggtgttcgtggtcctggtgatcgtgctgacaggctccattgtagctatcgcctacctgtgtgtcctgcctctcatcctccgaacctactcagtgccacgactctgctggcatttcttctatagccactggaatctgatcctgattgtcttccactactaccaggccatcaccactccgcctgggtacccaccccagggcaggaatgatatcgccaccgtctccatctgtaagaagtgcatttaccccaagccagcccgaacacaccactgcagcatctgcaacagctatggaagttgggaccttttccgggaggcttatgctgccattgagacttatcaccagaccccaccacccaccttctcctttcgagaaaggatgactcacaagagtcttgtctacctctggttcctgtgcagttctgtggcacttgccctgggtgccctaactgtatggcatgctgttctcatcagtcgaggtgagactagcatcgaaaggcacatcaacaagaaggagagacgtcggctacaggccaagggcagagtatttaggaatccttacaactacggctgcttggacaactggaaggtattcctgggtgtggatacaggaaggcactggcttactcgggtgctcttaccttctagtcacttgccccatgggaatggaatgagctgggagccccctccctgggtgactgctcactcagcctctgtgatggcagtgtgagctggactgtgtcagccacgactcgagcactcattctgctccctatgttatttcaagggcctccaagggcagcttttctcagaatccttgatcaaaaagagccagtgggcctgccttagggtaccatgcaggacaattcaaggaccagcctttttaccactgcagaagaaagacacaatgtggagaaatcttaggactgacatccctttactcaggcaaacagaagttccaaccccagactaggggtcaggcagctagctacctaccttgcccagtgctgacccggacctcctccaggatacagcactggagttggccaccacctcttctacttgctgtctgaaaaaacacctgactagtacagctgagatcttggcttctcaacagggcaaagataccaggcctgctgctgaggtcactgccacttctcacatgctgcttaagggagcacaaataaaggtattcgatttttaaagata

SEQ ID NO: 38386 - DNA, 2006 bp, Homo sapiens
tacaaccccacattcggctaagtacgaggccccgtgttaatcggccgagggcgggtccgggtccgctgcctggcgctgcgggcggcgggccatggtggtttggattgagccgggcccggccggggcgccgagtcggagggggtggcagtgagcggcggcagaggctacggggctcggtttggctgactggggagtcggcaggcggcaggtcttttgtggggatgagccagggtgcaaggagagtacaatactccagttaccgaattgaaaccatccctgcagtggagcagcctcctccagtttctgttgggttttgagctacctgttaaataagtcagtgggattgtcaaggacaaagccctccctggctgcctcagggcaaaatcaggaaccatgcgaggccagcggagcctgctgctgggcccggcccgcctctgcctccgcctccttctgctgctgggttacaggcgccgctgtccacctctactccggggtctagtacagcgctggcgctacggcaaggtctgcctgcgctccctgctctacaactcctttgggggcagtgacaccgctgttgatgctgcctttgagcctgtctactggctggtagacaacgtgatccgctggtttggagtggtgttcgtggtcctggtgatcgtgctgacaggctccattgtagctatcgcctacctgtgtgtcctgcctctcatcctccgaacctactcagtgccacgactctgctggcatttcttctatagccactggaatctgatcctgattgtcttccactactaccaggccatcaccactccgcctgggtacccaccccagggcaggaatgatatcgccaccgtctccatctgtaagaagtgcatttaccccaagccagcccgaacacaccactgcagcatctgcaacaggtgtgtgctgaagatggatcaccactgcccctggctaaacaattgtgtgggccactataaccatcggtacttcttctctttctgctttttcatgactctgggctgtgtctactgcagctatggaagttgggaccttttccgggaggcttatgctgccattgagaaaatgaaacagctcgacaagaacaaactacaggcggttgccaaccagacttatcaccagaccccaccacccaccttctcctttcgagaaaggatgactcacaagagtcttgtctacctctggttcctgtgcagttctgtggcacttgccctgggtgccctaactgtatggcatgctgttctcatcagtcgaggtgagactagcatcgaaaggcacatcaacaagaaggagagacgtcggctacaggccaagggcagagtatttaggaatccttacaactacggctgcttggacaactggaaggtattcctgggtgtggatacaggaaggcactggcttactcgggtgctcttaccttctagtcacttgccccatgggaatggaatgagctgggagccccctccctgggtgactgctcactcagcctctgtgatggcagtgtgagctggactgtgtcagccacgactcgagcactcattctgctccctatgttatttcaagggcctccaagggcagcttttctcagaatccttgatcaaaaagagccagtgggcctgccttagggtaccatgcaggacaattcaaggaccagcctttttaccactgcagaagaaagacacaatgtggagaaatcttaggactgacatccctttactcaggcaaacagaagttccaaccccagactaggggtcaggcagctagctacctaccttgcccagtgctgacccggacctcctccaggatacagcactggagttggccaccacctcttctacttgctgtctgaaaaaacacctgactagtacagctgagatcttggcttctcaacagggcaaagataccaggcctgctgctgaggtcactgccacttctcacatgctgcttaagggagcacaaataaaggtattcgatttttaaagata

SEQ ID NO: 38387 - DNA, 1804 bp, Homo sapiens
tacaaccccacattcggctaagtacgaggccccgtgttaatcggccgagggcgggtccgggtccgctgcctggcgctgcgggcggcgggccatggtggtttggattgagccgggcccggccggggcgccgagtcggagggggtggcagtgagcggcggcagaggctacggggctcggtttggctgagaaccatgcgaggccagcggagcctgctgctgggcccggcccgcctctgcctccgcctccttctgctgctgggttacaggcgccgctgtccacctctactccggggtctagtacagcgctggcgctacggcaaggtctgcctgcgctccctgctctacaactcctttgggggcagtgacaccgctgttgatgctgcctttgagcctgtctactggctggtagacaacgtgatccgctggtttggagtggtgttcgtggtcctggtgatcgtgctgacaggctccattgtagctatcgcctacctgtgtgtcctgcctctcatcctccgaacctactcagtgccacgactctgctggcatttcttctatagccactggaatctgatcctgattgtcttccactactaccaggccatcaccactccgcctgggtacccaccccagggcaggaatgatatcgccaccgtctccatctgtaagaagtgcatttaccccaagccagcccgaacacaccactgcagcatctgcaacaggtgtgtgctgaagatggatcaccactgcccctggctaaacaattgtgtgggccactataaccatcggtacttcttctctttctgctttttcatgactctgggctgtgtctactgcagctatggaagttgggaccttttccgggaggcttatgctgccattgagaaaatgaaacagctcgacaagaacaaactacaggcggttgccaaccagacttatcaccagaccccaccacccaccttctcctttcgagaaaggatgactcacaagagtcttgtctacctctggttcctgtgcagttctgtggcacttgccctgggtgccctaactgtatggcatgctgttctcatcagtcgaggtgagactagcatcgaaaggcacatcaacaagaaggagagacgtcggctacaggccaagggcagagtatttaggaatccttacaactacggctgcttggacaactggaaggtattcctgggtgtggatacaggaaggcactggcttactcgggtgctcttaccttctagtcacttgccccatgggaatggaatgagctgggagccccctccctgggtgactgctcactcagcctctgtgatggcagtgtgagctggactgtgtcagccacgactcgagcactcattctgctccctatgttatttcaagggcctccaagggcagcttttctcagaatccttgatcaaaaagagccagtgggcctgccttagggtaccatgcaggacaattcaaggaccagcctttttaccactgcagaagaaagacacaatgtggagaaatcttaggactgacatccctttactcaggcaaacagaagttccaaccccagactaggggtcaggcagctagctacctaccttgcccagtgctgacccggacctcctccaggatacagcactggagttggccaccacctcttctacttgctgtctgaaaaaacacctgactagtacagctgagatcttggcttctcaacagggcaaagataccaggcctgctgctgaggtcactgccacttctcacatgctgcttaagggagcacaaataaaggtattcgatttttaaagata

SEQ ID NO: 38388 - DNA, 1600 bp, Homo sapiens
ggcacgagcgcgtgtggttgaggatgggctggcggcgggtccgggtccgctgcctggcgctgcgggcggcgggccatggtggtttggattgagccgggcccggccggggcgccgagtcggagggggtggcagtgagcggcggcagaggctacggggctcggtttggctgactggggagtcggcaggcggcaggaaccatgcgaggccagcggagcctgctgctgggcccggcccgcctctgcctccgcctccttctgctgctgggttacaggcgccgctgtccacctctactccggggtctagtacagcgctggcgctacggcaaggtctgcctgcgctccctgctctacaactcctttgggggcagtgacaccgctgttgatgctgcctttgagcctgtctactggctggtagacaacgtgatccgctggtttggagtggtgttcgtggtcctggtgatcgtgctgacaggctccattgtagctatcgcctacctgtgtgtcctgcctctcatcctccgaacctactcagtgccacgactctgctggcatttcttctatagccactggaatctgatcctgattgtcttccactactaccaggccatcaccactccgcctgggtacccaccccagggcaggaatgatatcgccaccgtctccatctgtaagaagtgcatttaccccaagccagcccgaacacaccactgcagcatctgcaacaggtgtgtgctgaagatggatcaccactgccacatacttcctccagccctctctaaactacccaccagtcttcgcccctcttttcttagttctgtggcacttgccctgggtgccctaactgtatggcatgctgttctcatcagtcgaggtgagactagcatcgaaaggcacatcaacaagaaggagagacgtcggctacaggccaagggcagagtatttaggaatccttacaactacggctgcttggacaactggaaggtattcctgggtgtggatacaggaaggcactggcttactcgggtgctcttaccttctagtcacttgccccatgggaatggaatgagctgggagccccctccctgggtgactgctcactcagcctctgtgatggcagtgtgagctggactgtgtcagccacgactcgagcactcattctgctccctatgttatttcaagggcctccaagggcagcttttctcagaatccttgatcaaaaagagccagtgggcctgccttagggtaccatgcaggacaattcaaggaccagcctttttaccactgcagaagaaagacacaatgtggagaaatcttaggactgacatccctttactcaggcaaacagaagttccaaccccagactaggggtcaggcagctagctacctaccttgcccagtgctgacccggacctcctccaggatacagcactggagttggccaccacctcttctacttgctgtctgaaaaaacacctgactagtacagctgagatcttggcttctcaacagggcaaagataccaggcctgctgctgaggtcactgccacttctcacatgctgcttaagggagcacaaataaaggtattcgatttttaaagata

SEQ ID NO: 38389 - DNA, 1424 bp, Homo sapiens
ccgctagtaggggccgggtggtgaatcggacgatgcgctgttgatgctgcctttgagcctgtctactggctggtagacaacgtgatccgctggtttggagtggtgttcgtggtcctggtgatcgtgctgacaggctccattgtagctatcgcctacctgtgtgtcctgcctctcatcctccgaacctactcagtgccacgactctgctggcatttcttctatagccactggaatctgatcctgattgtcttccactactaccaggccatcaccactccgcctgggtacccaccccagggcaggaatgatatcgccaccgtctccatctgtaagaagtgcatttaccccaagccagcccgaacacaccactgcagcatctgcaacaggtgtgtgctgaagatggatcaccactgcccctggctaaacaattgtgtgggccactataaccatcggtacttcttctctttctgctttttcatgactctgggctgtgtctactgcagctatggaagttgggaccttttccgggaggcttatgctgccattgagacttatcaccagaccccaccacccaccttctcctttcgagaaaggatgactcacaagagtcttgtctacctctggttcctgtgcagttctgtggcacttgccctgggtgccctaactgtatggcatgctgttctcatcagtcgaggtgagactagcatcgaaaggcacatcaacaagaaggagagacgtcggctacaggccaagggcagagtatttaggaatccttacaactacggctgcttggacaactggaaggtattcctgggtgtggatacaggaaggcactggcttactcgggtgctcttaccttctagtcacttgccccatgggaatggaatgagctgggagccccctccctgggtgactgctcactcagcctctgtgatggcagtgtgagctggactgtgtcagccacgactcgagcactcattctgctccctatgttatttcaagggcctccaagggcagcttttctcagaatccttgatcaaaaagagccagtgggcctgccttagggtaccatgcaggacaattcaaggaccagcctttttaccactgcagaagaaagacacaatgtggagaaatcttaggactgacatccctttactcaggcaaacagaagttccaaccccagactaggggtcaggcagctagctacctaccttgcccagtgctgacccggacctcctccaggatacagcactggagttggccaccacctcttctacttgctgtctgaaaaaacacctgactagtacagctgagatcttggcttctcaacagggcaaagataccaggcctgctgctgaggtcactgccacttctcacatgctgcttaagggagcacaaataaaggtattcgatttttaaagata

SEQ ID NO: 38390 - DNA, 1427 bp, Homo sapiens
gtatcgctaggtcgaggccggttttatcggccgagggaggctcggggctcggttggctccctgctctacaactcctttgggggcagtgacaccgctgttgatgctgcctttgagcctgtctactggctggtagacaacgtgatccgctggtttggagtggtgttcgtggtcctggtgatcgtgctgacaggctccattgtagctatcgcctacctgtgtgtcctgcctctcatcctccgaacctactcagtgccacgactctgctggcatttcttctatagccactggaatctgatcctgattgtcttccactactaccaggccatcaccactccgcctgggtacccaccccagggcaggaatgatatcgccaccgtctccatctgtaagaagtgcatttaccccaagccagcccgaacacaccactgcagcatctgcaacaggtgtgtgctgaagatggatcaccactgcccctggctaaacaattgtgtgggccactataaccatcggtacttcttctctttctgctttttcatgactctgggctgtgtctactgcagctatggaagttgggaccttttccgggaggcttatgctgccattgagacttatcaccagaccccaccacccaccttctcctttcgagaaaggatgactcacaagagtcttgtctacctctggttcctgtgcagtcgaggtgagactagcatcgaaaggcacatcaacaagaaggagagacgtcggctacaggccaagggcagagtatttaggaatccttacaactacggctgcttggacaactggaaggtattcctgggtgtggatacaggaaggcactggcttactcgggtgctcttaccttctagtcacttgccccatgggaatggaatgagctgggagccccctccctgggtgactgctcactcagcctctgtgatggcagtgtgagctggactgtgtcagccacgactcgagcactcattctgctccctatgttatttcaagggcctccaagggcagcttttctcagaatccttgatcaaaaagagccagtgggcctgccttagggtaccatgcaggacaattcaaggaccagcctttttaccactgcagaagaaagacacaatgtggagaaatcttaggactgacatccctttactcaggcaaacagaagttccaaccccagactaggggtcaggcagctagctacctaccttgcccagtgctgacccggacctcctccaggatacagcactggagttggccaccacctcttctacttgctgtctgaaaaaacacctgactagtacagctgagatcttggcttctcaacagggcaaagataccaggcctgctgctgaggtcactgccacttctcacatgctgcttaagggagcacaaataaaggtattcgatttttaaagata

SEQ ID NO: 38391 - DNA, 1567 bp, Homo sapiens
ggcacgagcgcgtgtggttgaggatgggctggcggcgggtccgggtccgctgcctggcgctgcgggcggcgggccatggtggtttggattgagccgggcccggccggggcgccgagtcggagggggtggcagtgagcggcggcagaggctacggggctcggtttggctgactggggagtcggcaggcggcaggaaccatgcgaggccagcggagcctgctgctgggcccggcccgcctctgcctccgcctccttctgctgctgggttacaggcgccgctgtccacctctactccggggtctagtacagcgctggcgctacggcaaggtctgcctgcgctccctgctctacaactcctttgggggcagtgacaccgctgttgatgctgcctttgagcctgtctactggctggtagacaacgtgatccgctggtttggagtggtgttcgtggtcctggtgatcgtgctgacaggctccattgtagctatcgcctacctgtgtgtcctgcctctcatcctccgaacctactcagtgccacgactctgctggcatttcttctatagccactggaatctgatcctgattgtcttccactactaccaggccatcaccactccgcctgggtacccaccccagggcaggaatgatatcgccaccgtctccatctgtaagaagtgcatttaccccaagccagcccgaacacaccactgcagcatctgcaacaggtgtgtgctgaagatggatcaccactgcccctggctaaacaattgtgtgggccactataaccatcggtacttcttctctttctgctttttcatgactctgggctgtgtctactgcagctatggaagttgggaccttttccgggaggcttatgctgccattgagacttatcaccagaccccaccacccaccttctcctttcgagaaaggatgactcacaagagtcttgtctacctctggttcctgtgcagttctgtggcacttgccctgggtgccctaactgtatggcatgctgttctcatcagtcgaggtgagactagcatcgaaaggcacatcaacaagaaggagagacgtcggctacaggccaagggcagagtatttaggaatccttacaactacggctgcttggacaactggaaggtattcctgggtgtggatacaggaaggtaatgtaagacacacagactaatgctgtccaacagaacactgtgatgagaaagatgttctatgcctgtgagcacttggaatatggctagtggctactgtgttagcacagttctagactctaggaatagagatcattgtccatttgaaccagaaaggcttgaggccaatactgtgtggttttaagtaacagatgaggcttcaacgtgactacagtggaatcctaggaaagctgtgctcaggaaggggcctctgggtgtaggatatggtggccaccagtcacctctcacttggagagcagtgtctagagttcaagccaataatttgtgagattaaaataatctacttgtcatagaggccctaagacagtaactggagctagctctctcagcccaagacaa

SEQ ID NO: 38392 - DNA, 696 bp, Homo sapiens
ggcaagatgaagtgaaaggtaaaccgcagttgaaagacgtgcgtctttcaactacggctgcttggacaactggaaggtattcctgggtgtggatacaggaaggcactggcttactcgggtgctcttaccttctagtcacttgccccatgggaatggaatgagctgggagccccctccctgggtgactgctcactcagcctctgtgatggcagtgtgagctggactgtgtcagccacgactcgagcactcattctgctccctatgttatttcaagggcctccaagggcagcttttctcagaatccttgatcaaaaagagccagtgggcctgccttagggtaccatgcaggacaattcaaggaccagcctttttaccactgcagaagaaagacacaatgtggagaaatcttaggactgacatccctttactcaggcaaacagaagttccaaccccagactaggggtcaggcagctagctacctaccttgcccagtgctgacccggacctcctccaggatacagcactggagttggccaccacctcttctacttgctgtctgaaaaaacacctgactagtacagctgagatcttggcttctcaacagggcaaagataccaggcctgctgctgaggtcactgccacttctcacatgctgcttaagggagcacaaataaaggtattcgatttttaaagata

SEQ ID NO: 38393 - DNA, 656 bp, Homo sapiens
  misc_feature (16)..(16): n is a, c, g, or t
  misc_feature (19)..(19): n is a, c, g, or t
aatatgtcggtcccangantgctgagacactggaccgtattcgtgggtgtggatacaggaaggcactggcttactcgggtgctcttaccttctagtcacttgccccatgggaatggaatgagctgggagccccctccctgggtgactgctcactcagcctctgtgatggcagtgtgagctggactgtgtcagccacgactcgagcactcattctgctccctatgttatttcaagggcctccaagggcagcttttctcagaatccttgatcaaaaagagccagtgggcctgccttagggtaccatgcaggacaattcaaggaccagcctttttaccactgcagaagaaagacacaatgtggagaaatcttaggactgacatccctttactcaggcaaacagaagttccaaccccagactaggggtcaggcagctagctacctaccttgcccagtgctgacccggacctcctccaggatacagcactggagttggccaccacctcttctacttgctgtctgaaaaaacacctgactagtacagctgagatcttggcttctcaacagggcaaagataccaggcctgctgctgaggtcactgccacttctcacatgctgcttaagggagcacaaataaaggtattcgatttttaaagata

SEQ ID NO: 38394 - DNA, 649 bp, Homo sapiens
agcacagaggaggtggacagcacaggtaggtattcctgggtgtggatacaggaaggcactggcttactcgggtgctcttaccttctagtcacttgccccatgggaatggaatgagctgggagccccctccctgggtgactgctcactcagcctctgtgatggcagtgtgagctggactgtgtcagccacgactcgagcactcattctgctccctatgttatttcaagggcctccaagggcagcttttctcagaatccttgatcaaaaagagccagtgggcctgccttagggtaccatgcaggacaattcaaggaccagcctttttaccactgcagaagaaagacacaatgtggagaaatcttaggactgacatccctttactcaggcaaacagaagttccaaccccagactaggggtcaggcagctagctacctaccttgcccagtgctgacccggacctcctccaggatacagcactggagttggccaccacctcttctacttgctgtctgaaaaaacacctgactagtacagctgagatcttggcttctcaacagggcaaagataccaggcctgctgctgaggtcactgccacttctcacatgctgcttaagggagcacaaataaaggtattcgatttttaaagata

SEQ ID NO: 38395 - DNA, 1783 bp, Homo sapiens
tacaaccccacattcggctaagtacgaggccccgtgttaatcggccgagggcgggtccgggtccgctgcctggcgctgcgggcggcgggccatggtggtttggattgagccgggcccggccggggcgccgagtcggagggggtggcagtgagcggcggcagaggctacggggctcggtttggctgactggggagtcggcaggcggcaggtaagggcgaagcctcggcccttgctccccatcctagtccctttttctgggtagggcactgccctggggccttgtcttgagtgcgggttcctgctctctcctcgccccgccctgcggggccgtgccctcctcagcccgagcgcaccttccgagcaatcgttacgctcagagcaggagggaaggaggtcaagcgacccaactcgtctgtttcacagatatggaacctcagattcagagacagggtttgacttgtccaaaatgatcaagatagttaagatagagcccaaactggaacccacggtttttgacttccagtccatcgcagtttcacctcgcggctgtcattgagaaataaaaccttttcccggttttttgttttgtttttgaggagtctcgctctgtcgccaggctggagtgcagtggagcgatctctgttcactgcaacctccgcctcccggcatcaagcgattctcctgcctcagcctcccgcgcggctgggacttacaggcgcgcgccaccacgcccagctaatttttgtagttttagtagtgacggggtttcaccatgttagccaggatggtcttgatctcttgatccgcccgcctcggccttccaaagtgcagggagtacaggcatgagccactgcctccggccttttcccggttttttaaactgcagcttccagtcctgcggtccgatcctcttcgcggcccctcatccccacttcagtaagctttctctggttgaaaaagccgaactctggttgtgtgggcccgtcatcaaaagataagcagccccaaaataaagttgttactctttttcttctcagcgtgttagcccagaagggaggtctgcacatgaataaaatgctactctttattgatgttgggtatctcctacttgagattgcaaacatcctgagagcagcgtctttgtccagatgacattcgccacgactttgatctcagttcacctgacttctgatggctttgccgtctgtccttccctgtcccctcagtcgactttcccattgggaaacagatgtgacttaaagccatgggaagaggggagtgttgtggccagcaatctcctccagtctggtggcagatgaccagtatggcctgtgactattactgaaggatcagagtactcgggcttgtgcttggggtggtagtaaagctgcgctttgctctgtttcctcccgttcactgagattagccccttctcccctacacacatctttttgaattttgctttacttctatttcttgagatgaaaagtctgggccaggtgcggtggctcacgcctgcaatcccagcactttgggaggctgaggcaagcacatcacctgaggtcgggagtttgagaccagcctgaccaacatggagaaacccggtctctactaaaaaaatacaaaattagccaggcgtggtggcacatgcctggaatcccagccactcaggaggctgaggcaggagaattgcttgaacccaggaggcggaggttgtggtgagcccagattgtgccattgcactccagcctgggcaacaagagtgaaactccatctcaaaaaa

SEQ ID NO: 38396 - DNA, 605 bp, Homo sapiens
aacagctcgacaagaacaaactacaggcggttgccaaccaggtgggctgtccccaccccactgcctcctgctgctcaggcctgggggtatagagttgctaaggcatctggggccgacctgcccatgtagttgtagaggctgccgagaggccactctagaccagatcaggagtgttcaggcaggctggctgtggtgggtagactaagtggcctacaggcaagctggaagtccctggtatgtgacagttttggctatctatcccgtcatcacctctctttgggtcgagcaagcaatctgccttggtgatggcctgagcagcaaggagtctatgttagtctgtgtaatggggttccaggggacagagatcaggcagagccagtctgatcatcccttgctcctggtccatctgcatctggatcatccctgcccccccagtaccttttaggactccctaatctgctgagcccatcttgattgtatttctgctgccctttcacagtccctagtggagctcacagtccctagtggttttccccactccagtcagtccattctgggtatggtctggtctcctctcttggggatgcagctgtgcagtgaaggag

SEQ ID NO: 38397 - DNA, 371 bp, Homo sapiens
gaatggaattggagacaaagcattttctgtcatgcaaggggtagctggctgtcctgacaggagacagggaatctcctgctaccaggttgagttggctagcctgtgacatcagcccagagggagtaggaagaagagtatcttttgccaagacttaaatagcaccaggaaatacctcggtacaggatccacattctgtgtactcattcctccattggctgttctttggtgaggaataatcatctgaaggtaggttgatgcactagggcagtcaggaagccctggcaatctctgctacagtggccatgcccagagacacagtggacagctttgtccatgttggccacactccacccaaaagtctgtctacacag

SEQ ID NO: 38398 - DNA, 364 bp, Homo sapiens
atggagtcttgctatgttgcccaggctagactcaaatgatcttcctatctcagtctcctgagttgctgggactactaggcatgagctaccatgcctggcttcacatcatttattcttaggccactttgatgctttttcattgatgctctttatagacatagtgaagtaaaagtttatctaggatatatggtgggaggtgaggaagacttaggtagagaggttccaaaccagttgttactgcttagctcaatttcagacatacttcctccagccctctctaaactacccaccagtcttcgcccctcttttcttagttctgtggcacttgccctgggtgccctaactgtatggcatgctgttctca

SEQ ID NO: 38399 - DNA, 327 bp, Homo sapiens
atgctctgaaaagctttgagcattttcacctcaaccttgggtgtgaacagtcttgtattttcttgcctttggaaagtagttcttagtgactggaagcctgaggcttgggtgatattgtcaggaaccagggatgaacctgaggggcctggacaccgcctgaaattgtgtttgattctagtccttaatcatttcccaaccagcctggctaaacaattgtgtgggccactataaccatcggtacttcttctctttctgctttttcatgactctgggctgtgtctactgcagctatggaagttgggaccttttccgggaggcttatgctgc

SEQ ID NO: 38400 - DNA, 1762 bp, Homo sapiens
ggcacgagcgcgtgtggttgaggatgggctggcggcgggtccgggtccgctgcctggcgctgcgggcggcgggccatggtggtttggattgagccgggcccggccggggcgccgagtcggagggggtggcagtgagcggcggcagaggctacggggctcggtttggctgactggggagtcggcaggcggcaggaaccatgcgaggccagcggagcctgctgctgggcccggcccgcctctgcctccgcctccttctgctgctgggttacaggcgccgctgtccacctctactccggggtctagtacagcgctggcgctacggcaaggtctgcctgcgctccctgctctacaactcctttgggggcagtgacaccgctgttgatgctgcctttgagcctgtctactggctggtagacaacgtgatccgctggtttggagtggtgttcgtggtcctggtgatcgtgctgacaggctccattgtagctatcgcctacctgtgtgtcctgcctctcatcctccgaacctactcagtgccacgactctgctggcatttcttctatagccactggaatctgatcctgattgtcttccactactaccaggccatcaccactccgcctgggtacccaccccagggcaggaatgatatcgccaccgtctccatctgtaagaagtgcatttaccccaagccagcccgaacacaccactgcagcatctgcaacaggtgtgtgctgaagatggatcaccactgcccctggctaaacaattgtgtgggccactataaccatcggtacttcttctctttctgctttttcatgactctgggctgtgtctactgcagctatggaagttgggaccttttccgggaggcttatgctgccattgagacttatcaccagaccccaccacccaccttctcctttcgagaaaggatgactcacaagagtcttgtctacctctggttcctgtgcagttctgtggcacttgccctgggtgccctaactgtatggcatgctgttctcatcagtcgaggtgagactagcatcgaaaggcacatcaacaagaaggagagacgtcggctacaggccaagggcagagtatttaggaatccttacaactacggctgcttggacaactggaaggtattcctgggtgtggatacaggaaggcactggcttactcgggtgctcttaccttctagtcacttgccccatgggaatggaatgagctgggagccccctccctgggtgactgctcactcagcctctgtgatggcagtgtgagctggactgtgtcagccacgactcgagcactcattctgctccctatgttatttcaagggcctccaagggcagcttttctcagaatccttgatcaaaaagagccagtgggcctgccttagggtaccatgcaggacaattcaaggaccagcctttttaccactgcagaagaaagacacaatgtggagaaatcttaggactgacatccctttactcaggcaaacagaagttccaaccccagactaggggtcaggcagctagctacctaccttgcccagtgctgacccggacctcctccaggatacagcactggagttggccaccacctcttctacttgctgtctgaaaaaacacctgactagtacagctgagatcttggcttctcaacagggcaaagataccaggcctgctgctgaggtcactgccacttctcacatgctgcttaagggagcacaaataaaggtattcgatttttaaagata

SEQ ID NO: 38401 - DNA, 2347 bp, Homo sapiens
  misc_feature (1776)..(1776): n is a, c, g, or t
ggcacgagcgcgtgtggttgaggatgggctggcggcgggtccgggtccgctgcctggcgctgcgggcggcgggccatggtggtttggattgagccgggcccggccggggcgccgagtcggagggggtggcagtgagcggcggcagaggctacggggctcggtttggctgactggggagtcggcaggcggcaggaaccatgcgaggccagcggagcctgctgctgggcccggcccgcctctgcctccgcctccttctgctgctgggttacaggcgccgctgtccacctctactccggggtctagtacagcgctggcgctacggcaaggtctgcctgcgctccctgctctacaactcctttgggggcagtgacaccgctgttgatgctgcctttgagcctgtctactggctggtagacaacgtgatccgctggtttggagtggtgttcgtggtcctggtgatcgtgctgacaggctccattgtagctatcgcctacctgtgtgtcctgcctctcatcctccgaacctactcagtgccacgactctgctggcatttcttctatagccactggaatctgatcctgattgtcttccactactaccaggccatcaccactccgcctgggtacccaccccagggcaggaatgatatcgccaccgtctccatctgtaagaagtgcatttaccccaagccagcccgaacacaccactgcagcatctgcaacaggtgtgtgctgaagatggatcaccactgcccctggctaaacaattgtgtgggccactataaccatcggtacttcttctctttctgctttttcatgactctgggctgtgtctactgcagctatggaagttgggaccttttccgggaggcttatgctgccattgagacttatcaccagaccccaccacccaccttctcctttcgagaaaggatgactcacaagagtcttgtctacctctggttcctgtgcagttctgtggcacttgccctgggtgccctaactgtatggcatgctgttctcatcagtcgaggtgagactagcatcgaaaggcacatcaacaagaaggagagacgtcggctacaggccaagggcagagtatttaggaatccttacaactacggctgcttggacaactggaaggtattcctgggtgtggatacaggaaggcactggcttactcgggtgctcttaccttctagtcacttgccccatgggaatggaatgagctgggagccccctccctgggtgactgctcactcagcctctgtgatggcagtgtgagctggactgtgtcagccacgactcgagcactcattctgctccctatgttatttcaagggcctccaagggcagcttttctcagaatccttgatcaaaaagagccagtgggcctgccttagggtaccatgcaggacaattcaaggaccagcctttttaccactgcagaagaaagacacaatgtggagaaatcttaggactgacatccctttactcaggcaaacagaagttccaaccccagactaggggtcaggcagctagctacctaccttgcccagtgctgacccggacctcctccaggatacagcactggagttggccaccacctcttctacttgctgtctgaaaaaacacctgactagtacagctgagatcttggcttctcaacagggcaaagataccaggcctgctgctgaggtcactgccacttctcacatgctgcttaagggagcacaaataaaggtattcgatttttaaagataaaaaaaaaaacaanaaaacataacagatgatacgaaaagatgatacataacagaaagggggagccgcctgccctgaaaattgtcaccctcgcaggggggcgccccataaatttctacgcgtatcgcaccagattgttgtgttgttcacactgtgttgtggcccccaaatatggagagagctgtcgattttctcagaaccaggcaaaagttggcactcagttctatttgaaccagaacatcttgtgcgtcactggtggaaacagctcgggcgttacacttccggcgaactcctttgtgctataggggacaccccattatacctgtgcgggggggggggagacaatactaaggtgtgggcgatacaacatcattacccactacaacataataattttctacacgcgccccctcaaggaggcacagcacatttaataccaactttcctagacagacggtgaatgaaacatgcctgtgaacaagacacacggcataataatatatcattcctctgctgttaaaacgattattggggttacacgggcagacactttgttgaccaagaaacatttttttcacaggaggcac

SEQ ID NO: 38402 - DNA, 1583 bp, Homo sapiens
tacaaccccacattcggctaagtacgaggccccgtgttaatcggccgagggcgggtccgggtccgctgcctggcgctgcgggcggcgggccatggtggtttggattgagccgggcccggccggggcgccgagtcggagggggtggcagtgagcggcggcagaggctacggggctcggtttggctgactggggagtcggcaggcggcaggaaccatgcgaggccagcggagcctgctgctgggcccggcccgcctctgcctccgcctccttctgctgctgggttacaggcgccgctgtccacctctactccggggtctagtacagcgctggcgctacggcaaggtctgcctgcgctccctgctctacaactcctttgggggcagtgacaccgctgttgatgctgcctttgagcctgtctactggctggtagacaacgtgatccgctggtttggagtgggcaggaatgatatcgccaccgtctccatctgtaagaagtgcatttaccccaagccagcccgaacacaccactgcagcatctgcaacaggtgtgtgctgaagatggatcaccactgcccctggctaaacaattgtgtgggccactataaccatcggtacttcttctctttctgctttttcatgactctgggctgtgtctactgcagctatggaagttgggaccttttccgggaggcttatgctgccattgagacttatcaccagaccccaccacccaccttctcctttcgagaaaggatgactcacaagagtcttgtctacctctggttcctgtgcagttctgtggcacttgccctgggtgccctaactgtatggcatgctgttctcatcagtcgaggtgagactagcatcgaaaggcacatcaacaagaaggagagacgtcggctacaggccaagggcagagtatttaggaatccttacaactacggctgcttggacaactggaaggtattcctgggtgtggatacaggaaggcactggcttactcgggtgctcttaccttctagtcacttgccccatgggaatggaatgagctgggagccccctccctgggtgactgctcactcagcctctgtgatggcagtgtgagctggactgtgtcagccacgactcgagcactcattctgctccctatgttatttcaagggcctccaagggcagcttttctcagaatccttgatcaaaaagagccagtgggcctgccttagggtaccatgcaggacaattcaaggaccagcctttttaccactgcagaagaaagacacaatgtggagaaatcttaggactgacatccctttactcaggcaaacagaagttccaaccccagactaggggtcaggcagctagctacctaccttgcccagtgctgacccggacctcctccaggatacagcactggagttggccaccacctcttctacttgctgtctgaaaaaacacctgactagtacagctgagatcttggcttctcaacagggcaaagataccaggcctgctgctgaggtcactgccacttctcacatgctgcttaagggagcacaaataaaggtattcgatttttaaagata

SEQ ID NO: 38403 - DNA, 1708 bp, Homo sapiens
ggcacgagcgcgtgtggttgaggatgggctggcggcgggtccgggtccgctgcctggcgctgcgggcggcgggccatggtggtttggattgagccgggcccggccggggcgccgagtcggagggggtggcagtgagcggcggcagaggctacggggctcggtttggctgactggggagtcggcaggcggcaggaaccatgcgaggccagcggagcctgctgctgggcccggcccgcctctgcctccgcctccttctgctgctgggttacaggcgccgctgtccacctctactccggggtctagtacagcgctggcgctacggcaaggtctgcctgcgctccctgctctacaactcctttgggggcagtgacaccgctgttgatgctgcctttgagcctgtctactggctggtagacaacgtgatccgctggtttggagtggtgttcgtggtcctggtgatcgtgctgacaggctccattgtagctatcgcctacctgtgtgtcctgcctctcatcctccgaacctactcagtgccacgactctgctggcatttcttctatagccactggaatctgatcctgattgtcttccactactaccaggccatcaccactccgcctgggtacccaccccagggcaggaatgatatcgccaccgtctccatctgtaagaagtgcatttaccccaagccagcccgaacacaccactgcagcatctgcaacaggtgtgtgctgaagatggatcaccactgcccctggctaaacaattgtgtgggccactataaccatcggtacttcttctctttctgctttttcatgactctgggctgtgtctactgcagctatggaagttgggaccttttccgggaggcttatgctgccattgagacttatcaccagaccccaccacccaccttctcctttcgagaaaggatgactcacaagagtcttgtctacctctggttcctgtgcagtcgaggtgagactagcatcgaaaggcacatcaacaagaaggagagacgtcggctacaggccaagggcagagtatttaggaatccttacaactacggctgcttggacaactggaaggtattcctgggtgtggatacaggaaggcactggcttactcgggtgctcttaccttctagtcacttgccccatgggaatggaatgagctgggagccccctccctgggtgactgctcactcagcctctgtgatggcagtgtgagctggactgtgtcagccacgactcgagcactcattctgctccctatgttatttcaagggcctccaagggcagcttttctcagaatccttgatcaaaaagagccagtgggcctgccttagggtaccatgcaggacaattcaaggaccagcctttttaccactgcagaagaaagacacaatgtggagaaatcttaggactgacatccctttactcaggcaaacagaagttccaaccccagactaggggtcaggcagctagctacctaccttgcccagtgctgacccggacctcctccaggatacagcactggagttggccaccacctcttctacttgctgtctgaaaaaacacctgactagtacagctgagatcttggcttctcaacagggcaaagataccaggcctgctgctgaggtcactgccacttctcacatgctgcttaagggagcacaaataaaggtattcgatttttaaagata

SEQ ID NO: 38404 - DNA, 1826 bp, Homo sapiens
caacagatatgtagcagcgcggcacctgttgttatttcatgaccgtgacgggtcttagttcgtatatcattgtggcgtcggctgtacaaccatggtggtttggattgagccgggcccggccggggcgccgagtcggagggggtggcagtgagcggcggcagaggctacggggctcggtttggctgactggggagtcggcaggcggcaggaaccatgcgaggccagcggagcctgctgctgggcccggcccgcctctgcctccgcctccttctgctgctgggttacaggcgccgctgtccacctctactccggggtctagtacagcgctggcgctacggcaaggtctgcctgcgctccctgctctacaactcctttgggggcagtgacaccgctgttgatgctgcctttgagcctgtctactggctggtagacaacgtgatccgctggtttggagtggtgttcgtggtcctggtgatcgtgctgacaggctccattgtagctatcgcctacctgtgtgtcctgcctctcatcctccgaacctactcagtgccacgactctgctggcatttcttctatagccactggaatctgatcctgattgtcttccactactaccaggccatcaccactccgcctgggtacccaccccagggcaggaatgatatcgccaccgtctccatctgtaagaagtgcatttaccccaagccagcccgaacacaccactgcagcatctgcaacaggtgtgtgctgaagatggatcaccactgcccctggctaaacaattgtgtgggccactataaccatcggtacttcttctctttctgctttttcatgactctgggctgtgtctactgcagctatggaagttgggaccttttccgggaggcttatgctgccattgagaaaatgaaacagctcgacaagaacaaactacaggcggttgccaaccagacttatcaccagaccccaccacccaccttctcctttcgagaaaggatgactcacaagagtcttgtctacctctggttcctgtgcagttctgtggcacttgccctgggtgccctaactgtatggcatgctgttctcatcagtcgaggtgagactagcatcgaaaggcacatcaacaagaaggagagacgtcggctacaggccaagggcagagtatttaggaatccttacaactacggctgcttggacaactggaaggtattcctgggtgtggatacaggaaggcactggcttactcgggtgctcttaccttctagtcacttgccccatgggaatggaatgagctgggagccccctccctgggtgactgctcactcagcctctgtgatggcagtgtgagctggactgtgtcagccacgactcgagcactcattctgctccctatgttatttcaagggcctccaagggcagcttttctcagaatccttgatcaaaaagagccagtgggcctgccttagggtaccatgcaggacaattcaaggaccagcctttttaccactgcagaagaaagacacaatgtggagaaatcttaggactgacatccctttactcaggcaaacagaagttccaaccccagactaggggtcaggcagctagctacctaccttgcccagtgctgacccggacctcctccaggatacagcactggagttggccaccacctcttctacttgctgtctgaaaaaacacctgactagtacagctgagatcttggcttctcaacagggcaaagataccaggcctgctgctgaggtcactgccacttctcacatgctgcttaagggagcacaaataaaggtattcgatttttaaagata

SEQ ID NO: 38405 - DNA, 2136 bp, Homo sapiens
tagaaactgcatagaggagatggaggcactggcagaggtgccatagaagcagtgaactgggaagtctggttgggtatcttggggctaaggcagcagctgcagagaaggttcttaaatgtctaattagactggggcagtggagtccatcagagaggtcaggacccgaggccttcatgaatcaacatggaggtcccctcccattgactccttcctgtgttctgctcagaatacctggagttgtcttggctaccatttccttggggtggggctgggaatggaattggagacaaagcattttctgtcatgcaaggggtagctggctgtcctgacaggagacagggaatctcctgctaccaggttgagttggctagcctgtgacatcagcccagagggagtaggaagaagagtatcttttgccaagacttaaatagcaccaggaaatacctcggtacaggatccacattctgtgtactcattcctccattggctgttctttggtgaggaataatcatctgaaggaaccatgcgaggccagcggagcctgctgctgggcccggcccgcctctgcctccgcctccttctgctgctgggttacaggcgccgctgtccacctctactccggggtctagtacagcgctggcgctacggcaaggtctgcctgcgctccctgctctacaactcctttgggggcagtgacaccgctgttgatgctgcctttgagcctgtctactggctggtagacaacgtgatccgctggtttggagtggtgttcgtggtcctggtgatcgtgctgacaggctccattgtagctatcgcctacctgtgtgtcctgcctctcatcctccgaacctactcagtgccacgactctgctggcatttcttctatagccactggaatctgatcctgattgtcttccactactaccaggccatcaccactccgcctgggtacccaccccagggcaggaatgatatcgccaccgtctccatctgtaagaagtgcatttaccccaagccagcccgaacacaccactgcagcatctgcaacaggtgtgtgctgaagatggatcaccactgcccctggctaaacaattgtgtgggccactataaccatcggtacttcttctctttctgctttttcatgactctgggctgtgtctactgcagctatggaagttgggaccttttccgggaggcttatgctgccattgagaaaatgaaacagctcgacaagaacaaactacaggcggttgccaaccagacttatcaccagaccccaccacccaccttctcctttcgagaaaggatgactcacaagagtcttgtctacctctggttcctgtgcagttctgtggcacttgccctgggtgccctaactgtatggcatgctgttctcatcagtcgaggtgagactagcatcgaaaggcacatcaacaagaaggagagacgtcggctacaggccaagggcagagtatttaggaatccttacaactacggctgcttggacaactggaaggtattcctgggtgtggatacaggaaggcactggcttactcgggtgctcttaccttctagtcacttgccccatgggaatggaatgagctgggagccccctccctgggtgactgctcactcagcctctgtgatggcagtgtgagctggactgtgtcagccacgactcgagcactcattctgctccctatgttatttcaagggcctccaagggcagcttttctcagaatccttgatcaaaaagagccagtgggcctgccttagggtaccatgcaggacaattcaaggaccagcctttttaccactgcagaagaaagacacaatgtggagaaatcttaggactgacatccctttactcaggcaaacagaagttccaaccccagactaggggtcaggcagctagctacctaccttgcccagtgctgacccggacctcctccaggatacagcactggagttggccaccacctcttctacttgctgtctgaaaaaacacctgactagtacagctgagatcttggcttctcaacagggcaaagataccaggcctgctgctgaggtcactgccacttctcacatgctgcttaagggagcacaaataaaggtattcgatttttaaagata

SEQ ID NO: 38406 - DNA, 1481 bp, Homo sapiens
gtatcgctaggtcgaggccggttttatcggccgagggaggctcggggctcggttggctccctgctctacaactcctttgggggcagtgacaccgctgttgatgctgcctttgagcctgtctactggctggtagacaacgtgatccgctggtttggagtggtgttcgtggtcctggtgatcgtgctgacaggctccattgtagctatcgcctacctgtgtgtcctgcctctcatcctccgaacctactcagtgccacgactctgctggcatttcttctatagccactggaatctgatcctgattgtcttccactactaccaggccatcaccactccgcctgggtacccaccccagggcaggaatgatatcgccaccgtctccatctgtaagaagtgcatttaccccaagccagcccgaacacaccactgcagcatctgcaacaggtgtgtgctgaagatggatcaccactgcccctggctaaacaattgtgtgggccactataaccatcggtacttcttctctttctgctttttcatgactctgggctgtgtctactgcagctatggaagttgggaccttttccgggaggcttatgctgccattgagacttatcaccagaccccaccacccaccttctcctttcgagaaaggatgactcacaagagtcttgtctacctctggttcctgtgcagttctgtggcacttgccctgggtgccctaactgtatggcatgctgttctcatcagtcgaggtgagactagcatcgaaaggcacatcaacaagaaggagagacgtcggctacaggccaagggcagagtatttaggaatccttacaactacggctgcttggacaactggaaggtattcctgggtgtggatacaggaaggcactggcttactcgggtgctcttaccttctagtcacttgccccatgggaatggaatgagctgggagccccctccctgggtgactgctcactcagcctctgtgatggcagtgtgagctggactgtgtcagccacgactcgagcactcattctgctccctatgttatttcaagggcctccaagggcagcttttctcagaatccttgatcaaaaagagccagtgggcctgccttagggtaccatgcaggacaattcaaggaccagcctttttaccactgcagaagaaagacacaatgtggagaaatcttaggactgacatccctttactcaggcaaacagaagttccaaccccagactaggggtcaggcagctagctacctaccttgcccagtgctgacccggacctcctccaggatacagcactggagttggccaccacctcttctacttgctgtctgaaaaaacacctgactagtacagctgagatcttggcttctcaacagggcaaagataccaggcctgctgctgaggtcactgccacttctcacatgctgcttaagggagcacaaataaaggtattcgatttttaaagata

SEQ ID NO: 38407 - DNA, 1701 bp, Homo sapiens
ggcacgagcgcgtgtggttgaggatgggctggcggcgggtccgggtccgctgcctggcgctgcgggcggcgggccatggtggtttggattgagccgggcccggccggggcgccgagtcggagggggtggcagtgagcggcggcagaggctacggggctcggtttggctgactggggagtcggcaggcggcaggaaccatgcgaggccagcggagcctgctgctgggcccggcccgcctctgcctccgcctccttctgctgctgggttacaggcgccgctgtccacctctactccggggtctagtacagcgctggcgctacggcaaggtctgcctgcgctccctgctctacaactcctttgggggcagtgacaccgctgttgatgctgcctttgagcctgtctactggctggtagacaacgtgatccgctggtttggagtggtgttcgtggtcctggtgatcgtgctgacaggctccattgtagctatcgcctacctgtgtgtcctgcctctcatcctccgaacctactcagtgccacgactctgctggcatttcttctatagccactggaatctgatcctgattgtcttccactactaccaggccatcaccactccgcctgggtacccaccccagggcaggaatgatatcgccaccgtctccatctgtaagaagtgcatttaccccaagccagcccgaacacaccactgcagcatctgcaacaggtgtgtgctgaagatggatcaccactgcccctggctaaacaattgtgtgggccactataaccatcggtacttcttctctttctgctttttcatgactctgggctgtgtctactgcagctatggaagttgggaccttttccgggaggcttatgctgccattgagacttatcaccagaccccaccacccaccttctcctttcgagaaaggatgactcacaagagtcttgtctacctctggttcctgtgcagttctgtggcacttgccctgggtgccctaactgtatggcatgctgttctcatcagtcgaggtgagactagcatcgaaaggcacatcaacaagaaggagagacgtcggctacaggccaagggcagagtatttaggaatccttacaactacggctgcttggacaactggaaggtattcctgggtgtggatacaggaaggcactggcttactcgggtgctcttaccttctagtcacttgccccatgggaatggaatgagctgggagccccctccctgggtgactgctcactcagcctctgtgatggcagtgtgagctggactgtgtcagccacgactcgagcactcattctgctccctatgttatttcaagggcctccaagggcagcttttctcagaatccttgatcaaaaagagccagtgggcctgccttagggtaccatgcaggacaattcaaggaccagcctttttaccactgcagaagaaagacacaatgtggagaaatcttaggactgacatccctttaccagtgctgacccggacctcctccaggatacagcactggagttggccaccacctcttctacttgctgtctgaaaaaacacctgactagtacagctgagatcttggcttctcaacagggcaaagataccaggcctgctgctgaggtcactgccacttctcacatgctgcttaagggagcacaaataaaggtattcgatttttaaagata

SEQ ID NO: 38408 - DNA, 1329 bp, Homo sapiens
tacaaccccacattcggctaagtacgaggccccgtgttaatcggccgagggcgggtccgggtccgctgcctggcgctgcgggcggcgggccatggtggtttggattgagccgggcccggccggggcgccgagtcggagggggtggcagtgagcggcggcagaggctacggggctcggtttggctgactggggagtcggcaggcggcagggcaggaatgatatcgccaccgtctccatctgtaagaagtgcatttaccccaagccagcccgaacacaccactgcagcatctgcaacaggtgtgtgctgaagatggatcaccactgcccctggctaaacaattgtgtgggccactataaccatcggtacttcttctctttctgctttttcatgactctgggctgtgtctactgcagctatggaagttgggaccttttccgggaggcttatgctgccattgagaaaatgaaacagctcgacaagaacaaactacaggcggttgccaaccagacttatcaccagaccccaccacccaccttctcctttcgagaaaggatgactcacaagagtcttgtctacctctggttcctgtgcagtcgaggtgagactagcatcgaaaggcacatcaacaagaaggagagacgtcggctacaggccaagggcagagtatttaggaatccttacaactacggctgcttggacaactggaaggtattcctgggtgtggatacaggaaggcactggcttactcgggtgctcttaccttctagtcacttgccccatgggaatggaatgagctgggagccccctccctgggtgactgctcactcagcctctgtgatggcagtgtgagctggactgtgtcagccacgactcgagcactcattctgctccctatgttatttcaagggcctccaagggcagcttttctcagaatccttgatcaaaaagagccagtgggcctgccttagggtaccatgcaggacaattcaaggaccagcctttttaccactgcagaagaaagacacaatgtggagaaatcttaggactgacatccctttactcaggcaaacagaagttccaaccccagactaggggtcaggcagctagctacctaccttgcccagtgctgacccggacctcctccaggatacagcactggagttggccaccacctcttctacttgctgtctgaaaaaacacctgactagtacagctgagatcttggcttctcaacagggcaaagataccaggcctgctgctgaggtcactgccacttctcacatgctgcttaagggagcacaaataaaggtattcgatttttaaagata

SEQ ID NO: 38409 - DNA, 779 bp, Homo sapiens
  misc_feature (752)..(752): n is a, c, g, or t
ggcacgagcgcgtgtggttgaggatgggctggcggcgggtccgggtccgctgcctggcgctgcgggcggcgggccatggtggtttggattgagccgggcccggccggggcgccgagtcggagggggtggcagtgagcggcggcagaggctacggggctcggtttggctgactggggagtcggcaggcggcaggaaccatgcgaggccagcggagcctgctgctgggcccggcccgcctctgcctccgcctccttctgctgctgggttacaggcgccgctgtccacctctactccggggtctagtacagcgctggcgctacggcaaggtctgcctgcgctccctgctctacaactcctttgggggcagtgacaccgctgttgatgctgcctttgagcctgtctactggctggtagacaacgtgatccgctggtttggagtggtgttcgtggtcctggtgatcgtgctgacaggctccattgtagctatcgcctacctgtgtgtcctgcctctcatcctccgaacctactcagtgccacgactctgctggcatttcttctatagccactggaatctgatcctgattgtcttccactactaccaggccatcaccactccgcctgggtacccaccccagggcaggaatgatatcgccaccgtctccatctgtaagaagtgcatttaccccaagccagcccgaacacaccactgcagcatctgcaacagccaacttgcgaggcaattctggcaaacnagggtggtggtgtctagaaagaatggg

SEQ ID NO: 38410 - DNA, 780 bp, Homo sapiens
aaaacattgagttaaaaccccagtggaaatgttaaacagcaaatagcataaattctcaagagagaactatgggaactggaaaacagatctgcagaagttagttagaattctgcagagataaaagagatgcttgtgaggaagagacattacaaacatggatggtggtatgagggcccagtgggaaaaatagcatcctaaaggcagcttgagaagaaaggcagattactccccaggttcaacagtgaaactcaggaaatgccaagtagcaacagtagaggccataaggaagtaaaatcttcagtgtgctaaggaaaatcagttgttggcttagttttcagcaaccagcttaaattatcgttcaataatgggaacaaataaggacattttcacagaaaaaaaaaaaagttgtatttactaagagaccttcgctgtacttcgggaagaaggaagtaaggagaaaggagaaatgcggacagtaatggtatccagaggcgttgggaagtgcaggtaaatctgaataagcattcgcttctgaaagtgatcgtcactaatttggagaggattaaaaaccaaagtcccaacaaaaaatggaaatcagtgagggggtgatttgaatgaacacactcttaagttctttgaactgtttgggaagtgtaggagggatattgattgacttcaaactttctgagtcaagtagacatgttccaattttaagggtaaccaccaaaagaatagaaatagtgtttaaagctttcaaactcacagagggtaaaaatatgg

SEQ ID NO: 38411 - DNA, 336 bp, Homo sapiens
attaaacacccacagcccttttcaaatgggaaataaatagcaacatctgacaccttcttggggacccagaatcattgtaatatacttatggaagcagcatgtgctgttctcagcagtggcctagaacttagtttatagaaagtgttgcagccatctgcttgcctatttgactatttgcttcttttccataaagctagcattaaaaaggtatagttttcttacctttagagatgacactttataaaaaagcagtttctaaatgaaaggctttcctatcatctcgtagaactgggcttctcaaagctgccagcatcatcgcccaggagcttattagag

SEQ ID NO: 38412 - DNA, 502 bp, Homo sapiens
aacgaaaccttcttttgccccctccgcagcagtcgcctccgggctttattgcaagtttacggttccatacaagtaaatccgaaaaaaagtgtgtgtgggggggtccacaccactaattattatggcgaggaagataaagaagacatggacagaaggcggatggctctgcggcctggctcccgcagaccgaccgccttcttcttccattcgagatggctcgtaccgaacctccttgccttcttcctgggtctctcgggggctggaccaatacatctgccgatgccctggccgaatggcaggcgacatcgggtcctggacccccacacgcagctcagtacccacgaggccccaggccgctggaagcctgtagctccgcggaggatgaaagcctgcccgcaggttctcctggagtggtgagcctctgtcggaagggggcgcccacgtctttttaatggtcctaacacaccagtggaataaatctctaagattccaaaaaaaaaaa

SEQ ID NO: 38413 - DNA, 455 bp, Homo sapiens
acgaaattaaatattttttgcacaggttccatacaagtaaatccgaaaaaaagtgtgtgtgggggggtccacaccactaattattatggcgaggaagataaagaagacatggacagaaggcggatggctctgcggcctggctcccgcagaccgaccgccttcttcttccattcgagatggctcgtaccgaacctccttgccttcttcctgggtctctcgggggctggaccaatacatctgccgatgccctggccgaatggcaggcgacatcgggtcctggacccccacacgcagctcagtacccacgaggccccaggccgctggaagcctgtagctccgcggaggatgaaagcctgcccgcaggttctcctggagtggtgagcctctgtcggaagggggcgcccacgtctttttaatggtcctaacacaccagtggaataaatctctaagattcc

SEQ ID NO: 38414 - DNA, 362 bp, Homo sapiens
cagaattgaacttatttggaaatagggtcgttgcagatgtaattaaattaagatgaggtcatacttgagtagggtggatcctttatgctatgtgactggtgtccttataaaagagatggtcatgtgaagacaggcacacacacagaacaccatggaagatggaccagagattggagtgatgcctctacaagccaaggagtccctgtgactgctggccatgaccagaagctaaagagaggcatggaacagactctccctcggaggcctcagaaggaattcaccctgctgacacttggattttggacttctaggctttagaacaatcagagaatacatttctgtgattttaagctatccagttt

SEQ ID NO: 38415 - DNA, 287 bp, Homo sapiens
ttgctctaatattaatattttctcaggagcatattgtttaattttcacatatttgttaattttccatgttcttttttttccaagttcataatatattgtacaaattgaattatcacatgatgagttggcattagcttctccaggcatgggaacttaacagatgagattaagaactgtagacagtttaaaatccatttatgttgctttcatagctggagtttttttggaccttaacttgaaatataagacaatcaaagcaatgcttctgtatgtgaccagtacacaat

SEQ ID NO: 38416 - DNA, 267 bp, Homo sapiens
caatagtcactcagtgtttcctaagttaacagttaaaagggggttggaggataatgcttgacatgttattggtgaacttgagcaaccacagtgagctgtactggttggcagaagtagcggcgtagggaaattggagttgaaaggagtgtggccaataagcctgtgcccaaaacgtttgagttttatcctgatgtgaatctatgcagaactgaagggaaagcctgccttctgtttactggagttgtgcacagttttgaggaatttgaa

SEQ ID NO: 38417 - DNA, 366 bp, Homo sapiens
aaaaaaagtttacatatatatatatatatacacacacacacagccctactaacatagcctgttgcattaaaaagctcttagataaacttaaaaggtcaataaaaatattagcagggaacatcaaaaatgaaatcgttttgtggtacacttgtgtcattttggttcattgttccccatagaattgttttaagtcatgctttgtcaaaatatccaaaggatgatacgagtatcttactaggtttgtttttttcattagaatgtcattgtgttagaaaatttttgcaattcactaaggggaacaataactatgtaatttccaaataatcatatgaaaaggaacaaagtcattaaaagataataatgacc

SEQ ID NO: 38418 - DNA, 166 bp, Homo sapiens
gataacttgaacttcatcacaattaaaaacttttgtgcatcagacactatcaagaaagttgaatggcagcctatacaatgagagaaaatacttacaaatcatatacctgataaagggtctagtattgagatcatacaaaaactcttccaactctagaataaaaagc

SEQ ID NO: 38419 - DNA, 263 bp, Homo sapiens
tctgaccacaacccagacaggaagacaaagaagatatgacaattattatccctcttttacataagagcaagcaggttcaaggataagtcacctgtccaaggtcacaaagctagaaattcattaagtcagaatgcaagtcagaaaggcctttcatcacgaacgtagtgttccatctaccatatcatttgaagtctcattcagaaccgtgattagtgggttagaaaaacaggacatagtgagaaagacttgggaatgttattgtg

SEQ ID NO: 38420 - DNA, 374 bp, Homo sapiens
ggcagttgtaaaagtagaaaatgttttgcttggttaactattccctccccttattttaaaaaatataactacagaataataattaccaatgttttcaacttatggatttcctttataagtcatagactttaaattattccattctaaaacattctgggttccttttctctctgtttaggatattttttcattattaagaaataggaaagaacttataaactcaggaaaattaacatgggaagtgatttcctagtctatgcgctagaccttaatgggatatgtctttgtctcttcaaaatctgtaaaatcgtattcataaaatgcatgtataccttagtatgtagtttggcttgtgggttagagaatttgtttag

SEQ ID NO: 38421 - DNA, 500 bp, Homo sapiens
tctgttttgaaagcatataaaacaaatcatcactcctggtaaatggcctcaagatggttctgttggcacattacaaaacagaacccgaacccccatgctggtgaacgaacaatctagacaaggccaccctgcgtgtaattgaccaggctgtgcagtgaacgaggaccctggcctgggtggctgagctggggtgaacctcatcccttaggccaaggaaagggggtgtctttgtctgatctatgcaaaggctttgactgctggccaagcccagtgtagtggccatcccctttttctaactggcacaattaacagaaaggcaccgtgtgggctaaagaaagtcctccggccaggtttcaaactgaaggaaaaactacacaagaaatccgatttgaagtattacttgttcccacactataggcttacccgccaagttcagtaaaaacaggccaaagctgaacgtgtttctggaagctcatttacccacaagccctattcatttg

SEQ ID NO: 38422 - DNA, 211 bp, Homo sapiens
ctgattggagactgggatagtatcagttctcttccaagctgtttttgtggagtaatagaaggtttccattgtactgtgattatgattgagagggtgctgagtatgtggagattctgcatggtagattcttcttccaatgtatgtagatttatgtaaagaacagcagataaagcaatgaaaaatgaagtcagtgtttacttacacaaaaaga

SEQ ID NO: 38423 - DNA, 369 bp, Homo sapiens
ggactgactcagcactgtgggcagctgagaaggaaaaggccttgcaaatgctctctagaccttagttcaaaatccctccaccccagaggagccaggtatgggccaggcatggtaatagctgcaagcaagatgccaggaccatttaaggctgaggcatttaattaggtacaatgtattacttcctgaaagtgtatgaaagcttcatagtgtctgcttagacatttagtgatagcagctacctacccagattggaggggatttgggtggggggcggctctagaagcttagctgcacctttggtttgatccgtgtttgactcatgtttgtaaattgtccctacaattaaggctgagggataacttcagcccc

SEQ ID NO: 38424 - DNA, 560 bp, Homo sapiens
ctaatttaaaaaccgaagatctaacctgctttccttagtacaaataaagccaacttttagctccttttacagtattactttgccacttgagtagggctaaacaccttttggaccatattcattgttactatcaatacatagacacacattagaattaattgaaaggctggtgctatattttctactttattattaaatgataaaagtaacattcactgtagaagttttagaaaatgtagggaaattataaggataaaactaaaaataacctctacgtgggtgcagtggctcatgcctgtaatcccattactttgggaggctgaggcagatggatcgcttgagcccaggagttggagaccagcctgggcaatgtggtgaaaccctgtctctaccaaaaatacaaaaaattagcctgatgtggtggcgcatgcctgtagtcccagctactcaggaggctgaggtggaaggatggcttgagcccaagaggtcgaggctgcagtgagccaagattgcaccactggattcctgcctgggtaaccgagcaagaccttgtctcaata

SEQ ID NO: 38425 - DNA, 220 bp, Homo sapiens
agcaagtacccaaaagtgttcagtggagaagcctggaagagaccggaagcatggccgcggcctcttgtcatttagccctggggagagaaaggcatggagttgggtttagggtcacctggtatcagttgtgaaaagggtttttagtagaattgggtatttcagagtctcttgatgattgattctagccttttaaaatctttcttggtaatgacatttagct

SEQ ID NO: 38426 - DNA, 707 bp, Homo sapiens
agttttatgggggaaagagttcttggtgactgagcgagactccatctcaaaaaaaaaaaaaaaaaaaaaatgcaaattcttgggcctcacctaaaagccactgaatcagacatactggggaagggtccagcaatgtttcaacaagcccaccaagtgattctgatacaagttaaaatttaagaaccatttcattgtttgggtttgtttataaaagcagtgctaggtcaaagaatgactaggtaaaatgaggtaatgaaagacagctggggaatgggatgaagcacacctgtattcaatacccacctccgctcttgggtgatcttggatgcatcacttctcagccttgaaacttgggttccttagctccaggggtacagaaccaaatgatctctaagaccctgaccccatctgaacctctggttagtctatttttgaacttgcttctttcgttgtgttctaggactgtctcccaacacttacatctcaatacccccttccctctttgctttgtgttcctcaatacgaaagacctgtggttgctatctggatgtctcccatctccaaacatgttcccattggaaaaaaaacagtacacaatatgtgtttgctttactcacttatatattatatatgtgtgctgctatataaacatacgcaatatgtattcaaaatggaaattcaagctcagataataaaacagcgattct

SEQ ID NO: 38427 - DNA, 1001 bp, Homo sapiens
catggaaagagcattgctggggggtcaactggatggtggagacgttgctaagtgtcttactctgttctaaatctgccagaggaggtgtatggggaagctcctgggtgctaaaggatctatgagttggagaagctgccctctccatgaacctagcaggaggaagccgtattctgcaggagccaatcataataggagcctaatgtacaggaagtgagcctgtggaaaaccgccctgctggaactgaatgctggagacagcaggctctgtaggagctttgctagccagatgcactgaaactagggaaagaatcccccttcctcttccagtgttcctccaccattctgctgataaggtttaaccttgtgccagttagcaaaggagaaatatctacaaggcctagctccattatcacagaaggatggatttggaattgagaggcataactgtcacagtccctttaactacttttttccttttcctacagcctaggaagctaagaacctttaactttttcatgtgtacacagtgagaaaccacacacatataacttcttttgatgacttctctatattactgtgtatgttttcagaaattttgaaggactattaatgcatcatgtgacacaattaagaaatgagcatccacttcttaaatttataaataatcttttaaaaaatacctttggtggtgggggacctagaattaagatgtggagataattatctgacaaaaaatttggagaaaaattttaagacagatgggggcaaaagatcccatgtttagctggtccgaaagtagtgttttctcagttggctgttcacaatcagttacagatcaaacttcttgttctactatttccccccttgactagttgttaaaaaaaaaagacacccaggattaccaggtatcttagatttatatttatttccaggtttaacttactaggtcaagtctttttctaattattatttttgagacacggtctggtctgtcactctgtc

SEQ ID NO: 38428 - DNA, 632 bp, Homo sapiens
caagccatcctcttgaactcctgctctcaagcgatcctcttggcctcccaaagttttggaattacaggtgtgagccaccacacccagcctacagttctaagattctttaagacaatctcttggatatctgggtgttgctgaggctcaatgacactgattctgattcaccagactgcactgtggttgctggaaaaacttcatcaccctccaacacaacgggatgggtttggagaaaaacaagaaagacacatcctgtgtgatatgtatgtggtccccttaagcgaaggagactccctgctgcatgagttcccataggatgcttagtatccttcatctaactcagcccagatttccctgggcaccgcccccgaagctgtactattgtcccgtgctattctatggggacctattatctatttgacttccagtaggaagattccagaagcattttatagaagcattttcaaaacttatagaatatgttttacttctcatttgagaaatctgaagtaccagtggaatctggtcttttcatggacacagtgagtgtggatggtagcagagaagaagcaggaggaggcagggagaaccttcagaccatggcctaggtatgatggagagaaaagaaagga

SEQ ID NO: 38429 - DNA, 731 bp, Homo sapiens
aaggaattgtggactgaatcactagccttaggtctttcagcaaacagcctatcagggccatttatcatgtgtgagatttgcattttacttgctgactttgtgtaatagatcccattcatgtccccttggggtatttccaatacttgaatggcagattggagtttttcagagtatgtgtttcatctgctagtctttctctccttcatagcttttcttttcctggacttgctccttttgagttgcttttgcgtttctcatgcctaggcaagtgtaatagaaattatgtagctccttatgttggcaaaggagctctatatagtttcactttgtataaaagttaggaccagctgttgttacatgtaatattttagttcagaacttgacctgaaggaagggaagaaaagtatgtgatttttaccttttttaacaaatgtgaaaaagtcagttttagaaatttcgtggtagtaagttcggcatttgttacatgtatagagagaagactaataatctctatttataactaaatcattgagatagaaaaagattcccattgactgtagacttcttcccattttgtcttcccttctgcctgtttccccttcaggcttggctctaggaaccaaagtgatttgttgttgttccaacctgggctttgtgactttggttagtgccactaccttcttccctcctttcccccttcaatttggaaataaatttctgtatatgttgca

SEQ ID NO: 38430 - DNA, 613 bp, Homo sapiens
aaggaattgtggactgaatcactagccttaggtctttcagcaaacagcctatcagggccatttatcatgtgtgagatttgcattttacttgctgactttgtgtaatagatcccattcatgtccccttggggtatttccaatacttgaatggcagattggagtttttcagagtatgtgtttcatctgctagtctttctctccttcatagcttttcttttcctggacttgctccttttgagttgcttttgcgtttctcatgcctaggcaagtgtaatagaaattatgtagctccttatgttggcaaaggagctctatatagtttcactttgtataaaagttaggaccagctgttgttacatgtaatattttagttcagaacttgacctgaaggaagggaagaaaagtatgtgatttttaccttttttaacaaatgtgaaaaagtcagttttagaaatttcgtggtagtaagttcggcatttgttacatgtatagagagaagactaataatctctatttataactaaatcattgagatagaaaaagattcccattgactgtagacttcttcccattttgtcttcccttctgcctgtggtaagacgagatcctggag

SEQ ID NO: 38431 - DNA, 355 bp, Homo sapiens
ggggaaaaaaaaaaaaaaaaagggtcttcttttgccaagtgccacctgagttccaaattttaccattctttgtaaacagttggatggattatgataaagaagatgctaccaatgaaatagaaaaccaacgagatgagaagactgtgatcctcatgtactcagaggcacttccctcctaagtcaaagaccatcctcactgactatgtgccaacgcctcgtttcaggcttgtgactcaacaaagggcttttccattgatagaagcagtttgggatttgtagttgcgacttcttcgatagttacctgcacgtccattgctggcaactgacttgtcattaaaacctggctctttggtta

SEQ ID NO: 38432 - DNA, 4031 bp, Homo sapiens
aaggaattgtggactgaatcactagccttaggtctttcagcaaacagcctatcagggccatttatcatgtgtgagatttgcattttacttgctgactttgtgtaatagatcccattcatgtccccttggggtatttccaatacttgaatggcagattggagtttttcagagtatgtgtttcatctgctagtctttctctccttcatagcttttcttttcctggacttgctccttttgagttgcttttgcgtttctcatgcctaggcaagtgtaatagaaattatgtagctccttatgttggcaaaggagctctatatagtttcactttgtataaaagttaggaccagctgttgttacatgtaatattttagttcagaacttgacctgaaggaagggaagaaaagtatgtgatttttaccttttttaacaaatgtgaaaaagtcagttttagaaatttcgtggtagtaagttcggcatttgttacatgtatagagagaagactaataatctctatttataactaaatcattgagatagaaaaagattcccattgactgtagacttcttcccattttgtcttcccttctgcctgtttccccttcaggcttggctctaggaaccaaagtgatttgttgttgttccaacctgggctttgtgactttggttagtgccactaccttcttccctcctttcccccttcaatttggaaataaatttctgtatatgttgcaattttaggtttaggtttgttctttttctttttcattaatcctctctcacctcacagataccccctcccatggcaaataatataataaccagtgaattttcaggaatttaaaaattagcttttttccacttaaaggagaaaaatatttgggactagcagcagaggcagtaagagatgtgaaccttggtgagctctgatacagtgagaagagattatactcatgaaagagaatgttagtgttacagagaagcagccgatagcaaatcgactgtagagacttggcggcggtggcattgccccaggtcgtcagcagtgtggtattatctatgagaacttgagcgacagagtatttcttgatgaatttatagatcatttgagatgttgagttactttagtttagttttgttttgttttttcaaataagtagagactattgtaaaaaacgagaaaggaaaatgaaatgtgcgtgttgatagcaataatttgtttcttttaaagattctaaaaggtctgagacctgtagcattaattatttgagtgccctcccttctcccctcccctcccttttctcttctcttttttcctctcctctccttctcctttattcattgttttgcttttggagtaggtgttgttcaagtatctgtggtttggttctggcattttgttcccaccatccccttcccccattaacttcccccctgcttgccatcctgcagtagtataaatcatgaataaaaaataattttgctgttgtagtatacattggagaaactggcaggttttatttccattattttatttccactatatctatgataagatgcaattataaggagagaagtgactgttttttattgataaggcaagattttcagaaaaatgagtaaaataattaatgaaacatatttagagcacttaatggtctctgttttcaatataattcttgatttcatttttctctggaatatattggccttctacagctattactgaattatagaaactggtttatttctggcagaaagctgcagtgccacctgagttccaaattttaccattctttgtaaacagttggatggattatgataaagaagatgctaccaatgaaatagaaaaccaacgagatgagaagactgtgatcctcatgtactcagaggcacttccctcctaagtcaaagaccatcctcactgactatgtgccaacgcctcgtttcaggcttgtgactcaacaaagggcttttccattgatagaagcagtttgggatttgtagttgcgacttcttcgatagttacctgcacgtccattgctggcaactgacttgtcattaaaacctggctctttggttaagggagctacgctgtggtttattcttaagttacgtggataaactaacctctaacagaaatatactttggttaattttgaaatgtgtcatttttaaacaatcttaaaagtaatacagaattgtgatttattaattttaaaacattcagaacttgttgaaagaaaaattatatctgaatcaagattcatgttttttatttttattttttttgatacagagtctcactctgtcactcaggctggagtgcagtgacatgatctcagctcactgcaacctccgcttcctgggttcaagcaattctcatgcctcagcctcctgagtagctgagaccacaggcacccgccaccacacccagctatttttttgtatttttagtagagacagagtctcaccacattgcccaggctggtctccaactcctgagctcaggcagtctgcccaccttggcctcccaaagtgctgcagttacaggcgtgagccactgcacctggcctcatgttttttaaataattgccttttatatttaccctttttgtcatcactttagaatgaaaattcccatttaaatctgaaagttaccttaatagtcctcttgtgttattaggacagtattattatagtacttatttattttattttagatttaaagttatcttctctttttcttttttcttctgctgcttttagggacaattaaaactgggaaactatgaaacatggaacattttatcctacctgaaagtaaacgagtaattgtgaagcataagacactgaggctaatacaactctgtcttcatgtgttgactgcctggcacatagtattcattctcttccctttaacatagaagtgtccagctgcgtacagtctagtaaccagcaactgtaaacgaacctgtgcctctaacaagcgattctaaaccacctatgagtatttcttttagggctcacttaaatacatgtttgtatatactgtattctagccagaataattttagatctgatcaggtagtagctaaaattagaaaaaaacaaaatagatgcttaaagaatttgcatccatttttgagtctaaatcttttaaaatatactgagatccacatctagtgaaatgtcagtgtcaaaatattatagattatagctaaaatccagattaatactcatttggggttttttatagtggaacttcatagtaatacaaaaagcagattgtcttcctgtctccgctgctcccacagtaggtattgaaactggtaaaatcagttttttgatagtgtgtgtatataagaaaaaatagatacacacattcttttttctcagtcaacacattgattgaacactctggcaaagatgctgtggtggatgaggttggagttcgaaagaagaagcaagcgctggcctggccttgaaagaaccgaagtctttcccattcacttctctagaaagctgccaagacagaggcagaaagaaatggatgatagttctgtcaagcacacttctgttctcttagaacttagaagtgtttctaagagaacagaagtaataagagaaacagttacgtgtggaattcaacatctttggttggaacgcattggctttttttttcttgttttgatagaaatggaattaagcaaaagtagtttttgtcttttctgttgtcttcaaattttatgccttttatttttaatttaatcccgttcaattatttaattgttatacattgacattaactgctgtattttgactttgttcaataattttgttctttcagggctagaaataaactttttaaaaaaagtgtgcatttttccctttcctaaacttttattctttcttttgatcagcgtaaaagaatattttaatgtcttttgatagcataaaagaatatttaaatgtcttaataggttttcaaagaacatttagtatttttagtgataaatgttttaaacctttta

SEQ ID NO: 38433 - DNA, 3839 bp, Homo sapiens
aaggaattgtggactgaatcactagccttaggtctttcagcaaacagcctatcagggccatttatcatgtgtgagatttgcattttacttgctgactttgtgtaatagatcccattcatgtccccttggggtatttccaatacttgaatggcagattggagtttttcagagtatgtgtttcatctgctagtctttctctccttcatagcttttcttttcctggacttgctccttttgagttgcttttgcgtttctcatgcctaggcaagtgtaatagaaattatgtagctccttatgttggcaaaggagctctatatagtttcactttgtataaaagttaggaccagctgttgttacatgtaatattttagttcagaacttgacctgaaggaagggaagaaaagtatgtgatttttaccttttttaacaaatgtgaaaaagtcagttttagaaatttcgtggtagtaagttcggcatttgttacatgtatagagagaagactaataatctctatttataactaaatcattgagatagaaaaagattcccattgactgtagacttcttcccattttgtcttcccttctgcctgtttccccttcaggcttggctctaggaaccaaagtgatttgttgttgttccaacctgggctttgtgactttggttagtgccactaccttcttccctcctttcccccttcaatttggaaataaatttctgtatatgttgcaattttaggtttaggtttgttctttttctttttcattaatcctctctcacctcacagataccccctcccatggcaaataatataataaccagtgaattttcaggaatttaaaaattagcttttttccacttaaaggagaaaaatatttgggactagcagcagaggcagtaagagatgtgaaccttggtgagctctgatacagtgagaagagattatactcatgaaagagaatgttagtgttacagagaagcagccgatagcaaatcgactgtagagacttggcggcggtggcattgccccaggtcgtcagcagtgtggtattatctatgagaacttgagcgacagagtatttcttgatgaatttatagatcatttgagatgttgagttactttagtttagttttgttttgttttttcaaataagtagagactattgtaaaaaacgagaaaggaaaatgaaatgtgcgtgttgatagcaataatttgtttcttttaaagattctaaaaggtctgagacctgtagcattaattatttgagtgccctcccttctcccctcccctcccttttctcttctcttttttcctctcctctccttctcctttattcattgttttgcttttggagtaggtgttgttcaagtatctgtggtttggttctggcattttgttcccaccatccccttcccccattaacttcccccctgcttgccatcctgcagtagtataaatcatgaataaaaaataattttgctgttgtagtatacattggagaaactggcaggttttatttccattattttatttccactatatctatgataagatgcaattataaggagagaagtgactgttttttattgataaggcaagattttcagaaaaatgagtaaaataattaatgaaacatatttagagcacttaatggtctctgttttcaatataattcttgatttcatttttctctggaatatattggccttctacagctattactgaattatagaaactggtttatttctggcagaaagctgcagtgccacctgagttccaaattttaccattctttgtaaacagttggatggattatgataaagaagatgctaccaatgaaatagaaaaccaacgagatgagaagactgtgatcctcatgtactcagaggcacttccctcctaagtcaaagaccatcctcactgactatgtgccaacgcctcgtttcaggcttgtgactcaacaaagggcttttccattgatagaagcagtttgggatttgtagttgcgacttcttcgatagttacctgcacgtccattgctggcaactgacttgtcattaaaacctggctctttggttaagggagctacgctgtggtttattcttaagttacgtggataaactaacctctaacagaaatatactttggttaattttgaaatgtgtcatttttaaacaatcttaaaagtaatacagaattgtgatttattaattttaaaacattcagaacttgttgaaagaaaaattatatctgaatcaagattcatgttttttatttttattttttttgatacagagtctcactctgtcactcaggctggagtgcagtgacatgatctcagctcactgcaacctccgcttcctgggttcaagcaattctcatgcctcagcctcctgagtagctgagaccacaggcacccgccaccacacccagctatttttttgtatttttagtagagacagagtctcaccacattgcccaggctggtctccaactcctgagctcaggcagtctgcccaccttggcctcccaaagtgctgcagttacaggcgtgagccactgcacctggcctcatgttttttaaataattgccttttatatttaccctttttgtcatcactttagaatgaaaattcccatttaaatctgaaagttaccttaatagtcctcttgtgttattaggacagtattattatagtacttatttattttattttagatttaaagttatcttctctttttcttttttcttctgctgcttttagggacaattaaaactgggaaactatgaaacatggaacattttatcctacctgaaagtaaacgagtaattgtgaagcataagacactgaggctaatacaactctgtcttcatgtgttgactgcctggcacatagtattcattctcttccctttaacatagaagtgtccagctgcgtacagtctagtaaccagcaactgtaaacgaacctgtgcctctaacaagcgattctaaaccacctatgagtatttcttttagggctcacttaaatacatgtttgtatatactgtattctagccagaataattttagatctgatcaggtagtagctaaaattagaaaaaaacaaaatagatgcttaaagaatttgcatccatttttgagtctaaatcttttaaaatatactgagatccacatctagtgaaatgtcagtgtcaaaatattatagattatagctaaaatccagattaatactcatttggggttttttatagtggaacttcatagtaatacaaaaagcagattgtcttcctgtctccgctgctcccacagtaggtattgaaactggtaaaatcagttttttgatagtgtgtgtatataagaaaaaatagatacacacattcttttttctcagtcaacacattgattgaacactctggcaaagatgctgtggtggatgaggttggagttcgaaagaagaagcaagcgctggcctggccttgaaagaaccgaagtctttcccattcacttctctagaaagctgccaagacagaggcagaaagaaatggatgatagttctgtcaagcacacttctgttctcttagaacttagaagtgtttctaagagaacagaagtaataagagaaacagttacgtgtggaattcaacatctttggttggaacgcattggctttttttttcttgttttgatagaaatggaattaagcaaaagtagtttttgtcttttctgttgtcttcaaattttatgccttgaaattaaaatgaaatcccctaaaattttatagggttaaacctggttttacaggggggtatttacatatggggccaaatctatggt

SEQ ID NO: 38434 - DNA, 2306 bp, Homo sapiens
ggggaaaaaaaaaaaaaaaaagggtcttcttttgccaagtgccacctgagttccaaattttaccattctttgtaaacagttggatggattatgataaagaagatgctaccaatgaaatagaaaaccaacgagatgagaagactgtgatcctcatgtactcagaggcacttccctcctaagtcaaagaccatcctcactgactatgtgccaacgcctcgtttcaggcttgtgactcaacaaagggcttttccattgatagaagcagtttgggatttgtagttgcgacttcttcgatagttacctgcacgtccattgctggcaactgacttgtcattaaaacctggctctttggttaagggagctacgctgtggtttattcttaagttacgtggataaactaacctctaacagaaatatactttggttaattttgaaatgtgtcatttttaaacaatcttaaaagtaatacagaattgtgatttattaattttaaaacattcagaacttgttgaaagaaaaattatatctgaatcaagattcatgttttttatttttattttttttgatacagagtctcactctgtcactcaggctggagtgcagtgacatgatctcagctcactgcaacctccgcttcctgggttcaagcaattctcatgcctcagcctcctgagtagctgagaccacaggcacccgccaccacacccagctatttttttgtatttttagtagagacagagtctcaccacattgcccaggctggtctccaactcctgagctcaggcagtctgcccaccttggcctcccaaagtgctgcagttacaggcgtgagccactgcacctggcctcatgttttttaaataattgccttttatatttaccctttttgtcatcactttagaatgaaaattcccatttaaatctgaaagttaccttaatagtcctcttgtgttattaggacagtattattatagtacttatttattttattttagatttaaagttatcttctctttttcttttttcttctgctgcttttagggacaattaaaactgggaaactatgaaacatggaacattttatcctacctgaaagtaaacgagtaattgtgaagcataagacactgaggctaatacaactctgtcttcatgtgttgactgcctggcacatagtattcattctcttccctttaacatagaagtgtccagctgcgtacagtctagtaaccagcaactgtaaacgaacctgtgcctctaacaagcgattctaaaccacctatgagtatttcttttagggctcacttaaatacatgtttgtatatactgtattctagccagaataattttagatctgatcaggtagtagctaaaattagaaaaaaacaaaatagatgcttaaagaatttgcatccatttttgagtctaaatcttttaaaatatactgagatccacatctagtgaaatgtcagtgtcaaaatattatagattatagctaaaatccagattaatactcatttggggttttttatagtggaacttcatagtaatacaaaaagcagattgtcttcctgtctccgctgctcccacagtaggtattgaaactggtaaaatcagttttttgatagtgtgtgtatataagaaaaaatagatacacacattcttttttctcagtcaacacattgattgaacactctggcaaagatgctgtggtggatgaggttggagttcgaaagaagaagcaagcgctggcctggccttgaaagaaccgaagtctttcccattcacttctctagaaagctgccaagacagaggcagaaagaaatggatgatagttctgtcaagcacacttctgttctcttagaacttagaagtgtttctaagagaacagaagtaataagagaaacagttacgtgtggaattcaacatctttggttggaacgcattggctttttttttcttgttttgatagaaatggaattaagcaaaagtagtttttgtcttttctgttgtcttcaaattttatgccttttatttttaatttaatcccgttcaattatttaattgttatacattgacattaactgctgtattttgactttgttcaataattttgttctttcagggctagaaataaactttttaaaaaaagtgtgcatttttccctttcctaaacttttattctttcttttgatcagcgtaaaagaatattttaatgtcttttgatagcataaaagaatatttaaatgtcttaataggttttcaaagaacatttagtatttttagtgataaatgttttaaacctttta

SEQ ID NO: 38435 - DNA, 2402 bp, Homo sapiens
cgttaacatcactgctgtggcctcatactcttttttccattttctacaagaagccttttagtatatgaaaattattactctttttggggtttaaagaaatggtctgcataacctgaatgaaagaagcaaatgactattctctgaagacaaccaagagaaaattgcaaaaagacaattggatggattatgataaagaagatgctaccaatgaaatagaaaaccaacgagatgagaagactgtgatcctcatgtactcagaggcacttccctcctaagtcaaagaccatcctcactgactatgtgccaacgcctcgtttcaggcttgtgactcaacaaagggcttttccattgatagaagcagtttgggatttgtagttgcgacttcttcgatagttacctgcacgtccattgctggcaactgacttgtcattaaaacctggctctttggttaagggagctacgctgtggtttattcttaagttacgtggataaactaacctctaacagaaatatactttggttaattttgaaatgtgtcatttttaaacaatcttaaaagtaatacagaattgtgatttattaattttaaaacattcagaacttgttgaaagaaaaattatatctgaatcaagattcatgttttttatttttattttttttgatacagagtctcactctgtcactcaggctggagtgcagtgacatgatctcagctcactgcaacctccgcttcctgggttcaagcaattctcatgcctcagcctcctgagtagctgagaccacaggcacccgccaccacacccagctatttttttgtatttttagtagagacagagtctcaccacattgcccaggctggtctccaactcctgagctcaggcagtctgcccaccttggcctcccaaagtgctgcagttacaggcgtgagccactgcacctggcctcatgttttttaaataattgccttttatatttaccctttttgtcatcactttagaatgaaaattcccatttaaatctgaaagttaccttaatagtcctcttgtgttattaggacagtattattatagtacttatttattttattttagatttaaagttatcttctctttttcttttttcttctgctgcttttagggacaattaaaactgggaaactatgaaacatggaacattttatcctacctgaaagtaaacgagtaattgtgaagcataagacactgaggctaatacaactctgtcttcatgtgttgactgcctggcacatagtattcattctcttccctttaacatagaagtgtccagctgcgtacagtctagtaaccagcaactgtaaacgaacctgtgcctctaacaagcgattctaaaccacctatgagtatttcttttagggctcacttaaatacatgtttgtatatactgtattctagccagaataattttagatctgatcaggtagtagctaaaattagaaaaaaacaaaatagatgcttaaagaatttgcatccatttttgagtctaaatcttttaaaatatactgagatccacatctagtgaaatgtcagtgtcaaaatattatagattatagctaaaatccagattaatactcatttggggttttttatagtggaacttcatagtaatacaaaaagcagattgtcttcctgtctccgctgctcccacagtaggtattgaaactggtaaaatcagttttttgatagtgtgtgtatataagaaaaaatagatacacacattcttttttctcagtcaacacattgattgaacactctggcaaagatgctgtggtggatgaggttggagttcgaaagaagaagcaagcgctggcctggccttgaaagaaccgaagtctttcccattcacttctctagaaagctgccaagacagaggcagaaagaaatggatgatagttctgtcaagcacacttctgttctcttagaacttagaagtgtttctaagagaacagaagtaataagagaaacagttacgtgtggaattcaacatctttggttggaacgcattggctttttttttcttgttttgatagaaatggaattaagcaaaagtagtttttgtcttttctgttgtcttcaaattttatgccttttatttttaatttaatcccgttcaattatttaattgttatacattgacattaactgctgtattttgactttgttcaataattttgttctttcagggctagaaataaactttttaaaaaaagtgtgcatttttccctttcctaaacttttattctttcttttgatcagcgtaaaagaatattttaatgtcttttgatagcataaaagaatatttaaatgtcttaataggttttcaaagaacatttagtatttttagtgataaatgttttaaacctttta

SEQ ID NO: 38436 - DNA, 2605 bp, Homo sapiens
aaggaattgtggactgaatcactagccttaggtctttcagcaaacagcctatcagggccatttatcatgtgtgagatttgcattttacttgctgactttgtgtaatagatcccattcatgtccccttggggtatttccaatacttgaatggcagattggagtttttcagagtatgtgtttcatctgctagtctttctctccttcatagcttttcttttcctggacttgctccttttgagttgcttttgcgtttctcatgcctaggcaagtgtaatagaaattatgtagctccttatgttggcaaaggagctctatatagtttcactttgtataaaagttaggaccagctgttgttacatgtaatattttagttcagaacttgacctgaaggaagggaagaaaagtatgtgatttttaccttttttaacaaatgtgaaaaagtcagttttagaaatttcgtggtagtaagttcggcatttgttacatgtatagagagaagactaataatctctatttataactaaatcattgagatagaaaaagattcccattgactgtagacttcttcccattttgtcttcccttctgcctgtttccccttcaggcttggctctaggaaccaaagtgatttgttgttgttccaacctgggctttgtgactttggttagtgccactaccttcttccctcctttcccccttcaatttggaaataaatttctgtatatgttgcaattttaggtttaggtttgttctttttctttttcattaatcctctctcacctcacagataccccctcccatggcaaataatataataaccagtgaattttcaggaatttaaaaattagcttttttccacttaaaggagaaaaatatttgggactagcagcagaggcagtaagagatgtgaaccttggtgagctctgatacagtgagaagagattatactcatgaaagagaatgttagtgttacagagaagcagccgatagcaaatcgactgtagagacttggcggcggtggcattgccccaggtcgtcagcagtgtggtattatctatgagaacttgagcgacagagtatttcttgatgaatttatagatcatttgagatgttgagttactttagtttagttttgttttgttttttcaaataagtagagactattgtaaaaaacgagaaaggaaaatgaaatgtgcgtgttgatagcaataatttgtttcttttaaagattctaaaaggtctgagacctgtagcattaattatttgagtgccctcccttctcccctcccctcccttttctcttctcttttttcctctcctctccttctcctttattcattgttttgcttttggagtaggtgttgttcaagtatctgtggtttggttctggcattttgttcccaccatccccttcccccattaacttcccccctgcttgccatcctgcagtagtataaatcatgaataaaaaataattttgctgttgtagtatacattggagaaactggcaggttttatttccattattttatttccactatatctatgataagatgcaattataaggagagaagtgactgttttttattgataaggcaagattttcagaaaaatgagtaaaataattaatgaaacatatttagagcacttaatggtctctgttttcaatataattcttgatttcatttttctctggaatatattggccttctacagctattactgaattatagaaactggtttatttctggcagaaagctgcagtgccacctgagttccaaattttaccattctttgtaaacagttggatggattatgataaagaagatgctaccaatgaaatagaaaaccaacgagatgagaagactgtgatcctcatgtactcagaggcacttccctcctaagtcaaagaccatcctcactgactatgtgccaacgcctcgtttcaggcttgtgactcaacaaagggcttttccattgatagaagcagtttgggatttgtagttgcgacttcttcgatagttacctgcacgtccattgctggcaactgacttgtcattaaaacctggctctttggttaagggagctacgctgtggtttattcttaagttacgtggataaactaacctctaacagaaatatactttggttaattttgaaatgtgtcatttttaaacaatcttaaaagtaatacagaattgtgatttattaattttaaaacattcagaacttgttgaaagaaaaattatatctgaatcaagattcatgttttttatttttattttttttgatacagagtctcactctgtcactcaggctgagattgaaccgtggcactccagcctggtgtgacagagcgagactttatctcaataaaaaacaaaaagaccaaaaacagtaaatcaccgtgataggcaaaaggcattcctttattatttttggcatcttttaaactattgtggactctgggtccaatttgaaagtgattaagctaaacatatttgacctttgaactagtcccatttaagaccattacggaactggttcctctttgatctccccatgtctgaatggctaataatacacattgagagggcaccaacgg

SEQ ID NO: 38437 - DNA, 2080 bp, Homo sapiens
aaggaattgtggactgaatcactagccttaggtctttcagcaaacagcctatcagggccatttatcatgtgtgagatttgcattttacttgctgactttgtgtaatagatcccattcatgtccccttggggtatttccaatacttgaatggcagattggagtttttcagagtatgtgtttcatctgctagtctttctctccttcatagcttttcttttcctggacttgctccttttgagttgcttttgcgtttctcatgcctaggcaagtgtaatagaaattatgtagctccttatgttggcaaaggagctctatatagtttcactttgtataaaagttaggaccagctgttgttacatgtaatattttagttcagaacttgacctgaaggaagggaagaaaagtatgtgatttttaccttttttaacaaatgtgaaaaagtcagttttagaaatttcgtggtagtaagttcggcatttgttacatgtatagagagaagactaataatctctatttataactaaatcattgagatagaaaaagattcccattgactgtagacttcttcccattttgtcttcccttctgcctgtttccccttcaggcttggctctaggaaccaaagtgatttgttgttgttccaacctgggctttgtgactttggttagtgccactaccttcttccctcctttcccccttcaatttggaaataaatttctgtatatgttgcaattttaggtttaggtttgttctttttctttttcattaatcctctctcacctcacagataccccctcccatggcaaataatataataaccagtgaattttcaggaatttaaaaattagcttttttccacttaaaggagaaaaatatttgggactagcagcagaggcagtaagagatgtgaaccttggtgagctctgatacagtgagaagagattatactcatgaaagagaatgttagtgttacagagaagcagccgatagcaaatcgactgtagagacttggcggcggtggcattgccccaggtcgtcagcagtgtggtattatctatgagaacttgagcgacagagtatttcttgatgaatttatagatcatttgagatgttgagttactttagtttagttttgttttgttttttcaaataagtagagactattgtaaaaaacgagaaaggaaaatgaaatgtgcgtgttgatagcaataatttgtttcttttaaagattctaaaaggtctgagacctgtagcattaattatttgagtgccctcccttctcccctcccctcccttttctcttctcttttttcctctcctctccttctcctttattcattgttttgcttttggagtaggtgttgttcaagtatctgtggtttggttctggcattttgttcccaccatccccttcccccattaacttcccccctgcttgccatcctgcagtagtataaatcatgaataaaaaataattttgctgttgtagtatacattggagaaactggcaggttttatttccattattttatttccactatatctatgataagatgcaattataaggagagaagtgactgttttttattgataaggcaagattttcagaaaaatgagtaaaataattaatgaaacatatttagagcacttaatggtctctgttttcaatataattcttgatttcatttttctctggaatatattggccttctacagctattactgaattatagaaactggtttatttctggcagaaagctgcagtgccacctgagttccaaattttaccattctttgtaaacagttggatggattatgataaagaagatgctaccaatgaaatagaaaaccaacgagatgagaagactgtgatcctcatgtactcagaggcacttccctcctaagtcaaagaccatcctcactgactatgtgccaacgcctcgtttcaggcttgtgactcaacaaagggcttttccattgatagaagcagtttgggatttgtagttgcgacttcttcgatagttacctgcacgtccattgctggcaactgacttgtcattaaaacctggctctttggtta

SEQ ID NO: 38438 - DNA, 1163 bp, Homo sapiens
  misc_feature (65)..(65): n is a, c, g, or t
tgtgaagcataagaactgagtatcgtcttgtgctggcacatagtattcattctcttcccttatanactgcgtacagtctagtaaccagcaactgtaaacgaacctgtgcctctaacaagcgattctaaaccacctatgagtatttcttttagggctcacttaaatacatgtttgtatatactgtattctagccagaataattttagatctgatcaggtagtagctaaaattagaaaaaaacaaaatagatgcttaaagaatttgcatccatttttgagtctaaatcttttaaaatatactgagatccacatctagtgaaatgtcagtgtcaaaatattatagattatagctaaaatccagattaatactcatttggggttttttatagtggaacttcatagtaatacaaaaagcagattgtcttcctgtctccgctgctcccacagtaggtattgaaactggtaaaatcagttttttgatagtgtgtgtatataagaaaaaatagatacacacattcttttttctcagtcaacacattgattgaacactctggcaaagatgctgtggtggatgaggttggagttcgaaagaagaagcaagcgctggcctggccttgaaagaaccgaagtctttcccattcacttctctagaaagctgccaagacagaggcagaaagaaatggatgatagttctgtcaagcacacttctgttctcttagaacttagaagtgtttctaagagaacagaagtaataagagaaacagttacgtgtggaattcaacatctttggttggaacgcattggctttttttttcttgttttgatagaaatggaattaagcaaaagtagtttttgtcttttctgttgtcttcaaattttatgccttttatttttaatttaatcccgttcaattatttaattgttatacattgacattaactgctgtattttgactttgttcaataattttgttctttcagggctagaaataaactttttaaaaaaagtgtgcatttttccctttcctaaacttttattctttcttttgatcagcgtaaaagaatattttaatgtcttttgatagcataaaagaatatttaaatgtcttaataggttttcaaagaacatttagtatttttagtgataaatgttttaaacctttta

SEQ ID NO: 38439 - DNA, 1406 bp, Homo sapiens
aaggaattgtggactgaatcactagccttaggtctttcagcaaacagcctatcagggccatttatcatgtgtgagatttgcattttacttgctgactttgtgtaatagatcccattcatgtccccttggggtatttccaatacttgaatggcagattggagtttttcagagtatgtgtttcatctgctagtctttctctccttcatagcttttcttttcctggacttgctccttttgagttgcttttgcgtttctcatgcctaggcaagtgtaatagaaattatgtagctccttatgttggcaaaggagctctatatagtttcactttgtataaaagttaggaccagctgttgttacatgtaatattttagttcagaacttgacctgaaggaagggaagaaaagtatgtgatttttaccttttttaacaaatgtgaaaaagtcagttttagaaatttcgtggtagtaagttcggcatttgttacatgtatagagagaagactaataatctctatttataactaaatcattgagatagaaaaagattcccattgactgtagacttcttcccattttgtcttcccttctgcctgtttccccttcaggcttggctctaggaaccaaagtgatttgttgttgttccaacctgggctttgtgactttggttagtgccactaccttcttccctcctttcccccttcaatttggaaataaatttctgtatatgttgcaattttaggtttaggtttgttctttttctttttcattaatcctctctcacctcacagataccccctcccatggcaaataatataataaccagtgaattttcaggaatttaaaaattagcttttttccacttaaaggagaaaaatatttgggactagcagcagaggcagtaagagatgtgaaccttggtgagctctgatacagtgagaagagattatactcatgaaagagaatgttagtgttacagagaagcagccgatagcaaatcgactgtagagacttggcggcggtggcattgccccaggtcgtcagcagtgtggtattatctatgagaacttgagcgacagagtatttcttgatgaatttatagatcatttgagatgttgagttactttagtttagttttgttttgttttttcaaataagtagagactattgtaaaaaacgagaaaggaaaatgaaatgtgcgtgttgatagcaataatttgtttcttttaaagattctaaaaggtctgagacctgtcgctcaagttctcatagataataccacactgctgacgacctggggcaatgccaccgccgccaagtctctacagtcgatttgctatcggctgcttctctgtaacactaacattctctttcttgagtataatctcttctcactgtatcaggtcgagc

SEQ ID NO: 38440 - DNA, 1175 bp, Homo sapiens
aaggaattgtggactgaatcactagccttaggtctttcagcaaacagcctatcagggccatttatcatgtgtgagatttgcattttacttgctgactttgtgtaatagatcccattcatgtccccttggggtatttccaatacttgaatggcagattggagtttttcagagtatgtgtttcatctgctagtctttctctccttcatagcttttcttttcctggacttgctccttttgagttgcttttgcgtttctcatgcctaggcaagtgtaatagaaattatgtagctccttatgttggcaaaggagctctatatagtttcactttgtataaaagttaggaccagctgttgttacatgtaatattttagttcagaacttgacctgaaggaagggaagaaaagtatgtgatttttaccttttttaacaaatgtgaaaaagtcagttttagaaatttcgtggtagtaagttcggcatttgttacatgtatagagagaagactaataatctctatttataactaaatcattgagatagaaaaagattcccattgactgtagacttcttcccattttgtcttcccttctgcctgtttccccttcaggcttggctctaggaaccaaagtgatttgttgttgttccaacctgggctttgtgactttggttagtgccactaccttcttccctcctttcccccttcaatttggaaataaatttctgtatatgttgcaattttaggtttaggtttgttctttttctttttcattaatcctctctcacctcacagataccccctcccatggcaaataatataataaccagtgaattttcaggaatttaaaaattagcttttttccacttaaaggagaaaaatatttgggactagcagcagaggcagtaagagatgtgaaccttggtgagctctgatacagtgagaagagattatactcatgaaagagaatgttagtgttacagagaagcagccgatagcaaatcgactgtagagacttggcggcggtggcattgccccaggtcgtcagcagtgtggtattatctatgagaacttgagcgacaggtctcagaccttttagaatctttaaaagaaacaaattattgctatcaacacgcacatttgattttcctttctcgctttttacaatagtctctacttattt

SEQ ID NO: 38441 - DNA, 1037 bp, Homo sapiens
gataccctatttatttatttatttatttttaaagaaaaaaaatagccaggcatggtggctcttgcctgtcacccttgctacttgggaggctgaggtgggaggatcgcttgagctcaggagttggaggttgcagtgagttatgatcacaccactgcgctacagcctaggagacagagtaagactctgtctctgaaaaaaataaacaaacaaaaaagggcatatttcacactgttagatttgtcattgcagtggctgcacatgtacgcgcgcgtgtgtgtgtgtgtaattgacactagaaaggttccctttgcagtatgcaggaggcctagaatagaaaaaagaaatatagaacagcttggtcttctcagcctgctccccttttttggattttatacaaggaggtgcctgcagaatgcagcagtggttccagtttattttatgttaaggctcacacacaaatttctgttttttttttttttgtcaaaaaatttttttgtctctggatctctttacactcttaaaaatgattgaggctggacactgtggctcacacctgtaatcccagcactttgggaggctgagacaggtggatcacttgaggtcaggagtttgagaccagcctgaccaacttggagaaaccccgtctctactaaaaatgaaaaattagctgggcatggtggcgcatgcctgtaatcccagctacttgggaggctgaggcaggagaatcacttgaacccaggaggcagagattgcggtgagccgagatcgtaccattgcattctagcctgggcaacaagcgaaactctgtctcaaaaaaaaaaaaaaagattgagaatatcacagagatttggtttatatggattatatctatcaatatttactgtattagaaattaaaactggctggatgtggtggctcatgcctgtagtcccaacactttgggaggtcaaggtaggaggatcacttgagcccaggatcttgctatgttgaccaatctgggcaacatagcaacatcccatctctacaaaaaaaaaaaa

SEQ ID NO: 38442 - DNA, 414 bp, Homo sapiens
tttttctgtttgtttttctgcacttagaatatgaattatcctagataactctgggaaagttagatttgaaaagcaatctctttcacaaaaatccatggagaatcacttgaacccaggaggcagagattgcggtgagccgagatcgtaccattgcattctagcctgggcaacaagcgaaactctgtctcaaaaaaaaaaaaaaagattgagaatatcacagagatttggtttatatggattatatctatcaatatttactgtattagaaattaaaactggctggatgtggtggctcatgcctgtagtcccaacactttgggaggtcaaggtaggaggatcacttgagcccaggatcttgctatgttgaccaatctgggcaacatagcaacatcccatctctacaaaaaaaaaaaa

SEQ ID NO: 38443 - DNA, 433 bp, Homo sapiens
cacctccaaaaattttatgtgggttttacacattaagcaagcataggtgaggtgcagtgaaggggaagtgatggctgtcagtcgtttggccaggttcctttgcatacaggggagctagtgggtgtataccagctgagacagctgaaggaggagaacatgaagaatagttggaaactattgaacctccaagatttttctgtctttgttaacaactagcagttacatgctagcattatttatttatttagttagttagttagttagttcttgagatggagtctcactctgtcacccacgctggagtgcagtggcatgatctcagctcactacaacctctgcctcctgggttcaggtgattttcctgcttcagcctcctgagtagctgggattacaggggcccgctaccacgcccagctaatttttgtattttgag

SEQ ID NO: 38444 - DNA, 5786 bp, Homo sapiens
  misc_feature (25)..(25): n is a, c, g, or t
  misc_feature (33)..(33): n is a, c, g, or t
  misc_feature (44)..(44): n is a, c, g, or t
  misc_feature (72)..(72): n is a, c, g, or t
  misc_feature (75)..(75): n is a, c, g, or t
  misc_feature (90)..(90): n is a, c, g, or t
  misc_feature (2000)..(2000): n is a, c, g, or t
  misc_feature (2072)..(2072): n is a, c, g, or t
aatggcctgtgagtcagaggggcantggagtcngcggcgcgganccggggcggccccggggagggaccgtcncanggaggggcgcggcancggctggggggctgcgggcgccagggcccgctagtgttgcacacgaagctgaacagcgaagagcctagcagagcagggctcagcctgagccaccctttgtctgggttgggggcccgtggcagggaggaccggggaaccaaggggagggaccgggacgggacgggacggaagggcccggagcagcggccacctccgcggagccaatttgggagcggggtgagtgtgctagagggaaagagcaaatctccgaagctccagtatagtatggggcctgtcccaggctgtggggaggagaggagtgagaagggacctgggaggctgggcagggggtaagggatcgtccagaagaaggagtccaggagtcaggtgagtctgcctggcttagtttagagagtctgctaaggtctgctctctcccctctgaagatagagggctctaggctgggggccgaggggttggtaagagagaagaagtcgaccttcctacccacagtggtggtccgtgggaacagcccccctagcttgtgtggatgtatgtagggacaaaatagagagcagctggcagcagttctctttgcataggatgagggtggaaagcacatggataggaattcatcctgtcactctccttgatcatggtagaaatggaaatctttaatactgaagggaaggggagaatgagccttgaagctgatacctataccaatacccacctcacccacctcccaggcctcaaaagtgtctaaaggtacagacgtattctgggacttgttgtttttgctggccttgctccctcagcatgttgggagctgtagtccttgccagccacagcctggcacagctgtttgatgccagctgctgcccaccccctgaacgaagagtgaggcttggcctactctgccctgcccccctcccctgcagtcctgccccatgagtcagcttgaagccatggtctagagccagactggctgggtggcaggggagtgaatatagagcgtcttgttgacagggtgggaactgagagggctctggggttaataagcagatgccaggtatgctggggtcaagtagggcatcatgtcatcccctggcttccccagggcaaggggtcaagagggcaactgggatgacctggaagtggtggtgctagggaaaaggcccctcctgaatctgtatggcttgggtggaggaaagaagggtagaaattagtgcaggttgtaccttctgacaaggttggttgcaggtaggatagtgcaggttgcgattggtgttctgccctttccagccatcccgcccaccacagggaaccaggattttcttagggatcccaattcttaggagaatttggtgaaatgggatagtggggtacaatgatgggaacttggtgtaggagagcttttcagtccctgggtacaaatctctcctttctgcctgctccccacccccacctctgttcctgattttcccttgtacaattaatctctctgcttctctcatctgggaaatttttctctccactctcaggactgctgctcagatgtctgggacttgcattctactttttttgagccctgctgtgtgcttacccctgtacttggggttggatggaggggtgggacacagatctgtcctcaggaactctatggtcggtctagaagatgccttacccacaggagtgagcagaactgttagtgagcttacaggaagtagtaacactgccataggtgaggtctcagagaagggagagatgcttatggtctggggtggacagagcagactttctggaggagatggcatttgacctatccaaggaggaaaagtcttgggtaggcattcaaagggcacttcttgaaggggaaagagcaccgtgaatgtcagacagcaaaagagaaggctgaccctgggggcagntggctttcaacttgacattcccctcaccctagtatgggctggaatagttagtgaagaccatcttatgcaccngtggtttggggttttggtgttgggtgtgtgagcactgggggaggggcgtggagaggtactccctagttgcttccagctgactgactgctgcggccttatctctagtttgcagggccttgcgggagggccctggaaagtgccttctggcagtgaccccttccccttccccttcttgtttttggtcggatttgttgcctcttgttaaagagacaggctgctggaggcaatttggagttcagggctgaaaggccagctctgagctgacttgaaatttgtacctctgaggaccgctgatggggtataactgtgtgggagacctctgcccttagtgccctaggatggcacttgtccctttggagatagacatataagaaggagttgtgcaatttggtggctttgagtaagaaagctgaattcttcccctggccgcctctcagctgacacggtctcttggatcttgggggtctctcatcccttcctccatgtagggcaggagtcctcaaatggtggccctgacaagtagttattctacctcaactcacttgtcacatccttattatactgagccaagacctgcctctttgactccttaggtagcccaactctgccatctgtgccctggaccccaagcctaccctttctgttcctgaagagcctctcacatgggagaaggatgtcctggagtgtactattagcctataattggtgacaggccttaccgctggctccagtgatcctggcttacgtctgttcttctctcctcagggtcctgctgagctcaggagctgcacggaatggtggcagtcaccttgccagtgcagcaggcatggatcagactgcaagctaggggcacgaggcatcagttgggaagaggggacgcacagctaggcttgaggcctcttcatcgggatgtccccaggccccccagcccaggcccagcataaaggccgtgttggggggcccccctgacccaaggggggcttcatgcgccacgtgcaggcggagccgtctccatcctcagagccggaggctggcccttcacagcctccagtcaggcagggggccctccagggtggcctgctcatgggctacagcccagcagggggggcgacatcccccggggtctaccaggtatccatcttttcccctccggctggtacctctgagcctcatagggccctgaaacgacaagccccatccactgagggtccccgggagctgaagagaggccctgggctgggggccagagagggactaccccctgaagaaccatctactgtggggctcttaggcccagagggaccggggctgggactaggtgtggccagccagcatttctcccaccgtggcctctgtgttgtggaacagagaagtagtgtcacctcatcttggacttcaggggcctggagtcccccctgccccccatcaaatgcttcctgcaatactttgcacaccagagactgggcctccccagatccagggggacaggggtccctgggggagtccccagggccagcccctccaggccagctgcacacacttgacactgatttgcacagtcttgcacaaatagggggtaagagcccagtggctggggtgggcaatgggggtagcctctggcctagggagtcccctggcactgccaatgggcacagtcccgagcacacaccccctggccctggacccccaggcccctgccccaccaagcgaaggctgcttcctgctggagaagccccagatgtcagctctgaggaagaggggccagcccctcggaggcgccggggatccctgggccaccctactgctgccaacagttctgatgccaaagccacacccttctggagccacctgctgcctgggcccaaagagcctgttttggacccaacagactgcggtcccatggggcggaggctgaaaggagcccgtcgcctgaagctgagcccccttcgaagcctccggaaggggccaggcctgctgagcccccccagtgcctcccctgttcctacccctgctgtcagccgtaccctgctgggcaactttgaggaatcattgctgcgaggacgttttgcaccatctggccacattgagggcttcacagcagaaattggagctagtgggtcatactgcccccagcacgtcacgctgcctgtcactgtcacattctttgatgtttctgagcaaaatgccccggctcccttcctgggcatcgtggatctgaaccccttggggaggaagggttacagcgtgcccaaggtgggcaccgtccaagtgaccttatttaaccccaaccagactgtggtaaagatgttccttgtgacctttgacttctcggacatgcctgctgcccacatgaccttcctgcgccatcgcctctttttggtgcctgtgggtgaggagggaaatgctaaccccacccaccgcctcctctgctacttgctgcacctcaggttccggagctcccgctcaggccgcttaagcctgcatggagatatccgcctgcttttttcccgccggagcctggagctggacacagggctcccctacgaactgcaggctgtgaccgaggcccctcataatccacgttattcacctttgccctgattgccagcactctgaacccatgcgggctaatgacctgcccatcctgctccatcttagagaacatatatggagagacagcaagagacccttcaggcttgaattaaagccctcaccatgctcacgcccaaatggattatttgggtgtttaaagcttctgattcttactacaccctgccctacttcgggtactccatgtgcctgtcccctcccttgggtttcccaggccagcttaggtagtagggaggaactggagctaccctgagattttctcaagttcccaggcaagttatgccagcgttgcctccctgtcctgggcaggggccacttgttattttatttatttttaatttataatttattcaaattggattgccttggtaacctcccacacctgataattggcatcactcctccccgcttcccactctcagatattgctccaacctcaggagttgaagaggcttatgcggtgggggcaggaggagaactgctttccctcagctgagggaagaggggctattccagagggactgagtcagtagccaaagactcagcttcccctgtccttccccagtcccttcacttcccctaccctctgacctatctctgaaagccaagttatgcgtatgtgtgtgtgcacaagcttgtctttgtgtggtatgtgtgtgtgagtgtgcatgtatgcacacacacaggggttaaccacccctcacctagggctccagactccagttgtccctctcctcctacctgtgtctccttgttttggggtcctgactgaagaaggtgtccagggggcagagtcagggccaagcactggggtgcctcctctcacctggccagactctgacccacctacctcagctggggtgaggggcacccctcaaactcagtcatgtggttccaaactaccccattccccactccagactctgacccagcctcagtcctaactcctggggctgggctgaggggaacaagcatttgctgaaacttgaaaaaacaaagcaaatcaaaaacaggaaaaaattgtacctggtacttttttttagaaaaaaagattaaaaaagaaagaataaattcttgtttggaaacttgaactaagctctaaat

SEQ ID NO: 38445 - DNA, 3057 bp, Homo sapiens
cagactgaaggggcgaggtttgcaggcggaggctacagctagggctgctcagtaactgccccaaccactaccacgtccccaagtgcaacgggacccacggaactacagggtcctgctgagctcaggagctgcacggaatggtggcagtcaccttgccagtgcagcaggcatggatcagactgcaagctaggggcacgaggcatcagttgggaagaggggacgcacagctaggcttgaggcctcttcatcgggatgtccccaggccccccagcccaggcccagcataaaggccgtgttggggggcccccctgacccaaggggggcttcatgcgccacgtgcaggcggagccgtctccatcctcagagccggaggctggcccttcacagcctccagtcaggcagggggccctccagggtggcctgctcatgggctacagcccagcagggggggcgacatcccccggggtctaccaggtatccatcttttcccctccggctggtacctctgagcctcatagggccctgaaacgacaagccccatccactgagggtccccgggagctgaagagaggccctgggctgggggccagagagggactaccccctgaagaaccatctactgtggggctcttaggcccagagggaccggggctgggactaggtgtggccagccagcatttctcccaccgtggcctctgtgttgtggaacagagaagtagtgtcacctcatcttggacttcaggggcctggagtcccccctgccccccatcaaatgcttcctgcaatactttgcacaccagagactgggcctccccagatccagggggacaggggtccctgggggagtccccagggccagcccctccaggccagctgcacacacttgacactgatttgcacagtcttgcacaaatagggggtaagagcccagtggctggggtgggcaatgggggtagcctctggcctagggagtcccctggcactgccaatgggcacagtcccgagcacacaccccctggccctggacccccaggcccctgccccaccaagcgaaggctgcttcctgctggagaagccccagatgtcagctctgaggaagaggggccagcccctcggaggcgccggggatccctgggccaccctactgctgccaacagttctgatgccaaagccacacccttctggagccacctgctgcctgggcccaaagagcctgttttggacccaacagactgcggtcccatggggcggaggctgaaaggagcccgtcgcctgaagctgagcccccttcgaagcctccggaaggggccaggcctgctgagcccccccagtgcctcccctgttcctacccctgctgtcagccgtaccctgctgggcaactttgaggaatcattgctgcgaggacgttttgcaccatctggccacattgagggcttcacagcagaaattggagctagtgggtcatactgcccccagcacgtcacgctgcctgtcactgtcacattctttgatgtttctgagcaaaatgccccggctcccttcctgggcatcgtggatctgaaccccttggggaggaagggttacagcgtgcccaaggtgggcaccgtccaagtgaccttatttaaccccaaccagactgtggtaaagatgttccttgtgacctttgacttctcggacatgcctgctgcccacatgaccttcctgcgccatcgcctctttttggtgcctgtgggtgaggagggaaatgctaaccccacccaccgcctcctctgctacttgctgcacctcaggttccggagctcccgctcaggccgcttaagcctgcatggagatatccgcctgcttttttcccgccggagcctggagctggacacagggctcccctacgaactgcaggctgtgaccgaggcccctcataatccacgttattcacctttgccctgattgccagcactctgaacccatgcgggctaatgacctgcccatcctgctccatcttagagaacatatatggagagacagcaagagacccttcaggcttgaattaaagccctcaccatgctcacgcccaaatggattatttgggtgtttaaagcttctgattcttactacaccctgccctacttcgggtactccatgtgcctgtcccctcccttgggtttcccaggccagcttaggtagtagggaggaactggagctaccctgagattttctcaagttcccaggcaagttatgccagcgttgcctccctgtcctgggcaggggccacttgttattttatttatttttaatttataatttattcaaattggattgccttggtaacctcccacacctgataattggcatcactcctccccgcttcccactctcagatattgctccaacctcaggagttgaagaggcttatgcggtgggggcaggaggagaactgctttccctcagctgagggaagaggggctattccagagggactgagtcagtagccaaagactcagcttcccctgtccttccccagtcccttcacttcccctaccctctgacctatctctgaaagccaagttatgcgtatgtgtgtgtgcacaagcttgtctttgtgtggtatgtgtgtgtgagtgtgcatgtatgcacacacacaggggttaaccacccctcacctagggctccagactccagttgtccctctcctcctacctgtgtctccttgttttggggtcctgactgaagaaggtgtccagggggcagagtcagggccaagcactggggtgcctcctctcacctggccagactctgacccacctacctcagctggggtgaggggcacccctcaaactcagtcatgtggttccaaactaccccattccccactccagactctgacccagcctcagtcctaactcctggggctgggctgaggggaacaagcatttgctgaaacttgaaaaaacaaagcaaatcaaaaacaggaaaaaattgtacctggtacttttttttagaaaaaaagattaaaaaagaaagaataaattcttgtttggaaacttgaactaagctctaaat

SEQ ID NO: 38446 - DNA, 367 bp, Homo sapiens
tccttgaggacaagggaccctttttacccagagcaggctgcataaaatggattttaagcaatatttactgggtggaaccgaattaaattagtaggatgtgcagacccacctacctcagctggggtgaggggcacccctcaaactcagtcatgtggttccaaactaccccattccccactccagactctgacccagcctcagtcctaactcctggggctgggctgaggggaacaagcatttgctgaaacttgaaaaaacaaagcaaatcaaaaacaggaaaaaattgtacctggtacttttttttagaaaaaaagattaaaaaagaaagaataaattcttgtttggaaacttgaactaagctctaaat

SEQ ID NO: 38447 - DNA, 3255 bp, Homo sapiens
  misc_feature (25)..(25): n is a, c, g, or t
  misc_feature (33)..(33): n is a, c, g, or t
  misc_feature (44)..(44): n is a, c, g, or t
  misc_feature (72)..(72): n is a, c, g, or t
  misc_feature (75)..(75): n is a, c, g, or t
  misc_feature (90)..(90): n is a, c, g, or t
aatggcctgtgagtcagaggggcantggagtcngcggcgcgganccggggcggccccggggagggaccgtcncanggaggggcgcggcancggctggggggctgcgggcgccagggcccgctagtgttgcacacgaagctgaacagcgaagagcctagcagagcagggctcagcctgagccaccctttgtctgggttgggggcccgtggcagggaggaccggggaaccaaggggagggaccgggacgggacgggacggaagggcccggagcagcggccacctccgcggagccaatttgggagcgggggtcctgctgagctcaggagctgcacggaatggtggcagtcaccttgccagtgcagcaggcatggatcagactgcaagctaggggcacgaggcatcagttgggaagaggggacgcacagctaggcttgaggcctcttcatcgggatgtccccaggccccccagcccaggcccagcataaaggccgtgttggggggcccccctgacccaaggggggcttcatgcgccacgtgcaggcggagccgtctccatcctcagagccggaggctggcccttcacagcctccagtcaggcagggggccctccagggtggcctgctcatgggctacagcccagcagggggggcgacatcccccggggtctaccaggtatccatcttttcccctccggctggtacctctgagcctcatagggccctgaaacgacaagccccatccactgagggtccccgggagctgaagagaggccctgggctgggggccagagagggactaccccctgaagaaccatctactgtggggctcttaggcccagagggaccggggctgggactaggtgtggccagccagcatttctcccaccgtggcctctgtgttgtggaacagagaagtagtgtcacctcatcttggacttcaggggcctggagtcccccctgccccccatcaaatgcttcctgcaatactttgcacaccagagactgggcctccccagatccagggggacaggggtccctgggggagtccccagggccagcccctccaggccagctgcacacacttgacactgatttgcacagtcttgcacaaatagggggtaagagcccagtggctggggtgggcaatgggggtagcctctggcctagggagtcccctggcactgccaatgggcacagtcccgagcacacaccccctggccctggacccccaggcccctgccccaccaagcgaaggctgcttcctgctggagaagccccagatgtcagctctgaggaagaggggccagcccctcggaggcgccggggatccctgggccaccctactgctgccaacagttctgatgccaaagccacacccttctggagccacctgctgcctgggcccaaagagcctgttttggacccaacagactgcggtcccatggggcggaggctgaaaggagcccgtcgcctgaagctgagcccccttcgaagcctccggaaggggccaggcctgctgagcccccccagtgcctcccctgttcctacccctgctgtcagccgtaccctgctgggcaactttgaggaatcattgctgcgaggacgttttgcaccatctggccacattgagggcttcacagcagaaattggagctagtgggtcatactgcccccagcacgtcacgctgcctgtcactgtcacattctttgatgtttctgagcaaaatgccccggctcccttcctgggcatcgtggatctgaaccccttggggaggaagggttacagcgtgcccaaggtgggcaccgtccaagtgaccttatttaaccccaaccagactgtggtaaagatgttccttgtgacctttgacttctcggacatgcctgctgcccacatgaccttcctgcgccatcgcctctttttggtgcctgtgggtgaggagggaaatgctaaccccacccaccgcctcctctgctacttgctgcacctcaggttccggagctcccgctcaggccgcttaagcctgcatggagatatccgcctgcttttttcccgccggagcctggagctggacacagggctcccctacgaactgcaggctgtgaccgaggcccctcataatccacgttattcacctttgccctgattgccagcactctgaacccatgcgggctaatgacctgcccatcctgctccatcttagagaacatatatggagagacagcaagagacccttcaggcttgaattaaagccctcaccatgctcacgcccaaatggattatttgggtgtttaaagcttctgattcttactacaccctgccctacttcgggtactccatgtgcctgtcccctcccttgggtttcccaggccagcttaggtagtagggaggaactggagctaccctgagattttctcaagttcccaggcaagttatgccagcgttgcctccctgtcctgggcaggggccacttgttattttatttatttttaatttataatttattcaaattggattgccttggtaacctcccacacctgataattggcatcactcctccccgcttcccactctcagatattgctccaacctcaggagttgaagaggcttatgcggtgggggcaggaggagaactgctttccctcagctgagggaagaggggctattccagagggactgagtcagtagccaaagactcagcttcccctgtccttccccagtcccttcacttcccctaccctctgacctatctctgaaagccaagttatgcgtatgtgtgtgtgcacaagcttgtctttgtgtggtatgtgtgtgtgagtgtgcatgtatgcacacacacaggggttaaccacccctcacctagggctccagactccagttgtccctctcctcctacctgtgtctccttgttttggggtcctgactgaagaaggtgtccagggggcagagtcagggccaagcactggggtgcctcctctcacctggccagactctgacccacctacctcagctggggtgaggggcacccctcaaactcagtcatgtggttccaaactaccccattccccactccagactctgacccagcctcagtcctaactcctggggctgggctgaggggaacaagcatttgctgaaacttgaaaaaacaaagcaaatcaaaaacaggaaaaaattgtacctggtacttttttttagaaaaaaagattaaaaaagaaagaataaattcttgtttggaaacttgaactaagctctaaat

SEQ ID NO: 38448 - DNA, 2303 bp, Homo sapiens
cagactgaaggggcgaggtttgcaggcggaggctacagctagggctgctcagtaactgccccaaccactaccacgtccccaagtgcaacgggacccacggaactacaggtgtggggcagggtgagcgtggaagaagggacgcggatgggggtgcgctttgcagacgatctggagactgctgtgtgttgagggaagatacgaagtcgcgggagcagttggggactcaatgtgtgggcaacaagggtcctgctgagctcaggagctgcacggaatggtggcagtcaccttgccagtgcagcaggcatggatcagactgcaagctaggggcacgaggcatcagttgggaagaggggacgcacagctaggcttgaggcctcttcatcgggatgtccccaggccccccagcccaggcccagcataaaggccgtgttggggggcccccctgacccaaggggggcttcatgcgccacgtgcaggcggagccgtctccatcctcagagccggaggctggcccttcacagcctccagtcaggcagggggccctccagggtggcctgctcatgggctacagcccagcagggggggcgacatcccccggggtctaccaggtatccatcttttcccctccggctggtacctctgagcctcatagggccctgaaacgacaagccccatccactgagggtccccgggagctgaagagaggccctgggctgggggccagagagggactaccccctgaagaaccatctactgtggggctcttaggcccagagggaccggggctgggactaggtgtggccagccagcatttctcccaccgtggcctctgtgttgtggaacagagaagtagtgtcacctcatcttggacttcaggggcctggagtcccccctgccccccatcaaatgcttcctgcaatactttgcacaccagagactgggcctccccagatccagggggacaggggtccctgggggagtccccagggccagcccctccaggccagctgcacacacttgacactgatttgcacagtcttgcacaaatagggggtaagagcccagtggctggggtgggcaatgggggtagcctctggcctagggagtcccctggcactgccaatgggcacagtcccgagcacacaccccctggccctggacccccaggcccctgccccaccaagcgaaggctgcttcctgctggagaagccccagatgtcagctctgaggaagaggggccagcccctcggaggcgccggggatccctgggccaccctactgctgccaacagttctgatgccaaagccacacccttctggagccacctgctgcctgggcccaaagagcctgttttggacccaacagactgcggtcccatggggcggaggctgaaaggagcccgtcgcctgaagctgagcccccttcgaagcctccggaaggggccaggcctgctgagcccccccagtgcctcccctgttcctacccctgctgtcagccgtaccctgctgggcaactttgaggaatcattgctgcgaggacgttttgcaccatctggccacattgagggcttcacagcagaaattggagctagtgggtcatactgcccccagcacgtcacgctgcctgtcactgtcacattctttgatgtttctgagcaaaatgccccggctcccttcctgggcatcgtggatctgaaccccttggggaggaagggttacagcgtgcccaaggtgggcaccgtccaagtgccctgtccttccccagtcccttcacttcccctaccctctgacctatctctgaaagccaagttatgcgtatgtgtgtgtgcacaagcttgtctttgtgtggtatgtgtgtgtgagtgtgcatgtatgcacacacacaggggttaaccacccctcacctagggctccagactccagttgtccctctcctcctacctgtgtctccttgttttggggtcctgactgaagaaggtgtccagggggcagagtcagggccaagcactggggtgcctcctctcacctggccagactctgacccacctacctcagctggggtgaggggcacccctcaaactcagtcatgtggttccaaactaccccattccccactccagactctgacccagcctcagtcctaactcctggggctgggctgaggggaacaagcatttgctgaaacttgaaaaaacaaagcaaatcaaaaacaggaaaaaattgtacctggtacttttttttagaaaaaaagattaaaaaagaaagaataaattcttgtttggaaacttgaactaagctctaaat

SEQ ID NO: 38449 - DNA, 2675 bp, Homo sapiens
agaagattagcaggcggtcaccgttttatttcagtcacagggcgtggattaaggttacttatacgtggccgttggctctgacaattacaccaacactaccacgtccccaagtgcaacgggacccacggaactacaggtgtggggcagggtgagcgtggaagaagggacgcggatgggggtgcgctttgcagacgatctggagactgctgtgtgttgagggaagatacgaagtcgcgggagcagttggggactcaatgtgtgggcaacaagggtcctgctgagctcaggagctgcacggaatggtggcagtcaccttgccagtgcagcaggcatggatcagactgcaagctaggggcacgaggcatcagttgggaagaggggacgcacagctaggcttgaggcctcttcatcgggatgtccccaggccccccagcccaggcccagcataaaggccgtgttggggggcccccctgacccaaggggggcttcatgcgccacgtgcaggcggagccgtctccatcctcagagccggaggctggcccttcacagcctccagtcaggcagggggccctccagggtggcctgctcatgggctacagcccagcagggggggcgacatcccccggggtctaccaggccctggacccccaggcccctgccccaccaagcgaaggctgcttcctgctggagaagccccagatgtcagctctgaggaagaggggccagcccctcggaggcgccggggatccctgggccaccctactgctgccaacagttctgatgccaaagccacacccttctggagccacctgctgcctgggcccaaagagcctgttttggacccaacagactgcggtcccatggggcggaggctgaaaggagcccgtcgcctgaagctgagcccccttcgaagcctccggaaggggccaggcctgctgagcccccccagtgcctcccctgttcctacccctgctgtcagccgtaccctgctgggcaactttgaggaatcattgctgcgaggacgttttgcaccatctggccacattgagggcttcacagcagaaattggagctagtgggtcatactgcccccagcacgtcacgctgcctgtcactgtcacattctttgatgtttctgagcaaaatgccccggctcccttcctgggcatcgtggatctgaaccccttggggaggaagggttacagcgtgcccaaggtgggcaccgtccaagtgaccttatttaaccccaaccagactgtggtaaagatgttccttgtgacctttgacttctcggacatgcctgctgcccacatgaccttcctgcgccatcgcctctttttggtgcctgtgggtgaggagggaaatgctaaccccacccaccgcctcctctgctacttgctgcacctcaggttccggagctcccgctcaggccgcttaagcctgcatggagatatccgcctgcttttttcccgccggagcctggagctggacacagggctcccctacgaactgcaggctgtgaccgaggcccctcataatccacgttattcacctttgccctgattgccagcactctgaacccatgcgggctaatgacctgcccatcctgctccatcttagagaacatatatggagagacagcaagagacccttcaggcttgaattaaagccctcaccatgctcacgcccaaatggattatttgggtgtttaaagcttctgattcttactacaccctgccctacttcgggtactccatgtgcctgtcccctcccttgggtttcccaggccagcttaggtagtagggaggaactggagctaccctgagattttctcaagttcccaggcaagttatgccagcgttgcctccctgtcctgggcaggggccacttgttattttatttatttttaatttataatttattcaaattggattgccttggtaacctcccacacctgataattggcatcactcctccccgcttcccactctcagatattgctccaacctcaggagttgaagaggcttatgcggtgggggcaggaggagaactgctttccctcagctgagggaagaggggctattccagagggactgagtcagtagccaaagactcagcttcccctgtccttccccagtcccttcacttcccctaccctctgacctatctctgaaagccaagttatgcgtatgtgtgtgtgcacaagcttgtctttgtgtggtatgtgtgtgtgagtgtgcatgtatgcacacacacaggggttaaccacccctcacctagggctccagactccagttgtccctctcctcctacctgtgtctccttgttttggggtcctgactgaagaaggtgtccagggggcagagtcagggccaagcactggggtgcctcctctcacctggccagactctgacccacctacctcagctggggtgaggggcacccctcaaactcagtcatgtggttccaaactaccccattccccactccagactctgacccagcctcagtcctaactcctggggctgggctgaggggaacaagcatttgctgaaacttgaaaaaacaaagcaaatcaaaaacaggaaaaaattgtacctggtacttttttttagaaaaaaagattaaaaaagaaagaataaattcttgtttggaaacttgaactaagctctaaat

SEQ ID NO: 38450 - DNA, 2993 bp, Homo sapiens
gagaaattaaacgaggaaagggacaagtccacagaaggtggaagggtcctgctgagctcaggagctgcacggaatggtggcagtcaccttgccagtgcagcaggcatggatcagactgcaagctaggggcacgaggcatcagttgggaagaggggacgcacagctaggcttgaggcctcttcatcgggatgtccccaggccccccagcccaggcccagcataaaggccgtgttggggggcccccctgacccaaggggggcttcatgcgccacgtgcaggcggagccgtctccatcctcagagccggaggctggcccttcacagcctccagtcaggcagggggccctccagggtggcctgctcatgggctacagcccagcagggggggcgacatcccccggggtctaccaggtatccatcttttcccctccggctggtacctctgagcctcatagggccctgaaacgacaagccccatccactgagggtccccgggagctgaagagaggccctgggctgggggccagagagggactaccccctgaagaaccatctactgtggggctcttaggcccagagggaccggggctgggactaggtgtggccagccagcatttctcccaccgtggcctctgtgttgtggaacagagaagtagtgtcacctcatcttggacttcaggggcctggagtcccccctgccccccatcaaatgcttcctgcaatactttgcacaccagagactgggcctccccagatccagggggacaggggtccctgggggagtccccagggccagcccctccaggccagctgcacacacttgacactgatttgcacagtcttgcacaaatagggggtaagagcccagtggctggggtgggcaatgggggtagcctctggcctagggagtcccctggcactgccaatgggcacagtcccgagcacacaccccctggccctggacccccaggcccctgccccaccaagcgaaggctgcttcctgctggagaagccccagatgtcagctctgaggaagaggggccagcccctcggaggcgccggggatccctgggccaccctactgctgccaacagttctgatgccaaagccacacccttctggagccacctgctgcctgggcccaaagagcctgttttggacccaacagactgcggtcccatggggcggaggctgaaaggagcccgtcgcctgaagctgagcccccttcgaagcctccggaaggggccaggcctgctgagcccccccagtgcctcccctgttcctacccctgctgtcagccgtaccctgctgggcaactttgaggaatcattgctgcgaggacgttttgcaccatctggccacattgagggcttcacagcagaaattggagctagtgggtcatactgcccccagcacgtcacgctgcctgtcactgtcacattctttgatgtttctgagcaaaatgccccggctcccttcctgggcatcgtggatctgaaccccttggggaggaagggttacagcgtgcccaaggtgggcaccgtccaagtgaccttatttaaccccaaccagactgtggtaaagatgttccttgtgacctttgacttctcggacatgcctgctgcccacatgaccttcctgcgccatcgcctctttttggtgcctgtgggtgaggagggaaatgctaaccccacccaccgcctcctctgctacttgctgcacctcaggttccggagctcccgctcaggccgcttaagcctgcatggagatatccgcctgcttttttcccgccggagcctggagctggacacagggctcccctacgaactgcaggctgtgaccgaggcccctcataatccacgttattcacctttgccctgattgccagcactctgaacccatgcgggctaatgacctgcccatcctgctccatcttagagaacatatatggagagacagcaagagacccttcaggcttgaattaaagccctcaccatgctcacgcccaaatggattatttgggtgtttaaagcttctgattcttactacaccctgccctacttcgggtactccatgtgcctgtcccctcccttgggtttcccaggccagcttaggtagtagggaggaactggagctaccctgagattttctcaagttcccaggcaagttatgccagcgttgcctccctgtcctgggcaggggccacttgttattttatttatttttaatttataatttattcaaattggattgccttggtaacctcccacacctgataattggcatcactcctccccgcttcccactctcagatattgctccaacctcaggagttgaagaggcttatgcggtgggggcaggaggagaactgctttccctcagctgagggaagaggggctattccagagggactgagtcagtagccaaagactcagcttcccctgtccttccccagtcccttcacttcccctaccctctgacctatctctgaaagccaagttatgcgtatgtgtgtgtgcacaagcttgtctttgtgtggtatgtgtgtgtgagtgtgcatgtatgcacacacacaggggttaaccacccctcacctagggctccagactccagttgtccctctcctcctacctgtgtctccttgttttggggtcctgactgaagaaggtgtccagggggcagagtcagggccaagcactggggtgcctcctctcacctggccagactctgacccacctacctcagctggggtgaggggcacccctcaaactcagtcatgtggttccaaactaccccattccccactccagactctgacccagcctcagtcctaactcctggggctgggctgaggggaacaagcatttgctgaaacttgaaaaaacaaagcaaatcaaaaacaggaaaaaattgtacctggtacttttttttagaaaaaaagattaaaaaagaaagaataaattcttgtttggaaacttgaactaagctctaaat

SEQ ID NO: 38451 - DNA, 3085 bp, Homo sapiens
agaagattagcaggcggtcaccgttttatttcagtcacagggcgtggattaaggttacttatacgtggccgttggctctgacaattacaccaacactaccacgtccccaagtgcaacgggacccacggaactacagggtcctgctgagctcaggagctgcacggaatggtggcagtcaccttgccagtgcagcaggcatggatcagactgcaagctaggggcacgaggcatcagttgggaagaggggacgcacagctaggcttgaggcctcttcatcgggatgtccccaggccccccagcccaggcccagcataaaggccgtgttggggggcccccctgacccaaggggggcttcatgcgccacgtgcaggcggagccgtctccatcctcagagccggaggctggcccttcacagcctccagtcaggcagggggccctccagggtggcctgctcatgggctacagcccagcagggggggcgacatcccccggggtctaccaggtatccatcttttcccctccggctggtacctctgagcctcatagggccctgaaacgacaagccccatccactgagggtccccgggagctgaagagaggccctgggctgggggccagagagggactaccccctgaagaaccatctactgtggggctcttaggcccagagggaccggggctgggactaggtgtggccagccagcatttctcccaccgtggcctctgtgttgtggaacagagaagtagtgtcacctcatcttggacttcaggggcctggagtcccccctgccccccatcaaatgcttcctgcaatactttgcacaccagagactgggcctccccagatccagggggacaggggtccctgggggagtccccagggccagcccctccaggccagctgcacacacttgacactgatttgcacagtcttgcacaaatagggggtaagagcccagtggctggggtgggcaatgggggtagcctctggcctagggagtcccctggcactgccaatgggcacagtcccgagcacacaccccctggccctggacccccaggcccctgccccaccaagcgaaggctgcttcctgctggagaagccccagatgtcagctctgaggaagaggggccagcccctcggaggcgccggggatccctgggccaccctactgctgccaacagttctgatgccaaagccacacccttctggagccacctgctgcctgggcccaaagagcctgttttggacccaacagactgcggtcccatggggcggaggctgaaaggagcccgtcgcctgaagctgagcccccttcgaagcctccggaaggggccaggcctgctgagcccccccagtgcctcccctgttcctacccctgctgtcagccgtaccctgctgggcaactttgaggaatcattgctgcgaggacgttttgcaccatctggccacattgagggcttcacagcagaaattggagctagtgggtcatactgcccccagcacgtcacgctgcctgtcactgtcacattctttgatgtttctgagcaaaatgccccggctcccttcctgggcatcgtggatctgaaccccttggggaggaagggttacagcgtgcccaaggtgggcaccgtccaagtgaccttatttaaccccaaccagactgtggtaaagatgttccttgtgacctttgacttctcggacatgcctgctgcccacatgaccttcctgcgccatcgcctctttttggtgcctgtgggtgaggagggaaatgctaaccccacccaccgcctcctctgctacttgctgcacctcaggttccggagctcccgctcaggccgcttaagcctgcatggagatatccgcctgcttttttcccgccggagcctggagctggacacagggctcccctacgaactgcaggctgtgaccgaggcccctcataatccacgttattcacctttgccctgattgccagcactctgaacccatgcgggctaatgacctgcccatcctgctccatcttagagaacatatatggagagacagcaagagacccttcaggcttgaattaaagccctcaccatgctcacgcccaaatggattatttgggtgtttaaagcttctgattcttactacaccctgccctacttcgggtactccatgtgcctgtcccctcccttgggtttcccaggccagcttaggtagtagggaggaactggagctaccctgagattttctcaagttcccaggcaagttatgccagcgttgcctccctgtcctgggcaggggccacttgttattttatttatttttaatttataatttattcaaattggattgccttggtaacctcccacacctgataattggcatcactcctccccgcttcccactctcagatattgctccaacctcaggagttgaagaggcttatgcggtgggggcaggaggagaactgctttccctcagctgagggaagaggggctattccagagggactgagtcagtagccaaagactcagcttcccctgtccttccccagtcccttcacttcccctaccctctgacctatctctgaaagccaagttatgcgtatgtgtgtgtgcacaagcttgtctttgtgtggtatgtgtgtgtgagtgtgcatgtatgcacacacacaggggttaaccacccctcacctagggctccagactccagttgtccctctcctcctacctgtgtctccttgttttggggtcctgactgaagaaggtgtccagggggcagagtcagggccaagcactggggtgcctcctctcacctggccagactctgacccacctacctcagctggggtgaggggcacccctcaaactcagtcatgtggttccaaactaccccattccccactccagactctgacccagcctcagtcctaactcctggggctgggctgaggggaacaagcatttgctgaaacttgaaaaaacaaagcaaatcaaaaacaggaaaaaattgtacctggtacttttttttagaaaaaaagattaaaaaagaaagaataaattcttgtttggaaacttgaactaagctctaaat

SEQ ID NO: 38452 - DNA, 1505 bp, Homo sapiens
gggagtggggagagaggaaagcagccctcaggccctaccaaccttgactgtcctgtccctagaccttatttaaccccaaccagactgtggtaaagatgttccttgtgacctttgacttctcggacatgcctgctgcccacatgaccttcctgcgccatcgcctctttttggtgcctgtgggtgaggagggaaatgctaaccccacccaccgcctcctctgctacttgctgcacctcaggttccggagctcccgctcaggccgcttaagcctgcatggagatatccgcctgcttttttcccgccggagcctggagctggacacagggctcccctacgaactgcaggctgtgaccgaggcccctcataatccacgttattcacctttgccctgattgccagcactctgaacccatgcgggctaatgacctgcccatcctgctccatcttagagaacatatatggagagacagcaagagacccttcaggcttgaattaaagccctcaccatgctcacgcccaaatggattatttgggtgtttaaagcttctgattcttactacaccctgccctacttcgggtactccatgtgcctgtcccctcccttgggtttcccaggccagcttaggtagtagggaggaactggagctaccctgagattttctcaagttcccaggcaagttatgccagcgttgcctccctgtcctgggcaggggccacttgttattttatttatttttaatttataatttattcaaattggattgccttggtaacctcccacacctgataattggcatcactcctccccgcttcccactctcagatattgctccaacctcaggagttgaagaggcttatgcggtgggggcaggaggagaactgctttccctcagctgagggaagaggggctattccagagggactgagtcagtagccaaagactcagcttcccctgtccttccccagtcccttcacttcccctaccctctgacctatctctgaaagccaagttatgcgtatgtgtgtgtgcacaagcttgtctttgtgtggtatgtgtgtgtgagtgtgcatgtatgcacacacacaggggttaaccacccctcacctagggctccagactccagttgtccctctcctcctacctgtgtctccttgttttggggtcctgactgaagaaggtgtccagggggcagagtcagggccaagcactggggtgcctcctctcacctggccagactctgacccacctacctcagctggggtgaggggcacccctcaaactcagtcatgtggttccaaactaccccattccccactccagactctgacccagcctcagtcctaactcctggggctgggctgaggggaacaagcatttgctgaaacttgaaaaaacaaagcaaatcaaaaacaggaaaaaattgtacctggtacttttttttagaaaaaaagattaaaaaagaaagaataaattcttgtttggaaacttgaactaagctctaaat

SEQ ID NO: 38453 - DNA, 1839 bp, Homo sapiens
agaagattagcaggcggtcaccgttttatttcagtcacagggcgtggattaaggttacttatacgtggccgttggctctgacaattacaccaacactaccacgtccccaagtgcaacgggacccacggaactacaggtgtggggcagggtgagcgtggaagaagggacgcggatgggggtgcgctttgcagacgatctggagactgctgtgtgttgagggaagatacgaagtcgcgggagcagttggggactcaatgtgtgggcaacaagggtcctgctgagctcaggagctgcacggaatggtggcagtcaccttgccagtgcagcaggcatggatcagactgcaagctaggggcacgaggcatcagttgggaagaggggacatcccccggggtctaccaggtatccatcttttcccctccggctggtacctctgagcctcatagggccctgaaacgacaagccccatccactgagggtccccgggagctgaagagaggccctgggctgggggccagagagggactaccccctgaagaaccatctactgtggggctcttaggcccagagggaccggggctgggactaggtgtggccagccagcatttctcccaccgtggcctctgtgttgtggaacagagaagtagtgtcacctcatcttggacttcaggggcctggagtcccccctgccccccatcaaatgcttcctgcaatactttgccctgattgccagcactctgaacccatgcgggctaatgacctgcccatcctgctccatcttagagaacatatatggagagacagcaagagacccttcaggcttgaattaaagccctcaccatgctcacgcccaaatggattatttgggtgtttaaagcttctgattcttactacaccctgccctacttcgggtactccatgtgcctgtcccctcccttgggtttcccaggccagcttaggtagtagggaggaactggagctaccctgagattttctcaagttcccaggcaagttatgccagcgttgcctccctgtcctgggcaggggccacttgttattttatttatttttaatttataatttattcaaattggattgccttggtaacctcccacacctgataattggcatcactcctccccgcttcccactctcagatattgctccaacctcaggagttgaagaggcttatgcggtgggggcaggaggagaactgctttccctcagctgagggaagaggggctattccagagggactgagtcagtagccaaagactcagcttcccctgtccttccccagtcccttcacttcccctaccctctgacctatctctgaaagccaagttatgcgtatgtgtgtgtgcacaagcttgtctttgtgtggtatgtgtgtgtgagtgtgcatgtatgcacacacacaggggttaaccacccctcacctagggctccagactccagttgtccctctcctcctacctgtgtctccttgttttggggtcctgactgaagaaggtgtccagggggcagagtcagggccaagcactggggtgcctcctctcacctggccagactctgacccacctacctcagctggggtgaggggcacccctcaaactcagtcatgtggttccaaactaccccattccccactccagactctgacccagcctcagtcctaactcctggggctgggctgaggggaacaagcatttgctgaaacttgaaaaaacaaagcaaatcaaaaacaggaaaaaattgtacctggtacttttttttagaaaaaaagattaaaaaagaaagaataaattcttgtttggaaacttgaactaagctctaaat

SEQ ID NO: 38454 - DNA, 2667 bp, Homo sapiens
cagactgaaggggcgaggtttgcaggcggaggctacagctagggctgctcagtaactgccccaaccactaccacgtccccaagtgcaacgggacccacggaactacaggtgtggggcagggtgagcgtggaagaagggacgcggatgggggtgcgctttgcagacgatctggagactgctgtgtgttgagggaagatacgaagtcgcgggagcagttggggactcaatgtgtgggcaacaagggtcctgctgagctcaggagctgcacggaatggtggcagtcaccttgccagtgcagcaggcatggatcagactgcaagctaggggcacgaggcatcagttgggaagaggggacgcacagctaggcttgaggcctcttcatcgggatgtccccaggccccccagcccaggcccagcataaaggccgtgttggggggcccccctgacccaaggggggcttcatgcgccacgtgcaggcggagccgtctccatcctcagagccggaggctggcccttcacagcctccagtcaggcagggggccctccagggtggcctgctcatgggctacagcccagcagggggggcgacatcccccggggtctaccaggtatccatcttttcccctccggctggtacctctgagcctcatagggccctgaaacgacaagccccatccactgagggtccccgggagctgaagagaggccctgggctgggggccagagagggactaccccctgaagaaccatctactgtggggctcttaggcccagagggaccggggctgggactaggtgtggccagccagcatttctcccaccgtggcctctgtgttgtggaacagagaagtagtgtcacctcatcttggacttcaggggcctggagtcccccctgccccccatcaaatgcttcctgcaatactttgcacaccagagactgggcctccccagatccagggggacaggggtccctgggggagtccccagggccagcccctccaggccagctgcacacacttgacactgatttgcacagtcttgcacaaatagggggtaagagcccagtggctggggtgggcaatgggggtagcctctggcctagggagtcccctggcactgccaatgggcacagtcccgagcacacaccccctggccctggacccccaggcccctgccccaccaagcgaaggctgcttcctgctggagaagccccagatgtcagctctgaggaagaggggccagcccctcggaggcgccggggatccctgggccaccctactgctgccaacagttctgatgccaaagccacacccttctggagccacctgctgcctgggcccaaagagcctgttttggacccaacagactgcggtcccatggggcggaggctgaaaggagcccgtcgcctgaagctgagcccccttcgaagcctccggaaggggccaggcctgctgagcccccccagtgcctcccctgttcctacccctgctgtcagccgtaccctgctgggcaactttgaggaatcattgctgcgaggacgttttgcaccatctggccacattgagggcttcacagcagaaattggagctagtgggtcatactgcccccagcacgtcacgctgcctgtcactgtcacattctttgatgtttctgagcaaaatgccccggctcccttcctgggcatcgtggatctgaaccccttggggaggaagggttacagcgtgcccaaggtgggcaccgtccaagtgaccttatttaaccccaaccagactgtggtaaagatgttccttgtgacctttgacttctcggacatgcctgctgcccacatgaccttcctgcgccatcgcctctttttggtgcctgtgggtgaggagggaaatgctaaccccacccaccgcctcctctgctacttgctgcacctcaggttccggagctcccgctcaggccgcttaagcctgcatggagatatccgcctgcttttttcccgccggagcctggagctggacacagggctcccctacgaactgcaggctgtgaccgaggcccctcataatccacgttattcacctttgccctgattgccagcactctgaacccatgcgggctaatgacctgcccatcctgctccatcttagagaacatatatggagagacagcaagagacccttcaggcttgaattaaagccctcaccatgctcacgcccaaatggattatttgggtgtttaaagcttctgattcttactacaccctgccctacttcgggtactccatgtgcctgtcccctcccttgggtttcccaggccagcttaggtagtagggaggaactggagctaccctgagattttctcaagttcccaggcaagttatgccagcgttgcctcctctcacctggccagactctgacccacctacctcagctggggtgaggggcacccctcaaactcagtcatgtggttccaaactaccccattccccactccagactctgacccagcctcagtcctaactcctggggctgggctgaggggaacaagcatttgctgaaacttgaaaaaacaaagcaaatcaaaaacaggaaaaaattgtacctggtacttttttttagaaaaaaagattaaaaaagaaagaataaattcttgtttggaaacttgaactaagctctaaat

SEQ ID NO: 38455 - DNA, 2537 bp, Homo sapiens
cagactgaaggggcgaggtttgcaggcggaggctacagctagggctgctcagtaactgccccaaccactaccacgtccccaagtgcaacgggacccacggaactacaggtgtggggcagggtgagcgtggaagaagggacgcggatgggggtgcgctttgcagacgatctggagactgctgtgtgttgagggaagatacgaagtcgcgggagcagttggggactcaatgtgtgggcaacaagggtcctgctgagctcaggagctgcacggaatggtggcagtcaccttgccagtgcagcaggcatggatcagactgcaagctaggggcacgaggcatcagttgggaagaggggacgcacagctaggcttgaggcctcttcatcgggatgtccccaggccccccagcccaggcccagcataaaggccgtgttggggggcccccctgacccaaggggggcttcatgcgccacgtgcaggcggagccgtctccatcctcagagccggaggctggcccttcacagcctccagtcaggcagggggccctccagggtggcctgctcatgggctacagcccagcagggggggcgacatcccccggggtctaccaggtatccatcttttcccctccggctggtacctctgagcctcatagggccctgaaacgacaagccccatccactgagggtccccgggagctgaagagaggccctgggctgggggccagagagggactaccccctgaagaaccatctactgtggggctcttaggcccagagggaccggggctgggactaggtgtggccagccagcatttctcccaccgtggcctctgtgttgtggaacagagaagtagtgtcacctcatcttggacttcaggggcctggagtcccccctgccccccatcaaatgcttcctgcaatactttgcacaccagagactgggcctccccagatccagggggacaggggtccctgggggagtccccagggccagcccctccaggccagctgcacacacttgacactgatttgcacagtcttgcacaaatagggggtaagagcccagtggctggggtgggcaatgggggtagcctctggcctagggagtcccctggcactgccaatgggcacagtcccgagcacacaccccctggccctggacccccaggcccctgccccaccaagcgaaggctgcttcctgctggagaagccccagatgtcagctctgaggaagaggggccagcccctcggaggcgccggggatccctgggccaccctactgctgccaacagttctgatgccaaagccacacccttctggagccacctgctgcctgggcccaaagagcctgttttggacccaacagactgcggtcccatggggcggaggctgaaaggagcccgtcgcctgaagctgagcccccttcgaagcctccggaaggggccaggcctgctgagcccccccagtgcctcccctgttcctacccctgctgtcagccgtaccctgctgggcaactttgaggaatcattgctgcgaggacgttttgcaccatctggccacattgagggcttcacagcagaaattggagctagtgggtcatactgcccccagcacgtcacgctgcctgtcactgtcacattctttgatgtttctgagcaaaatgccccggctcccttcctgggcatcgtggatctgaaccccttggggaggaagggttacagcgtgcccaaggtgggcaccgtccaagtgaccttatttaaccccaaccagactgtggtaaagatgttccttgtgacctttgacttctcggacatgcctgctgcccacatgaccttcctgcgccatcgcctctttttggtgcctgtgggtgaggagggaaatgctaaccccacccaccgcctcctctgctacttgctgcacctcaggttccggagctcccgctcaggccgcttaagcctgcatggagatatccgcctgcttttttcccgccggagcctggagctggacacagggctcccctacgaactgcaggctgtgaccgaggcccctcataatccacgttattcacctttgccctgattgccagcactctgaacccatgcgggctaatgacctgcccatcctgctccatcttagagaacatatatggagagacagcaagagacccttcaggcttgaattaaagccctcaccatgctcacgcccaaatggattatttgggtgtttaaagcttctgattcttactacaccctgccctacttcgggtactccatgtgcctgtcccctcccttgggtttcccaggccagcttaggtagtagggaggaactggagctaccctgagattttctcaagttcccaggcaagttatgccagcgttgcctccctgtcctgggcaggggccacttgttattttatttatttttaatttataatttattcaaattggattgccttggtaacctacccctccccctagcattacttatatgatatgtttccatacccattacaatttccagcattccccctcaaaccta

SEQ ID NO: 38456 - DNA, 2366 bp, Homo sapiens
  misc_feature (2342)..(2342): n is a, c, g, or t
  misc_feature (2350)..(2350): n is a, c, g, or t
cagactgaaggggcgaggtttgcaggcggaggctacagctagggctgctcagtaactgccccaaccactaccacgtccccaagtgcaacgggacccacggaactacaggtgtggggcagggtgagcgtggaagaagggacgcggatgggggtgcgctttgcagacgatctggagactgctgtgtgttgagggaagatacgaagtcgcgggagcagttggggactcaatgtgtgggcaacaagggtcctgctgagctcaggagctgcacggaatggtggcagtcaccttgccagtgcagcaggcatggatcagactgcaagctaggggcacgaggcatcagttgggaagaggggacgcacagctaggcttgaggcctcttcatcgggatgtccccaggccccccagcccaggcccagcataaaggccgtgttggggggcccccctgacccaaggggggcttcatgcgccacgtgcaggcggagccgtctccatcctcagagccggaggctggcccttcacagcctccagtcaggcagggggccctccagggtggcctgctcatgggctacagcccagcagggggggcgacatcccccggggtctaccaggtatccatcttttcccctccggctggtacctctgagcctcatagggccctgaaacgacaagccccatccactgagggtccccgggagctgaagagaggccctgggctgggggccagagagggactaccccctgaagaaccatctactgtggggctcttaggcccagagggaccggggctgggactaggtgtggccagccagcatttctcccaccgtggcctctgtgttgtggaacagagaagtagtgtcacctcatcttggacttcaggggcctggagtcccccctgccccccatcaaatgcttcctgcaatactttgcacaccagagactgggcctccccagatccagggggacaggggtccctgggggagtccccagggccagcccctccaggccagctgcacacacttgacactgatttgcacagtcttgcacaaatagggggtaagagcccagtggctggggtgggcaatgggggtagcctctggcctagggagtcccctggcactgccaatgggcacagtcccgagcacacaccccctggccctggacccccaggcccctgccccaccaagcgaaggctgcttcctgctggagaagccccagatgtcagctctgaggaagaggggccagcccctcggaggcgccggggatccctgggccaccctactgctgccaacagttctgatgccaaagccacacccttctggagccacctgctgcctgggcccaaagagcctgttttggacccaacagactgcggtcccatggggcggaggctgaaaggagcccgtcgcctgaagctgagcccccttcgaagcctccggaaggggccaggcctgctgagcccccccagtgcctcccctgttcctacccctgctgtcagccgtaccctgctgggcaactttgaggaatcattgctgcgaggacgttttgcaccatctggccacattgagggcttcacagcagaaattggagctagtgggtcatactgcccccagcacgtcacgctgcctgtcactgtcacattctttgatgtttctgagcaaaatgccccggctcccttcctgggcatcgtggatctgaaccccttggggaggaagggttacagcgtgcccaaggtgggcaccgtccaagtgaccttatttaaccccaaccagactgtggtaaagatgttccttgtgacctttgacttctcggacatgcctgctgcccacatgaccttcctgcgccatcgcctctttttggtgcctgtgggtgaggagggaaatgctaaccccacccaccgcctcctctgctacttgctgcacctcaggttccggagctcccgctcaggccgcttaagcctgcatggagatatccgcctgcttttttcccgccggagcctggagctggacacagggctcccctacgaactgcaggctgtgaccgaggcccctcataatccacgttattcacctttgccctgattgccagcactctgaacccatgcgggctaatgacctgcccatcctgctccatcttagagaacatatatggagagacagcaagagacccttcaggcttgaattaaagccctcaccatgctcacgcccaaatggattatttgggtgtttaaagcttctgattcttactacaccctgccctacttcgggtactccagttcctccctactacctaagctggcctgggaaacccaagggaggggacaggcacatggagtacccgtcgancggccgcnaatttagtagtagtag

SEQ ID NO: 38457 - DNA, 417 bp, Homo sapiens
ctgtagggcaggggcaggttcagggtgagagcttgtggagagggacatgtgtttagggcccagggttttcctagtccccaccttgactgatggctccctggccttccagggcatcgtggatctgaaccccttggggaggaagggttacagcgtgcccaaggtgggcaccgtccaagtggtgagtttgccctgagggagtgggagtggggagagaggaaagcagccctcaggccctaccaaccttgactgtcctgtccctagaccttatttaaccccaaccagactgtggtaaagatgttccttgtgacctttgacttctcggacatgcctgctgcccacatgaccttcctgcgccatcgcctctttttggtgcctgtgggtgaggagggaaatgctaaccccacccaccgcctcctc

SEQ ID NO: 38458 - DNA, 449 bp, Homo sapiens
aggccaggccaggggtgactgtctctggtctttgtccctggttgctggcacatagcacccgaaacccttggaaaccgagtgatgagagagccttttgctcatgaggtgactgatgaccggggacaccaggtggcttcaggatggaagcagatggccagaaagaccaaggcctgatgacgggttgggatggaaaaggggtgaggggctggagattgagtgaatcaccagtggcttagtcaaccatgcctgcacaatggaaccccgtaagaacccacagggatcagagggcttcccgccgggttgtggaacacaccaaggcactggagggtggtgcgagcagagagcacagcatcactgcccccacctcacaccaggccctacgcatctcttccatacggctgtctgagttttatcctttgtaataaaccagcaactgtaagaaacgcact

SEQ ID NO: 38459 - DNA, 875 bp, Homo sapiens
agcggatattaataccaccgctaataatgacagtagcagtcgagggaggagcaagcatgctaatattagccacacctgttgagggcccggcacacgccaggcccttacatatgtgatgatgtcagtcctcgtgatgagctgcactcagcatctccacgttgactgcgagggaccgctggatcccagagccaggacagaactcaaggctattttggttgggaagaaaagaggtgttcagctgacctcaagtacgggagggttgagtgaaacgagcatcattgtgggaacctgggtgaatcaaagcagtgggttgcagacagagctgggactgcagtgtggagctccagggagccagaggcaccctgtgcatctgccacaagtccctgaagctgcagtcctggcatcatccccaggtacctccgtctccgctgcttctctgcttcttcctgttgcacgccgtctcctgcattcatttcttcctgtgtatctggcctggacctcagcccctgctccttatagacgtggctgctctgcggccctaactcctccctggcttccctccaggcctccttacaggccctctccctcggctgcctgcccagttcaccgtgcatagccctgttgctcccctcaatccctgccgattcccacaccaccgtttgcctctggattggttgcccactagtcaggtcccgcccttcatccaatcagctgtggtgggcgggacacttcctccagccgtcctcaagcctggcctcaggaccctgtcacattctgaaaagttgttgacgacccgaaagagctttggtttaggcaaaatattgttaaatatctctggatatttaccacattaaaaattaaaactgagaaattac

SEQ ID NO: 38460 - DNA, 799 bp, Homo sapiens
gagtattggaatcacgaggagcttttaaaaaaacatatattcctggattcctaaagttttgattcagtggtgtaaagccaggtatctgaaattttaagttctacaggaaattcagacataacacagttgaaaattattggtcttgtcaaggcttactggctttggcaatctttattaagtagtaaactcatttaaaaatacaagttctttggttgttataagcaaatgatgtagaattctatttagttccattttattaatatataacaaaaggccatttatcaggcactgtgattaaggacaatacaaattcaaatgtttgggtatttagtgggacttctggattctacccatgaaggattaactgctatagaaatagccatttcactgtttaaaactaggacataggtgaaacaactcaagacattgaacaacatgcagttgaacagagaaaagggaaacaaatgagttcagctctataattaccccctgcttactgcctagaggtagtttctgggttgcagtgcaggcagtgggagcccaaacaaagcctagtagtgtcactgagttctggagactgaaactggagttcagggaggcctagatggctaaaatttgcaggacagaatactagaaagaaaactgtacagggaaaaagttctggaaattgacagaagggttccttggaatttttggctaaattgtgatttgtgcatgtgaggggtgaacccacacaagtttggggttagttgggaaagatgggaagcatcactggaaaacaaaaggtaaaacaattctc

SEQ ID NO: 38461 - DNA, 292 bp, Homo sapiens
tttgggaattgtataaactctttttttttttaatcatttacaatggttcctgttgttgtaaattagagacatgtggcagactggttaggtacatggattctggaggctgactccttaggttcaaatctcagccctgctacttacttgctgtgtgatttggggtaagttattgaacctctctggccctcaagtttttcatgtgataagggtccaggatgtacttaaacatagggctgttgtgaggattaaatgaggccacaggtgtgatactcagagtacctggcagcagacc

SEQ ID NO: 38462 - DNA, 3717 bp, Homo sapiens
catctttcatatcttgatatgcagctgcatcagatggaaaaaaatttactaaagcaccctgttaaagagctggtgtgctccagtgaggccctctccttttctcagcacagtgtggcagtggtaatctattcaaattttgcctgttacacaaaataatccacttatatatacagtcagccttccgtacttgtgggttctgcatctgtggattccaccaactgtagatggaaaatactcaaaaagaaagttgtgtctgtactgaatatgtacagactttttccttgtcattattccctaaacaatacagcgtaacaactatttaaataggatttacattgttttaggtattataaattacctagagatgatttaaagtatatgggaggatgtgcataggttatatgcaatttctgcaccattttatgtcaaggattttgaacatcctcagattttggtgttcgagggcatcctggaatcaattccccatgataccgagggatgactggatattaatcgatttccctcaagcctgcccttgctgtgaactagtgctacaagcacgggaaatccatctgctctctggcttaaaatatgtatctcatctaaaattgttcgttaaagtgtgaataaattgctaagtggttgttgcttagcaataatttttgcctgaccatcagcagagcttttatttacctttgtaattaaaatccaacatagcatgggctcttgggcaaaatatttcactgactattaagcatgtagaacaggaaaatgaaatacactatttgtgcccttgacctagaaccagaaccactaattatgagaactttgttttatgtaccaaattcacattgaccattttctgagctctagactgatcgtagtaagttttgtgacttaacaatgaaagaaagtagaaagatgctttgggttttcaaaatgttgttttttaaaattgttctttgggtgaatttactcagtgctgctttgagttgtatacagaaacaaatgttgggaattgctcctcagaaatgtgttcctaagttgtgttttcaactttacatcatgaggtgaagcattagggaaagagattctttcgatttgtttaataatctaattatacagaccaaagtgctttacgtttctgctctatgttaatgttttagaatggtgattttgctgattaatttagacctggaattgaaataatgtgctcagaataataacatggttatagttcttgtatgataaagtattcaatttcagaatagtgttggaatcctgagtttgaataatgtgttgtatttagaaacatagccctatctgttttaaacaaataatttgttggccgattgtccatggttgagcatgacaaaaatacctcgtcgaaaggcaagcttaggtaactgctggcaaaacactgggtgcactatttttctggataaaatttatagttattttctatattacccttcaaaagggatctcttcaggttaaaaatcacgcttatgctgaagtctttatctggtgttaactaaaaatctcatatgggttcataaccgaggtcactaataattcatttttatcacttgtaaaaatttgctcaaaattccaaaaaaatattgatttgttttttagtgattttgcaggctgacccccaacctaagttttgataacatctggtaagtcagtatagttctgtgacttcatgttttaactaagaaggaaaattcatagatattcctattagattttataaaccttcaaaagtctgaaacttaattttgagtctaaattttctgacactggccccttttaatattgtaagtttttgttcactttcttaagtaaaaaaaacatttaattactagttagcccttaactgggaaactcaggtaatgaactgctgacttttctaaagttctttaactgatcaattctgtatagagggatatttatctaaccactttccgtattttacaagtgctctttctaaaaaggaataactattatagctctatttccccaatctctataggactcatgagagattgcttgtgtaaatataaaagcaccatatgtgttcttaactcctatggctgcttgaagctcatgatgaaaaagtctttttgtcagttttaattgttaagtacagaacaaacaattgtttggtgatggcctggttgaaagagagcatataaatatatcccagtggaactcaccaaagaagaccacacctcagaaattattgcattttctcattatgtgttgggtttgatttgcttttgtttttaatgcagctcttttaatataaagattcttgatacagtgaaatctcttatttcaagtgtaagttattcttcacccaccccttcccctgccattgtatttcccatctgtttcaaggagtttcaacaatttacattgcatcgtatgcagtaggtactgctttttcagaaagacctggaaaacatacctgctatgaatattttgttcagatgtagccatttacctggctctcaagttgtctttgtggagagggtcttagacaaaaatcttccttgtatttacttgggttaagtgaagtccaaattcttacagtatgctatttcaggatttctgatattaaaaaagaaaaaacaaaatctttatatctcttattaacacttcccccaagaagggttgtgctgttatttattttctattataagaaaagttcattctttaagtagtttcttttacctctaatctaatttcataccaaatacctgatcaatagaaatgatatatttaagcagcaaagattcctaatccatcattatgaaaagtgtcagcatacttagtagtgaacagataaagtcaatttgaatataattccactttgtttttagagactaaattaagattcaattaacattatcctatgaattctgaatgtgataatgtgattcaaacagtcaaattttattaagctcttagtaactcaggatagcattccatactaacctcaagttagcaaaacaaattagttaaacagcttggttcttagcagactgcttaaaagatcaagaaaattttctcatcttttctttctacttagaaacattgcaagaaaccttggacagtcttcaccagacctgccatgattttataagatttaggcctcagtgacatgctcctgaaagtttcctgccagccatccaaactaagcatccactcattccatcttcccaaagtcactcaccgataaaggtagcatccttaagttcatttttgaaaggtggaggaggatctccccctgcccaaaggaatttttttatcagaataccttgaaaggggggtatataaatttggaaaacttaatttcttggctgtgtttgataacagttcctatgcatggtttttaatgtgaggtaaatttgtttctttcttcagaatacctctctccaccccccaccttattcttcctctttaatgaatatttttattggagctcaaactccatgacttacgtgctcactaagttttcttttttccccttgtttactctgtctgtatgtatgtcaaaagctggcaaaacctctaaaactgtcaagaaaatgcttgaaagttgatttgtcatagtgcaaattcatgataaaatgtcttaatgttatttggatatgtagtacatagaaacagaaaaataaagtcatttttataactttaaaaaaaaaa

SEQ ID NO: 38463 - DNA, 408 bp, Homo sapiens
acattctgaggtcctgcagttcagtgttaacatgtgaattttggggatacacaactgaaccataacacaaactgtgaattcttagcaccttaagaataagttgtagaagagaacagagccactcctccagccattgctccaatggctctggttaagttgtagctcagtagagagcatgaatgctctcaaaaaagcactacagttgtcctcggtatccacagggggttgcttcctggatcccctcagacaccaaaatgcacagacattcaagtccctggtaaaaaatggtgtagcatttatgtataacatatgcacatcctcccgtgtactttacatcatctctacattacttgtaatacctaataaagtgtagatgctatggagatagttgatatactgtattgtttt

SEQ ID NO: 38464 - DNA, 407 bp, Homo sapiens
tccttaataatattcacataattacatctaatggcctattccccatcctcagatctatcgacagcatttaattcaatagatgctttcttttcctggaaacatttccttcatttggctttcaggacacttcactcaatggcatttcctccttcctttcttggtggttcttttcaacctatgggatttccttcattcccagacccttcaatatcttggagttctccaagactgttcacaacgtcactagttcccttattaatttcatctaatctcattgtttaattttttatgtcctgacaattctccaaattttattccccctttacttgagaatcatacccaactgccttcttaacttctccacttgaatcttgtatcagtctgcataatgtaaatatgctgcaata

SEQ ID NO: 38465 - DNA, 266 bp, Homo sapiens
tctatcaaaaatagctgccaagaatggccaattgagaatatccaagctcaagggaaaagaatactatgatgaattattggtgtcataagggagaaaataaaaaatggtgacagaagtaccaagtccttgtcatacatgagattcatcaaactattagcagtagttatttatagaattaggaatgatggcaagaaggcttttattttcaacattatacacttctacattgtttgcgttttttaaagacaagcaagtattactttcaa

SEQ ID NO: 38466 - DNA, 557 bp, Homo sapiens
gtgtaccaagaagagggtcactttttccccttcatcctgcacctatcactctccactgctcataccgctaagctctttcatcatccgacattgacttgtaatttaacagaggccatgtgctaagcaggacattgcagtattggctggccagtttgactcagctgtcttcccactgcaagtcaattgtttttgcctaaaattatttcagcaagctttgtgctgtaatctgtgtcacacttttggccagtttgttaatgtaagtgctccttggtagtaggagtaagatcaattcctgctttacctacctatggcccttggacaataccctctacccagtgggtttcaccaacagacactttgtggtgggcatattggcaaaaatgtttgactcccaaccactacttcccaaggttttgccatgcatagagctctccttatttgcacactggggctttctgtaactgcaatgtccatccatgtctaaggatgcagccaaataaagaagctgcttcccttttattttattttattttattatttttttgagacagagtttt

SEQ ID NO: 38467 - DNA, 1088 bp, Homo sapiens
tttaactgtggcttcatttactatcggcagatcttgaaatttcaacccgctttatcctaaaaggaagttgagtccaaaaccatggaaaacaccaaaacattcctggcccaaatccaccacacatctcacatacctaatatgacatatttggtacagttcttcagagctggaatatttctagtttttcatcctcctgtcttcatcaccagcccttctctccacttccaaactcggtctcttccataggctttgacttgaactagcccttgacagctactctgctttcttaccctgtactatcacgagactgtgaattttttggcaatcctctagaataaacaaacgataccaatatttatctggaatagcaacagattctgtccttaacaaatgtaacagtattatttgattacaacaaagcaaaacatcaataaaacaccaggcagagatagcgcacgtctaaaaccattatagcagtgatggttggctcattgatgaggtcagcatgaaaggccactttataagaccctatatgctgtttataaaacaaacttttatattttattttattttagacaaagtctcgctttttctctcccagactggagtgcagtggcacaatctcggctcactgcaacctccgcctcccgggttcaggcgattctcctgcctcagcctcccaagtagctggggattacaggtgtctgccaccatgccccggctaatttttgtatttttagtagagacagggtttcaccatattggccaggctggtcttgaactcctgacttcaggtgatccacccaccttggcctcccaaagtgctgagattacagatgtgagccaccgcgcctggcctaaaatgaacttttagtactttggataatagcactcaaaatagaagcatctttaaaaatcatcttaaaagtatatatctgataagaacactttaacaatgcaattttaagttaataatcttatttttgtttcctaaactaatattagttaaggacttttttcaataactgcaggaagataatttaaatatatctgtttaatattagtagtttcctagcaagaattgatct

SEQ ID NO: 38468 - DNA, 593 bp, Homo sapiens
acaaaacgaacaaacaaacaaataaaccaaaagattgggctacatgactaataggatatggacaagagtaaataaattgttgcttctgctctctttgcttagattgctcacttaaggggaaactaactaccacgttatgcagctctactgtaaaaatgcacagggtgagaaaccaaggcctccttctgacaggagccacttgccggtcatgtgagtaagccatcatggagataggtccgtgtttataactggtgtcatatgcctgtcccactgctgtattttgaaagcaggaaactcatttcttgagtgttgcaggttcgcagaggaagaattgtgcccctggatgaattatacctacagcctcactcatatccaatttagataatgtaggtaagagttggaaattttgaactgatgagatcttggactttgagttgaggctgtaatggattgagacttttgggaaccctgaagtgcggtgaatgtattttgtgtgtaggacatatatgaatcattggggggttagaagtgtgctatgatagatacccccacatacacacacaagaggtccactttttactccctgaagcttg

SEQ ID NO: 38469 - DNA, 507 bp, Homo sapiens
agtgaataaaaacaccatggaaaaattaatttggtaatacgaagcatgggctacatttcctgatttcattttgtgatttgatgttagtcagtaaacctgtgattatatgctacccacagtgaaggtgaattccatatatccaatgaagtttttcagaaaacatcttagcttcttacagaagaagaagcatgaaatggcttttcacctccacctgtatgctgtttctaagctcatgaagctaggatttgccatggggaacctagagagcaagaggattgctcacttaaggggaaactaactaccacgttatgcagctctactgtaaaaatgcacagggtgagaaaccaaggcctccttctgacaggagccacttgccggtcatgctcttcgaaagactgaaaaaattgacaggaccagagagagtccatctagaagaatgtcaaacaaaccactgaagtaacgtgttgacaaaataacagctctaataaattgcaatttgactataaa

SEQ ID NO: 38470 - DNA, 650 bp, Homo sapiens
tggtgtggtcagaactccaggtcactggaagttagtggaatcatgtagttgaattctttacttcaagacattgtattctctccagctatcaaaacattaatgatcttttatgtcttttttttgttattgttatactttaagttctggggtacatgtgcggaacatgtaggtttgttacataggtatacatgtgccatggtggtttgctgcactcatcaacctgtcatctacattcttttatgtctgtctttcaaagcaacactctgttcttctgagtagtgaaatcaggtcaactttaccaccagcctccatttttaatatgcttcaccatcatccagcacctacttaagatttatctagggctctgtggtgatgttaggacccataaaagaaatttatgccttccatatgtttggttacagatgggaaatgggaatgttgaaggacatgaaagaaaggatgtttacacattaagcatcagttctgaagctagattgtctgagtttgaatcttagctcttccctttattagctctgtgacctcgagctagttacttaaatgctctgatcctctatttcctgatcagtgaaacctccctattcaaatgtgtgagagtttaataaattaggacacttaaaaatgttggagca

SEQ ID NO: 38471 - DNA, 640 bp, Homo sapiens
cccactaccctgcactgagctgtctctgggccagcagctgctgcgggccaccactgatgaggacctgcagacagccatcctgctgctggcacatggctcccgtgaggaggtgaacgagacctgtggggagggagacggctgcacggcactccatctggcctgccgcaaggggaatgtggtcctggagcagctcctgatctggtacggggtggacgtcatggcccgagatgcccacgggaacacagcgctgacctacgcccggcaggcctccagccaggagtgcatcaacgtgcttctgcagtacggctgccccgacgagtgcgtgtagtatctgttttatttgactgcagtctccttggtgcaaaaacaaaatgggaaaaataaggataactcagaatttcaaaaggaaatcacaaattcagctagtaatagcattttcagtacttttcgtaaactaagtaaatacacaaaatgttgatttttctgaccataagacatattttatgtccttttgccaaggtggatgtgttagtctcaggccctcctggccacattgcccaagtcacacaggcttctgtattatgtatttagataaaatgtgtgaaaatatatttgaaaaaaatttcataaaaaaaaaaaa

SEQ ID NO: 38472 - DNA, 460 bp, Homo sapiens
gggggcatcaaatccacaccttaccttaaggtgttgttgactgcgagacttgtgctaggaactctgaagggagggacagataacctctgtcctcaaggagcccacaaggtagccaggagggcagagtgacaagcattggagagtttacacatcactgaagcagacaagaaactctgattgcaaactcagaggtgaagagaatgtaactcgttttatttttctttattgcaacttagtttcttttgtgagctcctgttcctctagggacaaaacttaatcttagttccaggccccccctttctctgaagctgcactttcattccagagagattgcgtaatgccatgatcacaggagggggatccgtcagggtaggcgggcaaggctgcaataacaaacagcttccatccctctttggttttaaagaacaaacgtcattttcctatgcacgctacatgtcca

SEQ ID NO: 38473 - DNA, 387 bp, Homo sapiens
taattttgtgcatgaaacaaagttttgactgcattttgactgcaacccatcacatgaagtcaggtgtagacttctctacttgtggcatcatgtcagtgctccaaaagtttgggattttggagcatttcgggttttggattttcggattagggataatcaatctgtgactctacataagtgcataccaatataaataaatgactaaatttaaaaaatgaaaagttaaatctttcttacagaagaatttcaaataatatatgtaactactccccccactaaaaaaaggtgaaacttgacacccctctacacataccctgagagtagactaggcttaacgactccaccccaagcaatagaatagggaaagggaaaaatagtaactttaca

SEQ ID NO: 38474 - DNA, 478 bp, Homo sapiens
gaaagaagaaacccattaagaggttaagagcaagggcaggcttgggcctaaaggggcacagccctaccagtcctgtgccttttccgctacaccacattcccctggacaaactccctccaccactcctacccccagcaccctcctcagtatcctgcccccagcttccacacggtgcatcattgcctataatcatgattgtcaagctcaaatgcacatcagcagccctcggagagtgtacaaaattcagactgctgggaccgccctcagggtttctgatccaagaggcctgggggcggggcctgagactctgcattcctagtaagttccctggtgatgctgacgctgctggcccagggccacactttgagaactgctgatttatagtaatttaaagtgttcacctaacagctggggaatggttaaatgcggttcatctacttgataaaatatgtgtaattatgaaagccacatataagaa

SEQ ID NO: 38475 - DNA, 992 bp, Homo sapiens
cattatatgttagcatcacctgaaattgggatggatgcagtacgatagtctaatctggaatgaatctgaagaatattggtgaaagaaaatcctctcagtggcagaatttcaagtggtacatttagttgtccactgtacctgctgtaaagaattggcaagaactatggatatatattgattcatggttatttgctgacacttggctggatggtctgggacacgaaaagaacagagttggaagattggtgacatgacagtctgggatagaggtacatgattagacagacttctccaaatgagcagtgagtaggaggtatctgtccctagtgaatgtcaccaaagagcatccttagcaaaagagggtctttataataaggtagaaaagatgataagataataaggtctataaatgtcagacagtatctttccccaggcatccctgtctttgcccagtgggcttttgcgcaacgtagtcatgtgggcagggatggaggatattcatggactcagaaacatggatttccattgaccaaaaccacagcaatgtgcctgagctaccaagagcagacaccagtaatgaacccctgatttagcaccattccagggagggcaagccaatcctggtagtaggttcattacattaaatcacgtcattcaaaggctaaactttgttctcattggaatcaactattactttggaaatgtactcacattccctgcctgcaatgtttctgccaaaaccaccacaatccatggatttatagaatgcctaaatcataatatcccaaagaatattgcttccaaccaaggaattcattttataacaaacgaggtatgatgatatacttatcctcatagaacttgctggttttactgtgttccccattacctgaaatagctgtcctcatgcaatggtagaataatattttcctgtatactaagttacctttcagaggaaataaaatattttacttgcatttaaaaaaaaaaaa

SEQ ID NO: 38476 - DNA, 890 bp, Homo sapiens
gaaagaaaagaaacagaaataaacttaggacacagcagacggcccatcctgagggtaccacatagcagatgctgggaccttttttcaggcccaagcccccaaagcccggtcattcccagcaccatcttcacgggtttctgcccaggtctttctgctgcatctcttcctcccccgattccttaatcattttttttaaaatcagttcatgtctttgtaaaccaaattatttctaaaaggcaaatttatattactgccggagagtgagaccaacacagagcagcagagacagagacagactggctcccgagcgttcagccccagtgccggaagccagctagagccctggccttttcagtgacatgagccaatgacaactcccagttctctccctccggtcaatctgaagccgggtttttgcctcttacaactgaaagagtcctggtggtcacaggcatggctgattaaagatgcccaccaggtctttgttacaccctcatatacttggggccttgaatgtgggtgtgctctgagatgacttgaccaggagaatacggtagcagtgacactgcagtttccagcccaggcctgaagagatgattagcgcccactccttgcttcttgaaagtctctccttgggagtcctgggctgctatgttaaaaatccaactgccctgaggccaccatgatgtgaggaggctggagccaggtggagaggccatggtggcgaaagagctgccggaccagttcccattgccccagcccccagccatctgagtcatccccactgaggacacagatatcacagagcagatacgagctatccctgcaccgcccatccagattctttacccagtttgtgagatataataataatgaactgttttaggcca

SEQ ID NO: 38477 - DNA, 1249 bp, Homo sapiens
gaaagaaaagaaacagaaataaacttaggacacagcagacggcccatcctgagggtaccacatagcagatgctgggaccttttttcaggtggacgccacatgacctttcctttgcaggcatccatgctgatgttcacaaggcacacagcatttcagctgaagaaagaactggcaggattttcatcacgaaagggcactgtctatcgtttatgaaaatgaagcatatgaagtaaaagtttggaaacagatggaattaaatcttctgacagattttaaaataagatctaaaaaagagcaagacatgctcttggatggggaaacttaatatcagaaaaatgtcaattttcccattttttccatataaatttaatgtaattcaaattccattaccaacagggtgattttttaaaaaactagataaaatgatctgaaagattatgcagcagaataaatgcccaagaattaccagggaagactggaaaaaagactgctgtgggggttttgccttcctggaaataagaccatactgcaaagtcactgtaatcagatcaatatggcattggcagaggactagacaatggaaaggaatggagaatacaaaaataagtttcaggatatatgagaatgagatatatgccaaaggtagtattttgattcggtgggagaagggcagactgtgaagtaagtggtaccagccacaactgaatatccatctgggataaaataaaattgcactcgtcttagagatccaaatcaacttcagatggattaaaactttgaatgtaaaaaacataaatgactaacagtcctgcaaaatatcttggagacaacctgtgccatctggagagtgggaagagcacatgcaaaggccaaggggtggagcagcccagcatgttctggaaaaggtagggctccccaaggctgggatgatggtggagacctgggtgtgtgggagcacaggggtgggggcccgtgggccaggaatgcacagagaggggctggtgctctgccgcaggcccaagcccccaaagcccggtcattcccagcaccatcttcacgggtttctgcccaggtctttctgctgcatctcttcctcccccgattccttaatcattttttttaaaatcagttcatgtctttgtaaaccaaattatttctaaaaggcaaatttatattactgccgaaatcaagggtcagtgagctagttgtgtatgttctgaatcacatggaaataaatgcatcgaacatt

SEQ ID NO: 38478 - DNA, 1817 bp, Homo sapiens
gaaagaaaagaaacagaaataaacttaggacacagcagacggcccatcctgagggtaccacatagcagatgctgggaccttttttcaggtggacgccacatgacctttcctttgcaggcatccatgctgatgttcacaaggcacacagcatttcagctgaagaaagaactggcaggattttcatcacgaaagggcactgtctatcgtttatgaaaatgaagcatatgaagtaaaagtttggaaacagatggaattaaatcttctgacagattttaaaataagatctaaaaaagagcaagacatgctcttggatggggaaacttaatatcagaaaaatgtcaattttcccattttttccatataaatttaatgtaattcaaattccattaccaacagggtgattttttaaaaaactagataaaatgatctgaaagattatgcagcagaataaatgcccaagaattaccagggaagactggaaaaaagactgctgtgggggttttgccttcctggaaataagaccatactgcaaagtcactgtaatcagatcaatatggcattggcagaggactagacaatggaaaggaatggagaatacaaaaataagtttcaggatatatgagaatgagatatatgccaaaggtagtattttgattcggtgggagaagggcagactgtgaagtaagtggtaccagccacaactgaatatccatctgggataaaataaaattgcactcgtcttagagatccaaatcaacttcagatggattaaaactttgaatgtaaaaaacataaatgactaacagtcctgcaaaatatcttggagacaacctgtgccatctggagagtgggaagagcacatgcaaaggccaaggggtggagcagcccagcatgttctggaaaaggtagggctccccaaggctgggatgatggtggagacctgggtgtgtgggagcacaggggtgggggcccgtgggccaggaatgcacagagaggggctggtgctctgccgcaggcccaagcccccaaagcccggtcattcccagcaccatcttcacgggtttctgcccaggtctttctgctgcatctcttcctcccccgattccttaatcattttttttaaaatcagttcatgtctttgtaaaccaaattatttctaaaaggcaaatttatattactgccggagagtgagaccaacacagagcagcagagacagagacagactggctcccgagcgttcagccccagtgccggaagccagctagagccctggccttttcagtgacatgagccaatgacaactcccagttctctccctccggtcaatctgaagccgggtttttgcctcttacaactgaaagagtcctggtggtcacaggcatggctgattaaagatgcccaccaggtctttgttacaccctcatatacttggggccttgaatgtgggtgtgctctgagatgacttgaccaggagaatacggtagcagtgacactgcagtttccagcccaggcctgaagagatgattagcgcccactccttgcttcttgaaagtctctccttgggagtcctgggctgctatgttaaaaatccaactgccctgaggccaccatgatgtgaggaggctggagccaggtggagaggccatggtggcgaaagagctgccggaccagttcccattgccccagcccccagccatctgagtcatccccactgaggacacagatatcacagagcagatacgagctatccctgcaccgcccatccagattctttacccagtttgtgagatataataataatgaactgttttaggcca

SEQ ID NO: 38479 - DNA, 999 bp, Homo sapiens
  misc_feature (932)..(932): n is a, c, g, or t
  misc_feature (999)..(999): n is a, c, g, or t
gaaagaaaagaaacagaaataaacttaggacacagcagacggcccatcctgagggtaccacatagcagatgctgggaccttttttcaggtggacgccacatgacctttcctttgcaggcatccatgctgatgttcacaaggcacacagcatttcagctgaagaaagaactggcaggattttcatcacgaaagggcactgtctatcgtttatgaaaatgaagcatatgaagtaaaagtttggaaacagatggaattaaatcttctgacagattttaaaataagatctaaaaaagagcaagacatgctcttggatggggaaacttaatatcagaaaaatgtcaattttcccattttttccatataaatttaatgtaattcaaattccattaccaacagggtgattttttaaaaaactagataaaatgatctgaaagattatgcagcagaataaatgcccaagaattaccagggaagactggaaaaaagactgctgtgggggttttgccttcctggaaataagaccatactgcaaagtcactgtaatcagatcaatatggcattggcagaggactagacaatggaaaggaatggagaatacaaaaataagtttcaggatatatgagaatgagatatatgccaaaggtagtattttgattcggtgggagaagggcagactgtgaagtaagtggtaccagccacaactgaatatccatctgggataaaataaaattgcactcgtcttagagatccaaatcaacttcagatggattaaaactttgaatgtaaaaaacataaatgactaacagtcctgcaaaatatcttggagacaacctgtgccatctggagagtgggaagagcacatgcaaaggccaaggggtggagcagcccagcatgttctggaaaagtgaacagatgaattgaacagccacttnttaaaagaagatgtatgaatgcccagtaagaacatgaaaaaaactcaactaactttatttaaggaan

SEQ ID NO: 38480 - DNA, 746 bp, Homo sapiens
gagagtcaacctggaaacttggcaagaatctccgggactgccctcctgctggggtcatgtggcactgggagctgcggtggccatctttactgccacccaggagagcctgccggagagtgagaccaacacagagcagcagagacagagacagactggctcccgagcgttcagccccagtgccggaagccagctagagccctggccttttcagtgacatgagccaatgacaactcccagttctctccctccggtcaatctgaagccgggtttttgcctcttacaactgaaagagtcctggtggtcacaggcatggctgattaaagatgcccaccaggtctttgttacaccctcatatacttggggccttgaatgtgggtgtgctctgagatgacttgaccaggagaatacggtagcagtgacactgcagtttccagcccaggcctgaagagatgattagcgcccactccttgcttcttgaaagtctctccttgggagtcctgggctgctatgttaaaaatccaactgccctgaggccaccatgatgtgaggaggctggagccaggtggagaggccatggtggcgaaagagctgccggaccagttcccattgccccagcccccagccatctgagtcatccccactgaggacacagatatcacagagcagatacgagctatccctgcaccgcccatccagattctttacccagtttgtgagatataataataatgaactgttttaggcca

SEQ ID NO: 38481 - DNA, 378 bp, Homo sapiens
catcttgagtttttttctcattcataaatgagccatgatgtatgtttacattgagaaattaaatacagtggtaggtttagtaataaaatagaggccaaaatctttgaacttgaggaactgtagtttttcctgactggctgaagatccaccagcacagttgcctttcttagcatacatttttattatactttttcagtttactttcttcagtaaaacatttgaagttgactttggggctattttgactattaagaaatatcaaattttaggagtattttgaagtagtaagagaaaattcttttgaatcctttagtattatgtcaaaagaaggactgttttatgttcaagtgaacataaattctcagttcttattttgtt

SEQ ID NO: 38482 - DNA, 2770 bp, Homo sapiens
gtttgaagtgtgggtaaaggttggggttaagaaatcacagctttgctagctaaaagtggcataatcagttaataatgaaaaactcacagctttgctactttgagtttgaagtttgctagtttgaggccaccatccagaaatttaacaaggagatcctagaaatgagagacctatagagggctaacatggctccccaaccatctgtagcagacagctaaactttgcatgcccaggggatactcagtagagcccagcaaaaagtgaaagccagaagagacttgagatctgggtacaactttgaatgctaccttccatgcagactgttccatctgcagatgttggaagccttactggtgcaaggtggctgggcttaatctctgcccaaatccactggctgaccactaaactaagcagccactcactcattagggaaatgcaaattaaagccataacaacaaccaccagaatggctaaaattaaaaagactgacaatccaagtgttgacaaggatatgcggaaaccagaatcctctcaaattgctggtgggaatataaaacagtatggccatgatggaaaacagtttggcagtttcttaaaaagttcaatatacacttaatgtgtaactcagcaattctatttccaaggtatgctgtcaggaaaaatgacagcatgtgtccaggcaaagttggtatatgatgttcatagtgtcacccagcaagcaatcaatgggcctgcttcccaaggcacatggaggccaataccatggcgctggcttttgaggaaaaataagctttatcatgactggactggcaaggagccaggaagaagcacccaaatctgcctcctggagctggtagttgggtagagttttataagcatagggtaatagggtgtgatccaattggatcttgtgatgaagtgatgctggggggtgttttctgactggctcctgacatggggctatgccagagctcaatctggttggattctggatcctgttatgccatatccacttttttttttttttttttttttttttgagatagagtctcactcttgtcacccaggctggagtgcagtggtgcaatctcagctcactgcaacctccgcctcctgggttcaagtgattctcctgcctcagcctcccaagtagctgggattacaggcgcctaccaccatgcccagtatttgtatttttagtaaagatggggttttgccatgttggccaggctggtctcaaactcctgacctcaggtgatctgcccgcctcggcctcccagagttctgggattacaggcatgagccaccacacccggcttccacttcttagttcagtcccctctccttggttggaacatttaggttgcccctatagttgcatgcttggttcatctggacatgctcagcttacatgatgttcaacctgggggcccatggcaactgaaaaacaactcacaactttgttacagaagagatgaaccagattggtctgacgtggttaaaacagcagctttagctgtgattgaaaactggaactaatttatgtgtctgtcagcagatgaatggataagcaaattgtggtatatctatagaatggaataatactcagtaatgaaaaggaatggactattgatacatacagtgacatgtatgcattgcaaaataataacatgctgtgtgaaagaagccagacaccttttcctacaaaacagaatactgattccatttaggtgaaattctagaaaatgcaagctaatctgtagtgacagtagatcagtgcctgcagatcagaggatggcttgggagaggagggagaaagggattccaaaggaaagagcacaatgaaacgtttgggggtgatgtatatattcattatttgattatgtctaatgatttcatgggtgtatacatatgtcaaaactcattgtatatttaaatatgtgcaatttattgtatatcaagagtaactcagtaaagttataaaaactaaaactatgcccattcaaaaagcaaacagatgttcatagtaccattattcacagtagacaaaaactggaaacaatccaaatccatcaaccggtgaatagataaacaaaatttggtatgtccatatcagccatgaaaaggaataaaattctgattcatgccacgggtacatactacaatatggttgaacctcagaaacattatgccaagtgaaagggctctgtattgtatgataccatgatatgaaacttttagaacaggcaaaaccttagatcagatcagtactttgcctgggtgtagggtggcagcatggagattggttttaaacaggcacagcggaacagtttgggtgatggaaatgttcctggtgatagttgtgtataaattgtatgaaaacgtgtgcaattgtgtacttaaaatggataattttcatgacatgcaaattatacctcaagaaagccactaaacgtgggtggccactcaaaatttcaaattctctttaagatgaccattcaggtcaggcatggtggctcactcctgtaatcccagcactttgggaggccaaggcaggcagagcacgaggtcaggagatcgagaccatcttggctgacacggtgaaaccccatctctactaaaagtacaaaacgttagatgggcgtggtggcgggcacggtggtgggcgcctgtagaggcaggagagaatggcgtgaacccgggaggcagagcttgcagtgagccaagatcacgccactgcactgtagcctgggtgacagagcaagactcc

SEQ ID NO: 38483 - DNA, 1045 bp, Homo sapiens
tgggaaacacttcaggttggcatggttacagagggctttgctggggtggtgatgcctgcagatcagaggatggcttgggagaggagggagaaagggattccaaaggaaagagcacaatgaaacgtttgggggtgatgtatatattcattatttgattatgtctaatgatttcatgggtgtatacatatgtcaaaactcattgtatatttaaatatgtgcaatttattgtatatcaagagtaactcagtaaagttataaaaactaaaactatgcccattcaaaaagcaaacagatgttcatagtaccattattcacagtagacaaaaactggaaacaatccaaatccatcaaccggtgaatagataaacaaaatttggtatgtccatatcagccatgaaaaggaataaaattctgattcatgccacgggtacatactacaatatggttgaacctcagaaacattatgccaagtgaaagggctctgtattgtatgataccatgatatgaaacttttagaacaggcaaaaccttagatcagatcagtactttgcctgggtgtagggtggcagcatggagattggttttaaacaggcacagcggaacagtttgggtgatggaaatgttcctggtgatagttgtgtataaattgtatgaaaacgtgtgcaattgtgtacttaaaatggataattttcatgacatgcaaattatacctcaagaaagccactaaacgtgggtggccactcaaaatttcaaattctctttaagatgaccattcaggtcaggcatggtggctcactcctgtaatcccagcactttgggaggccaaggcaggcagagcacgaggtcaggagatcgagaccatcttggctgacacggtgaaaccccatctctactaaaagtacaaaacgttagatgggcgtggtggcgggcacggtggtgggcgcctgtagaggcaggagagaatggcgtgaacccgggaggcagagcttgcagtgagccaagatcacgccactgcactgtagcctgggtgacagagcaagactcc

SEQ ID NO: 38484 - DNA, 415 bp, Homo sapiens
aagtacttccacagacagtccactaggggggcagcactgtgtatgtggaagctttgcgtgtttgtgttccgggcacatgctttaagaaatctgtcagccccttgtgtgtaaatcttcatgcttatagagataacattctactgcctcttttatgaaggattggggagggaaaaatatttattttttggcatttagtagacgttatgtattttagtccttatgacaacactgtaaggaggcaaactcctcttagcttaaatgaataagaaaactgaagctctgccatgtaggaaaagttgtctcaggtctcaccaaagctcataagcaactaaactaagatttggagtcagatcttcctcaatccagagcacatgctccatcagtaacaccaggcaccatccacatagccatgagg

SEQ ID NO: 38485 - DNA, 512 bp, Homo sapiens
gtgatttctttccagattatcgagactcaagactttccagaacgtggcaaagagccctggaagaaatgtcccaggaacgccgcggtcaggaccgaggctccccggggccaggttcagggttcgaggtcccagcctcgcaactgctggcgtctggagggcgggagagtggccgggcccgaagctgcggctccgacgtacagttgcgagtctggggcggtgggccccgcagagctccgggggaagggagccgccgccgctgcggggaattggcttgggcaacgccgctgagtgttcaaacgtcgctgctcccgggccttgggcagcctctcctacctgacccaaattctgggctgcaaagcccgggcgaagttgtcgctttcactccgaatacgcccagtcgcaccgtcaacttcataggctgggcccggcagaggcctttcgcctccgcccagcggtctccgctgcggcccctcagcctctggagagccggggggcggccctcgccccggcag

SEQ ID NO: 38486 - DNA, 171 bp, Homo sapiens
tgtgcgtggttacacttgtagtcagcatgtctcagaacatgagccccacagcatactacctgggtattgctgctggttagtcagggcccaagggctcattagtcagcagatgatgaatcctacaacgacttggtttttccttcaaggcagtgggctcccttttgggcaagg

SEQ ID NO: 38487 - DNA, 481 bp, Homo sapiens
ttctactgatttttctgtgccacaggtcttgactcctgtaggctaaaattctcaagcctcttctgcctcaactgataatatgggaaaggtttggcccaaaggtgggtgaactggtggggagaaggatgagggaattcaggggattgctgagcccattctcctagacagtgctgctggcactggctctgtcttctccgtttccatctcgcatcagacggttcttccctctatgggcctagtcctacctagacacttttcagttggattccagttctggggatgctccgtcctgcagggatctaagtccttcccattgtcttcggctcctgggctcagctagaaccatcttttcccattgtccctgtggtgctagggctttcagtggttattaacgtctgtgttgtatcatcttgcctgaatttcagctctctgtaaccagttccccaaataaaattccccccatttacctacattctgtgag

SEQ ID NO: 38488 - DNA, 426 bp, Homo sapiens
tttttagcatgaagggctgttgaattttgttgaaggccttttctgcatctattgagataatcatgtggtttttgtctttggttctgtttatatgatggattacatttattgatttgcatatgttgaaccagccttgcatccaagggatgaagcccacttgattgtagtggataagctttttgatgtgctgctggattcggtttgccagtatttcactgaggatttttgcatcgatgttcatcagggatattggtctaatatcccttagactatgtgtattcttaaagctacagtgagtcttttgtagacagcatgctgttgggtcttgttttttaaatcaacttacatttgaagtaattattaataagtaaggacttactgttgtcattttgttaattattttctgactatttggtagtttattcc

SEQ ID NO: 38489 - DNA, 436 bp, Homo sapiens
tcatttgacatgcctctcagcgttaggaaagagatattaaaatgcagcgaataaacagccaacaggacagctgttattgcaaaaagaaccctggggtcctccaggtacacattttatttgctgtagtagaaaaattcccgttccttttcctagctaattgcttgcattagtgcctcctggttcttcccttgaatttactagaaatggaaattaagaaacgagtccagtcattgatcattggcctgtcaactttgtggacactcacccaggtgaatgaaaaacatcttgataagaacaacaaagtcaacagcaccaaaggcggtgcttttaaagcagttgttcttgtgatggtctttaagcagctgagaccagtagccctgtcgtctaattgtcgcatactttgtaaataaaacgattgcattcccattttgatttt

SEQ ID NO: 38490 - DNA, 886 bp, Homo sapiens
gtttcatttgtgtttttctcattcttacttgtttatattcttactgtatttgtacttgtagatacacacttttactatatatttttaatatttaaatagtggaaatatattaatgaatatgtgtatataatataaaggcaaatgaataagtgtaactaaatgaataaatattttcaaactttatgtaagttgtaagaggtattggtcatgctttttcattcattatgtttgtgagattcattcatgttgatgtgtgcagctgtagttcatctatttttactgctgtatgattgaacactattaatatgccaacgttatcactccatcttcctgatgatggatatttagattgttcctaattttttgaaccttcctgtctgtgtcttccagggtacatacataggaatggagtttctaggtattgggaatgcatatcttcaattttactagatcttgcttaattgctctccaaagttgccttccattgagagtatatccctttaagaactgtggcttcatggggcagtgtcagatcctccctgcctcctgcctggatctaaggccatgtctcctgcccaagacaattttggctttaaagttcacatactcttctatttctagtcactaacaattgtcttattttcttgcaagctcagttacgaacttgaagggagttttgttgtggtttatcttgcgtttctatatgtttttaaaaaggcaagttttggatttttgtgattgctttccctccctctcttcatctagtttgaggtggcacacacctataatcccagcactttgggaggccaaggcgggaggatcacttgatgtcaggagtttgagaccagcctggtcacaatagtgacataccatctctacaaaacca

SEQ ID NO: 38491 - DNA, 253 bp, Homo sapiens
tttacgactttctcgcttcctttctctccgttgcatcttggatgctgagaaagtaaaaattagttcagacaagaaaagtaaaatacctgcctggctactcatcacgctgggatagctgaaacagataaggcctgctgccatgttaacagcaacatacgttcttcccaaggacactctgccactgtagtgtcataacaacccacttttttgaaggggtctttcttttactcattcactgaaaaaccttgttttc

SEQ ID NO: 38492 - DNA, 350 bp, Homo sapiens
atcaagacatgctaaagattcccaaatttctttctccagcccaccctttctgaactgcagatgaggccaactgcctcctggacatcatcttgctgtcccatggcatcgcaaagttaagaaaccttaaacttaacccatgatcttggccatcagatctgtgactctatgtatattccttctttgttgaactgcaccttgtctcccaaactccaaattcagaattcccttttgccgttctctctctcataatcttcatggacaatcaatgaccaagctctattcattctacctcagttttttttcgataatcaaaatgaaaatacaaccacattagaatatttatgagaatc

SEQ ID NO: 38493 - DNA, 391 bp, Homo sapiens
ttttttttttttttggtagagaaagattttcaccatgttgcccaggctggtctcaagctcctggactcaagcagtctaccctccttggcctcccaaagtgtttagatcacaggcatgagccaccatgcctggccccaagtattactttcactgtaaacttttctccagtcattccctgcacccttgatctgggcaaaattaatgattatctgtttagtgctctttatacatctctcattataacttattatgctgtaatgtaattatttgtgtgtctctttccaaacaaaccatgagattcttatcaggacatatacctaccccacccctgcccagtgcctgttattattcctagtacaccgcaggagtaatgtatataaaattgctctac

SEQ ID NO: 38494 - DNA, 403 bp, Homo sapiens
ttttttttttttttggtagagaaagattttcaccatgttgcccaggctggtctcaagctcctggactcaagcagtctaccctccttggcctcccaaagtgtttagatcacaggcatgagccaccatgcctggccccaagtattactttcactgtaaacttttctccagtcattccctgcacccttgatctgggcaaaattaatgattatctgtttagtgctctttatacatctctcattataacttattatgctgtaatgtaattatttgtgtgtctctttccaaacaaaccatgagattcttatcaggacatatacctaccccacccctgcccagtgcctgttattattccgtcgacccggccgcgaatttagtaattgtagtcgacccgggaattccggac

SEQ ID NO: 38495 - DNA, 977 bp, Homo sapiens
ccctgtctcttaaaaaaaaaaggttcaaagagtgtcactgtcaatctgggcacctcccactagctcacctctcctgcaaagtcactgggctagcaaaagtccccactggaagcagatatgaaacatatcttacatgtgcagagctcactgtccttcccaagagctttcccttctgttatcccagggaaaccctcgtggtgaccttgcaggcacctggggcagagagccctccttcccttcactgctgagcagggttgccagatttagcagaaaaaaatctatttgttttctagctgaaactcaaatttaactgggtgttctagatttcatctgataactccactgttaaggaaacagaagcaaagttatctggggtcacaaaatctaggagagcctgatgtgagtttaagattctttatgcctggtctgggctttgtatcttgtaaggccacaggtttacatgtttcatgatagcatgtacctggcatgattgcagcacctgagcctgcaaacgtctttgtttaattccctgcagcaccaccttgcatgtaatcagctccatctgcaaagtatttggcaaaatcaacattcttctccttctgactttttccacattgtgcccagagccactaggagccttgtattagattgaactacatgaaatcaccatttgggggagataaaaaatagtcaaaagtcagcgcattttgtgtgtgtgtgattcaacctaaatgattgcccttgcttaggatttatttaaaaagtttgtcaaaagtgaacacaagccaggtacagtggcatgcacctgtacacctagctactcaggaggctgaggcagaaggatcacttgagcccagcggtatgagtccagcctggagaatatagtgagatctcatctcttaaaatgaaaagaagaaaacaaaaagtgagcacagtacgtgcttttgtgtctagatattttaaatctctttctgctg

SEQ ID NO: 38496 - DNA, 381 bp, Homo sapiens
tgaaagtgaaaactgtacagtcacaggcagcatagcagtgtttcactcagcaggggaccgtggatgtgatggtgatcctataagattatatcatattttgccaggcactgtggctcacgctgtaatcccagtactttgggaggccgaggcaggcggatcatgaggtcaggagttcgagaccagcctggccagcgtggtgaaatcctgtctctactaaaagtacaaaaattagctgggcgtggtggcgagcgtctgtaatcccagctactcgggagactgaggcaggagaatctcctgaacccagaaggcggaggttgcagtgagccgggatcgcgtcggctcactgcaacccagcctgggcaacaagcaaaaatctgtctt

SEQ ID NO: 38497 - DNA, 99 bp, Homo sapiens
taataatttatctttgagaacaagaagtttatttttcatttatcaagagcttaacatttccctcttaggaaaaatgctttgagggatacactatactca

SEQ ID NO: 38498 - DNA, 422 bp, Homo sapiens
gggtagaagagataatagtttattgacatcagcagatcataggattgtagctgggctgatgagaaatggtatagcaacgatagttgcaagtggccagagagaatgtgggttgcactgaagtacagtacagcacttgatcattgggcagtaggggatgggggaaggaaaactttggagaaacaaacagataatgcctgtcaggcaaaattaacatgtcatactttaaggtttgagtctgatcaagggagagtcaattctttttttttaaagatagaattatagaaatattggccagccatgtaatcccagctcacgcctgtaatcccagcaatttgggaggccgaggtgggaggattgcttgagcccaggagttcaagaccagcctgggtaatactagcaagatatcattgctagtagggaaa

SEQ ID NO: 38499 - DNA, 716 bp, Homo sapiens
gtttaccattaaccagaactctggaaatagatatttaatccccaaacagaggtgatggtgtgtctagaagcaatttaaagcctccatagcttgactagtcactttatcctgggcaactttttggattgtttggtaatctagaaacgagagagaacgctaattgcttcaacattaaagaaacccaccttctagactcactcgttcccccacccctcctttatgttttctttcttgttcctctaagaaatgaaatatagaagacgaaaatataaactggactacagcagggtgcagtggtgcatgcctgtaatcccagcactttgggaaggaggattgcctgaggccaggagtttgagaactggcctgggccacatagacctccttcctacaaaaaatttaaaaagtatatttaaaccagactagaaactttcaaccacaaaaatccatggggtcattgaggtgcaaatggaaagaccaggagcaaaagtagagggagcaaaagtagagggtggggacagtgtggaggtgaggacagtatggaggtggggacagggtatggaggtggagacaatgtatggaggtggaggcggtggctgagcagagcaggaaagctgctgggggctgtgaggagctaggtttggctgggtgacagcaagggctggacagaaagtgctttcagaaaagcccaaggataaagtccaaagagattaaaggtt

SEQ ID NO: 38500 - DNA, 476 bp, Homo sapiens
ctggagcagtgatagggtgactctttaccagcaatatgaggatcccatttgtttggatcatttgtaaaggtaacttttcccatttgtaactaaaaagttatctgtggagggatcctttgcagtcactcacaaagtgtgaataaaatatcctgttcccaataatctttaaaaaaatttaaaaagtatatttaaaccagactagaaactttcaaccacaaaaatccatggggtcattgaggtgcaaatggaaagaccaggagcaaaagtagagggagcaaaagtagagggtggggacagtgtggaggtgaggacagtatggaggtggagacaatgtatggaggtggaggcggtggctgagcagagcaggaaagctgctgggggctgtgaggagctaggtttggctgggtgacagcaagggctggacagaaagtgctttcagaaaagcccaaggataaagtccaaagagattaaaggtt

SEQ ID NO: 38501 - DNA, 5431 bp, Homo sapiens
atggagcaggcgggcaccagacctgcggcgacagagcatccacggctccggcggcccatgccctggctgctgctactgcctctcctgctgctgttgctgctgctgctacctggcccagcggcctcccagctgcgatactctgtgccagaggagcaggcacccggcgcgctcgtgggcaacgtggctcgcgcgctggggcttgagctgcggcgcttggggccgggttgcttgcgcatcaaccatctgggtgcgcccagtccgcgctacctggagctggacctgacgagtggagcgctcttcgtcaacgagcgcattgatcgggaggcgctgtgtgagcagcggcctcgctgcctgctcagcctggaagtgctggcgcacaaccccgtggcggtgagcgccgttgaggtggaaatattggacatcaacgacaactcaccgcgtttcccgcggcccaactaccagcttcaggtaagcgaatcggtggcgcctggagcgcgctttcacatagagagtgcgcaggaccccgacgtgggcgccaactcagtacagacctacgagctcagccccagcgagcacttcgagctggaccttaagcccctgcaggagaacagtaaagtgcttgagctggtgctgcgtaagggcctagaccgggagcaggcagccttgcaccacctggttctcacagccgtggatgggggcattccagcccgctcgggtacggcacagatctctgtgcgtgtcctggacactaacgacaactctcctgcctttgaccagtccacttatcgcgtccagctacgggaggactcacccccaggcacattggtggtgaagctgaatgcctcagacccggatgagggctccaatggtgagctcaggtactccttgagcagctacacgtcggaccgggagaggcagctcttcagcatagatgccagtaccggggaagtgcgagtaattggggggctggattatgaggaagcctcctcctaccagatctatgtgcaggcgactgaccggggtccagtgcccatggcaggtcactgcaaggtgctggtggacatcgtggacgtgaatgacaatgccccagaggtggtgctcacggacctgtatagcccagtgcctgagaatgctacacccaacaccattgtggccgttctcagtgtcaatgaccaagactcaggccccaaccggaaagtgagcctgggtctggaggccacactgcctttccgactgaatggctttggaaactcctatacactggtggtgagcggcccactggaccgagagcgggtggctgtctacaacatcacggtgacagccacagatgggggaataccgcagctcacatccctgcgtacactgaaggttgagatctctgacatcaatgacaatccaccaagcttcctggaggactcctattccatctacatacaggagaacaatttgccaggtgtgttgctctgtactgtgcaagccacagacccagatgaaaaggagaatgcagaggtgacctactcccttctggagagggagattcaagggctgccagtcacctcctatgtctccattaacagtgccagtggcagcctttatgctgtcaactcctttgactatgagaagtttcgggagttctttgtgactgtggaggctcaggacaaggggagcccaccactgagcagcactgtgactgccaacgtatatgtggtggacatgaatgaccatgcccctcacattctgtaccctacctcaaccaactcgtcagcagccttcgagatggtgcctcgaactgcccctgctggctacctggtcaccaaagtcatagctatggactcagactctgggcaaaatgcttggcttttttaccatctagcccagacttctgacctggacctctttaaggtagagctgcacacaggagaaattaggactaccaggaagatgggagatgagagtggtagcactttcaacctgaccgtggtggtccgagataatggagagccatcactatcagcctctgtggccattacagtagctgtggtggatagggtttccaaaatcctccctgacactcagaggcatgttaagagccctcggacatactctgaaattaccctttatctaataatagcattaagcacagtgtcttttatatttcttttgacaatcatcattttgagcatcatcaagtgctaccgctacactgcgtatggcactgcatgctgtggaggcttctgtggagtaagggaaaggtcccctgcagaactgtacaaacaagccaacaacaatattgatgccaggataccgcatggcctcaaagtgcagcctcacttcattgaagttcgagggaatggctccctcaccaagacctactgctacaaggcctgtctgacagcaggctcagggagtgacactttcatgttttacaatacaggggcccagacaggaccagggccttcgggagcccaagcagcagtgactgacagcaggaatctcacaggccaaagtggtcagaatgctgggaacctgattattctcaaaaatgaggctgtttctcaaaatgagccacgacagcccaaccctgactggcgttactctgcctccctgagagcaggcatgcacagctctgtgcacctagaggaggctggcattctacgggctggtccaggagggcctgatcagcagtggccaacagtatccagtgcaacaccagaaccagaggcaggagaagtgtcccctccagtcggtgcgggtgtcaacagcaacagctggacctttaaatacggaccaggcaaccccaaacaatccggtcccggtgagttgcccgacaaattcattatcccaggatctcctgcaatcatctccatccggcaggagcctactaacagccaaattgacaaaagtgacttcataaccttcggcaaaaaggaggagaccaagaaaaagaagaaaaagaagaagggtaacaagacccaggagaaaaaagagaaagggaacagcacgactgacaacagtgaccagtgaggtcctcaaatggaaacaagccacttagccagtttttgtaataatggcaaatctctcccatgtagcaattccctgctcctttttcctatctacatgagccctcttagagacctcagaaatctgcagaaagttccctgtgtctgtctagaacgcatttaacaggttttgtcgtaaaagctttactaagtctggtgttaactctttctctccactctggcttgttttcagaacctaaaaagcagacccaagtttcctttctcctccgccgcaaaggagaggcttcccagccccgccagtgagaggttggactctctgccctgtgctccggggatcctgtcttgatgacacttgcagggcaggctgaaaagttttgagattgagcagcttgggagtttgtggccactgggtatgtgtggctaccgcgggtatgcgagtgccagatattggctgagacgagccagcttagactaattggtacaaggaaggcaagaaaacaaagacaaataaacagcggaagttatcagtatggaggggaagtgtaaacttaaagggaccagactttctaaatcttacaactcaagaggtggcagccaccctctaggagacaaaactacccccactgacaaggctttaggagaccctaaagtctgttggctgtgacgtcattatacctaaaatctgcatcatacctgcaagccaacagttcagtgttttaacagagaaccaccctgggaaacagaagcagatctgatgtgtttcctatacatgtcctgtgctcactttattaaaaattcttttgcacacaatgtttatgaaaaggccagatccttttccaatacttatgcaaaagcaaaagaaaaccccgacacctcacctttcgctgtttgttgtttcatagatttatttaaaaaaagagaaagtctatagctataaatctttaaagagaaatatgaatacaattcccctaaactctcctcaaaagagaattcagtctacagccatttaaatgatcattgctgctacagaagtgctttaagagaattgcctgaaacatctgtattatatcggccacctgccaatcacagctttactctttcaggtcactctggggctgcctcttgcatgtattactaaataaaatgatctctctttctctctctctctctcttttctaagaaacaattatgtgcactttgatacacaaccttctctaaccaactatatatcaagacccaaaaattgaagaaaaatattgttttctcatacagtgagcagatttttcaatctactaattctgtgacttgtcttggtgtgctagcctacaccttctctttggtttagttttccttttctataacactctgaattgctaatcttactaacacctatgatgttacctgaaatcaatctcccatatgtatgctgtatgctatgctaagactcctgaaatatacttactctgtgcttgtgtatgtgaatgttaatgcaactattacctagagtgaactttaagctttattgttgaatgtaattccattatatttccttttgtacacctgtgaaaaagtggagtagtgtttttttaaccattgttaatcagcttttgtgtatgaaagacacagtaaaatttctttcttaaatcaagatactggtgattcaaggaattttatttatggtccagccaagagccatctcgtgccaagacttctgctggcaagggaatggataaagctgttttgttctagtaacaattttggaatgaatactgacaatattccatgagggtgtgcaagcacaaattttaccaatctgacctctttgaagttgcagaatgctttgaaattctaatggtatctgaaatatcagctcatagaaagtaacaaaatttgctgtcaccttaaataagacattttaattttgttataatgtacaatttagaagtttgattaattatattatctatttaggcattaatataaaagaggtaggagtctgttatttaaaaaaagcattaaatttaaaaaaaaactgtcttgtctacttttagcttcattctcccatattttgaagggtgtgtaacttcagctctgcaggattgcatggggtaaaacttgttaccaacacatgtgaaccattgctacattgtaggttgtgatcattttgccccactgaagcccatgtatctgaccttacgtgccttttgaactaggagaatcgggctaatttattaatgatgataattataatgtatctgtacagcactttttacatttgcgaagtgctttccaatccatgttagttactagttattacagctgtaaggataaaacacgtcatgtggattcattttgaattggtgctattggtatttcctctgttattgctaataaatgaaaatggtggtatg

SEQ ID NO: 38502 - DNA, 2633 bp, Homo sapiens
caatgccggcgttcgggaggcgcaacgtcggcggtcgctgagtatccagcccgcagcagtgacggccggcaggagcgtgctcttccccgcggctcgtgctctccaggagtccggagcatggtcctgggtcaccgttggtgtagcgtgttggtggaacgtggacgcctagagggaggatggtgggctgtggggtggcagttttatgtttgtgggtttcctgcggcgctgcagcgggacagctcgagtactcagtgccggaggagacggagcggggcgtagccgtaggcaatctctccgcggacttgaggctgccagcggccgctatgtcctcgcggaactttcgcttcctttccagccaccgcgagctctacttcggggtggatctacccagcggcaatttggtggtcagagagccggcggaccgcgaacagctgtgcagggccaaagctgcctgcgtcttgacctacgacctggtgctcgaggacccgctggagctgcacaagattcggattcacgtcctggacaccaatgacaactcacctctctttcctgccggcgacgtgcagctgcacatccccgagttcctgacgcccggagcccgctttactctcccgaatgcccaagatgacgacgagggaagcaatgggatactaagctacagcctaagccccagtcagcactttcgcctggacatgggatcgcgggttgacggcagcgaatacccggagttggtgttggagaaagcactggatcgcgaacagcgcgccacccacctgctggtgcttacagctcgggacggcgggctacctgcccgctcaggagacgcacaagtcaccatcattgtggtggacacaaatgacaacgcgcctgtatttgagcgctccgtataccgcaccaaggttccagagactgcacccaatgggactgtgttattccgagttcaagccttggatccagatgaagggtccaatggggaagtccaatactccctaagcaacagcacgcaagcagagctgcgacaccgctttcacgtgcaccctaaaagtggggaggtgcaagtagctgcttcactaggtccgcctgaaacgctcttggaggcatacattgaggcgagggacgaaggtgtctttggtttagctagcaccgctaaactgctggtggaggtgactgacgtgaacgatcatgcccccgaactggacttcctgactctttcgaacccagtacctgaggacgctgcccctggcacagtgattgctctctttagtgtaaaggatgaagacctcgattctaatggtagggtcatttgtggcatgtctagtgcaggcccttttcagctgacggcttcctttgacaactactacagcctgctgattgatgggcccctggaccgggagcagatcagtgaataccaagtcctgatcacggcctcagatagtggctcaccgccacttagcacccgaaggacaatcactgtgtcagttgctgatgtgaatgacaatacaccaaactttcctcaaccccagcaggaacttttcgttgctgaaaacaatggccctggggcctctctaggccgagtgtttgcccaggaccccgacctggggaagaatggccttgtctcttatgagctgttggatgttatctctgaagggccatcagcctctagcttggtggcagtggaatcatccagtggggccatcactgccaaaacttcctttgactttgagcagctcagggggtttcatttccaagtagaaggccgggatggtggcattcctcccagaagtgcaacagtgactataaacttgtttgtggtagataggaatgacaattatccggttatcttgtttcccttgcccagaaatggttctgtcccagtggaaattgtgccccgctctgccaggactggacacttggtcacaaaagtggtagcagaggatgctgacagtggttctaatgcctggctttcctaccacatctcccgggcgtctgactctagtctctttagaatttcagccaatataggtgagctccgtactgctcgcttagttcttcccactgatgcagttaagcagagggtggtggtagtggttcgggaccatggagacccaccactttcctcctctgtcactctgggtgtgctgttgagcaactctgtccctcagttacttccagactttgaagatgtctgggaaccaggagggcagctttctgcccagaacttgtatttagtaattgccttggcttgtatttcctttttatttctggggtgcttacttttcttcgtgtgtaccaagttgcaccagagcccaggctgttgcgctcagagctgctgtcgctctacagaggatctgaggtatggaagtaagatggtttcaaatccttgcatgacatcagccaccatagatgtcactacagttgagagactttctcagacttatctctatcgggcctctctgggacttggttctgataataacagtttgctgttgcgtggggagtacaatgctgccgacctgcgaaatcttgccactggggtaggactgaatttgccaatatcctgtattcagattcggaataggaaaggggatcacgctaatgtcaatgccatggtaagcaaattttatggaatttga

SEQ ID NO: 38503 - DNA, 5475 bp, Homo sapiens
caatgccggcgttcgggaggcgcaacgtcggcggtcgctgagtatccagcccgcagcagtgacggccggcaggagcgtgctcttccccgcggctcgtgctctccaggagtccggagcatggtcctgggtcaccgttggtgtagcgtgttggtggaacgtggacgcctagagggaggatggtgggctgtggggtggcagttttatgtttgtgggtttcctgcggcgctgcagcgggacagctcgagtactcagtgccggaggagacggagcggggcgtagccgtaggcaatctctccgcggacttgaggctgccagcggccgctatgtcctcgcggaactttcgcttcctttccagccaccgcgagctctacttcggggtggatctacccagcggcaatttggtggtcagagagccggcggaccgcgaacagctgtgcagggccaaagctgcctgcgtcttgacctacgacctggtgctcgaggacccgctggagctgcacaagattcggattcacgtcctggacaccaatgacaactcacctctctttcctgccggcgacgtgcagctgcacatccccgagttcctgacgcccggagcccgctttactctcccgaatgcccaagatgacgacgagggaagcaatgggatactaagctacagcctaagccccagtcagcactttcgcctggacatgggatcgcgggttgacggcagcgaatacccggagttggtgttggagaaagcactggatcgcgaacagcgcgccacccacctgctggtgcttacagctcgggacggcgggctacctgcccgctcaggagacgcacaagtcaccatcattgtggtggacacaaatgacaacgcgcctgtatttgagcgctccgtataccgcaccaaggttccagagactgcacccaatgggactgtgttattccgagttcaagccttggatccagatgaagggtccaatggggaagtccaatactccctaagcaacagcacgcaagcagagctgcgacaccgctttcacgtgcaccctaaaagtggggaggtgcaagtagctgcttcactaggtccgcctgaaacgctcttggaggcatacattgaggcgagggacgaaggtgtctttggtttagctagcaccgctaaactgctggtggaggtgactgacgtgaacgatcatgcccccgaactggacttcctgactctttcgaacccagtacctgaggacgctgcccctggcacagtgattgctctctttagtgtaaaggatgaagacctcgattctaatggtagggtcatttgtggcatgtctagtgcaggcccttttcagctgacggcttcctttgacaactactacagcctgctgattgatgggcccctggaccgggagcagatcagtgaataccaagtcctgatcacggcctcagatagtggctcaccgccacttagcacccgaaggacaatcactgtgtcagttgctgatgtgaatgacaatacaccaaactttcctcaaccccagcaggaacttttcgttgctgaaaacaatggccctggggcctctctaggccgagtgtttgcccaggaccccgacctggggaagaatggccttgtctcttatgagctgttggatgttatctctgaagggccatcagcctctagcttggtggcagtggaatcatccagtggggccatcactgccaaaacttcctttgactttgagcagctcagggggtttcatttccaagtagaaggccgggatggtggcattcctcccagaagtgcaacagtgactataaacttgtttgtggtagataggaatgacaattatccggttatcttgtttcccttgcccagaaatggttctgtcccagtggaaattgtgccccgctctgccaggactggacacttggtcacaaaagtggtagcagaggatgctgacagtggttctaatgcctggctttcctaccacatctcccgggcgtctgactctagtctctttagaatttcagccaatataggtgagctccgtactgctcgcttagttcttcccactgatgcagttaagcagagggtggtggtagtggttcgggaccatggagacccaccactttcctcctctgtcactctgggtgtgctgttgagcaactctgtccctcagttacttccagactttgaagatgtctgggaaccaggagggcagctttctgcccagaacttgtatttagtaattgccttggcttgtatttcctttttatttctggggtgcttacttttcttcgtgtgtaccaagttgcaccagagcccaggctgttgcgctcagagctgctgtcgctctacagaggatctgaggtatggaagtaagatggtttcaaatccttgcatgacatcagccaccatagatgtcactacagttgagagactttctcagacttatctctatcgggcctctctgggacttggttctgataataacagtttgctgttgcgtggggagtacaatgctgccgacctgcgaaatcttgccactggggtaggactgaatttgccaatatcctgtattcagattcggaataggaaaggggatcacgctaatgtcaatgccatgccacgacagcccaaccctgactggcgttactctgcctccctgagagcaggcatgcacagctctgtgcacctagaggaggctggcattctacgggctggtccaggagggcctgatcagcagtggccaacagtatccagtgcaacaccagaaccagaggcaggagaagtgtcccctccagtcggtgcgggtgtcaacagcaacagctggacctttaaatacggaccaggcaaccccaaacaatccggtcccggtgagttgcccgacaaattcattatcccaggatctcctgcaatcatctccatccggcaggagcctactaacagccaaattgacaaaagtgacttcataaccttcggcaaaaaggaggagaccaagaaaaagaagaaaaagaagaagggtaacaagacccaggagaaaaaagagaaagggaacagcacgactgacaacagtgaccagtgaggtcctcaaatggaaacaagccacttagccagtttttgtaataatggcaaatctctcccatgtagcaattccctgctcctttttcctatctacatgagccctcttagagacctcagaaatctgcagaaagttccctgtgtctgtctagaacgcatttaacaggttttgtcgtaaaagctttactaagtctggtgttaactctttctctccactctggcttgttttcagaacctaaaaagcagacccaagtttcctttctcctccgccgcaaaggagaggcttcccagccccgccagtgagaggttggactctctgccctgtgctccggggatcctgtcttgatgacacttgcagggcaggctgaaaagttttgagattgagcagcttgggagtttgtggccactgggtatgtgtggctaccgcgggtatgcgagtgccagatattggctgagacgagccagcttagactaattggtacaaggaaggcaagaaaacaaagacaaataaacagcggaagttatcagtatggaggggaagtgtaaacttaaagggaccagactttctaaatcttacaactcaagaggtggcagccaccctctaggagacaaaactacccccactgacaaggctttaggagaccctaaagtctgttggctgtgacgtcattatacctaaaatctgcatcatacctgcaagccaacagttcagtgttttaacagagaaccaccctgggaaacagaagcagatctgatgtgtttcctatacatgtcctgtgctcactttattaaaaattcttttgcacacaatgtttatgaaaaggccagatccttttccaatacttatgcaaaagcaaaagaaaaccccgacacctcacctttcgctgtttgttgtttcatagatttatttaaaaaaagagaaagtctatagctataaatctttaaagagaaatatgaatacaattcccctaaactctcctcaaaagagaattcagtctacagccatttaaatgatcattgctgctacagaagtgctttaagagaattgcctgaaacatctgtattatatcggccacctgccaatcacagctttactctttcaggtcactctggggctgcctcttgcatgtattactaaataaaatgatctctctttctctctctctctctcttttctaagaaacaattatgtgcactttgatacacaaccttctctaaccaactatatatcaagacccaaaaattgaagaaaaatattgttttctcatacagtgagcagatttttcaatctactaattctgtgacttgtcttggtgtgctagcctacaccttctctttggtttagttttccttttctataacactctgaattgctaatcttactaacacctatgatgttacctgaaatcaatctcccatatgtatgctgtatgctatgctaagactcctgaaatatacttactctgtgcttgtgtatgtgaatgttaatgcaactattacctagagtgaactttaagctttattgttgaatgtaattccattatatttccttttgtacacctgtgaaaaagtggagtagtgtttttttaaccattgttaatcagcttttgtgtatgaaagacacagtaaaatttctttcttaaatcaagatactggtgattcaaggaattttatttatggtccagccaagagccatctcgtgccaagacttctgctggcaagggaatggataaagctgttttgttctagtaacaattttggaatgaatactgacaatattccatgagggtgtgcaagcacaaattttaccaatctgacctctttgaagttgcagaatgctttgaaattctaatggtatctgaaatatcagctcatagaaagtaacaaaatttgctgtcaccttaaataagacattttaattttgttataatgtacaatttagaagtttgattaattatattatctatttaggcattaatataaaagaggtaggagtctgttatttaaaaaaagcattaaatttaaaaaaaaactgtcttgtctacttttagcttcattctcccatattttgaagggtgtgtaacttcagctctgcaggattgcatggggtaaaacttgttaccaacacatgtgaaccattgctacattgtaggttgtgatcattttgccccactgaagcccatgtatctgaccttacgtgccttttgaactaggagaatcgggctaatttattaatgatgataattataatgtatctgtacagcactttttacatttgcgaagtgctttccaatccatgttagttactagttattacagctgtaaggataaaacacgtcatgtggattcattttgaattggtgctattggtatttcctctgttattgctaataaatgaaaatggtggtatg

SEQ ID NO: 38504 - DNA, 2655 bp, Homo sapiens
atggagcaggcgggcaccagacctgcggcgacagagcatccacggctccggcggcccatgccctggctgctgctactgcctctcctgctgctgttgctgctgctgctacctggcccagcggcctcccagctgcgatactctgtgccagaggagcaggcacccggcgcgctcgtgggcaacgtggctcgcgcgctggggcttgagctgcggcgcttggggccgggttgcttgcgcatcaaccatctgggtgcgcccagtccgcgctacctggagctggacctgacgagtggagcgctcttcgtcaacgagcgcattgatcgggaggcgctgtgtgagcagcggcctcgctgcctgctcagcctggaagtgctggcgcacaaccccgtggcggtgagcgccgttgaggtggaaatattggacatcaacgacaactcaccgcgtttcccgcggcccaactaccagcttcaggtaagcgaatcggtggcgcctggagcgcgctttcacatagagagtgcgcaggaccccgacgtgggcgccaactcagtacagacctacgagctcagccccagcgagcacttcgagctggaccttaagcccctgcaggagaacagtaaagtgcttgagctggtgctgcgtaagggcctagaccgggagcaggcagccttgcaccacctggttctcacagccgtggatgggggcattccagcccgctcgggtacggcacagatctctgtgcgtgtcctggacactaacgacaactctcctgcctttgaccagtccacttatcgcgtccagctacgggaggactcacccccaggcacattggtggtgaagctgaatgcctcagacccggatgagggctccaatggtgagctcaggtactccttgagcagctacacgtcggaccgggagaggcagctcttcagcatagatgccagtaccggggaagtgcgagtaattggggggctggattatgaggaagcctcctcctaccagatctatgtgcaggcgactgaccggggtccagtgcccatggcaggtcactgcaaggtgctggtggacatcgtggacgtgaatgacaatgccccagaggtggtgctcacggacctgtatagcccagtgcctgagaatgctacacccaacaccattgtggccgttctcagtgtcaatgaccaagactcaggccccaaccggaaagtgagcctgggtctggaggccacactgcctttccgactgaatggctttggaaactcctatacactggtggtgagcggcccactggaccgagagcgggtggctgtctacaacatcacggtgacagccacagatgggggaataccgcagctcacatccctgcgtacactgaaggttgagatctctgacatcaatgacaatccaccaagcttcctggaggactcctattccatctacatacaggagaacaatttgccaggtgtgttgctctgtactgtgcaagccacagacccagatgaaaaggagaatgcagaggtgacctactcccttctggagagggagattcaagggctgccagtcacctcctatgtctccattaacagtgccagtggcagcctttatgctgtcaactcctttgactatgagaagtttcgggagttctttgtgactgtggaggctcaggacaaggggagcccaccactgagcagcactgtgactgccaacgtatatgtggtggacatgaatgaccatgcccctcacattctgtaccctacctcaaccaactcgtcagcagccttcgagatggtgcctcgaactgcccctgctggctacctggtcaccaaagtcatagctatggactcagactctgggcaaaatgcttggcttttttaccatctagcccagacttctgacctggacctctttaaggtagagctgcacacaggagaaattaggactaccaggaagatgggagatgagagtggtagcactttcaacctgaccgtggtggtccgagataatggagagccatcactatcagcctctgtggccattacagtagctgtggtggatagggtttccaaaatcctccctgacactcagaggcatgttaagagccctcggacatactctgaaattaccctttatctaataatagcattaagcacagtgtcttttatatttcttttgacaatcatcattttgagcatcatcaagtgctaccgctacactgcgtatggcactgcatgctgtggaggcttctgtggagtaagggaaaggtcccctgcagaactgtacaaacaagccaacaacaatattgatgccaggataccgcatggcctcaaagtgcagcctcacttcattgaagttcgagggaatggctccctcaccaagacctactgctacaaggcctgtctgacagcaggctcagggagtgacactttcatgttttacaatacaggggcccagacaggaccagggccttcgggagcccaagcagcagtgactgacagcaggaatctcacaggccaaagtggtcagaatgctgggaacctgattattctcaaaaatgaggctgtttctcaaaatgaggtgagacagtggtcagggggtcttctacaaactcatgcatttgttacacatcccccaatatcctgtgatttggctttattgagtcattaa

SEQ ID NO: 38505 - DNA, 1068 bp, Homo sapiens
ggcggtggtgagcgcgctggagcccgcgtggagaacatgcggcggggatgggagtgcgcctagtctcgaggcgggagagccagccgccctgcagccggccgtcggccccgcagccacagccgagccccgctgcggagctcccggcggcccagccccgaggctctgcggccgcgccgcgcgtccctaccaaccgacaccatgaacaccatcgtcttcaacaagctcagcggtgcggtgctgtttgaggacggaggcgcctcggagcgggagcggggtggccggccctacagcggtgtcctggacagtcctcacgcccgccccgaggtgggcattcccgacggcccgcccctcaaggacaacctcggcctgagacaccggaggaccggcgcccggcagaatggcgggaaggtgaggcacaagcggcaggccctgcaagacatggcgcgacccctcaagcagtggctttacaagcaccgtgacaacccgtaccccaccaagaccgagaagatactcttggccctcggctcgcagatgacgctagtgcaggtgtcaaattggtttgctaatgcaagacgtcggcttaagaataccgttcgacagccagatttaagctgggctttgagaataaagttatacaacaagtatgttcaaggcaatgctgaacggcttagcgtaagcagtgatgactcatgttctgaagatggagaaaatcctccaagaacccacatgaacgaagggggctataataccccagttcaccatcctgtgattaaaagtgagaattcggtcatcaaagcgggagtgaggccagagtcacgggccagtgaggactacgtggcaccccccaaatacaagagcagcttgttgaaccgttaccttaatgactctttgagacatgtcatggccacgaacactaccatgatgggaaaaacaaggcaaagaaaccactcgggatcttttagctccaatgaatttgaggaagaattagtgtctccatcgtcatcagaaactgaaggcaactttgtctatcgcacaggtaagtccgtgctttctgtagtaattcctgcg

SEQ ID NO: 38506 - DNA, 503 bp, Homo sapiens
ttttttaaaggcaaatgacagagaggaatcaactagccatggcaaacagaaatacagcaattctccatcatctccctgctccagtcagactgttctcacaatttatttcagacagatgaagatgtgcttctgtgtagctgggagcagtcaattaaagagattaaaggcagaaaggctgctacagcaaaagtatttaagttttagtttcttctgcagctgtgctttctccactttctcagcaatcagaatttccttaccctctgttctttgtctgttggaattcaacagaagctatttattttctcctataggttttttaaaaagagatcctagggccatagatttttattttcagtgtttatgccatgtatgccatctaagcataggagtgctatatttagtttaaactttagcatgcctaaagaactcattcctttatccccaattttaggacaggcaaatcaaagttaagagttcacgtaaaattaaacactgtaggttag

SEQ ID NO: 38507 - DNA, 371 bp, Homo sapiens
gtggggatgggcctccagcttgcctccagcctgaaaaaatagtagagggtgttgaggctgggaagggaggtggggctcatgttgtacagggcctgagccagggagcttgggcttcattctgagtactgtggcagccctgggaaggtttgtagcacagagggatattgtcatttttggaaagatccctttggctgcttaggtagagaagggcttcaagagggcaggaagggacaggactacagaaggggctgcttcagagtccagattaaggaaggagaggcctgggcagtcagaaaggaagagaagccggatgtggtggcttgtatcttcaatcccagcactttgagaggccaaggtgggaggatcacttg

SEQ ID NO: 38508 - DNA, 414 bp, Homo sapiens
gccacctgcaataaattgcagctggctgtttccacagcctctggaagggaagatggaaggacagaggagagtgaaaagaaagaaggctgtcatacagagaagagaggctacaacttgaaattttatactgaaagatgatctggtttatgaacatgatgatgatgtgtgtagtgaattttttctagtgtatatgccaaggcaatattattctcttgactatgggattcattaagtctgttgtatctgtcatccatgcttatccacatgtcaaggaagtgaattaatttcagcattcccaagatagaagtgatagtatatggtaatttacttacagcttataataatgagtgtcattatttgattaaatggatattactaattaatgggagttgccatgtcactattgtaatgtta

SEQ ID NO: 38509 - DNA, 585 bp, Homo sapiens
aattgaatatgtaatttatgtacatggttcaaaattcaaatgataacagagattcttggtgaaaagaaatcatgtgcaccctccgtgggaggaattgctgacaccagcttcttgtgtctttacagtctgtccatatatgagcttacacatgcatttgtttcccaaatgattacacggtatacactgtttgcaccttgctttttacactgaacagtgtatcttgatttatcgccgagtgttcacattagcacacataaaactgcctcgtccattttaatggttgcatgatattccattagatagctgtgtcatattctatttaaccagtgatttattaatacatatttaatttattttcaactgttatgtatgttttactgtacctataggataaattacaaaagtggagtttctagatctaaggctaggttactttttaatttgacagacatttccaaattgctcttcataaagggttgaagtcagtgcatacgtgaggactctgtgagtgtgcaggcggccctgtacctctgcaggttcttcacctgagtcaagcaactgtgggttgaaagtattcaaaaaaag

SEQ ID NO: 38510 - DNA, 307 bp, Homo sapiens
tcacaaaatttattaatttgattaatcttttcaaagttgggctgaaagaagatatcttgtcttgtttgttcattttctatgcattgaactataccataaattttgtcatatccttccttctgcttattttaggtttcatttgttcttctttttctcatttcttcaggtatatgcttaagtcattaattttagaactttcttcttttttaatataattattaaatgctataaatttccccctaagaactgctttagctatggttaatgaggttttgatgttttcattttcatttgattcaaaaaaaat

SEQ ID NO: 38511 - DNA, 2649 bp, Homo sapiens
  misc_feature (625)..(625): n is a, c, g, or t
aaggacaattagtcactagcgagacccagtaggaagagaggtttaaatcagagggattgaatgagggtgctttgtgccttccctgaagccatgccctccagcaactcccgcccccccgcgtgcctagccccgggggctctctacttggctctgttgctccatctctccctttcctcccaggctggagacaggagacccttgcctgtagacagagctgcaggtttgaaggaaaagaccctgattctacttgatgtgagcaccaagaacccagtcaggacagtcaatgagaacttcctctctctgcagctggatccgtccatcattcatgatggctggctcgatttcctaagctccaagcgcttggtgaccctggcccggggactttcgcccgcctttctgcgcttcgggggcaaaaggaccgacttcctgcagttccagaacctgaggaacccggcgaaaagccgcgggggcccgggcccggattactatctcaaaaactatgaggatgacattgttcgaagtgatgttgccttagataaacagaaaggctgcaagattgcccagcaccctgatgttatgctggagctccaaagggagaaggcagctcagatgcatctggttcttntaaaggagcaattctccaatacttacagtaatctcatattaacagagccaaataactatcggaccatgcatggccgggcagtaaatggcagccagttgggaaaggattacatccagctgaagagcctgttgcagcccatccggatttattccagagccagcttatatggccctaatattgggcggccgaggaagaatgtcatcgccctcctagatggattcatgaaggtggcaggaagtacagtagatgcagttacctggcaacattgctacattgatggccgggtggtcaaggtgatggacttcctgaaaactcgcctgttagacacactctctgaccagattaggaaaattcagaaagtggttaatacatacactccaggaaagaagatttggcttgaaggtgtggtgaccacctcagctggaggcacaaacaatctatccgattcctatgctgcaggattcttatggttgaacactttaggaatgctggccaatcagggcattgatgtcgtgatacggcactcattttttgaccatggatacaatcacctcgtggaccagaattttaacccattaccagactactggctctctctcctctacaagcgcctgatcggccccaaagtcttggctgtgcatgtggctgggctccagcggaagccacggcctggccgagtgatccgggacaaactaaggatttatgctcactgcacaaaccaccacaaccacaactacgttcgtgggtccattacactttttatcatcaacttgcatcgatcaagaaagaaaatcaagctggctgggactctcagagacaagctggttcaccagtacctgctgcagccctatgggcaggagggcctaaagtccaagtcagtgcaactgaatggccagcccttagtgatggtggacgacgggaccctcccagaattgaagccccgcccccttcgggccggccggacattggtcatccctccagtcaccatgggcttttttgtggtcaagaatgtcaatgctttggcctgccgctaccgataagctatcctcacactcatggctaccagtgggcctgctgggctgcttccactcctccactccagtagtatcctctgttttcagacatcctagcaaccagcccctgctgccccatcctgctggaatcaacacagacttgctctccaaagagactaaatgtcatagcgtgatcttagcctaggtaggccacatccatcccaaaggaaaatgtagacatcacctgtacctatataaggataaaggcatgtgtatagagcaaatgtttcccttcatgtgcactatgaaaacgagctgacagcacactcccaggagaaatgtttccagacaactccccatgatcctgtcacacagcattataaccacaaatccaaaccttagcctgctgctgctgctgccctcagaggaagatgaggaaggaaaaaaactgggtggacctacaaaaacccatcctctcccaactccttcttctctgcctctttcttgctgctgccctgagttttttgacacatctctttccataggggagtaatgggtgtgtcagccctggcctgctgggagagctgtttgtatgatttcccggctgatgtatgagcgtgcgcatctgggttcctgacagtggcatccatcactggcagttcttctgggaagcgggtgcttcaaaagtaaaattacaatcacactccagatttggtaagaaggttctattcctctgtgaatccagattcccccagagttgtaatgggagtcaagtaacaatattcattgagtggagagcagtttattaggcacaacaaaaagtagtcatcattcttcatgttgctatgagggagagtttgagtacaaagagaaagcatactgaaacatcaggtacacacacacaccccaactggacaaagcaaattagacctctccaaaattaagagaatattaggggctctatagggtaagcccttaattgtttggttaactcaaatcattatttttaaa

SEQ ID NO: 38512 - DNA, 2487 bp, Homo sapiens
aaggacaattagtcactagcgagacccagtaggaagagaggtttaaatcagagggattgaatgagggtgctttgtgccttccctgaagccatgccctccagcaactcccgcccccccgcgtgcctagccccgggggctctctacttggctctgttgctccatctctccctttcctcccaggctggagacaggagacccttgcctgtagacagagctgcaggtttgaaggaaaagaccctgattctacttgatgtgagcaccaagaacccagtcaggacagtcaatgagaacttcctctctctgcagctggatccgtccatcattcatgatggctggctcgatttcctaagctccaagcgcttggtgaccctggcccggggactttcgcccgcctttctgcgcttcgggggcaaaaggaccgacttcctgcagttccagaacctgaggaacccggcgaaaagccgcgggggcccgggcccggattactatctcaaaaactatgaggatgagccaaataactatcggaccatgcatggccgggcagtaaatggcagccagttgggaaaggattacatccagctgaagagcctgttgcagcccatccggatttattccagagccagcttatatggccctaatattgggcggccgaggaagaatgtcatcgccctcctagatggattcatgaaggtggcaggaagtacagtagatgcagttacctggcaacattgctacattgatggccgggtggtcaaggtgatggacttcctgaaaactcgcctgttagacacactctctgaccagattaggaaaattcagaaagtggttaatacatacactccaggaaagaagatttggcttgaaggtgtggtgaccacctcagctggaggcacaaacaatctatccgattcctatgctgcaggattcttatggttgaacactttaggaatgctggccaatcagggcattgatgtcgtgatacggcactcattttttgaccatggatacaatcacctcgtggaccagaattttaacccattaccagactactggctctctctcctctacaagcgcctgatcggccccaaagtcttggctgtgcatgtggctgggctccagcggaagccacggcctggccgagtgatccgggacaaactaaggatttatgctcactgcacaaaccaccacaaccacaactacgttcgtgggtccattacactttttatcatcaacttgcatcgatcaagaaagaaaatcaagctggctgggactctcagagacaagctggttcaccagtacctgctgcagccctatgggcaggagggcctaaagtccaagtcagtgcaactgaatggccagcccttagtgatggtggacgacgggaccctcccagaattgaagccccgcccccttcgggccggccggacattggtcatccctccagtcaccatgggcttttttgtggtcaagaatgtcaatgctttggcctgccgctaccgataagctatcctcacactcatggctaccagtgggcctgctgggctgcttccactcctccactccagtagtatcctctgttttcagacatcctagcaaccagcccctgctgccccatcctgctggaatcaacacagacttgctctccaaagagactaaatgtcatagcgtgatcttagcctaggtaggccacatccatcccaaaggaaaatgtagacatcacctgtacctatataaggataaaggcatgtgtatagagcaaatgtttcccttcatgtgcactatgaaaacgagctgacagcacactcccaggagaaatgtttccagacaactccccatgatcctgtcacacagcattataaccacaaatccaaaccttagcctgctgctgctgctgccctcagaggaagatgaggaaggaaaaaaactgggtggacctacaaaaacccatcctctcccaactccttcttctctgcctctttcttgctgctgccctgagttttttgacacatctctttccataggggagtaatgggtgtgtcagccctggcctgctgggagagctgtttgtatgatttcccggctgatgtatgagcgtgcgcatctgggttcctgacagtggcatccatcactggcagttcttctgggaagcgggtgcttcaaaagtaaaattacaatcacactccagatttggtaagaaggttctattcctctgtgaatccagattcccccagagttgtaatgggagtcaagtaacaatattcattgagtggagagcagtttattaggcacaacaaaaagtagtcatcattcttcatgttgctatgagggagagtttgagtacaaagagaaagcatactgaaacatcaggtacacacacacaccccaactggacaaagcaaattagacctctccaaaattaagagaatattaggggctctatagggtaagcccttaattgtttggttaactcaaatcattatttttaaa

SEQ ID NO: 38513 - DNA, 2823 bp, Homo sapiens
  misc_feature (625)..(625): n is a, c, g, or t
aaggacaattagtcactagcgagacccagtaggaagagaggtttaaatcagagggattgaatgagggtgctttgtgccttccctgaagccatgccctccagcaactcccgcccccccgcgtgcctagccccgggggctctctacttggctctgttgctccatctctccctttcctcccaggctggagacaggagacccttgcctgtagacagagctgcaggtttgaaggaaaagaccctgattctacttgatgtgagcaccaagaacccagtcaggacagtcaatgagaacttcctctctctgcagctggatccgtccatcattcatgatggctggctcgatttcctaagctccaagcgcttggtgaccctggcccggggactttcgcccgcctttctgcgcttcgggggcaaaaggaccgacttcctgcagttccagaacctgaggaacccggcgaaaagccgcgggggcccgggcccggattactatctcaaaaactatgaggatgacattgttcgaagtgatgttgccttagataaacagaaaggctgcaagattgcccagcaccctgatgttatgctggagctccaaagggagaaggcagctcagatgcatctggttcttntaaaggagcaattctccaatacttacagtaatctcatattaacagccaggtctctagacaaactttataactttgctgattgctctggactccacctgatatttgctctaaatgcactgcgtcgtaatcccaataactcctggaacagttctagtgccctgagtctgttgaagtacagcgccagcaaaaagtacaacatttcttgggaactgggtaatgagccaaataactatcggaccatgcatggccgggcagtaaatggcagccagttgggaaaggattacatccagctgaagagcctgttgcagcccatccggatttattccagagccagcttatatggccctaatattgggcggccgaggaagaatgtcatcgccctcctagatggattcatgaaggtggcaggaagtacagtagatgcagttacctggcaacattgctacattgatggccgggtggtcaaggtgatggacttcctgaaaactcgcctgttagacacactctctgaccagattaggaaaattcagaaagtggttaatacatacactccaggaaagaagatttggcttgaaggtgtggtgaccacctcagctggaggcacaaacaatctatccgattcctatgctgcaggattcttatggttgaacactttaggaatgctggccaatcagggcattgatgtcgtgatacggcactcattttttgaccatggatacaatcacctcgtggaccagaattttaacccattaccagactactggctctctctcctctacaagcgcctgatcggccccaaagtcttggctgtgcatgtggctgggctccagcggaagccacggcctggccgagtgatccgggacaaactaaggatttatgctcactgcacaaaccaccacaaccacaactacgttcgtgggtccattacactttttatcatcaacttgcatcgatcaagaaagaaaatcaagctggctgggactctcagagacaagctggttcaccagtacctgctgcagccctatgggcaggagggcctaaagtccaagtcagtgcaactgaatggccagcccttagtgatggtggacgacgggaccctcccagaattgaagccccgcccccttcgggccggccggacattggtcatccctccagtcaccatgggcttttttgtggtcaagaatgtcaatgctttggcctgccgctaccgataagctatcctcacactcatggctaccagtgggcctgctgggctgcttccactcctccactccagtagtatcctctgttttcagacatcctagcaaccagcccctgctgccccatcctgctggaatcaacacagacttgctctccaaagagactaaatgtcatagcgtgatcttagcctaggtaggccacatccatcccaaaggaaaatgtagacatcacctgtacctatataaggataaaggcatgtgtatagagcaaatgtttcccttcatgtgcactatgaaaacgagctgacagcacactcccaggagaaatgtttccagacaactccccatgatcctgtcacacagcattataaccacaaatccaaaccttagcctgctgctgctgctgccctcagaggaagatgaggaaggaaaaaaactgggtggacctacaaaaacccatcctctcccaactccttcttctctgcctctttcttgctgctgccctgagttttttgacacatctctttccataggggagtaatgggtgtgtcagccctggcctgctgggagagctgtttgtatgatttcccggctgatgtatgagcgtgcgcatctgggttcctgacagtggcatccatcactggcagttcttctgggaagcgggtgcttcaaaagtaaaattacaatcacactccagatttggtaagaaggttctattcctctgtgaatccagattcccccagagttgtaatgggagtcaagtaacaatattcattgagtggagagcagtttattaggcacaacaaaaagtagtcatcattcttcatgttgctatgagggagagtttgagtacaaagagaaagcatactgaaacatcaggtacacacacacaccccaactggacaaagcaaattagacctctccaaaattaagagaatattaggggctctatagggtaagcccttaattgtttggttaactcaaatcattatttttaaa

SEQ ID NO: 38514 - DNA, 377 bp, Homo sapiens
ctggtctttgaactcagactgaaacttacactattgggttctctcctacttggtaggtgatgattggactttataaatatcagtttttttcctttaaaaggtgctattaaaacattaaaattaaatccatagattaaaatactcagaatacctaggtcagacaaagtacttgcaactagaatatataaggaacacttaaaacttgataaaaagaataaaaaggacctccccaaaatggcaaaatatttcatatcatttttcagaagacataagtggccaataagcatgtacaaatatgttcaataaaattattcatcgggaaaagcaattaaaaccacaatgagattctgctacatctttactaagactaaatttgc

SEQ ID NO: 38515 - DNA, 435 bp, Homo sapiens
gagcattgcttgaacctgggaggcggaggttgcagtgagccaagactgtgccactgtactccagcctgggtgacagagcgagacgctgtctcaaaaaataaatgaaacaaacttaacattcatactttttatgtcaatagagttgaagttgcctttaactgtggtgaaataacataatatgaaatttacaattttaaccatttttaagtgtacaattcagtggcattaagtacattcatggtgttgtgtaaccatcatcactgtgtatttccagaactgttttattactccaaacagaaaccctgtacctattaaataataactcttcatttcccccttctccctactgctggtaacctcaattctattttctgtctctttgaatttgcctattctaggaacataaatatgtgtggaatcatgcaatctgtgttt

SEQ ID NO: 38516 - DNA, 598 bp, Homo sapiens
gatctgttatgggttgaattttctcctgcccaaattcttatgttgaagtccttacccctgatgggactagatttgtagacagggcctttaaggaggtgattagcgtagtgaggtcaccaggtgggccctgatgcaatctggcatcctcctaagaggacatgaggacacagacacatacagagggacgatcgtgtgaggacacagaggatggcatctgcacgccaaggagagaggcctcaggaggaaccagccctgcccacaccttgatctgggacttccagcctccagggttgtgagagagaaatgtctgttgtttaagccatgcagtctatggtgctttgttatggcagctccagcaagctaacctgggatctaaaatgatacttaaactggttcagtctgattcttaaactggttcagtggagctaggccaggctccctctgagcagatgttggtccctttgcaggcctgctgtgtgtgatgattgctaaccaggttatgacagtgatctttaagtaagtgggaatcttgtgagttttgaggttttgtttttttttttaatgaaatctacatgggatgtttcaaaaatagcagcct

SEQ ID NO: 38517 - DNA, 601 bp, Homo sapiens
atcctagcatctaggatcaggcctctcagcctcctccacacacagtggggctgattggcttagcctgggtttaaatccagctccttgtcacttcccaactagaaagacgcagtaacatgcaccccctcatgtggttgcctttagcatgtgataaatgaggaatgaaacgacaggacacgctgctccctgggcatcctgcctggcagagaacaaatgcttaataaatgccagccattacgactgccatcactagctacttcttctcttaaaagaaattcctgtgcaggcatggtggctcacacctgtaatctcagcactttgggaggccaaggtgggcggattgctttagcccaggagttcacaaccagcctggtcaacatagagaaaccctgcctctacaaaaaatacaaaattagctgggcctgctggtcccagctactgaggaggctgaggtgggagaattgcttgagcccaggaggtggaggttgcagtgagccaacatcatgccactgtattccagcctgggtgacagagagagaccctgtctcaaaaaaaaaaaaaaaaaaaaaaagaaagaaagaaagaaagaaagaaagaaaga

SEQ ID NO: 38518 - DNA, 378 bp, Homo sapiens
aaaaagtctgtacatgttcagtatatacctaaccatcatagacctaatcacatagtacatgatcagagggtggtcgaatctgaggatacagaaactccaagtatggagggctgactgtaatacatcattggatgatagataaagaaaatgtgtaatatccatccagtggaatataattctaccataaatacaaagtggggatgcgtgctacaacatggatgtgacttgagaaacctataatgaagccagtcacataccacatggcatgattctgattatatggaagtccataataggaaaatctatagagaccgaaagattgctgcttatcaagggctggggactggcagaagaagatgggaggataggagattgaca

SEQ ID NO: 38519 - DNA, 447 bp, Homo sapiens
gagccaaatggtgggggcaggggtagggggaagattcctttctccagcatgtaacagcattatgggagtgaattcagagcttctgtgtgttctgagccaagtgcctgctggaatgtggactgtaaatctctcatcgtcctcttcactgacccacaagcaacccctgctcctcccatctgcttcccgaccacctgcctttcagtttttctttatataaaaaacgttttccattctcctaccttcctctctgtctacctttgtatggtacatctcatccctcttctaaatatttccatctgaccacatttttccctaatgagacaggctcacaataggataaagtgtaacatttattcatttatctgctcagcaaatattattgagcacatactttgtcctaggcaccactttagttcttgagtggtcagcagtaaagaaaacagacaa

SEQ ID NO: 38520 - DNA, 288 bp, Homo sapiens
gtggatacatagtaggtatatatatatatttatgaggtatatgagatgttttgttacaatcatgtgatataaaataatcatcatggagaatgagttatccatcccctgaagcataaataaatgtaaattctgatgttgaatttatacaccaaattgttagattttagattttatcctcattttactttgcttattttcttatatactggtaagatcttatagatgctgtaatatagtaaaatgtagaatgtatgccataaaattaacctgaattagagtatttttgca

SEQ ID NO: 38521 - DNA, 366 bp, Homo sapiens
gttagtgtccacataagatccatcaaaaattaaatttaaatctaatagcctttggatttacgagagttgagatagcgtcttgctaaagaatagaacaagttatggattgaatgcttgaaattacagttcaggtaagctttacaagaatattatttattctgcactaactgcagcaagtagaagccttccacattagcataagataacatggtggctcccagaaagcatagtagtctgatcatactagttcaaactaaaagtctgaatgactttctggctgaaatttatcagctttcagagtagtacatgggatgcaagctattttttccctcccttctccaaagtcaccattgagtgaataatctg

SEQ ID NO: 38522 - DNA, 527 bp, Homo sapiens
atctattcctctgggcacactgacttccccatctttaatctaaatctttctcctaagctccagtcctacagctccacttgatagtcacttcaaactcaaaaacagcaacagtcctgccggcttctcaccctggctccagttcatagccatctgcctacttgacattgcttccaggacttttaatgggcatctcagacttatacccaaaatggaatttgctttgccctgtcttctgccactcacagtcagctcctcttctagtctccccagtttggggatgacactacaattcacccacttgctcaggccacaaactcaggagtcatccagtgctgctgcattcacttatgcaggttgagtccttcacaaggatgcctggccacagggccaacacgggttaccagcccacgctcttcccaccaaggtgtcctagcacccaggtacatgtgctgggaggaagggagcttctttacccagtggtgctgagaagtgcttctgcttctggccagagacagaattagcttttt

SEQ ID NO: 38523 - DNA, 644 bp, Homo sapiens
aactgacattaataccaatgttagaaaagaagaaaatttcaaacttgattaattaaatgtctgacttcagaagttaggaaaaaaaatacgaaatgatgctgaaaaaagtagaaggaaagaggaataaaggtaaaagccataattaatgaagtagagatccaagatacaaaagaaaggacaagccaaaattagttctttgaaaagcctaatgtaacatgtttagtggatatagattacaacaaaattaattatgtgcttatgtatcagcaaccaacaattagaaaatgtaattataaaaaagacagatacagagaaagatcaatgaaaccaaaagctatttccttgaaaagatcattaaaattgggccgggcgcggtggctcatgcctgtaatcgcagcactttaggaggccgaggcaggcacatcacaaggtcaggagatggataccatcctggctaacacggtgaaaccccgtctctactaaaaatacaaaaaattagctgggcgaggtggcgggcgcctgtagtcccagctactcaggaggctgaggcaggagaatggtgtgaacctgggaggcggagcttgcagtgagccaagatcgcaccactgcactccagcctgggtgacacagcaagactctgtttc

SEQ ID NO: 38524 - DNA, 285 bp, Homo sapiens
tttcttgaaagttttggtaaagtagatgatgattgtacatctgctgcaatgatggtggacctctgttagcagaaagatacagcgtctctcaatattctgccaaaagtttctatagcacttgtacctttcacacctacagcagctttatagaactgctgccattgggttcctgcaaagccttacattttcctattgtcttgaccctaaagaaatcaaatatgcagcatgggggaattttaggccttttccaaattgccatggtcagatcagatagcctttgacatt

SEQ ID NO: 38525 - DNA, 348 bp, Homo sapiens
ttttgagttccttcctctgtatagatgatgagatccaggccccgagtgtcttcataccttaagtcagattgccctgctagtgagcagtagagcgaggacccagcctaaggttacctaagtcccaagctagagtgttttctttaatatcaagccagccctgtccaaaattgcctttcatactgaactgaaattggaattgagtagttataagttccaagtctgcctcactgtggaattctaagagtaaaattcagataatttaattaacatttaatgcctgataattaccaggatctgtgttgagtgctggggatgcaggaatgaagacgacaacacattgtgccaaca

SEQ ID NO: 38526 - DNA, 918 bp, Homo sapiens
cggcaattacaggacgtatgattgttcagaagcactgcctgccggctgtttcctagcaccacatttcacgggagcaccaggttgagatgatggaattatttacttttaaatgtaacatctcgtacagtgctcaaatgcagacgtgaacgtggactgtaaccttaaaaacaaaggcagtacatgccacactactacccttcctgctcttgtgcgcacacctaccctgatgatgcagccttcactggatatcaaaccatttatgtcttttccagtggacagtagttctgctgttgggctctttccaaattttaacacaatggatcctgtgcaaaaagcggttattaaccatacatttggagtatccattcccccaaagaagaaacaagttatttcttgtaatgtctgtcagcttcgctttaactcagatagccaggccgaggcccactacaaaggaagtaaacatgccaagaaggtcaaagcactagacgcaacgaaaaataaacccaaaatggttccttccaaggacagcgcaaaggctaatcccagctgctccatcactccaatcacaggcaacaactctgacaaatcagaagataaagggaagttaaaagccagcagttccagtcagccatcaagctctgaaagtggctcatttctcctcaaatctggcacaacacccctgccacctggagcagccacttctccctccaagagcacaaattggcagcctccccggctacatgctgtggtagaaactccccaaagaaggaaaaaagcccaacaacactcactctactcggtccatatgacgaagtgggcttgggacaactccctggtcccaacatagcagggcccacaaccaaggcacaccagagcaccaaaaccacggcgcgaaacccggaaaagagggcccggcac

SEQ ID NO: 38527 - DNA, 760 bp, Homo sapiens
ttctagagagatcattcttgcaaagtatggcaaaggcttggcaaagtagactataagcttttggaaaacagggactatgtcttcttcaacaatgtgtacacaacaagtagcaggttgtttggcacatggcagatgctcgatacgttgatctggcagcggcatgggagatggatccaaagagattaaaactggagtgaaggagtccagtaatgatgtgaagagatgagggtctgaactaggacagaagtcagtcacagggatggatttgagacgttttggagggttacacatgcagtacatgccacactactacccttcctgctcttgtgcgcacacctaccctgatgatgcagccttcactggatatcaaaccatttatgtcttttccagtggacagtagttctgctgttgggctctttccaaattttaacacataaacttctgaccgtcctacctgggcttgcctctgttcatgctgtccggggaagcagaaaccagaataaaggggagaacaagatggatcctgtgcaaaaagcggttattaaccatacatttggagtatccattcccccaaagaagaaacaagttatttcttgtaatgtctgtcagcttcgctttaactcagatgggaaggaaggagccgcaagccaaggaatgtgggcaacctctagaagctggaaaagacaaagaaatggattttcccttaaagcctccagaaggaatgcagccctgctgacacctcgatgttagcccagtgaga

SEQ ID NO: 38528 - DNA, 2159 bp, Homo sapiens
ttctagagagatcattcttgcaaagtatggcaaaggcttggcaaagtagactataagcttttggaaaacagggactatgtcttcttcaacaatgtgtacacaacaagtagcaggttgtttggcacatggcagatgctcgatacgttgatctggcagcggcatgggagatggatccaaagagattaaaactggagtgaaggagtccagtaatgatgtgaagagatgagggtctgaactaggacagaagtcagtcacagggatggatttgagacgttttggagggttacacatgcagtacatgccacactactacccttcctgctcttgtgcgcacacctaccctgatgatgcagccttcactggatatcaaaccatttatgtcttttccagtggacagtagttctgctgttgggctctttccaaattttaacacaatggatcctgtgcaaaaagcggttattaaccatacatttggagtatccattcccccaaagaagaaacaagttatttcttgtaatgtctgtcagcttcgctttaactcagatagccaggccgaggcccactacaaaggaagtaaacatgccaagaaggtcaaagcactagacgcaacgaaaaataaacccaaaatggttccttccaaggacagcgcaaaggctaatcccagctgctccatcactccaatcacaggcaacaactctgacaaatcagaagataaagggaagttaaaagccagcagttccagtcagccatcaagctctgaaagtggctcatttctcctcaaatctggcacaacacccctgccacctggagcagccacttctccctccaagagcacaaatggagctcccggtactgttgttgaatcagaagaagaaaaagccaaaaaattactttattgttcactatgcaaagtggctgtgaactccctgtcacagctagaggcacacaacacaggatctaaacacaagaccatggttgaagctcgtaatggggctggtccaattaaatcctatcctagacctggatcaagattaaagatgcagaatggcagtaaggggtcaggactacagaacaagacatttcattgtgaaatctgtgatgttcatgttaattcagaaattcaactcaaacagcacatttctagccgaaggcataaagatcgagttgcagggaaaccactgaagccaaaatacagcccttacaacaaactccagcggagcccgagtattctagcagcaaaacttgcattccagaaagatatgatgaagcctttggccccagccttcctgtcctcacctctcgcagcggcggcagccgtgtcctcagcgctgtcactcccaccccggccctctgcctcgctcttccaggctccagccattcctccagctcttctgaggcctgggcatgggccaatccgcgccactcctgcctccatcctctttgctccgtactaacgtctgcaaaccccaagacgtttgaggccagtaggaagttgagaaagaaagccacaaggattcagcaatttaagcagtttgtgttgcagtaccccccattcacccacaaaatgcagcccaccacccagtcccccaattccagagagaaacacatcactagattgacgagggcttttagagactgctcctataattgaggaatcagcagcataggctttatctccctacttcctcccccaccctaccgcgttcaatttgtgtatctcagatatttgatttcttgagcatgtattggtcagaaagaaaaagaaagaaaaccattctctatttttccatgggtatgatctggcttaaaacaatatggaatattttcctgacagacttgaaaactaggatcttcctcagatgtctgtaaataactctggtatccaactgggtgtattctagtgtggaacaaaaaacagtgaacacaagtgcttacttgtggatactatcttaccaacggatcacaaagttctctttttggtgtactgttgttgacagggattgtgtactgtttcgacccaagtactgctgtatcctgtgtagtactagatctgtatctcttgtctgaattaaacatttttagttgctgtgtaaatgttaggaagcaaagtagctttggattttctctgtaagagaataaaagataaaataatgtatttt

SEQ ID NO: 38529 - DNA, 2105 bp, Homo sapiens
ttctagagagatcattcttgcaaagtatggcaaaggcttggcaaagtagactataagcttttggaaaacagggactatgtcttcttcaacaatgtgtacacaacaagtagcaggttgtttggcacatggcagatgctcgatacgttgatctggcagcggcatgggagatggatccaaagagattaaaactggagtgaaggagtccagtaatgatgtgaagagatgagggtctgaactaggacagaagtcagtcacagggatggatttgagacgttttggagggttacacatgcagtacatgccacactactacccttcctgctcttgtgcgcacacctaccctgatgatgcagccttcactggatatcaaaccatttatgtcttttccagtggacagtagttctgctgttgggctctttccaaattttaacacaatggatcctgtgcaaaaagcggttattaaccatacatttggagtatccattcccccaaagaagaaacaagttatttcttgtaatgtctgtcagcttcgctttaactcagatagccaggccgaggcccactacaaaggaagtaaacatgccaagaaggtcaaagcactagacgcaacgaaaaataaacccaaaatggttccttccaaggacagcgcaaaggctaatcccagctgctccatcactccaatcacaggcaacaactctgacaaatcagaagataaagggaagttaaaagccagcagttccagtcagccatcaagctctgaaagtggctcatttctcctcaaatctggcacaacacccctgccacctggagcagccacttctccctccaagagcacaaatggagctcccggtactgttgttgaatcagaagaagaaaaagccaaaaaattactttattgttcactatgcaaagtggctgtgaactccctgtcacagctagaggcacacaacacaggatctaaacacaagaccatggttgaagctcgtaatggggctggtccaattaaatcctatcctagacctggatcaagattaaagatgcagaatggcagtaaggggtcaggactacagaacaagacatttcattgtgaaatctgtgatgttcatgttaattcagaaattcaactcaaacagcacatttctagccgaaggcataaagatcgagttgcagggaaaccactgaagccaaaatacagcccttacaacaaactccagcggagcccgagtattctagcagcaaaacttgcattccagaaagatatgatgaagcctttggccccagccttcctgtcctcacctctcgcagcggcggcagccgtgtcctcagcgctgtcactcccaccccggccctctgcctcgctcttccaggctccagccattcctccagctcttctgaggcctgggcatgggccaatccgcgccactcctgcctccatcctctttgctccgtactaacgtctgcaaaccccaagacgtttgaggccagtaggaagttgagaaagaaagccacaaggattcagcaatttaagcagtttgtgttgcagtaccccccattcacccacaaaatgcagcccaccacccagtcccccaattccagagagaaacacatcactagattgacgagggcttttagagactgctcctataattgaggaatcagcagcataggctttatctccctacttcctcccccaccctaccgcgttcaatttgtgtatctcagatatttgatttcttgagcatgtattggtcagaaagaaaaagaaagaaaaccattctctatttttccatgggtatgatctggcttaaaacaatatggaatattttcctgacagacttgtattctagtgtggaacaaaaaacagtgaacacaagtgcttacttgtggatactatcttaccaacggatcacaaagttctctttttggtgtactgttgttgacagggattgtgtactgtttcgacccaagtactgctgtatcctgtgtagtactagatctgtatctcttgtctgaattaaacatttttagttgctgtgtaaatgttaggaagcaaagtagctttggattttctctgtaagagaataaaagataaaataatgtatttt

SEQ ID NO: 38530 - DNA, 2007 bp, Homo sapiens
ttctagagagatcattcttgcaaagtatggcaaaggcttggcaaagtagactataagcttttggaaaacagggactatgtcttcttcaacaatgtgtacacaacaagtagcaggttgtttggcacatggcagatgctcggcagtacatgccacactactacccttcctgctcttgtgcgcacacctaccctgatgatgcagccttcactggatatcaaaccatttatgtcttttccagtggacagtagttctgctgttgggctctttccaaattttaacacaatggatcctgtgcaaaaagcggttattaaccatacatttggagtatccattcccccaaagaagaaacaagttatttcttgtaatgtctgtcagcttcgctttaactcagatagccaggccgaggcccactacaaaggaagtaaacatgccaagaaggtcaaagcactagacgcaacgaaaaataaacccaaaatggttccttccaaggacagcgcaaaggctaatcccagctgctccatcactccaatcacaggcaacaactctgacaaatcagaagataaagggaagttaaaagccagcagttccagtcagccatcaagctctgaaagtggctcatttctcctcaaatctggcacaacacccctgccacctggagcagccacttctccctccaagagcacaaatggagctcccggtactgttgttgaatcagaagaagaaaaagccaaaaaattactttattgttcactatgcaaagtggctgtgaactccctgtcacagctagaggcacacaacacaggatctaaacacaagaccatggttgaagctcgtaatggggctggtccaattaaatcctatcctagacctggatcaagattaaagatgcagaatggcagtaaggggtcaggactacagaacaagacatttcattgtgaaatctgtgatgttcatgttaattcagaaattcaactcaaacagcacatttctagccgaaggcataaagatcgagttgcagggaaaccactgaagccaaaatacagcccttacaacaaactccagcggagcccgagtattctagcagcaaaacttgcattccagaaagatatgatgaagcctttggccccagccttcctgtcctcacctctcgcagcggcggcagccgtgtcctcagcgctgtcactcccaccccggccctctgcctcgctcttccaggctccagccattcctccagctcttctgaggcctgggcatgggccaatccgcgccactcctgcctccatcctctttgctccgtactaacgtctgcaaaccccaagacgtttgaggccagtaggaagttgagaaagaaagccacaaggattcagcaatttaagcagtttgtgttgcagtaccccccattcacccacaaaatgcagcccaccacccagtcccccaattccagagagaaacacatcactagattgacgagggcttttagagactgctcctataattgaggaatcagcagcataggctttatctccctacttcctcccccaccctaccgcgttcaatttgtgtatctcagatatttgatttcttgagcatgtattggtcagaaagaaaaagaaagaaaaccattctctatttttccatgggtatgatctggcttaaaacaatatggaatattttcctgacagacttgaaaactaggatcttcctcagatgtctgtaaataactctggtatccaactgggtgtattctagtgtggaacaaaaaacagtgaacacaagtgcttacttgtggatactatcttaccaacggatcacaaagttctctttttggtgtactgttgttgacagggattgtgtactgtttcgacccaagtactgctgtatcctgtgtagtactagatctgtatctcttgtctgaattaaacatttttagttgctgtgtaaatgttaggaagcaaagtagctttggattttctctgtaagagaataaaagataaaataatgtatttt

SEQ ID NO: 38531 - DNA, 2041 bp, Homo sapiens
cggcaattacaggacgtatgattgttcagaagcactgcctgccggctgtttcctagcaccacatttcacgggagcaccaggttgagatgatggaattatttacttttaaatgtaacatctcgtacagtgctcaaatgcagacgtgaacgtggactgtaaccttaaaaacaaaggcagtacatgccacactactacccttcctgctcttgtgcgcacacctaccctgatgatgcagccttcactggatatcaaaccatttatgtcttttccagtggacagtagttctgctgttgggctctttccaaattttaacacaatggatcctgtgcaaaaagcggttattaaccatacatttggagtatccattcccccaaagaagaaacaagttatttcttgtaatgtctgtcagcttcgctttaactcagatagccaggccgaggcccactacaaaggaagtaaacatgccaagaaggtcaaagcactagacgcaacgaaaaataaacccaaaatggttccttccaaggacagcgcaaaggctaatcccagctgctccatcactccaatcacaggcaacaactctgacaaatcagaagataaagggaagttaaaagccagcagttccagtcagccatcaagctctgaaagtggctcatttctcctcaaatctggcacaacacccctgccacctggagcagccacttctccctccaagagcacaaatggagctcccggtactgttgttgaatcagaagaagaaaaagccaaaaaattactttattgttcactatgcaaagtggctgtgaactccctgtcacagctagaggcacacaacacaggatctaaacacaagaccatggttgaagctcgtaatggggctggtccaattaaatcctatcctagacctggatcaagattaaagatgcagaatggcagtaaggggtcaggactacagaacaagacatttcattgtgaaatctgtgatgttcatgttaattcagaaattcaactcaaacagcacatttctagccgaaggcataaagatcgagttgcagggaaaccactgaagccaaaatacagcccttacaacaaactccagcggagcccgagtattctagcagcaaaacttgcattccagaaagatatgatgaagcctttggccccagccttcctgtcctcacctctcgcagcggcggcagccgtgtcctcagcgctgtcactcccaccccggccctctgcctcgctcttccaggctccagccattcctccagctcttctgaggcctgggcatgggccaatccgcgccactcctgcctccatcctctttgctccgtactaacgtctgcaaaccccaagacgtttgaggccagtaggaagttgagaaagaaagccacaaggattcagcaatttaagcagtttgtgttgcagtaccccccattcacccacaaaatgcagcccaccacccagtcccccaattccagagagaaacacatcactagattgacgagggcttttagagactgctcctataattgaggaatcagcagcataggctttatctccctacttcctcccccaccctaccgcgttcaatttgtgtatctcagatatttgatttcttgagcatgtattggtcagaaagaaaaagaaagaaaaccattctctatttttccatgggtatgatctggcttaaaacaatatggaatattttcctgacagacttgaaaactaggatcttcctcagatgtctgtaaataactctggtatccaactgggtgtattctagtgtggaacaaaaaacagtgaacacaagtgcttacttgtggatactatcttaccaacggatcacaaagttctctttttggtgtactgttgttgacagggattgtgtactgtttcgacccaagtactgctgtatcctgtgtagtactagatctgtatctcttgtctgaattaaacatttttagttgctgtgtaaatgttaggaagcaaagtagctttggattttctctgtaagagaataaaagataaaataatgtatttt

SEQ ID NO: 38532 - DNA, 1978 bp, Homo sapiens
tctgcaataaaaccggtggcaggttaatgtacctctcagctcctgatacatttattatacagaaattatagaccggctgacttaactattgctaagaaacatgcttcttggcagtacatgccacactactacccttcctgctcttgtgcgcacacctaccctgatgatgcagccttcactggatatcaaaccatttatgtcttttccagtggacagtagttctgctgttgggctctttccaaattttaacacaatggatcctgtgcaaaaagcggttattaaccatacatttggagtatccattcccccaaagaagaaacaagttatttcttgtaatgtctgtcagcttcgctttaactcagatagccaggccgaggcccactacaaaggaagtaaacatgccaagaaggtcaaagcactagacgcaacgaaaaataaacccaaaatggttccttccaaggacagcgcaaaggctaatcccagctgctccatcactccaatcacaggcaacaactctgacaaatcagaagataaagggaagttaaaagccagcagttccagtcagccatcaagctctgaaagtggctcatttctcctcaaatctggcacaacacccctgccacctggagcagccacttctccctccaagagcacaaatggagctcccggtactgttgttgaatcagaagaagaaaaagccaaaaaattactttattgttcactatgcaaagtggctgtgaactccctgtcacagctagaggcacacaacacaggatctaaacacaagaccatggttgaagctcgtaatggggctggtccaattaaatcctatcctagacctggatcaagattaaagatgcagaatggcagtaaggggtcaggactacagaacaagacatttcattgtgaaatctgtgatgttcatgttaattcagaaattcaactcaaacagcacatttctagccgaaggcataaagatcgagttgcagggaaaccactgaagccaaaatacagcccttacaacaaactccagcggagcccgagtattctagcagcaaaacttgcattccagaaagatatgatgaagcctttggccccagccttcctgtcctcacctctcgcagcggcggcagccgtgtcctcagcgctgtcactcccaccccggccctctgcctcgctcttccaggctccagccattcctccagctcttctgaggcctgggcatgggccaatccgcgccactcctgcctccatcctctttgctccgtactaacgtctgcaaaccccaagacgtttgaggccagtaggaagttgagaaagaaagccacaaggattcagcaatttaagcagtttgtgttgcagtaccccccattcacccacaaaatgcagcccaccacccagtcccccaattccagagagaaacacatcactagattgacgagggcttttagagactgctcctataattgaggaatcagcagcataggctttatctccctacttcctcccccaccctaccgcgttcaatttgtgtatctcagatatttgatttcttgagcatgtattggtcagaaagaaaaagaaagaaaaccattctctatttttccatgggtatgatctggcttaaaacaatatggaatattttcctgacagacttgaaaactaggatcttcctcagatgtctgtaaataactctggtatccaactgggtgtattctagtgtggaacaaaaaacagtgaacacaagtgcttacttgtggatactatcttaccaacggatcacaaagttctctttttggtgtactgttgttgacagggattgtgtactgtttcgacccaagtactgctgtatcctgtgtagtactagatctgtatctcttgtctgaattaaacatttttagttgctgtgtaaatgttaggaagcaaagtagctttggattttctctgtaagagaataaaagataaaataatgtatttt

SEQ ID NO: 38533 - DNA, 1982 bp, Homo sapiens
acaactagcagtgcctaccataagtacctagagtagtgccttacatggaataaatgctcaccaaatgacattctcattaaatcatctggaagataattagtgtgaaaggaataggcagtacatgccacactactacccttcctgctcttgtgcgcacacctaccctgatgatgcagccttcactggatatcaaaccatttatgtcttttccagtggacagtagttctgctgttgggctctttccaaattttaacacaatggatcctgtgcaaaaagcggttattaaccatacatttggagtatccattcccccaaagaagaaacaagttatttcttgtaatgtctgtcagcttcgctttaactcagatagccaggccgaggcccactacaaaggaagtaaacatgccaagaaggtcaaagcactagacgcaacgaaaaataaacccaaaatggttccttccaaggacagcgcaaaggctaatcccagctgctccatcactccaatcacaggcaacaactctgacaaatcagaagataaagggaagttaaaagccagcagttccagtcagccatcaagctctgaaagtggctcatttctcctcaaatctggcacaacacccctgccacctggagcagccacttctccctccaagagcacaaatggagctcccggtactgttgttgaatcagaagaagaaaaagccaaaaaattactttattgttcactatgcaaagtggctgtgaactccctgtcacagctagaggcacacaacacaggatctaaacacaagaccatggttgaagctcgtaatggggctggtccaattaaatcctatcctagacctggatcaagattaaagatgcagaatggcagtaaggggtcaggactacagaacaagacatttcattgtgaaatctgtgatgttcatgttaattcagaaattcaactcaaacagcacatttctagccgaaggcataaagatcgagttgcagggaaaccactgaagccaaaatacagcccttacaacaaactccagcggagcccgagtattctagcagcaaaacttgcattccagaaagatatgatgaagcctttggccccagccttcctgtcctcacctctcgcagcggcggcagccgtgtcctcagcgctgtcactcccaccccggccctctgcctcgctcttccaggctccagccattcctccagctcttctgaggcctgggcatgggccaatccgcgccactcctgcctccatcctctttgctccgtactaacgtctgcaaaccccaagacgtttgaggccagtaggaagttgagaaagaaagccacaaggattcagcaatttaagcagtttgtgttgcagtaccccccattcacccacaaaatgcagcccaccacccagtcccccaattccagagagaaacacatcactagattgacgagggcttttagagactgctcctataattgaggaatcagcagcataggctttatctccctacttcctcccccaccctaccgcgttcaatttgtgtatctcagatatttgatttcttgagcatgtattggtcagaaagaaaaagaaagaaaaccattctctatttttccatgggtatgatctggcttaaaacaatatggaatattttcctgacagacttgaaaactaggatcttcctcagatgtctgtaaataactctggtatccaactgggtgtattctagtgtggaacaaaaaacagtgaacacaagtgcttacttgtggatactatcttaccaacggatcacaaagttctctttttggtgtactgttgttgacagggattgtgtactgtttcgacccaagtactgctgtatcctgtgtagtactagatctgtatctcttgtctgaattaaacatttttagttgctgtgtaaatgttaggaagcaaagtagctttggattttctctgtaagagaataaaagataaaataatgtatttt

SEQ ID NO: 38534 - DNA, 1458 bp, Homo sapiens
  misc_feature (11)..(12): n is a, c, g, or t
  misc_feature (22)..(22): n is a, c, g, or t
  misc_feature (26)..(26): n is a, c, g, or t
  misc_feature (28)..(29): n is a, c, g, or t
  misc_feature (31)..(31): n is a, c, g, or t
ctcatagctgnntcctgagggnaaancnncntcagtgagagaggtgtgaactgactgtgttcttgactcttcaggaaccctaaagtcctgaactcattacctaacctcaatgcagcttatctaagagaagggaaggatcacacttattctcaaaacacaaaacaaaagtctctaggtctcgtcatggtttaagacaagcctgaattttgcattgaacttcatcatctaagctggaaacttctgggcatgttttttttcctggtgagcagcagcataaaatagctttagaatttattcagaggcctttccctgtgccctagcacacaggagcaaagaccaccaaataaaagaaagctatgccatgagccactgaaaccagcattgtgaaaataatcatttcttgacttctgagagtgaagattttcaaaatttaagacttcttaatgttggtgttttacttatgaaaagatgcctgtggtgctgttattcaaaaacaggatcgccaccccattcctggttttctccctcccttaggcaaaacttgcattccagaaagatatgatgaagcctttggccccagccttcctgtcctcacctctcgcagcggcggcagccgtgtcctcagcgctgtcactcccaccccggccctctgcctcgctcttccaggctccagccattcctccagctcttctgaggcctgggcatgggccaatccgcgccactcctgcctccatcctctttgctccgtactaacgtctgcaaaccccaagacgtttgaggccagtaggaagttgagaaagaaagccacaaggattcagcaatttaagcagtttgtgttgcagtaccccccattcacccacaaaatgcagcccaccacccagtcccccaattccagagagaaacacatcactagattgacgagggcttttagagactgctcctataattgaggaatcagcagcataggctttatctccctacttcctcccccaccctaccgcgttcaatttgtgtatctcagatatttgatttcttgagcatgtattggtcagaaagaaaaagaaagaaaaccattctctatttttccatgggtatgatctggcttaaaacaatatggaatattttcctgacagacttgaaaactaggatcttcctcagatgtctgtaaataactctggtatccaactgggtgtattctagtgtggaacaaaaaacagtgaacacaagtgcttacttgtggatactatcttaccaacggatcacaaagttctctttttggtgtactgttgttgacagggattgtgtactgtttcgacccaagtactgctgtatcctgtgtagtactagatctgtatctcttgtctgaattaaacatttttagttgctgtgtaaatgttaggaagcaaagtagctttggattttctctgtaagagaataaaagataaaataatgtatttt

SEQ ID NO: 38535 - DNA, 2080 bp, Homo sapiens
cggcaattacaggacgtatgattgttcagaagcactgcctgccggctgtttcctagcaccacatttcacgggagcaccaggttgagatgatggaattatttacttttaaatgtaacatctcgtacagtgctcaaatgcagacgtgaacgtggactgtaaccttaaaaacaaaggcagtacatgccacactactacccttcctgctcttgtgcgcacacctaccctgatgatgcagccttcactggatatcaaaccatttatgtcttttccagtggacagtagttctgctgttgggctctttccaaattttaacacaaaaagaagaggcttatttgagaccaataaattttgccagatggatcctgtgcaaaaagcggttattaaccatacatttggagtatccattcccccaaagaagaaacaagttatttcttgtaatgtctgtcagcttcgctttaactcagatagccaggccgaggcccactacaaaggaagtaaacatgccaagaaggtcaaagcactagacgcaacgaaaaataaacccaaaatggttccttccaaggacagcgcaaaggctaatcccagctgctccatcactccaatcacaggcaacaactctgacaaatcagaagataaagggaagttaaaagccagcagttccagtcagccatcaagctctgaaagtggctcatttctcctcaaatctggcacaacacccctgccacctggagcagccacttctccctccaagagcacaaatggagctcccggtactgttgttgaatcagaagaagaaaaagccaaaaaattactttattgttcactatgcaaagtggctgtgaactccctgtcacagctagaggcacacaacacaggatctaaacacaagaccatggttgaagctcgtaatggggctggtccaattaaatcctatcctagacctggatcaagattaaagatgcagaatggcagtaaggggtcaggactacagaacaagacatttcattgtgaaatctgtgatgttcatgttaattcagaaattcaactcaaacagcacatttctagccgaaggcataaagatcgagttgcagggaaaccactgaagccaaaatacagcccttacaacaaactccagcggagcccgagtattctagcagcaaaacttgcattccagaaagatatgatgaagcctttggccccagccttcctgtcctcacctctcgcagcggcggcagccgtgtcctcagcgctgtcactcccaccccggccctctgcctcgctcttccaggctccagccattcctccagctcttctgaggcctgggcatgggccaatccgcgccactcctgcctccatcctctttgctccgtactaacgtctgcaaaccccaagacgtttgaggccagtaggaagttgagaaagaaagccacaaggattcagcaatttaagcagtttgtgttgcagtaccccccattcacccacaaaatgcagcccaccacccagtcccccaattccagagagaaacacatcactagattgacgagggcttttagagactgctcctataattgaggaatcagcagcataggctttatctccctacttcctcccccaccctaccgcgttcaatttgtgtatctcagatatttgatttcttgagcatgtattggtcagaaagaaaaagaaagaaaaccattctctatttttccatgggtatgatctggcttaaaacaatatggaatattttcctgacagacttgaaaactaggatcttcctcagatgtctgtaaataactctggtatccaactgggtgtattctagtgtggaacaaaaaacagtgaacacaagtgcttacttgtggatactatcttaccaacggatcacaaagttctctttttggtgtactgttgttgacagggattgtgtactgtttcgacccaagtactgctgtatcctgtgtagtactagatctgtatctcttgtctgaattaaacatttttagttgctgtgtaaatgttaggaagcaaagtagctttggattttctctgtaagagaataaaagataaaataatgtatttt

SEQ ID NO: 38536 - DNA, 618 bp, Homo sapiens
tgggaattcttacttattctgaagcctggtggaaatgcaagttctcgagctctacttactgaatcagggctccagagctgggacccaacacgccagcttttaccaagccctctcagtggttctgatggcctagagtcagaaccagtgccttagactgtgcctggtctatatgattacccctgtcaagttgctagatcataggtattattattgagtacatgagggtatttctcccttacagcagtattgtgagtctcttggggaacaggcaggacttgtgtcgtattcatccacaaaatcctaacacctagcaccatggccaacacataatcaacactcaagaaatgctggatggctgaattaacaagtgaacaaagcaactcaagctgggcttcccagcatcatttattcacctccctcttctgctttgcccaggtgccatgcacatacaggccattgtcatcctgactgttgctttccaaaaggacaaggtggtagagatagggcccttagtatattcaacaggagtcaaaagaaatgaattcctggcctagttctgccacttaggagccttcataagcctctttcagcctcagtgtctcatcaatgaacagaaaa

SEQ ID NO: 38537 - DNA, 309 bp, Homo sapiens
atggtgaaaacccatcttaactaaaaatataaaaaattagccaggcatggtggcgggcgcctgtagtcccagctactcggaaggctgaggcaggagaatggcgtgaacccaggaggcggagcttgcagtgagctgagatcacgccactgcactccagcctgggcgacagagtgagactctgtctcaaaaacaacaacaaaaacaacaacaaacaaacaaaaatccaaaatggacagagacttctaaatgaacccccagtgatatcagacagatgaaaagactgtttttatgtcataacatgtttaacgt

SEQ ID NO: 38538 - DNA, 484 bp, Homo sapiens
aaaaaattgtcattaagaaatacttttactttattaccgggcatactgctatcataaatgggcattagccaggaatataaaaagcattctttggttttaaaaatatatatatatatatatttctaaataagaggatttatgtcatggacttagttataacatttttctcggagacaaaacaacttcttagaattcagggggaaaaaaatacaatgctaagggaaacagaggcttgggcaaacctaggtagccttgagggataatctggcttctactccaagataagttcagctcttacaggagacagaagctttcagggaattaatgtagctgagggaagaaaagcaaatgggagtgataccaacagtgaccaaccagaagcttatctcctgtcaaagtgacagccacagaggagctctggccattgctatggaagaccatggcccctctcccaaaaaaaaaaatttctcagataccttcaaaa

SEQ ID NO: 38539 - DNA, 631 bp, Homo sapiens
aacacacagatttagtgaataccatttcattaaacatattttttaagtgtatctgaaacattctttttattgatgggaatgctaagacatagagtatgaatatttaacactttaataatttttgccaaattacgttccaaaattatacttctgttaacagtacttaagattgcccatttttctgataacattcattgatgttgttagtgtttccgatttttgccctttacttaaagtcagctgctgtattcttagcacagtgctttctgtgacagatgtttcagatgacagtgcttcctgcctgcaggctcatctgtctgcccctggtagctttcaggctctcaggcaccctccctaatgggaccgactggggtcaagggctctgaaaatgctgcccaccctggcccaagggcctcctgaacaggtaggctgggggtgggggtgagtccggtggcttagatgacaaatggaggtagaggacgcattctcgcctgttatttcgatttttttctctcctcaccctgaccgtcacgttctcaccttttccacctcaatccccagtcacactagcttcccaggattaaaatggtctctctctcatgaaacttgtttagaaatctagaagcattaa

SEQ ID NO: 38540 - DNA, 430 bp, Homo sapiens
ggcggagcttgcagtgagctgagatcacgccactgcactgcagcctgagtgacagagtgagactccatctcaaaaaaaaaaaaaaaaaaaaaaaagtgcatggcacctccctcttcactgtttctctctcctgctcctccatagtaagacgtgcttgcttccccttcaccttctaccatgattgtaagtttcctgaggcctcccagtcatgcttcctgttaagcctgtggaactgtgagtcaattaaacctcttttcttcataaattacccagtttcaggtagagcttgatagcagtgtgagaatggactaatatatcatccctggttgttttaagatgcaaactttgaccaggcacagtggctcatgccagtaatcccaacacattgggaggccaaggcagaaggatcacttgagtccaggagttcaag

SEQ ID NO: 38541 - DNA, 807 bp, Homo sapiens
acagaaccttaggctgggcttgtaaatatcagactcccatatgtgttgggggaaagagaagaattaataaacctatgaggctgacactagcaggtattcacatggagaagatgagaaatagagccccatgccactccagacacacaaacgcattccagatgcactgactactgtcacgtgaaaagcaacacaacaaatctctagaagaaaaagtaagaggcaatgccttcatgtaaggtccctaagacgggattctggcttctcaataaatgctgctttattgctgtgtaagaagatagcacagacttagtgggttagagcaacagaaatgtgcagcaatgtactctcatcacgctgaggtcagaagtcctaaatgagtttatgggggctaaagccaaggtgttgtcagagctggctccttctcaagattctggggaacaatccacttccttgcctttctcgcatgttggtggtgacctgtactctgacactcatggccccttcctccaatttcaaagtgggtcactcctatctcagcttccaccttcacatcaccatctcctcttctgcagccaaatctccctcttaaaaataatgacccttgtgatgacattcagggcccacctggataacccaagataattcctcccatctcaagatccttaacttcatcacatctgcaaagctccttttgccatatgaggtcacacattcagaggtaccagagactagaacctgaatatctttgggggccattaattagccagccacaaatatgttcaattgttatttgctcaataaaacaag

SEQ ID NO: 38542 - DNA, 780 bp, Homo sapiens
tctactgaaagttggtagcaactttgtacatttctgtgttgcctttgaccaaaggacccagctgagcattggaatagctcacgcagcatgtcgctaagtgggaaaggcttaaaggcaaaggaggtttaacacccagataacatggtggagtagttgagagtacagtgttcacttcctgccctcccatttcctgaaggtctgaccaagtcatttaatcttgatgtatctcagtccatctataaattgggtattataataatagtgagatagaaaacaggcaggacttgttttctgatcataaccctgctgaccaaaacaggatgtggtccagatgagataaggtttaaaaaaacactagccaaagccagcaaacgggaacgagggtgatccctggctgccctcattgctcatcagcatgggacactctcaccagtgccatgacagtttacaattgccatgacaacgacctggcagttaccatccctttccatggtaacgacccagaagttacctttcctaggaagtcttaaatagcttgcccctcaatttgcattaacccaccccttaatttgcatgtgactaaaagtgggtataaaatacaatttccaagagcccctatgtggccaactcagggtgtactgcctatgagttagccctgctccacaagaagcagtgcccttcaataaagaattgtggtctaacaccactggctcacccttgaattccttccttgatgaagccaagaaccctcccaggctaagccccaatttggggactcac

SEQ ID NO: 38543 - DNA, 898 bp, Homo sapiens
gtcctaatgggtgcaagactgtataaatatccacatttgacagacacattcagagatgcatagagttcattagatatttctttgatgtgacgtttgtacttgaactatatattattccagtaccttacatcttagatgtagaagtcgctaggtcaaaggatgtgttttgaatttaaaacatgttgaatgactgttctcacattttaaacaggagtaatctactacaaaccagccagcctaaccactgcccctgctctcagcaatgatgggctcatcagcttggtaagagagaacattactcacaatcttgcttctcaatcttaatctatttgtgcttggtgttttatataacatcactaaccctaatacttgagtatttactttggcccttctgtccattttatccaaaagcaaacagatagccttcaagggacaccattgccttaagcagaatatgcctcctaagcattgaaagcctttgacccatctgatatccaagttctggcttattatgttattagggccttgaataactttatgtatattattatggactgaatgtatccccacaaattcatgttgaccctctgacctccagtgtgatggtctttggagatgaggcctttggcaggtgattagagctagatgaggtcatgagagggaggccctcatgaaaggctcagtggcctgataagaagaaacaccagagagcttgctctgtttctctgcctacctggcgcacacatacagaagaggtgatatgaccacacagcaacatggtggccaccagcaagctaggagagggatcagaatgaaacctattttgctggcaccttgatcttgaaattctagcctccagaactgtgagaaataaaattcttttattgaagccacccag

SEQ ID NO: 38544 - DNA, 256 bp, Homo sapiens
accaggtggtaaacaaagtgtttgcccttatagaaaaacacttcccatacaactgaaggtgaatacacaacagaacaacgacagtcccagaagcttccccgggccttggtgcattgttatgtagatgagcttttgctaaagatggctgcaggtgcagccaggagtccctggaatatgcagaaagactcctggctttgtgtaaatcgcttccagctgatttagacagttagcaaagggcatttattcagcaactggg

SEQ ID NO: 38545 - DNA, 556 bp, Homo sapiens
gccgcacatctgaatactgggtgccatgtgcccgaccctccctgcaggctgcgtcctgaggcttcccgaggcgggtctggcctccccagaaggtcggcagtcagcagagctgcgtccggatctgcttgtgctcacctgggtcatcctcctacctgttccaggccacaaataacatgaatggatgcagcggaaaatgctgtaaagggagtgggctccacgctcatcactcaccagaaaatactgcggggaggagtcccagggcttgagggagggggctccacgctcaccactgactcagaagataccgcaagggagcactctcgctgggaggagtcccaggtcttggcgacagtcctactcactgccatgacttacaacggggaggcatcagccaggggagaaggtgcggcggggccggggagaccagccgcagcgtggaaccctccccagcggagccacacgggacgctcgggctgcgagcacaggtgcgggatgctgacggggaagctgtgcgagactcagttcccagggcttttcctaggctggcagtgcggcc

SEQ ID NO: 38546 - DNA, 535 bp, Homo sapiens
aggtgaaaataggtccaaagaactcatgaataaatgattcatttctcaaactacttaggtagaataataaaacatggaatgtcaaaagttaaatgagcactttcccctctgtcaaaataatcagttttcataggaattaggtttttagccaaatggctgtgaggcaagttgaagtaagacaagaaaattgcaaatatttttagatgaaaatatttactttcagcagattttgagacagtcttgctccgttgcccagcctgcagtgcagtggagcgatctcagctcattgcaaccacctcctcctggattcaagcgattcttgtgcctcggcctcccaagtggctgggatttacaggcatgtgccaccatgctctactaaaagtaaaaagattagctgggcgtggtggtgtgtgcttgtaatcctagctagttgggaggctgagacaggagaatcgcttgaatccaggaggcgaaggttgtagtgagcccagattgagccactgcactccagcttgggcaatagagcaagactctg

SEQ ID NO: 38547 - DNA, 399 bp, Homo sapiens
gtcgacgtcccagctactcgggaggctgaggtgggagaattgcttgaactcgggaggcagaggttacagtgagccaagattgtgccaccacgctccagcctgggtgacagagcaagactctgccttttctttctcaaaaatccctggagtctgcctttgcttcagaaattagtttatccagctatacttgatggaaaacccagtgtttcagtagcagaaagagctttgtggtgtaagccattctagaataagtagacaggctaggggtctcttccgtgggatgccagttagctgtgtcccaaagacagacctcaaagactccatcccagggacacaatgcctctcccgaagctaggactctggaatcaggacacaggttgctctctctggacatatttc

SEQ ID NO: 38548 - DNA, 567 bp, Homo sapiens
acagaaaatattaactgtcagcaaggctatagagaaattggaagctgtatgcattgctttttggaatgtaaaatggtacagcccactgcggaaaatggtttagcagctccttaaaaatatgaagcatagaattatatgatccatcaacaccctttaagcgtatatacccaaaagaactgagagcagggactcaaacaggtatttgtacacccgattaacagcagcattattcacagtggccaaaaggtagcccaaacctaatgcccatcagtaggtgaatagataaagaaaatgtaatatatacatacacagagtattattcagccataaaaagaaaaatatctggccagattcaggggcttacacctgtaatcccagtattttgggaggccaaggtgggcaggtctcttgagccccatattttgagaccagactggacaacatggcacttttggttagaagtgtttgaccataactactattccagaaaaagatctactcattagaactacaaatcataaaattataagttctacaaaaacaaatcaaccttatctaccacccagt

SEQ ID NO: 38549 - DNA, 886 bp, Homo sapiens
ttacctcaaaggggcagattaacttagatttacagaaacgacagctgaggaggtaaatctgagtccctctggaggtgaaggtgcttctgagatgggaccttctataaataggttataagaacttgcagaaacgagggccccgttgggcacaggccgtcctgcacatactgaacattccactggggtggggcctctgctctcccactcccagtgcacctctgaaaacgaaggtcccagaacccgcatgccaccgggacaggaaacggagcggcttccagggctcatgggaactggtctaatattagcagtgtttttctcatctggcccttgggacgtctctatggggtaggtgttgttatcactcatttcacagatgaagcagcttgggctgcccctggggaagagtggatgcctagctgtcatcccagatctctgcgtgtcatcccgccctaccccatcctgcctcacccttcattctgtgtcctctcctgtgccagctctgggcacatacccaggaatgcctggaacacctttctgctgcctaggctgtaggctcagacaccccgagaacagcttgatgtcactctattgcccatccctggtcaaacacaatgtccttcctccaccttcccaccagcctgcctcctgcccctggctatatttaggactttctacagtctttgccaccaaccccttcttagggtttgaagaggggccacatcagatatctttggaaacccatggcaggagtgagcttttctctgggcacctcttatttccatcctgtatcctgggtctttcccacctactcaggctttgggtaaaaaggccaggctattagaacatcatgggggtggcgaggcctgcaggagggtggcttaccacc

SEQ ID NO: 38550 - DNA, 2981 bp, Homo sapiens
  misc_feature (1137)..(1137): n is a, c, g, or t
ttttcataaggacatcatatatgaattagaataggaatgtttactaactgccctaaaacataaagatggtgctcctgaacgctacaccagttgccccagggcactgtagtgaactcacagggaggcagccggacatttttaaatttcaagggaaacacagtgacatttgccagctaccatgcaaactgccgttattaaattgtttagacccattaggcacttgctttggcctaggtccagaacaattaggtacttcttttggcctagagtttccatgaaaaaaactactgaaacactaaagatgctgggaaccaagaaagtttaagaatctctgtaataagaataagaaatctatacgaggctgggcacggtggctcacggtggtaatcccagcactttgggaggccaacaagggtggatcactggaggtcaggagttcgagaccggcctggccagcatggcagaaccccatctctactaaaaatgcaagggttagccggatgtggtggcgggcgcctacagtcccagctccccaggaggctgaggcaggataatggcttgagcccgggaggtggaggttgcagtgagccaagattgtgccactgcactccaggctgggcaacaagagtgagactttatctcaacaaaaaaaaagaaaaaaactatacaaactgctgttctctgtcaggctccactactctggtgtgcaactgcaagaattacagacagagtgcctcagagaaactgactggccttgaaaacctaaaactattcattgataaaaacagtgagtgatgatatggagcacctggaaggaacagtttggtgttacagctctaaaaatctccagcaaactctattaggtgagcttctaaattatttcaaacatatgattttcatcaaaaatgcccctcatgctgtgataaaacttaaatgtgcatctggctatttacctatgcaaagggagggcaagagttgagagggatcaggtagagcaatgggtgttgaaaggctgcaactgaagaaaaggaagacctcaggcatggtttttaatgaatagtcaatcaacctattttactcacaggtggtacttctgagatttaacctatgcttcatccctcctgaaaaaccggaacncagcttgaggaatatttattgaaaacttaccctcatttttacttaaaaggatagcatcagggaccctattttaggaatactgtgtcagcctaaataataaccagagacagactctctaaaagaaaggatatttatttaaagatagagcattgcaatgtcagtatgcatgccatagtaaactatgtgtgtgttcagggaggtaaagacaaaggtttttaaagggaaaaaatgaggaagattacatcattgttttgaaataattatccgtggctacaaagatcaacaataggggtgatgccagcctgaggttggacaggcagtagtgggacaggtgtccttgcagaggtactttttatataaggtggcaatggcctttgtgcaaggttgtgggttttgcagttttttgtgacagtttttgttaccagacatacacggatgagaaccctctctttgtggccttcccggctctatttgtcatggttttcttaactttagcaattccattttgattctaacaactatcacacttgcatttgtgcttatatagcaccaggagtactatcaggacactttgagtttccctgcagagggaaaggtgattgagtagataggaaagatgacaaagctattctcctcaaccatggacacatctgcacatgtaatcccagggccaaggccacacttggcttgcttcgctgatctctcttttacataaattccatttagcattttggctaccagataaatttctttccatttaaatataaaaagtcctatcagaggaatgaaggattgcaattttataaaaggtcataaggagaggttataacaatctttaacaggaatatgaaaaagcctgagtttgggggaaattttctgaacctgaaaaaggaagaaacagtagccataaggggaaatggcttttgaattttaacaaaatgaacttcgtatgttgctaaaaaatatgagctgaaaatatactgctttttttccctgagttatacctatctcctgaaggaccaagagtggcccgtgtgatgtcacttggcaacactaatcgatgagatgtctcgatctaaggcatcttagcaccaataacaaaaacattttaaaatcaatgattatataacctattcctattttctttgagagaagagctcttcctaaaaataccaccaaccatattctctttcagctacaaatgaattcaaatgtaatttttttctataacattaatgtcaggttttatgacccactgcagagaaataaatagtttaaagtgtttttggactactggcatttaaatggaaagccagccttaaggtcgtgtgttaggtcatgtaaagcctgaagctgtcctaggtcagcgtcagattccgagtcatgtttgcctagtccgcacatgactgcagtacttgaataagtgcctacagcagacatttctcattttcccagaactatgatttgtaggtaaagaaatggaactgtggtgtatccaacatcatgtcatatatgctaaggtaaaatctggcactaaataagaaaaatggtttaactcttaaatggaatgaaacttttaaaaaatctgattttttcagctcttaaatagggaagttaggctggagacagtaggctcagtcatctcttaagcattcatggaaaaacctactatgtgtagtcattttgctagggtcatggggcctacagagacatatcagacagtagtaggagatgataggttcataaacaataacaataacagcaccatggcacatgtatacctctgtaacaaacctgcacgttctgcacatgtatcccagaacttaaagcaaagtaaaaaaaaa

SEQ ID NO: 38551 - DNA, 384 bp, Homo sapiens
gagattacaaacacacaagattcttgccctcataaacttcatagtctcttgtcaagagtaataaacagacaaaaacttgcaattcatccagataaaatctgtgacattggcaatcctgtgcctccatagtaacacataaaccaaacatcgtatgttctcacgcataagtgggagctaagctatgaggatgcaaaggcataagaatgatacaatgaactttggggtcttgagggagaaagggtgggaagggggtgaaggataaaaggctacaaattgggttcagcgtatactgcttgggtaatgggtgcaccaaaatctcacaaatcaccactaaagaatatactcatgtaaccaaataccacatgttctcccaaaaacctatga

SEQ ID NO: 38552 - DNA, 385 bp, Homo sapiens
gaaatctttcacaatagcaacaaaaaacaaaaggtcctcgtgatacagagcataactcctcactccttaaaggtggattgtacacagtgacttccttccaaaaagtagcacaggaaaattaattttcaattaatatattaggttttagtccactactgtgtattccattattttaaaatttaatagaatgattctaaaagcaattgatagtgtaaacaggaaaagatataacaaaaactctgaaaaagaaaagtaaggaggaaagaagtagctctattggctggtaaatagcttttaaaacaacgtgtggttggctgagcacattgtacaggtgagtagcccacacctgtagccccagcactttgggaggctgaggtgacaggat

SEQ ID NO: 38553 - DNA, 390 bp, Homo sapiens
gatcttcacctcgaagcagtgaccgtgactgtggttacatataaggatacacagtcggctccagggtgtacgccacagaatgaggcttcggcaagcgtgttcctcagatgctgctaggctgatgccccatagtcagtcaagggaggtaaaccctggagtcaacaaagtgaaacacatttcttggctgcaggacttctcagagcctttactatgtgaatttccactgtgactctccaagaggggatacaaaatacaaggtttcccagacttacttggtcatagaattttctctccagatattcatgttccactttgggaaatgccatgggtcaatgatgtggaggcctgagacccaacattggacagcacagtgcctaggcagggagccca

SEQ ID NO: 38554 - DNA, 443 bp, Homo sapiens
gttttctgcaggtcactggaggaaggtagccacacttcactgtgaggggatggtgccctacctgtcaccttcaacttctgctatctcacactgttgttggatgtttcagaccattttgcacttgctttgaaacttagctccttcactgaatcacgttgctccttcgttgctgctgcctccagatctccaaaggtgtcccctaccctctcctgtaccagccagataatcattggtctcctaccctgagaatggctatgagtccactgcaaaaggaatttctctagtttttcaaaatcttgagtcacatggtgaagctcttcaggagcaactctgctatgttgaagagattgggacatgtcaagttaatatctgatgggcctccttccttcagtacgcaccatcacttccaactcttcgtaggcttctgtaggtctcatatgctc

SEQ ID NO: 38555 - DNA, 658 bp, Homo sapiens
tcattaagttaatattgctttgtttcacttttacattttataaaatgattttatctaaactctttgtactcatctttggcttgtgtcttcaccactaaagccaattttgagtcttttaaaattgtttcccagatatattcactaataaaagataattttgtcttctatatagatgaacctcagatttttgaagtcttaacccaatgaaaattaatttcacacttatctaacagtacaatgcaggtgtacattaatagatgtgattcacacgtggtgattcaggcacccagggttccctctttggacctacggtttcaagagtgctgtgctcacttgcaggcagcttgtagaaaggaatgaaagggtggaggcagcaacccgcttatcaaccacgtcagccttttaaaggggacacatatcatttctgctcactttctactggctaaattagtgacttggtcctacctaggtacaacgtagtcttggcaatgtggtcacttctgagccataattcaattctatggaaagagaataacagagtttgatggagtattggtcatctaggccatatcatcttaagacagaagatgctgttactgaaaaagttattccaagatataagtacccattcataatacatattagggaggtttttgta

SEQ ID NO: 38556 - DNA, 317 bp, Homo sapiens
ttttttttggaggcacggtctcactctgtcaccgaggctggtgcaatcacagctcactgcagcctcaaattcatgggttcaagtgatcctcctgcctcagtctcttgcaacccttaccatcaaaatgtaagaaactagtatgaagccccttgatactactttcgtgattagaaatattctgctttggccaggcatggtagctcgcgcctgtaatcccagcactttggtaggccgaggcgggcagatcacctgaggtcaggagttcaagaccagcctggccaacatggtgaaaccccatctctaccaaaaatacaaaa

SEQ ID NO: 38557 - DNA, 426 bp, Homo sapiens
ggtcgacggaaaacagatcatgtttgattccttaagatgtggccactgctatttgtggtacaatttgtgatctgagagctgcatgtaaaaaacacatgagcaaaaagaatatccagcacacaagggctggctttctgattctcagaggtatagtgacaacacagcttacctctgcattcaaagaagctagaacttaccgcggataatcattagtagaagacagcttaaagtagtgtctgctttctggctaggcctgattcacaggtgctgtgataaattcaaaaagacctgcctcctctgatgtgctagtatcaagggtgagggagacagttaaccaaactggtcaaaagcattgtcagcaaagacctggtgctgaatcatgttgggaaactggagtttggagctagagaggcaataccaagtatc

SEQ ID NO: 38558 - DNA, 445 bp, Homo sapiens
aaaataatctctgttacccacacttctgatttttatttaggagcattttttttttcgtttcatcctcacagttttcacaattgcaatactttgggtaaatatttgatttcatcacttaaattctcatcacaaacatacatacatgtatgtatatatagtatatatatctatatttctgtctctatatacatctgtctatgtatgtatgtatgtatctatctatctatctatctatctatctatctatctatctatctatctatctttctatacagagagagtcagtcttgccctgtctcccaggctggagtacaatggtgccatcagctcactctaaccttgaactcctgaggcaggaggatcgtttgagcccaggagttcgaggttgcagtgagctatgattgcaccactgcactccagcctggtgacagtgagaccctgtctc

SEQ ID NO: 38559 - DNA, 316 bp, Homo sapiens
gggtcctctccttccttggctccactcctccagtccctcagacctcaacaggatattgaagcctgcccatatgggcatgcactcattaaatgtttccttctgactccattcctggcctgacagaggaagaagaagagacccataagattggcagtctggctgagaacgcattctcagaccctgcaggcagtgccaaccctttggaacccagccaggatgagaagagcatccccttgatctggggtgctgtgctcctggtaggtctgctggtggcagcggtggtgctgtttgctgtgatggccaagaggaaacaagg

SEQ ID NO: 38560 - DNA, 497 bp, Homo sapiens
attgtaataacccccatgaatcaagggtggggccaggtggagatcattgaatcacgggggcagtttcccccatactgttctcgtggtaatgaataagtcgcatgagatttgatggttttataaatggaagtacccctgcacaaatccttttgcctgatgtcatgtaagacatgccttcgctcctccttgccttctgccatgattgtgaggtctgcccagccatgtggaactgtgagtccactaaacctctttttctttataaattacccagtcttgggtatgtgtttaccagcagtgtgaaaatggactaatacagcctccaagatgataagcctcccaaaactcatctgtcaaccttcctttgtgtatcctgtcttccctggtttgcccttgtagagaagaatcatcctggattacgctcatgaatattcaagtcatgggaagaaacacattcttattgtaaaaaataaaatgatgtctggcttaccttagtcttt

SEQ ID NO: 38561 - DNA, 488 bp, Homo sapiens
gctactagaatggtgtctacctaccaaaatagtaaactttcctggaggaattgcagagccaccataaaggatttgaaaaatgcaagagtggtgattcttattacattcccattcaccttgcctatttggctttggagagtgacagtggattaccataaacttaatccaggtgatttcaattgcaggtattttttccagatgtgcttttgttgctggagcaaatctatacaatccctgacttttggtatgcagatattgatctggcatacacttcttttctgtatacctattagtaaagaccatcagaatcagtttacttttgactggcaaggtttgcattacactcttactaacctacatcagggctatattaagtcttatgacgtatcaagtcttatgcaaaggacctggatagccccttccttccacatattttgcctatccgttatgttaataccatgctgattgacctggtgatcaaaaaataa

SEQ ID NO: 38562 - DNA, 347 bp, Homo sapiens
ccatcagaatagagagaaatagtaagaagttggatttaaggttgttaaattcttgttttcctctttgatgccttttttttttctggttatctgtgctagccttcataggtgcattgctgttctgccagcattcggcttgatgccagccttggccaagcccagtttgtacatatctagaatctagattttccaatctgcttgcaaaaagtagtaaatcttttgctgggactagggggttaacagtgcttcctgtagcagacagctatctcttctcatgtaacttgatactcgagtttttcaggaaccacatttattgaaaacaaagcaaaattatgtcaaaaaaataa

SEQ ID NO: 38563 - DNA, 369 bp, Homo sapiens
tttttttttttttagtttccagaatttggctttattttgcagtatagaaatcatttggagccattttgagacagaagtagaggctctgtcaagtcaatactgcattgcagcttggtccactgaagaagccatgcctgagatacaaaagatgtgctacactttacccgctttatgttcgattcctctccccttttctctcatcaactttattaggttaaaacaccacatacaggctttctccaaatgactccctattgtctggagtttggttagaattttatgcccacataaaccaaacttgtggctaggctatttgggccctgccataacatttgacataacacaaaatataaagtcatagggaaaact

SEQ ID NO: 38564 - DNA, 905 bp, Homo sapiens
gtgggaggtgcctaaaaccacaacgctaatgttatgttaatggcattatagtgagctgggtcaaattaaggacatttaggttgatttgttgcacctgtgcctaagttgagaccgtccctgctgagcaacatcctggcataagggcaagttcttaaccacatttcttcctgttagctgcagaggcggggtaggtgctgtcctgcagttgttcctgtgaacattgttcctttctgtcccttctccctagaccctccatctctatctgcctatccagcccctaactcctctctcagtgctttccctccagtacatacccatattttaattttcaagtgtgcaattttcacatgtataattcgttaagaaagaatgcaagggaacgattcagatagtcatcaacaaactgcagctgagtccagactctgtctacctttcttccctcttctgtttgcatcatctccaatagtttttctaggatccaaaactgatactgatgctgcccagtttttagtgctggccctttgaggttcactgattctcctacattttctggctaacgtgtggaaaatctgctttgttcctagtacaacagtgataaaataattttttattcccctaaattcccaaaagtagcttatacttgccatgaagtttaggctatatctcgatctctatctttccatttatctatccatccatccgtctatccacacatacatatatgtgtctatttatctctcaagatttacagtatcagaatttttcagagtgtggctcaggaatcttttttctgttaagcaagtttcttaagcattgtgatgtatttttttgcttcaatttacttattgcatctgttaataaattactgcttacaaaaacagtaaagaaaaaaaagaattaaaaac

SEQ ID NO: 38565 - DNA, 296 bp, Homo sapiens
cagatattttaaaggacttgagtgttgtgatctaagctgtatctgctttagggagcacccctagccaagtaatgctatagaggtgccaccttgacagtcttggacaagatccgggagaattctctggattaccaggcagagactcctgtttccttcccttaatttctcccaaacttagagtctctctttctgttctgagccccctaaagctggggggtggagtaacacaggcacccccgtggcggccaccactatgactgcacggggtaagacctgaagccagcacagcactgggt

SEQ ID NO: 38566 - DNA, 408 bp, Homo sapiens
aggctgaaggaaaggggtctgggtcttgtccctaggaattctccccccccttctccctgatttctcggcctctctctctgtgtgaaggggcctctccctaatgtctcctccttcccccctcttctctctcctgcggcccagcctccctctccctcctccattcctctctccctgcccttttcctgcctgaagagcagaggtgaggacctgggacccctgaggggcagcgggtgatggctctgaagctgaacccagggcctggctgtggtcttcttggtcttgctgccccctgtgacccaaaggcatgggatggacagagatgcctgcccccgtgaagctggttggggagggcagttcaccagcatccatagagtaataaagtcactgtgtgtagacccggaaaaaaag

SEQ ID NO: 38567 - DNA, 628 bp, Homo sapiens
aggtgggggaggggaaggggaccctagcagagggtgggctgtgagatgaaagctgagtgggaagctggaccctacaaaggagtctgggggcgccgggaccggaccccttcggaaaggacaggctgcgggaggagctgcaggactgaggtacagaggccaggggcccagggcaggacccagcctggacttgactccctgggatcccaggaagggcacaccctttcctcaccacccgagtgagcgctgccccctcacagagacctctttgccccctgggccaggcagagcagtgcgctgcagtgtccagggaggccccattggcacggtggcgggtgccccgtgaaatccaacggaggccggagggtgccttgtgctgctggaacctcaccacggtgggcagccgctattccgcacgcatttcaccagcattggggtcagaactgactgcgctgggggcacaccgccagggggaacggccgcctggggggcctgctatcccgcggcgcccgtgatggcccgcgtggaacttggcgcattggaggggacccggaagcggtgccacaaacccaaacgcgaaggcaagcaactgcttggcgaagacctgcatgcggtggctgggaaacaacgt

SEQ ID NO: 38568 - DNA, 1960 bp, Homo sapiens
  misc_feature (16)..(16): n is a, c, g, or t
ccaggaaggacaaaanagcaggcagggaccgggccggcaaacccgggaagggcggggggggcctcgccaggagagagtgaggacaggctgcgggaggagctgcaggactgaggtacagaggccaggggcccagggcaggacccagcctggacttgactccctgggatcccaggaagggcacaccctttcctcaccacccgagtgagcgctgccccctcacagagacctctttgccccctgggccaggcagagcaggcgctgcggtccgggaggccccatggaggtggcggtgcccgtgaagcaggaggccgagggcctggcgctggactccccgtggcaccgcttccgccgcttccacctgggcgacgcgccgggcccgcgggaggcgctggggctgctccgcgccctgtgccgggactggctgcggcccgaggtgcacaccaaggagcagatgttggagctgctggtgctggaacagttcctgagcgcgctgcccgccgacacgcaggcctgggtgtgcagccggcagccgcagagcggggaggaggcggtggccctgctggaggagctctgggggccagcagcctcccccgatgggtcgtcagcaacgagggtgcctcaggatgtgacgcagggccctggggccacaggtggaaaggaggacagtgggatgattcccttagcaggcaccgcccctggggctgaggggccggcgcctggggactcccaggctgtgcgcccctacaagcaggagcccagcagccccccgctggcgcctggcctgcccgccttcctagcggccccgggcaccacgtcctgccccgagtgcggcaaaacgtccctgaaaccagctcacctgctgcgccaccggcagagccactcgggcgagaagccgcacgcctgccctgagtgcgggaaggcctttcggcgcaaggagcacctgcggcgccaccgcgacacgcaccccggcagccccggcagccccgggcccgcgctgcgccctctgcccgcccgtgagaagccccacgcgtgctgcgagtgtggcaagaccttctactggcgcgagcacctggtgcgccaccgcaagacgcactcgggagcgcggccctttgcctgctgggagtgtggcaagggcttcgggcgccgcgagcacgtgctgcgccaccagcgcatccacggccgggcagcggccagcgcgcagggggcggtagctccgggcccggatggtggaggccccttcccgccctggcccttgggttagccgcctcccggccagcgccatctcccgcccttggtgctgcccccgggcggtacctgctctctcccagcgccacttggcctcttcctctcctccttccctcccatcgtcctcctccacctgcgcctcccttgtctgaacttcccaacgccttcctattcctttccaactccttttcccccaaatttcactttccttctcaggtctcacctcagccccccccttctccctgatttctcggcctctctctctgtgtgaaggggcctctccctaatgtctcctccttcccccctcttctctctcctgcggcccagcctccctctccctcctccattcctctctccctgcccttttcctgcctgaagagcagaggtgaggacctgggacccctgaggggcaggccaggaggagctcgggcgcaggccaggcccccttggtgaagcagaggctgaaggaaaggggtctgggtcttgtccctaggaattctcctccctcaggagattgggggttgggggaggcagcgggtgatggctctgaagctgaacccagggcctggctgtggtcttcttggtcttgctgccccctgtgacccaaaggcatgggatggacagagatgcctgcccccgtgaagctggttggggagggcagttcaccagcatccatagagtaataaagtcactgtgtgtagacccggaaaaaaag

SEQ ID NO: 38569 - DNA, 1599 bp, Homo sapiens
ggcttcaagatggctccctggcagggggttggcaggaggccttggttcctcacctgggggcctctctgtggggcagcttcagtgtcgcccagcatgactgtggcttccccccagcagggatgggattgcacagctggtcgacggtggttgggagagggagaaatagaggcccttgctcaggtttctgagttcaaaactgtgctctcatttcaggggccagcagcctcccccgatgggtcgtcagcaacgagggtgcctcaggatgtgacgcagggccctggggccacaggtggaaaggaggacagtgggatgattcccttagcaggcaccgcccctggggctgaggggccggcgcctggggactcccaggctgtgcgcccctacaagcaggagcccagcagccccccgctggcgcctggcctgcccgccttcctagcggccccgggcaccacgtcctgccccgagtgcggcaaaacgtccctgaaaccagctcacctgctgcgccaccggcagagccactcgggcgagaagccgcacgcctgccctgagtgcgggaaggcctttcggcgcaaggagcacctgcggcgccaccgcgacacgcaccccggcagccccggcagccccgggcccgcgctgcgccctctgcccgcccgtgagaagccccacgcgtgctgcgagtgtggcaagaccttctactggcgcgagcacctggtgcgccaccgcaagacgcactcgggagcgcggccctttgcctgctgggagtgtggcaagggcttcgggcgccgcgagcacgtgctgcgccaccagcgcatccacggccgggcagcggccagcgcgcagggggcggtagctccgggcccggatggtggaggccccttcccgccctggcccttgggttagccgcctcccggccagcgccatctcccgcccttggtgctgcccccgggcggtacctgctctctcccagcgccacttggcctcttcctctcctccttccctcccatcgtcctcctccacctgcgcctcccttgtctgaacttcccaacgccttcctattcctttccaactccttttcccccaaatttcactttccttctcaggtctcacctcagccccccccttctccctgatttctcggcctctctctctgtgtgaaggggcctctccctaatgtctcctccttcccccctcttctctctcctgcggcccagcctccctctccctcctccattcctctctccctgcccttttcctgcctgaagagcagaggtgaggacctgggacccctgaggggcaggccaggaggagctcgggcgcaggccaggcccccttggtgaagcagaggctgaaggaaaggggtctgggtcttgtccctaggaattctcctccctcaggagattgggggttgggggaggcagcgggtgatggctctgaagctgaacccagggcctggctgtggtcttcttggtcttgctgccccctgtgacccaaaggcatgggatggacagagatgcctgcccccgtgaagctggttggggagggcagttcaccagcatccatagagtaataaagtcactgtgtgtagacccggaaaaaaag

SEQ ID NO: 38570 - DNA, 969 bp, Homo sapiens
atgagccaccaggcccacgctcttgtattttgacccccttatttaggaaacgttttcttgtctgtcagagtgagggcaggtggtttgcccctgccgctttgcttttttttttggagacagagtctcactctgttgcccaggctggagtacagtggtgtgatctcggctcactgcaacctccgcctcccgggttcaagtgattctcctgcctcagcgtcccgagtagctttgattacaggtacatggcaccacgcccagctaatttgttgtatctttagtagagttaggatttcaccatgttggccaagctggtctcaagctcctcaccttgtgatctgcccgcctcagcctcccaaagtgctgggattacaggtgtgagccacctcgcctggcctaggcattgctaattttcacaccagtgattgctttgtgatccaggtactcctctggccaaaaatatttgaaacggggaaaaggtgtggtgcgtgacttagctgtcataggcaccagaagaattctcatccctttcccttggggacgtggttttgaggaattatgtagtagggcgaagaaaccacaacgagttggactgaaactttttaaatttttggtcttcctggttggtgccgtcctgcttggcagctgttctgctgtttcacaccaagaaaagttgtttctgaacttagtttacttttttcccaagttaaaagtagcttatatattctgcattttgttaaggagcttgcactttatccaaagggcaggacgaagctgatctgagacaggtgtattagttatttcttgcttcctgacaagtcaccccacactcaggggtgtaaacagtaacatctgtcagctcagaaagcctctgtgggtccggagtctgtgagtggcttgggcacgcggacctggcccagggtctcctgtgaggtcacagtgcagtgttggccgggctgtcatctgaaggtt

SEQ ID NO: 38571 - DNA, 596 bp, Homo sapiens
  misc_feature (546)..(546): n is a, c, g, or t
  misc_feature (554)..(555): n is a, c, g, or t
gtgaggccggggcttcatggggagttgttgggctgaacgagcggctcggagtatgggattgggggagggggacgggggagtttggcgcaaagcctgctggggcatggagtcccggcgaggctttgtgcgcatgtgcggggaggtgagggggcttggggggcctcgcctgagagagtgaggacaggctgcgggaggagctgcaggactgaggtacagaggccaggggcccagggcaggacccagcctggacttgactccctgggatcccaggaagggcacaccctttcctcaccacccgagtgagcgctgccccctcacagagacctctttgccccctgggccaggcagagcaggcgctgcggtccgggaggccccatggaggtggcggtgcccgtgaagcaggaggccgagggcctggcgctggactccccgtggcaccgcttccgccgcttccacctgggcgacgcgccgggcccgcgggaggcgctggggctgctccgcgccctgtgccgggactggctgcggcccgaggtgccacgaaagccnttttttgnnactgtttggtgggaaaacaacgattctgtggggcgcttgcc

SEQ ID NO: 38572 - DNA, 2058 bp, Homo sapiens
gtgaggccggggcttcatggggagttgttgggctgaacgagcggctcggagtatgggattgggggagggggacgggggagtttggcgcaaagcctgctggggcatggagtcccggcgaggctttgtgcgcatgtgcggggaggtgagggggcttggggggcctcgcctgagagagtgaggacaggctgcgggaggagctgcaggactgaggtacagaggccaggggcccagggcaggacccagcctggacttgactccctgggatcccaggaagggcacaccctttcctcaccacccgagtgagcgctgccccctcacagagacctctttgccccctgggccaggcagagcaggcgctgcggtccgggaggccccatggaggtggcggtgcccgtgaagcaggaggccgagggcctggcgctggactccccgtggcaccgcttccgccgcttccacctgggcgacgcgccgggcccgcgggaggcgctggggctgctccgcgccctgtgccgggactggctgcggcccgaggtgcacaccaaggagcagatgttggagctgctggtgctggaacagttcctgagcgcgctgcccgccgacacgcaggcctgggtgtgcagccggcagccgcagagcggggaggaggcggtggccctgctggaggagctctgggggccagcagcctcccccgatgggtcgtcagcaacgagggtgcctcaggatgtgacgcagggccctggggccacaggtggaaaggaggacagtgggatgattcccttagcaggcaccgcccctggggctgaggggccggcgcctggggactcccaggctgtgcgcccctacaagcaggagcccagcagccccccgctggcgcctggcctgcccgccttcctagcggccccgggcaccacgtcctgccccgagtgcggcaaaacgtccctgaaaccagctcacctgctgcgccaccggcagagccactcgggcgagaagccgcacgcctgccctgagtgcgggaaggcctttcggcgcaaggagcacctgcggcgccaccgcgacacgcaccccggcagccccggcagccccgggcccgcgctgcgccctctgcccgcccgtgagaagccccacgcgtgctgcgagtgtggcaagaccttctactggcgcgagcacctggtgcgccaccgcaagacgcactcgggagcgcggccctttgcctgctgggagtgtggcaagggcttcgggcgccgcgagcacgtgctgcgccaccagcgcatccacggccgggcagcggccagcgcgcagggggcggtagctccgggcccggatggtggaggccccttcccgccctggcccttgggttagccgcctcccggccagcgccatctcccgcccttggtgctgcccccgggcggtacctgctctctcccagcgccacttggcctcttcctctcctccttccctcccatcgtcctcctccacctgcgcctcccttgtctgaacttcccaacgccttcctattcctttccaactccttttcccccaaatttcactttccttctcaggtctcacctcagccccccccttctccctgatttctcggcctctctctctgtgtgaaggggcctctccctaatgtctcctccttcccccctcttctctctcctgcggcccagcctccctctccctcctccattcctctctccctgcccttttcctgcctgaagagcagaggtgaggacctgggacccctgaggggcaggccaggaggagctcgggcgcaggccaggcccccttggtgaagcagaggctgaaggaaaggggtctgggtcttgtccctaggaattctcctccctcaggagattgggggttgggggaggcagcgggtgatggctctgaagctgaacccagggcctggctgtggtcttcttggtcttgctgccccctgtgacccaaaggcatgggatggacagagatgcctgcccccgtgaagctggttggggagggcagttcaccagcatccatagagtaataaagtcactgtgtgtagacccggaaaaaaag

SEQ ID NO: 38573 - DNA, 2059 bp, Homo sapiens
gaaatgcagcttcaatctccaaccggagagatttctctccagagagtaaagggctggaagtgggggcgagacagaagccacagtatcaacctctgagaagccgcgttcattcctgccagacattgcgagatacagttgggaagaatttccaaggaattcttctctgccttggcagtgagggacaggctgcgggaggagctgcaggactgaggtacagaggccaggggcccagggcaggacccagcctggacttgactccctgggatcccaggaagggcacaccctttcctcaccacccgagtgagcgctgccccctcacagagacctctttgccccctgggccaggcagagcaggcgctgcggtccgggaggccccatggaggtggcggtgcccgtgaagcaggaggccgagggcctggcgctggactccccgtggcaccgcttccgccgcttccacctgggcgacgcgccgggcccgcgggaggcgctggggctgctccgcgccctgtgccgggactggctgcggcccgaggtgcacaccaaggagcagatgttggagctgctggtgctggaacagttcctgagcgcgctgcccgccgacacgcaggcctgggtgtgcagccggcagccgcagagcggggaggaggcggtggccctgctggaggagctctgggggccagcagcctcccccgatgggtcgtcagcaacgagggtgcctcaggatgtgacgcagggccctggggccacaggtggaaaggaggacagtgggatgattcccttagcaggcaccgcccctggggctgaggggccggcgcctggggactcccaggctgtgcgcccctacaagcaggagcccagcagccccccgctggcgcctggcctgcccgccttcctagcggccccgggcaccacgtcctgccccgagtgcggcaaaacgtccctgaaaccagctcacctgctgcgccaccggcagagccactcgggcgagaagccgcacgcctgccctgagtgcgggaaggcctttcggcgcaaggagcacctgcggcgccaccgcgacacgcaccccggcagccccggcagccccgggcccgcgctgcgccctctgcccgcccgtgagaagccccacgcgtgctgcgagtgtggcaagaccttctactggcgcgagcacctggtgcgccaccgcaagacgcactcgggagcgcggccctttgcctgctgggagtgtggcaagggcttcgggcgccgcgagcacgtgctgcgccaccagcgcatccacggccgggcagcggccagcgcgcagggggcggtagctccgggcccggatggtggaggccccttcccgccctggcccttgggttagccgcctcccggccagcgccatctcccgcccttggtgctgcccccgggcggtacctgctctctcccagcgccacttggcctcttcctctcctccttccctcccatcgtcctcctccacctgcgcctcccttgtctgaacttcccaacgccttcctattcctttccaactccttttcccccaaatttcactttccttctcaggtctcacctcagccccccccttctccctgatttctcggcctctctctctgtgtgaaggggcctctccctaatgtctcctccttcccccctcttctctctcctgcggcccagcctccctctccctcctccattcctctctccctgcccttttcctgcctgaagagcagaggtgaggacctgggacccctgaggggcaggccaggaggagctcgggcgcaggccaggcccccttggtgaagcagaggctgaaggaaaggggtctgggtcttgtccctaggaattctcctccctcaggagattgggggttgggggaggcagcgggtgatggctctgaagctgaacccagggcctggctgtggtcttcttggtcttgctgccccctgtgacccaaaggcatgggatggacagagatgcctgcccccgtgaagctggttggggagggcagttcaccagcatccatagagtaataaagtcactgtgtgtagacccggaaaaaaag

SEQ ID NO: 38574 - DNA, 1624 bp, Homo sapiens
atgagccaccaggcccacgctcttgtattttgacccccttatttaggaaacgttttcttgtctgtcagagtgagggcaggtggtttgcccctgccgctttgcttttttttttggagacagagtctcactctgttgcccaggctggagtacagtggtgtgatctcggctcactgcaacctccgcctcccgggttcaagtgattctcctgcctcagcgtcccgagtagctttgattacaggggccagcagcctcccccgatgggtcgtcagcaacgagggtgcctcaggatgtgacgcagggccctggggccacaggtggaaaggaggacagtgggatgattcccttagcaggcaccgcccctggggctgaggggccggcgcctggggactcccaggctgtgcgcccctacaagcaggagcccagcagccccccgctggcgcctggcctgcccgccttcctagcggccccgggcaccacgtcctgccccgagtgcggcaaaacgtccctgaaaccagctcacctgctgcgccaccggcagagccactcgggcgagaagccgcacgcctgccctgagtgcgggaaggcctttcggcgcaaggagcacctgcggcgccaccgcgacacgcaccccggcagccccggcagccccgggcccgcgctgcgccctctgcccgcccgtgagaagccccacgcgtgctgcgagtgtggcaagaccttctactggcgcgagcacctggtgcgccaccgcaagacgcactcgggagcgcggccctttgcctgctgggagtgtggcaagggcttcgggcgccgcgagcacgtgctgcgccaccagcgcatccacggccgggcagcggccagcgcgcagggggcggtagctccgggcccggatggtggaggccccttcccgccctggcccttgggttagccgcctcccggccagcgccatctcccgcccttggtgctgcccccgggcggtacctgctctctcccagcgccacttggcctcttcctctcctccttccctcccatcgtcctcctccacctgcgcctcccttgtctgaacttcccaacgccttcctattcctttccaactccttttcccccaaatttcactttccttctcaggtctcacctcagccccccccttctccctgatttctcggcctctctctctgtgtgaaggggcctctccctaatgtctcctccttcccccctcttctctctcctgcggcccagcctccctctccctcctccattcctctctccctgcccttttcctgcctgaagagcagaggtgaggacctgggacccctgaggggcaggccaggaggagctcgggcgcaggccaggcccccttggtgaagcagaggctgaaggaaaggggtctgggtcttgtccctaggaattctcctccctcaggagattgggggttgggggaggcagcgggtgatggctctgaagctgaacccagggcctggctgtggtcttcttggtcttgctgccccctgtgacccaaaggcatgggatggacagagatgcctgcccccgtgaagctggttggggagggcagttcaccagcatccatagagtaataaagtcactgtgtgtagacccggaaaaaaag

SEQ ID NO: 38575 - DNA, 1077 bp, Homo sapiens
cataaatgggacatttacttcacaagctgttttcccagggtcttcctctgggtatgtctgaaatataaaaatctggactgggattgaagattgtgtttacaaatgcttttgaataggatttctcctgcagttgttacgtagcttttcagaaacacacaaactacaaataatgaacaacatctgcaatgattcggcagggtggcagcatccacgctctccacccaaaccctggtgggatttggagaggccgctggtgggcagaggttggccctaagcatggcagcctccggcttactgcacccagcctgtggggcggctcagtagccgctgacatggtggcctgttgtctcttctcttgttctagttaagcactatcctttgtactccctcaacgtggcctccatgtggttgaagctagggagactctacatgggcctggaacacaaagccgcaggggagaaagccctgaagaaggccattgcaatcatggaagtagctcacggcaaagatcatccatatatttctgagatcaaacaggaaattgaaagccactgaaactatgcagcatttcagttttcatttaaacacttagttcagaaaccttaaaggatttgaatatttcaaattgcacacgtcactccagcatctctgtaaaataattggaatgaaaatacttcttgcacttaaacactgcacatgccgtactttgaggttagtctgaatcttgaactttaataccaaattaattttgaatgcttttgtttcctaagagataatggcatggtttcatatgttatactttggacagacagagttttaaaaatggaattattttttctttcatgcctcttgtaatgttctgaacaaacttgaatgatgaaagtattaaagagatatcagtatttgaggtttgtattttcttctgtctctggggaggatttctcagtggtggtgggagcccagtcttggagtgaaagtgacacctgctgtccataattcagcaagctcaagtcttatccatgggactggggtcgggcagcctctttattctgcagttgctctgtggggctgtgccag

SEQ ID NO: 38576 - DNA, 1808 bp, Homo sapiens
  misc_feature (126)..(127): n is a, c, g, or t
agcgggggggcgccctcccttccggggagcggggagccgccgccgcgtccgccgggcggctcccaccccgccccccgcagctctaggtgacgcgtctccaataacagctcgccgggagccgcagcnngggcacagccggcggccgcgccccgccgccaccatgagggccgagggcctcggcggcctggagcgcttctgcagcccgggcaaaggccgggggctgcgggctctgcagcccttccaggtgggggacttgctgttctcctgcccggcctatgcctacgtgctcacggtcaacgagcggggcaaccactgcgagtactgcttcaccaggaaagaaggattgtccaaatgtggaagatgcaagcaggcattttactgcaatgtggagtgtcagaaagaagattggcccatgcacaagctggaatgttctcccatggttgtttttggggaaaactggaatccctcggagactgtaagactaacagcaaggattctggccaaacagaaaatccacccagagagaacaccttcggaaaaattgttagctgtgaaggagtttgaatcacatctggataagttagacaatgagaagaaggatttgattcagagtgacatagctgctctccatcacttttactccaagcatctcgaattccctgacaatgatagcctcgtagtactctttgcacaggttaactgtaatggcttcacaattgaagatgaagaactttctcatttgggatcagcgatatttcctgatgttgcattgatgaatcatagctgttgccccaatgtcattgtgacctacaaagggaccctggcagaagtcagagctgtacaggaaatcaagccgggagaggaggtttttaccagctatattgatctcctgtacccaacggaagatagaaatgaccggttaagagattcttatttctttacctgtgagtgccaggagtgtaccaccaaggacaaggataaggccaaggtggaaatccggaagctcagcgatcccccaaaggcagaagccatccgagacatggtcagatatgcacgcaacgtcattgaagagttccggagggccaagcactataaatcccctagtgagctgctggagatctgcgagctcagccaggagaagatgagctctgtgtttgaggacagtaacgtgtacatgttgcacatgatgtaccaggccatgggtgtctgcttgtacatgcaggactgggaaggagccctgcaatatggacagaaaatcattaagccctacagtaagcactatcctttgtactccctcaacgtggcctccatgtggttgaagctagggagactctacatgggcctggaacacaaagccgcaggggagaaagccctgaagaaggccattgcaatcatggaagtagctcacggcaaagatcatccatatatttctgagatcaaacaggaaattgaaagccactgaaactatgcagcatttcagttttcatttaaacacttagttcagaaaccttaaaggatttgaatatttcaaattgcacacgtcactccagcatctctgtaaaataattggaatgaaaatacttcttgcacttaaacactgcacatgccgtactttgaggttagtctgaatcttgaactttaataccaaattaattttgaatgcttttgtttcctaagagataatggcatggtttcatatgttatactttggacagacagagttttaaaaatggaattattttttctttcatgcctcttgtaatgttctgaacaaacttgaatgatgaaagtattaaagagatatcagt

SEQ ID NO: 38577 - DNA, 1984 bp, Homo sapiens
  misc_feature (126)..(127): n is a, c, g, or t
agcgggggggcgccctcccttccggggagcggggagccgccgccgcgtccgccgggcggctcccaccccgccccccgcagctctaggtgacgcgtctccaataacagctcgccgggagccgcagcnngggcacagccggcggccgcgccccgccgccaccatgagggccgagggcctcggcggcctggagcgcttctgcagcccgggcaaaggccgggggctgcgggctctgcagcccttccaggtgggggacttgctgttctcctgcccggcctatgcctacgtgctcacggtcaacgagcggggcaaccactgcgagtactgcttcaccaggaaagaaggattgtccaaatgtggaagatgcaagcaggcattttactgcaatgtggagtgtcagaaagaagattggcccatgcacaagctggaatgttctcccatggttgtttttggggaaaactggaatccctcggagactgtaagactaacagcaaggattctggccaaacagaaaatccacccagagagaacaccttcggaaaaattgttagctgtgaaggagtttgaatcacatctggataagttagacaatgagaagaaggatttgattcagagtgacatagctgctctccatcacttttactccaagcatctcgaattccctgacaatgatagcctcgtagtactctttgcacaggttaactgtaatggcttcacaattgaagatgaagaactttctcatttgggatcagcgatatttcctgatgttgcattgatgaatcatagctgttgccccaatgtcattgtgacctacaaagggaccctggcagaagtcagagctgtacaggaaatcaagccgggagaggaggtttttaccagctatattgatctcctgtacccaacggaagatagaaatgaccggttaagagattcttatttctttacctgtgagtgccaggagtgtaccaccaaggacaaggataaggccaaggtggaaatccggaagctcagcgatcccccaaaggcagaagccatccgagacatggtcagatatgcacgcaacgtcattgaagagttccggagggccaagcactataaatcccctagtgagctgctggagatctgcgagctcagccaggagaagatgagctctgtgtttgaggacagtaacgtgtacatgttgcacatgatgtaccaggccatgggtgtctgcttgtacatgcaggactgggaaggagccctgcaatatggacagaaaatcattaagccctacagtaagcactatcctttgtactccctcaacgtggcctccatgtggttgaagctagggagactctacatgggcctggaacacaaagccgcaggggagaaagccctgaagaaggccattgcaatcatggaagtagctcacggcaaagatcatccatatatttctgagatcaaacaggaaattgaaagccactgaaactatgcagcatttcagttttcatttaaacacttagttcagaaaccttaaaggatttgaatatttcaaattgcacacgtcactccagcatctctgtaaaataattggaatgaaaatacttcttgcacttaaacactgcacatgccgtactttgaggttagtctgaatcttgaactttaataccaaattaattttgaatgcttttgtttcctaagagataatggcatggtttcatatgttatactttggacagacagagttttaaaaatggaattattttttctttcatgcctcttgtaatgttctgaacaaacttgaatgatgaaagtattaaagagatatcagtatttgaggtttgtattttcttctgtctctggggaggatttctcagtggtggtgggagcccagtcttggagtgaaagtgacacctgctgtccataattcagcaagctcaagtcttatccatgggactggggtcgggcagcctctttattctgcagttgctctgtggggctgtgccag

SEQ ID NO: 38578 - DNA, 1747 bp, Homo sapiens
  misc_feature (126)..(127): n is a, c, g, or t
agcgggggggcgccctcccttccggggagcggggagccgccgccgcgtccgccgggcggctcccaccccgccccccgcagctctaggtgacgcgtctccaataacagctcgccgggagccgcagcnngggcacagccggcggccgcgccccgccgccaccatgagggccgagggcctcggcggcctggagcgcttctgcagcccgggcaaaggccgggggctgcgggctctgcagcccttccaggtgggggacttgctgttctcctgcccggcctatgcctacgtgctcacggtcaacgagcggggcaaccactgcgagtactgcttcaccagcagaaagaagattggcccatgcacaagctggaatgttctcccatggttgtttttggggaaaactggaatccctcggagactgtaagactaacagcaaggattctggccaaacagaaaatccacccagagagaacaccttcggaaaaattgttagctgtgaaggagtttgaatcacatctggataagttagacaatgagaagaaggatttgattcagagtgacatagctgctctccatcacttttactccaagcatctcgaattccctgacaatgatagcctcgtagtactctttgcacaggttaactgtaatggcttcacaattgaagatgaagaactttctcatttgggatcagcgatatttcctgatgttgcattgatgaatcatagctgttgccccaatgtcattgtgacctacaaagggaccctggcagaagtcagagctgtacaggaaatcaagccgggagaggaggtttttaccagctatattgatctcctgtacccaacggaagatagaaatgaccggttaagagattcttatttctttacctgtgagtgccaggagtgtaccaccaaggacaaggataaggccaaggtggaaatccggaagctcagcgatcccccaaaggcagaagccatccgagacatggtcagatatgcacgcaacgtcattgaagagttccggagggccaagcactataaatcccctagtgagctgctggagatctgcgagctcagccaggagaagatgagctctgtgtttgaggacagtaacgtgtacatgttgcacatgatgtaccaggccatgggtgtctgcttgtacatgcaggactgggaaggagccctgcaatatggacagaaaatcattaagccctacagtaagcactatcctttgtactccctcaacgtggcctccatgtggttgaagctagggagactctacatgggcctggaacacaaagccgcaggggagaaagccctgaagaaggccattgcaatcatggaagtagctcacggcaaagatcatccatatatttctgagatcaaacaggaaattgaaagccactgaaactatgcagcatttcagttttcatttaaacacttagttcagaaaccttaaaggatttgaatatttcaaattgcacacgtcactccagcatctctgtaaaataattggaatgaaaatacttcttgcacttaaacactgcacatgccgtactttgaggttagtctgaatcttgaactttaataccaaattaattttgaatgcttttgtttcctaagagataatggcatggtttcatatgttatactttggacagacagagttttaaaaatggaattattttttctttcatgcctcttgtaatgttctgaacaaacttgaatgatgaaagtattaaagagatatcagt

SEQ ID NO: 38579 - DNA, 1572 bp, Homo sapiens
ccagagtaacataggtatccgaagagtccctcccggcctatgcctacgtgctcacggtcaacgagcggggcaaccactgcgagtactgcttcaccaggaaagaaggattgtccaaatgtggaagatgcaagcaggcattttactgcaatgtggagtgtcagaaagaagattggcccatgcacaagctggaatgttctcccatggttgtttttggggaaaactggaatccctcggagactgtaagactaacagcaaggattctggccaaacagaaaatccacccagagagaacaccttcggaaaaattgttagctgtgaaggagtttgaatcacatctggataagttagacaatgagaagaaggatttgattcagagtgacatagctgctctccatcacttttactccaagcatctcgaattccctgacaatgatagcctcgtagtactctttgcacaggttaactgtaatggcttcacaattgaagatgaagaactttctcatttgggatcagcgatatttcctgatgttgcattgatgaatcatagctgttgccccaatgtcattgtgacctacaaagggaccctggcagaagtcagagctgtacaggaaatcaagccgggagaggaggtttttaccagctatattgatctcctgtacccaacggaagatagaaatgaccggttaagagattcttatttctttacctgtgagtgccaggagtgtaccaccaaggacaaggataaggccaaggtggaaatccggaagctcagcgatcccccaaaggcagaagccatccgagacatggtcagatatgcacgcaacgtcattgaagagttccggagggccaagcactataaatcccctagtgagctgctggagatctgcgagctcagccaggagaagatgagctctgtgtttgaggacagtaacgtgtacatgttgcacatgatgtaccaggccatgggtgtctgcttgtacatgcaggactgggaaggagccctgcaatatggacagaaaatcattaagccctacagtaagcactatcctttgtactccctcaacgtggcctccatgtggttgaagctagggagactctacatgggcctggaacacaaagccgcaggggagaaagccctgaagaaggccattgcaatcatggaagtagctcacggcaaagatcatccatatatttctgagatcaaacaggaaattgaaagccactgaaactatgcagcatttcagttttcatttaaacacttagttcagaaaccttaaaggatttgaatatttcaaattgcacacgtcactccagcatctctgtaaaataattggaatgaaaatacttcttgcacttaaacactgcacatgccgtactttgaggttagtctgaatcttgaactttaataccaaattaattttgaatgcttttgtttcctaagagataatggcatggtttcatatgttatactttggacagacagagttttaaaaatggaattattttttctttcatgcctcttgtaatgttctgaacaaacttgaatgatgaaagtattaaagagatatcagt

SEQ ID NO: 38580 - DNA, 2195 bp, Homo sapiens
  misc_feature (126)..(127): n is a, c, g, or t
  misc_feature (2195)..(2195): n is a, c, g, or t
agcgggggggcgccctcccttccggggagcggggagccgccgccgcgtccgccgggcggctcccaccccgccccccgcagctctaggtgacgcgtctccaataacagctcgccgggagccgcagcnngggcacagccggcggccgcgccccgccgccaccatgagggccgagggcctcggcggcctggagcgcttctgcagcccgggcaaaggccgggggctgcgggctctgcagcccttccaggtgggggacttgctgttctcctgcccggcctatgcctacgtgctcacggtcaacgagcggggcaaccactgcgagtactgcttcaccaggaaagaaggattgtccaaatgtggaagatgcaagcaggcattttactgcaatgtggagtgtcagaaagaagattggcccatgcacaagctggaatgttctcccatggttgtttttggggaaaactggaatccctcggagactgtaagactaacagcaaggattctggccaaacagaaaatccacccagagagaacaccttcggaaaaattgttagctgtgaaggagtttgaatcacatctggataagttagacaatgagaagaaggatttgattcagagtgacatagctgctctccatcacttttactccaagcatctcgaattccctgacaatgatagcctcgtagtactctttgcacaggttaactgtaatggcttcacaattgaagatgaagaactttctcatttgggatcagcgatatttcctgatgttgcattgatgaatcatagctgttgccccaatgtcattgtgacctacaaagggaccctggcagaagtcagagctgtacaggaaatcaagccgggagaggaggtttttaccagctatattgatctcctgtacccaacggaagatagaaatgaccggttaagagattcttatttctttacctgtgagtgccaggagtgtaccaccaaggacaaggataaggccaaggtggaaatccggaagctcagcgatcccccaaaggcagaagccatccgagacatggtcagatatgcacgcaacgtcattgaagagttccggagggccaagcactataaatcccctagtgagctgctggagatctgcgagctcagccaggagaagatgagctctgtgtttgaggacagtaacgtgtacatgttgcacatgatgtaccaggccatgggtgtctgcttgtacatgcaggactgggaaggagccctgcaatatggacagaaaatcattaagccctacagtaagcactatcctttgtactccctcaacgtggcctccatgtggttgaagctagggagactctacatgggcctggaacacaaagccgcaggggagaaagccctgaagaaggccattgcaatcatggaagtagctcacggcaaagatcatccatatatttctgagatcaaacaggaaattgaaagccactgaaactatgcagcatttcagttttcatttaaacacttagttcagaaaccttaaaggatttgaatatttcaaattgcacacgtcactccagcatctctgtaaaataattggaatgaaaatacttcttgcacttaaacactgcacatgccgtactttgaggttagtctgaatcttgaactttaataccaaattaattttgaatgcttttgtttcctaagagataatggcatggtttcatatgttatactttggacagacagagttttaaaaatggaattattttttctttcatgcctcttgtaatgttctgaacaaacttgaatgatgaaagtattaaagagatatcagtgaaaaagagaaaaaagatagaaataaaaggggggggggggcaagagtttcccgtgggggggcccaaggttcagcgttaccacagttttctggttaaagggggggcccaatagggaggtggtagtaataagctaggggatgggaccgtcgtataacaagcgtcgggacgtgggaacagctggtagctggagaatctttggtgaagggagacctatatgtccggaggggggggacacaagtgggggagaatctaccctagaagagaatattaaaagaggtcttaggggaaatataaagatttaaggggggtaagtgtggtatacatagggtggaatatgctatgagttagaaaatttggtataaggaggatgattgtcgaaatttttgn

SEQ ID NO: 38581 - DNA, 1886 bp, Homo sapiens
  misc_feature (126)..(127): n is a, c, g, or t
agcgggggggcgccctcccttccggggagcggggagccgccgccgcgtccgccgggcggctcccaccccgccccccgcagctctaggtgacgcgtctccaataacagctcgccgggagccgcagcnngggcacagccggcggccgcgccccgccgccaccatgagggccgagggcctcggcggcctggagcgcttctgcagcccgggcaaaggccgggggctgcgggctctgcagcccttccaggtgggggacttgctgttctcctgcccggcctatgcctacgtgctcacggtcaacgagcggggcaaccactgcgagtactgcttcaccaggaaagaaggattgtccaaatgtggaagatgcaagcaggcattttactgcaatgtggagtgtcagaaagaagattggcccatgcacaagctggaatgttctcccatggttgtttttggggaaaactggaatccctcggagactgtaagactaacagcaaggattctggccaaacagaaaatccacccagagagaacaccttcggaaaaattgttagctgtgaaggagtttgaatcacatctggataagttagacaatgagaagaaggatttgattcagagtgacatagctgctctccatcacttttactccaagcatctcgaattccctgacaatgatagcctcgtagtactctttgcacaggttaactgtaatggcttcacaattgaagatgaagaactttctcatttgggatcagcgatatttcctgatgttgcattgatgaatcatagctgttgccccaatgtcattgtgacctacaaagggaccctggcagaagtcagagctgtacaggaaatcaagccgggagaggaggtttttaccagctatattgatctcctgtacccaacggaagatagaaatgaccggttaagagattcttatttctttacctgtgagtgccaggagtgtaccaccaaggacaaggataaggccaaggtggaaatccggaagctcagcgatcccccaaaggcagaagccatccgagacatggtcagatatgcacgcaacgtcattgaagagttccggagggccaagcactataaatcccctagtgagctgctggagatctgcgagctcagccaggagaagatgagctctgtgtttgaggacagtaacgtgtacatgttgcacatgatgtaccaggccatgggtgtctgcttgtacatgcaggactgggaaggagccctgcaatatggacagaaaatcattaagccctacagtaagcactatcctttgtactccctcaacgtggcctccatgtggttgaagctagggagactctacatgggcctggaacacaaagccgcaggggagaaagccctgaagaaggccattgcaatcatggaagtagctcacggcaaagatcatccatatatttctgagatcaaacaggaaattgaaagccactgaaactatgcagcatttcagttttcatttaaacacttagttcagaaaccttaaaggatttgaatatttcaaattgcacacgtcactccagcatctctgtaaaataattggaatgaaaatacttcttgcacttaaacactgcacatgccgtactttgaggttagtctgaatcttgaactttaataccaaattaattttgaatgcttttgtttcctaagagataatggcatggtttcatatgttatactttggacagagttttaaattcggcacgagggacgtccttcctcaggagccgactgggcaatcacaggcaggaagatgaaggttctgtgggctgcgttgctggtcacattcctggcaggatgccaggccacagtggagctagcggtggagacagagcccggggcccgaagctgtgccaacg

SEQ ID NO: 38582 - DNA, 1083 bp, Homo sapiens
gcaacaacaaaggtctaggtctgacccggctctttcttgttgcattgatgaatcatagctgttgccccaatgtcattgtgacctacaaagggaccctggcagaagtcagagctgtacaggaaatcaagccgggagaggaggtttttaccagctatattgatctcctgtacccaacggaagatagaaatgaccggttaagagattcttatttctttacctgtgagtgccaggagtgtaccaccaaggacaaggataaggccaaggtggaaatccggaagctcagcgatcccccaaaggcagaagccatccgagacatggtcagatatgcacgcaacgtcattgaagagttccggagggccaagcactataaatcccctagtgagctgctggagatctgcgagctcagccaggagaagatgagctctgtgtttgaggacagtaacgtgtacatgttgcacatgatgtaccaggccatgggtgtctgcttgtacatgcaggactgggaaggagccctgcaatatggacagaaaatcattaagccctacagtaagcactatcctttgtactccctcaacgtggcctccatgtggttgaagctagggagactctacatgggcctggaacacaaagccgcaggggagaaagccctgaagaaggccattgcaatcatggaagtagctcacggcaaagatcatccatatatttctgagatcaaacaggaaattgaaagccactgaaactatgcagcatttcagttttcatttaaacacttagttcagaaaccttaaaggatttgaatatttcaaattgcacacgtcactccagcatctctgtaaaataattggaatgaaaatacttcttgcacttaaacactgcacatgccgtactttgaggttagtctgaatcttgaactttaataccaaattaattttgaatgcttttgtttcctaagagataatggcatggtttcatatgttatactttggacagacagagttttaaaaatggaattattttttctttcatgcctcttgtaatgttctgaacaaacttgaatgatgaaagtattaaagagatatcagt

SEQ ID NO: 38583 - DNA, 1174 bp, Homo sapiens
aactattagatttttaaaaaatgtcttgcaaagattcagttcctctgacttagcaagtaagtagtgaaggcagctaaacagtctgcctatctcattttaaaaactgggttttctcttctgactgacagtgttgcattgatgaatcatagctgttgccccaatgtcattgtgacctacaaagggaccctggcagaagtcagagctgtacaggaaatcaagccgggagaggaggtttttaccagctatattgatctcctgtacccaacggaagatagaaatgaccggttaagagattcttatttctttacctgtgagtgccaggagtgtaccaccaaggacaaggataaggccaaggtggaaatccggaagctcagcgatcccccaaaggcagaagccatccgagacatggtcagatatgcacgcaacgtcattgaagagttccggagggccaagcactataaatcccctagtgagctgctggagatctgcgagctcagccaggagaagatgagctctgtgtttgaggacagtaacgtgtacatgttgcacatgatgtaccaggccatgggtgtctgcttgtacatgcaggactgggaaggagccctgcaatatggacagaaaatcattaagccctacagtaagcactatcctttgtactccctcaacgtggcctccatgtggttgaagctagggagactctacatgggcctggaacacaaagccgcaggggagaaagccctgaagaaggccattgcaatcatggaagtagctcacggcaaagatcatccatatatttctgagatcaaacaggaaattgaaagccactgaaactatgcagcatttcagttttcatttaaacacttagttcagaaaccttaaaggatttgaatatttcaaattgcacacgtcactccagcatctctgtaaaataattggaatgaaaatacttcttgcacttaaacactgcacatgccgtactttgaggttagtctgaatcttgaactttaataccaaattaattttgaatgcttttgtttcctaagagataatggcatggtttcatatgttatactttggacagacagagttttaaaaatggaattattttttctttcatgcctcttgtaatgttctgaacaaacttgaatgatgaaagtattaaagagatatcagt

SEQ ID NO: 38584 - DNA, 1423 bp, Homo sapiens
  misc_feature (126)..(127): n is a, c, g, or t
agcgggggggcgccctcccttccggggagcggggagccgccgccgcgtccgccgggcggctcccaccccgccccccgcagctctaggtgacgcgtctccaataacagctcgccgggagccgcagcnngggcacagccggcggccgcgccccgccgccaccatgagggccgagggcctcggcggcctggagcgcttctgcagcccgggcaaaggccgggggctgcgggctctgcagcccttccaggtgggggacttgctgttctcctgcccggcctatgcctacgtgctcacggtcaacgagcggggcaaccactgcgagtactgcttcaccaggaaagaaggattgtccaaatgtggaagatgcaagcaggcattttactgcaatgtggagtgtcagaaagaagattggcccatgcacaagctggaatgttctcccatggttgtttttggggaaaactggaatccctcggagactgtaagactaacagcaaggattctggccaaacagaaaatccacccagagagaacaccttcggaaaaattgttagctgtgaaggagtttgaatcacatctggataagttagacaatgagaagaaggatttgattcagagtgacatagctgctctccatcacttttactccaagcatctcgaattccctgacaatgatagcctcgtagtactctttgcacaggttaactgtaatggcttcacaattgaagatgaagaactttctcatttgggatcagcgatatttcctgatgttgcattgatgaatcatagctgttgccccaatgtcattgtgacctacaaagggaccctggcagaagtcagagctgtacaggaaatcaagccgggagaggaggtttttaccagctatattgatctcctgtacccaacggaagatagaaatgaccggttaagagattcttatttctttacctgtgagtgccaggagtgtaccaccaaggacaaggataaggccaaggtggaaatccggaagctcagcgatcccccaaaggcagaagccatccgagacatggtcagatatgcacgcaacgtcattgaagagttccggagggccaagcactataaatcccctagtgagctgctggagatctgcgagctcagccaggagaagatgagctctgtgtttgaggacagtaacgtgtacatgttgcacatgatgtaccaggccatgggtgtctgcttgtacatgcaggactgggaaggagccctgcaatatggacagaaaatcattaagccctacagtaagcactatcctttgtactccctcaacgtggcctccatgtggttgaagctagggagactctacatgggcctggaacacaaagccgcaggggagaaagccctgaagaagccatgccatcatggctaccgccgtgaccctctcgacgccacc

SEQ ID NO: 38585 - DNA, 1512 bp, Homo sapiens
  misc_feature (126)..(127): n is a, c, g, or t
agcgggggggcgccctcccttccggggagcggggagccgccgccgcgtccgccgggcggctcccaccccgccccccgcagctctaggtgacgcgtctccaataacagctcgccgggagccgcagcnngggcacagccggcggccgcgccccgccgccaccatgagggccgagggcctcggcggcctggagcgcttctgcagcccgggcaaaggccgggggctgcgggctctgcagcccttccaggtgggggacttgctgttctcctgcccggcctatgcctacgtgctcacggtcaacgagcggggcaaccactgcgagtactgcttcaccaggaaagaaggattgtccaaatgtggaagatgcaagcaggcattttactgcaatgtggagtgtcagaaagaagattggcccatgcacaagctggaatgttctcccatggttgtttttggggaaaactggaatccctcggagactgtaagactaacagcaaggattctggccaaacagaaaatccacccagagagaacaccttcggaaaaattgttagctgtgaaggagtttgaatcacatctggataagttagacaatgagaagaaggatttgattcagagtgacatagctgctctccatcacttttactccaagcatctcgaattccctgacaatgatagcctcgtagtactctttgcacaggttaactgtaatggcttcacaattgaagatgaagaactttctcatttgggatcagcgatatttcctgatgttgcattgatgaatcatagctgttgccccaatgtcattgtgacctacaaagggaccctggcagaagtcagagctgtacaggaaatcaagccgggagaggaggtttttaccagctatattgatctcctgtacccaacggaagatagaaatgaccggttaagagattcttatttctttacctgtgagtgccaggagtgtaccaccaaggacaagtaagcactatcctttgtactccctcaacgtggcctccatgtggttgaagctagggagactctacatgggcctggaacacaaagccgcaggggagaaagccctgaagaaggccattgcaatcatggaagtagctcacggcaaagatcatccatatatttctgagatcaaacaggaaattgaaagccactgaaactatgcagcatttcagttttcatttaaacacttagttcagaaaccttaaaggatttgaatatttcaaattgcacacgtcactccagcatctctgtaaaataattggaatgaaaatacttcttgcacttaaacactgcacatgccgtactttgaggttagtctgaatcttgaactttaataccaaattaattttgaatgcttttgtttcctaagagataatggcatggtttcatatgttatactttggacagacagagttttaaaaatggaattattttttctttcatgcctcttgtaatgttctgaacaaacttgaatgatgaaagtattaaagagatatcagt

SEQ ID NO: 38586 - DNA, 901 bp, Homo sapiens
cataaatgggacatttacttcacaagctgttttcccagggtcttcctctgggtatgtctgaaatataaaaatctggactgggattgaagattgtgtttacaaatgcttttgaataggatttctcctgcagttgttacgtagcttttcagaaacacacaaactacaaataatgaacaacatctgcaatgattcggcagggtggcagcatccacgctctccacccaaaccctggtgggatttggagaggccgctggtgggcagaggttggccctaagcatggcagcctccggcttactgcacccagcctgtggggcggctcagtagccgctgacatggtggcctgttgtctcttctcttgttctagttaagcactatcctttgtactccctcaacgtggcctccatgtggttgaagctagggagactctacatgggcctggaacacaaagccgcaggggagaaagccctgaagaaggccattgcaatcatggaagtagctcacggcaaagatcatccatatatttctgagatcaaacaggaaattgaaagccactgaaactatgcagcatttcagttttcatttaaacacttagttcagaaaccttaaaggatttgaatatttcaaattgcacacgtcactccagcatctctgtaaaataattggaatgaaaatacttcttgcacttaaacactgcacatgccgtactttgaggttagtctgaatcttgaactttaataccaaattaattttgaatgcttttgtttcctaagagataatggcatggtttcatatgttatactttggacagacagagttttaaaaatggaattattttttctttcatgcctcttgtaatgttctgaacaaacttgaatgatgaaagtattaaagagatatcagt

SEQ ID NO: 38587 - DNA, 579 bp, Homo sapiens
agttatcttatgttgttaagggaaagggcaggagcctataacataagcactatcctttgtactccctcaacgtggcctccatgtggttgaagctagggagactctacatgggcctggaacacaaagccgcaggggagaaagccctgaagaaggccattgcaatcatggaagtagctcacggcaaagatcatccatatatttctgagatcaaacaggaaattgaaagccactgaaactatgcagcatttcagttttcatttaaacacttagttcagaaaccttaaaggatttgaatatttcaaattgcacacgtcactccagcatctctgtaaaataattggaatgaaaatacttcttgcacttaaacactgcacatgccgtactttgaggttagtctgaatcttgaactttaataccaaattaattttgaatgcttttgtttcctaagagataatggcatggtttcatatgttatactttggacagacagagttttaaaaatggaattattttttctttcatgcctcttgtaatgttctgaacaaacttgaatgatgaaagtattaaagagatatcagt

SEQ ID NO: 38588 - DNA, 718 bp, Homo sapiens
ctctcagttcattgaggaccagttacataccaagaccctcgtgtgcttttcctttgaattctcacaaaaccgagaggctttcctgatgaagaaagtgaggttcaagcaggtttaagccattgcaatcatggaagtagctcacggcaaagatcatccatatatttctgagatcaaacaggaaattgaaagccactgaaactatgcagcatttcagttttcatttaaacacttagttcagaaaccttaaaggatttgaatatttcaaattgcacacgtcactccagcatctctgtaaaataattggaatgaaaatacttcttgcacttaaacactgcacatgccgtactttgaggttagtctgaatcttgaactttaataccaaattaattttgaatgcttttgtttcctaagagataatggcatggtttcatatgttatactttggacagacagagttttaaaaatggaattattttttctttcatgcctcttgtaatgttctgaacaaacttgaatgatgaaagtattaaagagatatcagtatttgaggtttgtattttcttctgtctctggggaggatttctcagtggtggtgggagcccagtcttggagtgaaagtgacacctgctgtccataattcagcaagctcaagtcttatccatgggactggggtcgggcagcctctttattctgcagttgctctgtggggctgtgccag

SEQ ID NO: 38589 - DNA, 1613 bp, Homo sapiens
  misc_feature (126)..(127): n is a, c, g, or t
agcgggggggcgccctcccttccggggagcggggagccgccgccgcgtccgccgggcggctcccaccccgccccccgcagctctaggtgacgcgtctccaataacagctcgccgggagccgcagcnngggcacagccggcggccgcgccccgccgccaccatgagggccgagggcctcggcggcctggagcgcttctgcagcccgggcaaaggccgggggctgcgggctctgcagcccttccaggtgggggacttgctgttctcctgcccggcctatgcctacgtgctcacggtcaacgagcggggcaaccactgcgagtactgcttcaccaggaaagaaggattgtccaaatgtggaagatgcaagcaggcattttactgcaatgtggagtgtcagaaagaagattggcccatgcacaagctggaatgttctcccatggttgtttttggggaaaactggaatccctcggagactgtaagactaacagcaaggattctggccaaacagaaaatccacccagagagaacaccttcggaaaaattgttagctgtgaaggagtttgaatcacatctggataagttagacaatgagaagaaggatttgattcagagtgacatagctgctctccatcacttttactccaagcatctcgaattccctgacaatgatagcctcgtagtactctttgcacaggttaactgtaatggcttcacaattgaagatgaagaactttctcatttgggatcagcgatatttcctgagtaggctgtgtttgacttcatttctttcctttttacttacttaacactaatttgatttttttttcatttttaaataacccacctaactgcatgtggcagacatgaaactcaaagtgaattaaaacagctttttaatctgccagatttcaaaatatttcccctacacttaaggatccaaaggtagtagttaagagaacagttgcttgttaagtcctgctaggcagagagctgttattaaagaatattttatagcgtgcatagaaggaacagctcatgccctgctgagaaatttgctttctgcctatctgtggttctggaaatctttccatttcttatgctcaaagtgaaacattaattgccaaccaagaattggccacaagcttgagtacagactatatgagcttcttctccatctgtcctttttgataaataccagtacagaaacagcacaatttggagggagaatatgctgaagtagtgggccggataaaaatttcaaagaactgtaggattttctctggatttgaagaatacttgagtaattcagcaaaggctagccagttgacaaatggagatctttatagatctgactttaatggattgccaagaatgattttgcctttgtctgtctcatggaatgagtatttccaaaatgcttcagtccctgaaatcaaacccttgcttcacagatagagccaaggaattcatcatgcatccccccagcctccaaattaatccacattgtagataagttctatccagagggaggttgcttaacatatactgcaggggcctttgcctgtaggttgccacataggtaggaaacccttaatactcatgcatttgccctg

SEQ ID NO: 38590 - DNA, 831 bp, Homo sapiens
cggacgcgtgggtccggacgcgtgggctaatttgatttttttttcatttttaaataacccacctaactgcatgtggcagacatgaaactcaaagtgaattaaaacagctttttaatctgccagatttcaaaatatttcccctacacttaaggatccaaaggtagtagttaagagaacagttgcttgttaagtcctgctaggcagagagctgttattaaagaatattttatagcgtgcatagaaggaacagctcatgccctgctgagaaatttgctttctgcctatctgtggttctggaaatctttccatttcttatgctcaaagtgaaacattaattgccaaccaagaattggccacaagcttgagtacagactatatgagcttcttctccatctgtcctttttgataaataccagtacagaaacagcacaatttggagggagaatatgctgaagtagtgggccggataaaaatttcaaagaactgtaggattttctctggatttgaagaatacttgagtaattcagcaaaggctagccagttgacaaatggagatctttatagatctgactttaatggattgccaagaatgattttgcctttgtctgtctcatggaatgagtatttccaaaatgcttcagtccctgaaatcaaacccttgcttcacagatagagccaaggaattcatcatgcatccccccagcctccaaattaatccacattgtagataagttctatccagagggaggttgcttaacatatactgcaggggcctttgcctgtaggttgccacataggtaggaaacccttaatactcatgcatttgccctg

SEQ ID NO: 38591 - DNA, 384 bp, Homo sapiens
aaaaatacaaaaaattagccaggcatggtggtgggcgcctgtggtcccagctactcgggaagctgaggcaggagaatggcgtgaacccgggatgcggagcttgcagtgagcggagatcgcaccactgcactccagcctgggcgacagagcgagactccgtctcaaaataaataaataaattaaaataaaaacaggtcctggtggagaacataggctctaatggccagtttgcatcctgtgccttaaagcagagagatccaacttaaagttaccctgggtggaggtgtgaggagattggcttctaggctctcattgtttgtcttgctttttcctaggccattgcaatcatggaagtagctcacggcaaagatcatccatatattt

SEQ ID NO: 38592 - DNA, 1027 bp, Homo sapiens
  misc_feature (31)..(31): n is a, c, g, or t
  misc_feature (40)..(40): n is a, c, g, or t
cgaattccgagtctcggtaaccctccaaganccgctggcnagaagttcagagactgtacagggaaatcaagaccgggagaggaggtttttaccagctatattgatctcctgtacccaacggaagatagaaatgaccggttaagagattcttatttctttacctgtgagtgccaggagtgtaccaccaaggacaaggataaggccaaggtggaaatccggaagctcagcgatcccccaaaggcagaagccatccgagacatggtcagatatgcacgcaacgtcattgaagagttccggagggccaagcactataaatcccctagtgagctgctggagatctgcgagctcagccaggagaagatgagctctgtgtttgaggacagtaacgtgtacatgttgcacatgatgtaccaggccatgggtgtctgcttgtacatgcaggactgggaaggagccctgcaatatggacagaaaatcattaagccctacagtaagcactatcctttgtactccctcaacgtggcctccatgtggttgaagctagggagactctacatgggcctggaacacaaagccgcaggggagaaagccctgaagaaggccattgcaatcatggaagtagctcacggcaaagatcatccatatatttctgagatcaaacaggaaattgaaagccactgaaactatgcagcatttcagttttcatttaaacacttagttcagaaaccttaaaggatttgaatatttcaaattgcacacgtcactccagcatctctgtaaaataattggaatgaaaatacttcttgcacttaaacactgcacatgccgtactttgaggttagtctgaatcttgaactttaataccaaattaattttgaatgcttttgtttcctaagagataatggcatggtttcatatgttatactttggacagacagagttttaaaaatggaattattttttctttcatgcctcttgtaatgttctgaacaaacttgaatgatgaaagtattaaagagatatcagt

SEQ ID NO: 38593 - DNA, 1361 bp, Homo sapiens
  misc_feature (126)..(127): n is a, c, g, or t
agcgggggggcgccctcccttccggggagcggggagccgccgccgcgtccgccgggcggctcccaccccgccccccgcagctctaggtgacgcgtctccaataacagctcgccgggagccgcagcnngggcacagccggcggccgcgccccgccgccaccatgagggccgagggcctcggcggcctggagcgcttctgcagcccgggcaaaggccgggggctgcgggctctgcagcccttccaggtgggggacttgctgttctcctgcccggcctatgcctacgtgctcacggtcaacgagcggggcaaccactgcgagtactgcttcaccaggaaagaaggattgtccaaatgtggaagatgcaagcaggcattttactgcaatgtggagtgtcagaaagaagattggcccatgcacaagctggaatgttctcccatggttgtttttggggaaaactggaatccctcggagactgtaagactaacagcaaggattctggccaaacagaaaatccacccagagagaacaccttcggaaaaattgttagctgtgaaggagtttgaatcacatctggataagttagacaatgagaagaaggatttgattcagagtgacatagctgctctccatcacttttactccaagcatctcgaattccctgacaatgatagcctcgtagtactctttgcacaggttaactgtaatggcttcacaattgaagatgaagaactttctcatttgggatcagcgatatttcctgatgttgcattgatgaatcatagctgttgccccaatgtcattgtgacctacaaagggaccctggcagaagtcagagctgtacaggaaatcaagccgggagaggaggtttttaccagctatattgatctcctgtacccaacggaagatagaaatgaccggttaagagattcttatttctttacctgtgagtgccaggagtgtaccaccaaggacaaggataaggccaaggtggaaatccggaagctcagcgatcccccaaaggcagaagccatccgagacatggtcagatatgcacgcaacgtcattgaagagttccggagggccaagcactataaatcccctagtgagctgctggagatctgcgagctcagccaggagaagatgagctctgtgtttgaggacagtaacgtgtacatgttgcacatgatgtaccaggccatgggtgtctgcttgtacatgcaggactgggaaggagccctgcaatatggacagaaaatcattaagccctacagtaagcactatcctttgtgttccaggcccatgtagagtctccctagcttcaaccaccgggaggccacgttgagggagtacaaagtacgac

SEQ ID NO: 38594 - DNA, 1099 bp, Homo sapiens
  misc_feature (126)..(127): n is a, c, g, or t
  misc_feature (1037)..(1037): n is a, c, g, or t
  misc_feature (1053)..(1053): n is a, c, g, or t
agcgggggggcgccctcccttccggggagcggggagccgccgccgcgtccgccgggcggctcccaccccgccccccgcagctctaggtgacgcgtctccaataacagctcgccgggagccgcagcnngggcacagccggcggccgcgccccgccgccaccatgagggccgagggcctcggcggcctggagcgcttctgcagcccgggcaaaggccgggggctgcgggctctgcagcccttccaggtgggggacttgctgttctcctgcccggcctatgcctacgtgctcacggtcaacgagcggggcaaccactgcgagtactgcttcaccaggaaagaaggattgtccaaatgtggaagatgcaagcaggcattttactgcaatgtggagtgtcagaaagaagattggcccatgcacaagctggaatgttctcccatggttgtttttggggaaaactggaatccctcggagactgtaagactaacagcaaggattctggccaaacagaaaatccacccagagagaacaccttcggaaaaattgttagctgtgaaggagtttgaatcacatctggataagttagacaatgagaagaaggatttgattcagagtgacatagctgctctccatcacttttactccaagcatctcgaattccctgacaatgatagcctcgtagtactctttgcacaggttaactgtaatggcttcacaattgaagatgaagaactttctcatttgggatcagcgatatttcctgatgttgcattgatgaatcatagctgttgccccaatgtcattgtgacctacaaagggaccctggcagaagtcagagctgtacaggaaatcaagccgggagaggaggtttttaccagctatattgatctcctgtacccaacggaagatagaaatgaccggttaagagattcttatttctttacctggtgaagttgccccaaagggggaaaggcttgtaccacgccaaagggggaaccaaaaggggaataaaatgggccaaggtggaaatccggaaggnccctttcccaaaaggncccgggaaaaatttcccccccaacgccaaaaaaaggcaagaaacgc

SEQ ID NO: 38595 - DNA, 3054 bp, Homo sapiens
gaaaacctcctgggggagcctgcggcgcggtcctttcctgtgtccccttcgctgcgggtcctgcccggggccgcgccaggtggaggccccgagaggcggcgcgtttcctgcgctccgggattgcgggagaagcgtgagtccctgtctccgagactagaggccacggacacccgcgcaggagcatcccctggcaccccgccccacgcccgtccttccggagtctacacatcggcgacctcccgtgtctaggcgcacacatttcccgccccgcggagactcccacgccccgggccctctctgccgcaggcgccagatcccgcctctgggggctggaccgagagggtcctcggcggcttctttaaggctgcggtccccgccccgtcgtcctccccgccctcctccctctcgccgcggctcctcccgccctcccagagcagccgggcggctgggcgcgcgcggcgcagagcaggtgccggggagcccttcgcatgcggctgccgggccggaggtggtagcggcgccgggcgcgctccgcccgcccctcctccgggccgcactgaggctcgggcgcgcggggacatgtcggtggcgacgggcagcagcgaggcggccggcggggccagcggcggcggcgcacgggttttcttccaaagcccccggggtggcgccggtggcagccccggctccagcagcggctcaggctcctcccgggaggactcggcgcccgtggccacggcggccgctgcagggcaggttcagcagcaacagcagcggcgacaccagcagggaaaagtgacagtgaaatacgatcgtaaggagcttcggaagcggctggtgctggaggaatggatcgtggagcagctgggtcagctctacggctgcgaggaagaagaaatgccagaggtagaaattgacattgatgatcttcttgatgcagacagtgatgaagagagagcttcaaaattacaggaagctcttgtagactgctacaaaccaacagaggaatttatcaaagagctgctttctcggataagaggcatgaggaaactgagccctccgcagaagaagagtgtatgattctggaacagggtgaaactctcccagagacgaagaaagagtcctgggatttgtacttcatgaagacttttgtgaaagaataggtgtccttatgaacaacgtttttgtttttttttttttcttttttggtgtgaaggtgggggggtctattagacatttattcaagagcgttctttttttggttttaaaggtttttgttaatgtaatattttaatagcaaagatatcatgactctagccacagcctaaccaaggattatcaaaggaggtggacactcaaggaagggccacgccaggctgcgtttcctgcaaggactcagatgttcagtaccttatgatacagggaagatagttttcttacaagtagtttggtaatattttttttcttaagttgtacatttgactcagctgtcaaatttctcacacttgtatatatctacacacaactaagttaaaatgttgatgtgagttttatttcacatggatggaataaacttgtggttgtcctttaactggaggtcccagcacatgtgttttcaagaggccactaggcattcttcactgagtgctgctgacttcaacgttcactttatgcaccaaagtgaaagaattcagtgtatccgttattttaatgcactacaccacagaaatgttaagttggtcaagggcttaatttatggaatttctattatttcattggttgggatgctttgccaggtcatgtgcttattgtctcattttgtagtcttttaaagttgtatgaacccttaatttgaagaactaacttgatttctagagaaatatccacactatctcagtggtattttgcattggaaaaaggaagcactgtgtagcagtgaattgtctgctttccaccgagtactgtgtttattctctctccaggaaagcagatcaaaagaaagttagcagatcgagtgtcttcttccttagaaataggttctggtagcttctgtgcctgggtagtatcagaccagtgggagtaaaccgagtgttaagtgtcaaggtgagaaagcctcacattctctcaagacagttgctctaggagctgagttgctggtttggaagtgtggagattgcatttctggcttctctcaatggcttgtgttgaggactctgggtgctcctggccctaattgtgcaccctgatccccgtgcttggagctaggcctggtggcgtgctctagccctctcagttaccagctctttggagaaggatcaaaattcagatggaatgtgggatgggtaataggtgagagtagaaacccttccctccaggaggcccccgctgactcccacagaaacccacctaccataagatgtcttcaggtggccttgtccaaggatgggggtcaggcattttatatcaagggtgctctgaacatattttattttttaaaaaaactatgtttgtgaattttgcgtatactggcaagcttttgaaaatgtatttaattttgtattgtttaccaatgatttatttacaagatatttactcaaataaatggagctgcttacaaaaaaaaaaaaaaaaaaaaaaaaaaaaaaaaaaaaaaaaaaaaaaaaaaaaaaaaaaaaaaaaaaaaacaaaaaaaaaaaaaaaaaaaaaaaaaaaaaaaacaaaaaaaaaaaaaaaaaaaaaaaaaaaaaaaaaacacggcgggggggggcgggggagaaagaaaaaaaaaaaaaaacaacaggcggggggggggaccaggaagagaaagaagaacgggagtggagagagaagaacaagagaggggcagaacaaaaggcgagggggagacaccaacataaagaaacaagcaggggggagggaagaaaagaagaggagaaagcaagcaaacagaggagagacggagcaagacacagaaaaggagagtaagaataacagaggaggacaacagaacgacgacgaccaagcaaaacgagacacccccgcgccggggggagaggt

SEQ ID NO: 38596 - DNA, 2531 bp, Homo sapiens
gaaaacctcctgggggagcctgcggcgcggtcctttcctgtgtccccttcgctgcgggtcctgcccggggccgcgccaggtggaggccccgagaggcggcgcgtttcctgcgctccgggattgcgggagaagcgtgagtccctgtctccgagactagaggccacggacacccgcgcaggagcatcccctggcaccccgccccacgcccgtccttccggagtctacacatcggcgacctcccgtgtctaggcgcacacatttcccgccccgcggagactcccacgccccgggccctctctgccgcaggcgccagatcccgcctctgggggctggaccgagagggtcctcggcggcttctttaaggctgcggtccccgccccgtcgtcctccccgccctcctccctctcgccgcggctcctcccgccctcccagagcagccgggcggctgggcgcgcgcggcgcagagcaggtgccggggagcccttcgcatgcggctgccgggccggaggtggtagcggcgccgggcgcgctccgcccgcccctcctccgggccgcactgaggctcgggcgcgcggggacatgtcggtggcgacgggcagcagcgaggcggccggcggggccagcggcggcggcgcacgggttttcttccaaagcccccggggtggcgccggtggcagccccggctccagcagcggctcaggctcctcccgggaggactcggcgcccgtggccacggcggccgctgcagggcaggttcagcagcaacagcagcggcgacaccagcagggaaaagtgacagtgaaatacgatcgtaaggagcttcggaagcggctggtgctggaggaatggatcgtggagcagctgggtcagctctacggctgcgaggaatttatcaaagagctgctttctcggataagaggcatgaggaaactgagccctccgcagaagaagagtgtatgattctggaacagggtgaaactctcccagagacgaagaaagagtcctgggatttgtacttcatgaagacttttgtgaaagaataggtgtccttatgaacaacgtttttgtttttttttttttcttttttggtgtgaaggtgggggggtctattagacatttattcaagagcgttctttttttggttttaaaggtttttgttaatgtaatattttaatagcaaagatatcatgactctagccacagcctaaccaaggattatcaaaggaggtggacactcaaggaagggccacgccaggctgcgtttcctgcaaggactcagatgttcagtaccttatgatacagggaagatagttttcttacaagtagtttggtaatattttttttcttaagttgtacatttgactcagctgtcaaatttctcacacttgtatatatctacacacaactaagttaaaatgttgatgtgagttttatttcacatggatggaataaacttgtggttgtcctttaactggaggtcccagcacatgtgttttcaagaggccactaggcattcttcactgagtgctgctgacttcaacgttcactttatgcaccaaagtgaaagaattcagtgtatccgttattttaatgcactacaccacagaaatgttaagttggtcaagggcttaatttatggaatttctattatttcattggttgggatgctttgccaggtcatgtgcttattgtctcattttgtagtcttttaaagttgtatgaacccttaatttgaagaactaacttgatttctagagaaatatccacactatctcagtggtattttgcattggaaaaaggaagcactgtgtagcagtgaattgtctgctttccaccgagtactgtgtttattctctctccaggaaagcagatcaaaagaaagttagcagatcgagtgtcttcttccttagaaataggttctggtagcttctgtgcctgggtagtatcagaccagtgggagtaaaccgagtgttaagtgtcaaggtgagaaagcctcacattctctcaagacagttgctctaggagctgagttgctggtttggaagtgtggagattgcatttctggcttctctcaatggcttgtgttgaggactctgggtgctcctggccctaattgtgcaccctgatccccgtgcttggagctaggcctggtggcgtgctctagccctctcagttaccagctctttggagaaggatcaaaattcagatggaatgtgggatgggtaataggtgagagtagaaacccttccctccaggaggcccccgctgactcccacagaaacccacctaccataagatgtcttcaggtggccttgtccaaggatgggggtcaggcattttatatcaagggtgctctgaacatattttattttttaaaaaaactatgtttgtgaattttgcgtatactggcaagcttttgaaaatgtatttaattttgtattgtttaccaatgatttatttacaagatatttactcaaataaatggagctgcttacaagcctgttgacatgtgtggcttgcacaacacgtta

SEQ ID NO: 38597 - DNA, 1167 bp, Homo sapiens
gaaaacctcctgggggagcctgcggcgcggtcctttcctgtgtccccttcgctgcgggtcctgcccggggccgcgccaggtggaggccccgagaggcggcgcgtttcctgcgctccgggattgcgggagaagcgtgagtccctgtctccgagactagaggccacggacacccgcgcaggagcatcccctggcaccccgccccacgcccgtccttccggagtctacacatcggcgacctcccgtgtctaggcgcacacatttcccgccccgcggagactcccacgccccgggccctctctgccgcaggcgccagatcccgcctctgggggctggaccgagagggtcctcggcggcttctttaaggctgcggtccccgccccgtcgtcctccccgccctcctccctctcgccgcggctcctcccgccctcccagagcagccgggcggctgggcgcgcgcggcgcagagcaggtgccggggagcccttcgcatgcggctgccgggccggaggtggtagcggcgccgggcgcgctccgcccgcccctcctccgggccgcactgaggctcgggcgcgcggggacatgtcggtggcgacgggcagcagcgaggcggccggcggggccagcggcggcggcgcacgggttttcttccaaagcccccggggtggcgccggtggcagccccggctccagcagcggctcaggctcctcccgggaggactcggcgcccgtggccacggcggccgctgcagggcaggttcagcagcaacagcagcggcgacaccagcagggaaaagtgacagtgaaatacgatcgtaaggagcttcggaagcggctggtgctggaggaatggatcgtggagcagctgggtcagctctacggctgcgaggaagaagaaatgccagaggtagaaattgacattgatgatcttcttgatgcagacagtgatgaagagagagcttcaaaattacaggaagctcttgtagactgctacaaaccaacagaggaatttatcaaagagctgctttctcggataagaggcatgaggaaactgagccctccgcagaagaagagtgtatgattctggaacagggtgaaactctcccaggactctttcacaatgtaaacgcaaaacttaatttgtaatgcttatgatacatgtaaagaaggt

SEQ ID NO: 38598 - DNA, 2648 bp, Homo sapiens
gaaaacctcctgggggagcctgcggcgcggtcctttcctgtgtccccttcgctgcgggtcctgcccggggccgcgccaggtggaggccccgagaggcggcgcgtttcctgcgctccgggattgcgggagaagcgtgagtccctgtctccgagactagaggccacggacacccgcgcaggagcatcccctggcaccccgccccacgcccgtccttccggagtctacacatcggcgacctcccgtgtctaggcgcacacatttcccgccccgcggagactcccacgccccgggccctctctgccgcaggcgccagatcccgcctctgggggctggaccgagagggtcctcggcggcttctttaaggctgcggtccccgccccgtcgtcctccccgccctcctccctctcgccgcggctcctcccgccctcccagagcagccgggcggctgggcgcgcgcggcgcagagcaggtgccggggagcccttcgcatgcggctgccgggccggaggtggtagcggcgccgggcgcgctccgcccgcccctcctccgggccgcactgaggctcgggcgcgcggggacatgtcggtggcgacgggcagcagcgaggcggccggcggggccagcggcggcggcgcacgggttttcttccaaagcccccggggtggcgccggtggcagccccggctccagcagcggctcaggctcctcccgggaggactcggcgcccgtggccacggcggccgctgcagggcaggttcagcagcaacagcagcggcgacaccagcagggaaaagtgacagtgaaatacgatcgtaaggagcttcggaagcggctggtgctggaggaatggatcgtggagcagctgggtcagctctacggctgcgaggaagaagaaatgccagaggtagaaattgacattgatgatcttcttgatgcagacagtgatgaagagagagcttcaaaattacaggaagctcttgtagactgctacaaaccaacagaggaatttatcaaagagctgctttctcggataagaggcatgaggaaactgagccctccgcagaagaagagtgtatgattctggaacagggtgaaactctcccagagacgaagaaagagtcctgggatttgtacttcatgaagacttttgtgaaagaataggtgtccttatgaacaacgtttttgtttttttttttttcttttttggtgtgaaggtgggggggtctattagacatttattcaagagcgttctttttttggttttaaaggtttttgttaatgtaatattttaatagcaaagatatcatgactctagccacagcctaaccaaggattatcaaaggaggtggacactcaaggaagggccacgccaggctgcgtttcctgcaaggactcagatgttcagtaccttatgatacagggaagatagttttcttacaagtagtttggtaatattttttttcttaagttgtacatttgactcagctgtcaaatttctcacacttgtatatatctacacacaactaagttaaaatgttgatgtgagttttatttcacatggatggaataaacttgtggttgtcctttaactggaggtcccagcacatgtgttttcaagaggccactaggcattcttcactgagtgctgctgacttcaacgttcactttatgcaccaaagtgaaagaattcagtgtatccgttattttaatgcactacaccacagaaatgttaagttggtcaagggcttaatttatggaatttctattatttcattggttgggatgctttgccaggtcatgtgcttattgtctcattttgtagtcttttaaagttgtatgaacccttaatttgaagaactaacttgatttctagagaaatatccacactatctcagtggtattttgcattggaaaaaggaagcactgtgtagcagtgaattgtctgctttccaccgagtactgtgtttattctctctccaggaaagcagatcaaaagaaagttagcagatcgagtgtcttcttccttagaaataggttctggtagcttctgtgcctgggtagtatcagaccagtgggagtaaaccgagtgttaagtgtcaaggtgagaaagcctcacattctctcaagacagttgctctaggagctgagttgctggtttggaagtgtggagattgcatttctggcttctctcaatggcttgtgttgaggactctgggtgctcctggccctaattgtgcaccctgatccccgtgcttggagctaggcctggtggcgtgctctagccctctcagttaccagctctttggagaaggatcaaaattcagatggaatgtgggatgggtaataggtgagagtagaaacccttccctccaggaggcccccgctgactcccacagaaacccacctaccataagatgtcttcaggtggccttgtccaaggatgggggtcaggcattttatatcaagggtgctctgaacatattttattttttaaaaaaactatgtttgtgaattttgcgtatactggcaagcttttgaaaatgtatttaattttgtattgtttaccaatgatttatttacaagatatttactcaaataaatggagctgcttacaagcctgttgacatgtgtggcttgcacaacacgtta

SEQ ID NO: 38599 - DNA, 2931 bp, Homo sapiens
gaaaacctcctgggggagcctgcggcgcggtcctttcctgtgtccccttcgctgcgggtcctgcccggggccgcgccaggtggaggccccgagaggcggcgcgtttcctgcgctccgggattgcgggagaagcgtgagtccctgtctccgagactagaggccacggacacccgcgcaggagcatcccctggcaccccgccccacgcccgtccttccggagtctacacatcggcgacctcccgtgtctaggcgcacacatttcccgccccgcggagactcccacgccccgggccctctctgccgcaggcgccagatcccgcctctgggggctggaccgagagggtcctcggcggcttctttaaggctgcggtccccgccccgtcgtcctccccgccctcctccctctcgccgcggctcctcccgccctcccagagcagccgggcggctgggcgcgcgcggcgcagagcaggtgccggggagcccttcgcatgcggctgccgggccggaggtggtagcggcgccgggcgcgctccgcccgcccctcctccgggccgcactgaggctcgggcgcgcggggacatgtcggtggcgacgggcagcagcgaggcggccggcggggccagcggcggcggcgcacgggttttcttccaaagcccccggggtggcgccggtggcagccccggctccagcagcggctcaggctcctcccgggaggactcggcgcccgtggccacggcggccgctgcagggcaggttcagcagcaacagcagcggcgacaccagcagggaaaagtgacagtgaaatacgatcgtaaggagcttcggaagcggctggtgctggaggaatggatcgtggagcagctgggtcagctctacggctgcgaggaagaagaaatgccagaggtagaaattgacattgatgatcttcttgatgcagacagtgatgaagagagagcttcaaaattacaggaagctcttgtagactgctacaaaccaacagagacggagtctcgctctgttgcgcaggttggagtgcagtggtgtgatctcggctcactgcaacctccgcctcctgagttcaaccaattctcccgcctcagcctcctgagtagctgggattacagacgtgcgtcaccacgcccggctaatttttgtatttttagtagagacggggtttcaccatgttggccaggctggtctcaaactcctgacctcaggtattcacccgcctcggcctcccaaagtgctgggattacaggtgtgagccaccgcacccggcctatcggaatttatcaaagagctgctttctcggataagaggcatgaggaaactgagccctccgcagaagaagagtgtatgattctggaacagggtgaaactctcccagagacgaagaaagagtcctgggatttgtacttcatgaagacttttgtgaaagaataggtgtccttatgaacaacgtttttgtttttttttttttcttttttggtgtgaaggtgggggggtctattagacatttattcaagagcgttctttttttggttttaaaggtttttgttaatgtaatattttaatagcaaagatatcatgactctagccacagcctaaccaaggattatcaaaggaggtggacactcaaggaagggccacgccaggctgcgtttcctgcaaggactcagatgttcagtaccttatgatacagggaagatagttttcttacaagtagtttggtaatattttttttcttaagttgtacatttgactcagctgtcaaatttctcacacttgtatatatctacacacaactaagttaaaatgttgatgtgagttttatttcacatggatggaataaacttgtggttgtcctttaactggaggtcccagcacatgtgttttcaagaggccactaggcattcttcactgagtgctgctgacttcaacgttcactttatgcaccaaagtgaaagaattcagtgtatccgttattttaatgcactacaccacagaaatgttaagttggtcaagggcttaatttatggaatttctattatttcattggttgggatgctttgccaggtcatgtgcttattgtctcattttgtagtcttttaaagttgtatgaacccttaatttgaagaactaacttgatttctagagaaatatccacactatctcagtggtattttgcattggaaaaaggaagcactgtgtagcagtgaattgtctgctttccaccgagtactgtgtttattctctctccaggaaagcagatcaaaagaaagttagcagatcgagtgtcttcttccttagaaataggttctggtagcttctgtgcctgggtagtatcagaccagtgggagtaaaccgagtgttaagtgtcaaggtgagaaagcctcacattctctcaagacagttgctctaggagctgagttgctggtttggaagtgtggagattgcatttctggcttctctcaatggcttgtgttgaggactctgggtgctcctggccctaattgtgcaccctgatccccgtgcttggagctaggcctggtggcgtgctctagccctctcagttaccagctctttggagaaggatcaaaattcagatggaatgtgggatgggtaataggtgagagtagaaacccttccctccaggaggcccccgctgactcccacagaaacccacctaccataagatgtcttcaggtggccttgtccaaggatgggggtcaggcattttatatcaagggtgctctgaacatattttattttttaaaaaaactatgtttgtgaattttgcgtatactggcaagcttttgaaaatgtatttaattttgtattgtttaccaatgatttatttacaagatatttactcaaataaatggagctgcttacaagcctgttgacatgtgtggcttgcacaacacgtta

SEQ ID NO: 38600 - DNA, 2593 bp, Homo sapiens
gaaaacctcctgggggagcctgcggcgcggtcctttcctgtgtccccttcgctgcgggtcctgcccggggccgcgccaggtggaggccccgagaggcggcgcgtttcctgcgctccgggattgcgggagaagcgtgagtccctgtctccgagactagaggccacggacacccgcgcaggagcatcccctggcaccccgccccacgcccgtccttccggagtctacacatcggcgacctcccgtgtctaggcgcacacatttcccgccccgcggagactcccacgccccgggccctctctgccgcaggcgccagatcccgcctctgggggctggaccgagagggtcctcggcggcttctttaaggctgcggtccccgccccgtcgtcctccccgccctcctccctctcgccgcggctcctcccgccctcccagagcagccgggcggctgggcgcgcgcggcgcagagcaggtgccggggagcccttcgcatgcggctgccgggccggaggtggtagcggcgccgggcgcgctccgcccgcccctcctccgggccgcactgaggctcgggcgcgcggggacatgtcggtggcgacgggcagcagcgaggcggccggcggggccagcggcggcggcgcacgggttttcttccaaagcccccggggtggcgccggtggcagccccggctccagcagcggctcaggctcctcccgggaggactcggcgcccgtggccacggcggccgctgcagggcaggttcagcagcaacagcagcggcgacaccagcagggaaaagtgacagtgaaatacgatcgtaaggagcttcggaagcggctggtgctggaggaatggatcgtggagcagctgggtcagctctacggctgcgaggaagaagaaatgccagaggtagaaattgacattgatgatcttcttgatgcagacagtgatgaagagagagcttcaaaattacaggaagctcttgtagactgctacaaaccaacagaggaatttatcaaagagctgctttctcggataagaggcatgaggaaactgagccctccgcagaagaagagtgtatgattctggaacagggtgaaactctcccagagacgaagaaagagtcctgggatttgtacttcatgaagacttttgtgaaagaataggtgtccttatgaacaacgtttttgtttttttttttttcttttttggtgtgaaggtgggggggtctattagacatttattcaagagcgttctttttttggttttaaaggtttttgttaatgtaatattttaatagcaaagatatcatgactctagccacagcctaaccaaggattatcaaaggaggtggacactcaaggaagggccacgccaggctgcgtttcctgcaaggactcagatgttcagtaccttatgatacagggaagatagttttcttacaagtagtttggtaatattttttttcttaagttgtacatttgactcagctgtcaaatttctcacacttgtatatatctacacacaactaagttaaaatgttgatgtgagttttatttcacatggatggaataaacttgtggttgtcctttaactggaggtcccagcacatgtgttttcaagaggccactaggcattcttcactgagtgctgctgacttcaacgttcactttatgcaccaaagtgaaagaattcagtgtatccgttattttaatgcactacaccacagaaatgttaagttggtcaagggcttaatttatggaatttctattatttcattggttgggatgctttgccaggtcatgtgcttattgtctcattttgtagtcttttaaagttgtatgaacccttaatttgaagaactaacttgatttctagagaaatatccacactatctcagtggtattttgcattggaaaaaggaagcactgtgtagcagtgaattgtctgctttccaccgagtactgtgtttattctctctccaggaaagcagatcaaaagaaagttagcagatcgagtgtcttcttccttagaaataggttctggtagcttctgtgcctgggtagtatcagaccagtgggagtaaaccgagtctgagttgctggtttggaagtgtggagattgcatttctggcttctctcaatggcttgtgttgaggactctgggtgctcctggccctaattgtgcaccctgatccccgtgcttggagctaggcctggtggcgtgctctagccctctcagttaccagctctttggagaaggatcaaaattcagatggaatgtgggatgggtaataggtgagagtagaaacccttccctccaggaggcccccgctgactcccacagaaacccacctaccataagatgtcttcaggtggccttgtccaaggatgggggtcaggcattttatatcaagggtgctctgaacatattttattttttaaaaaaactatgtttgtgaattttgcgtatactggcaagcttttgaaaatgtatttaattttgtattgtttaccaatgatttatttacaagatatttactcaaataaatggagctgcttacaagcctgttgacatgtgtggcttgcacaacacgtta

SEQ ID NO: 38601 - DNA, 432 bp, Homo sapiens
agcccaactgtaaatgccattgcccaattaccccttctctttcttctttgtattgtgaagggttttgttgtcaagaacagtagagagaggaatacgatccccctgtacactccaccttgattttcatgaacacggtgccacatttgtctcatctattttttcaatgtgttagatttttgtaattaaaatataattcacatataaaaaatacacagctagtggccgggtgtgatggctcacacctgtaatcccagcactttggtaggctgaggtgggcagatcacctgaggccaagagttcgagaccaggctggccaacatggagaaacccgtctctactaaaaaatacaaaactcagccaggtatggtggcaggcgcctgtaatctacttgggaggctgaggcaggagtattgcttgaacccaggaggtgga

SEQ ID NO: 38602 - DNA, 314 bp, Homo sapiens
agagacacagagtgcattgcccgggtgccacttcaaggaaggacttgctgcccagctgcagggagtgtggtcaacaggcggcctccagctgttagcaactgaagggtctgccttgactgcacaacacgtagtctttaacctcctggagttgattatctgaccaatgccaaatacagattggcccgaggtttcacccctcccagggcagcttgctgctgggggtataatggccagctatttcagccaggtgcccgcaaccctgaagagcaacctccactccaactccttttgggttgagtgagactttgtcctgc

SEQ ID NO: 38603 - DNA, 449 bp, Homo sapiens
caagttattccaaatgaaggcgtaagaaagggaataataacaataataagaggagttgttcatgaggaaaaaccaaagcttgaaaattcaacaaagccagtgaagctcattcttgaaaacatgaatcacactcatgaattctaactacaatgaaaaagagaaagaaagagcaggcatgcatttccatatgggagtgagccagcagacagccctacagatcgtacacacgttttccaaaactaacaatggaacaggcggcaaacctatgccaatatactagaaattgcagattaaatagatgaaatattctaaactggagtttacataatgaacataagagtaatcagagaatctgactcattttagatgtgtgtgtgtgtgtatatatatgtgtgtgtgtgtgaaaaacattgactataataaaaataatctcgagttcaaaaaaaaaa

SEQ ID NO: 38604 - DNA, 419 bp, Homo sapiens
aagaggttggctgctggatccttcttgaaaaggaagagcagacaggatttgctggcagattggagtgggtgtgagagaggagtaaaggatgataccagggatttttgtagctggtgggcgttgccatgtataaggaaagggaagacttgggaagaacagcgtgtggaagtaagatcaggagttgggttttgtgcatgttcagtttctgaagcttttggagagcagattggagatatgctggattggggtgttcactgctcaagggagagatctaggctgcagatagaaataggagtctttgggccgggcgcggtggctcactcctgtaatcccagcactttgggaggctgagacgggcggatcacaaggtcaggagatgagaccatcctggctaacatggtgaaaccccgtctctacta

SEQ ID NO: 38605 - DNA, 456 bp, Homo sapiens
taaacaatcaaaataccaaatgttttaatccacaaaactgaaagtctttcctggaagacaagtgacattacatttcttcaatctatattcattcaaatatatgctaaaagtattatatttcaatagaaagggataattctgtcttccaagatataagatacaaacatgataaaaaagtttttaaaaaaagtccaacaagggcagaagcactagtgtagagagttgggaggataaaagggcaaagccagaggcaagtatgataggttcagatcagaaacagggctgtctatgaagtcatacctgggtgctcatgcacccaaatttaaagtgtgtagaacaaatagtccagggcccaataaaagcaagtcaaaaaacaagagctaagccagctgtatcaatcaccagtcataagaacagggtccggactgtgttcatcatttttggaggtcagggaat

SEQ ID NO: 38606 - DNA, 802 bp, Homo sapiens
ggatgcagtgtgctggcgtggtcctctcctttctggttctctggtggagaaaggctatggctgtagggtggggcggcctgggaggttggcccgctagttgcagaggtggtcagcctaggttgatcaagggcttttcacaacagcagtggcattgaacgttcattttggagatgccagaaactcttagaaattccactgagtcccaagggcttccgggacttgaaaaggaaagacacatttctcatctcctgggaaggttccttcagttacctaaggcatcatcttcgctaatgatgtgttaagccaaccccaggtcctggagtcactggagctcaaagaggctcattcccacctgtgggcctcccccatggggagctccttggctggctatggcctgcgtttgcctcagagagtccttgttggggcctgaccaaggcagactttggggagaatggtccctggtgttgggttttctctctgatattttcttcgttacctacgtagacttaaagaaatgtgcctctgggttgggcacagtggcactgtaatcccactgctttgggaggctgaggcaggaggatcatatgaggccaggagcacaagaccaacttaggcaacatagtgagacccccatttctgcaaaaaatttaaaccattagctgggcgtagtagtgctcacctgtagtcccagctactcaagcagctgaggtgggaggatcgcttgagcccaggagtttggggctgcagggagctgtgattatgcctctgcagtccagcctggatgatagaggaagactctgtc

SEQ ID NO: 38607 - DNA, 594 bp, Homo sapiens
tcttttctactccctccctccctcctcctactatgtgctaggtagtatgtaaggttgagaagtggaaggagatgctaaagtcagagtttgaatgcctgagggagatgcagaagttcttcacttaattatattgagaaggcaaattccatcacatcaacatgtgtgccacagtcattcaaagagtgacactgattggctttagtatactggttctgacttttggaaaccatttcctaggaagccagcacttgttaaagcttcattgatgtgaagaattggagaggggaggagtagagaggtaccttagcattgtgagagtgtaaaattcggagtcttacagtgtgctggagccacggaaagctgattgtgaagagagcctctcttcccaactccacatttggtgatgtcattggccccttgaaatgggccacagtgggggtatttacactacagaaattggcaaatgccataaaactgagctatttttttcagagatatagttgttagaccagtaaaccactgagaggtccccacatgcaggaaaatacacaaataaatactcaagatacaggccaggtgcggccgctcacgcct

SEQ ID NO: 38608 - DNA, 604 bp, Homo sapiens
gtgtgggtgacgggtagaataagagcccttgaagcaagttcagaaattctaataagctgaaatgcagcagagactgcagaggcacaaggaaagggattagatacccaaatcctgcaggggttcaggaggctatgcttcaaagcccctttgattcctgcctttcagctctctctagcggtcaccaagcgcaaagttctatgcctggttttcaagtcatttaagcagtcttttctagagacctgctgcgtgtcagacactctgctagaatccgggaacttcaggaatgaaaggaacataagtagaaaaaaaccagaagaacacaaagagtttgtactacctaacttccaagatacccttttcttctctgggcgccagtacccagagagtaccgaccttagcgccaaaattcggtcctctctgaggcagatcaggagccaccacgcccccagtgaaatggaggcggcaggaatcccacccccaacccctcttcctctccccacgactatcctcccgggggcgagagtcgcccggaagaactacccgcgcctcggcattggtttcctgctgagccccagccggataaaattagtcgattgctcacact

SEQ ID NO: 38609 - DNA, 601 bp, Homo sapiens
gaccctatctcagaagtgaataaataaaacaaatacagcatttaaatgaattgacattgagaaatttacaatttacaaatttatattaactgtagtttccaaaatatgttactgttggtcctgtaagttacaaagagactgaagaactttctttttatacattagagcattttcccctggaatgagtattgattaaaaagataacatttattaattaataaaggcaatttaaaatttagtgttatttgaagactgtcaacatctgaaggtatgaaacttggtacagtgaaataatttctcctttctccttccttttagttattcccacagaaaactcagcccagtgggaatttgtcatattatgcccatgttttaaaaatattcatagtttgaatcttattgacattttaaagaagagttttttcctccctggaatgtaaaacaaaaatattttttaatgatgtggaagtatatatttcatgttcattatgataaatctacaaacaaatgaattgtttttatgggtggagttcttctataagagtatattaaatgctttcagagttgtattaattttgtttctaaataatataccacttat

SEQ ID NO: 38610 - DNA, 230 bp, Homo sapiens
ccacaatgtttttggacctgttatccctcagcctttgggaaagagaatgtctttttctcctgttttatgagctgtgtagtgtgcgtgtgtatcttagtgaactaagattggatactaatctgggatcagaatcctgaatatggcttaaagatgtacgtcttagtacagacatttatagatgatgatgtttaataccgtagcgatcagattccaatgaattaaactgagag

SEQ ID NO: 38611 - DNA, 1013 bp, Homo sapiens
agtttcacatttatcaatctgaaaacttagtttgcagattggtaaatcagggtacttgacaagaataaatatggtacgcctttatatattcatgtgttacatgccagaaatgagtctgtttctggaccctgttcaaggaaatagtgatgactgagagaggtacagggaaataaacacccaagggaaacaacagaaataagcctccccaactttctaaaaaactgctcagcattatctctgtggattctgggtaaattcagctttttaacatcagctagtcactaatgccagaaattccacttcaagtgtatttattttcttgtgttaagcattattctacctggtttatgtctacaatgtagtattagtgtacttaggattcttgacacctcagtgtgcaataaataaaattttgaagttgttgtttttcatttgaaggtgagaccacagcccctgagttgctaaggggacctgggaatcctaggggaatggaggtggtggacgataagaggatggttgagggcaggagtttaaaggacacagaagctaggagagcagaaaatgtactccaccaccttctgtctaacttgtctcttaaaagtgcttttacattttaacttttttaaaaaatgtgggccgggcatagtggctcatgcctgtaatcccagcactttgggaggccgaggtgggcggatcacctgaggtcaagagttcaagaccagcctgaccaatatgatgaaaccccatctctactaaaaatacaaaaatagccaggtgtggtggcacatgcctgtcatcccagctactcaggaggctgaggtgggagaatcgcttgaacccgggaggtggaggttgcagtgagccgagatcatgccattgcactctagcctgggcaacgagagtgaaactctgtctcaataaataaataaaacacctggagaacagaacttccaacatattcctgaaaatgatatgtgggggggactagagggggggcaacaaaggtttgaagg

SEQ ID NO: 38612 - DNA, 1750 bp, Homo sapiens
agtttcacatttatcaatctgaaaacttagtttgcagattggtaaatcagggtacttgacaagaataaatatggtacgcctttatatattcatgtgttacatgccagaaatgagtctgtttctggaccctgttcaaggaaatagtgatgactgagagaggtacagggaaataaacacccaagggaaacaacagaaataagcctccccaactttctaaaaaactgctcagcattatctctgtggattctgggtaaattcagctttttaacatcagctagtcactaatgccagaaattccacttcaagtgtatttattttcttgtgttaagcattattctacctggtttatgtctacaatgtagtattagtgtacttaggattcttgacacctcagtgtgcaataaataaaattttgaagttgttgtttttcatttgaaggtgagaccacagcccctgagttgctaaggggacctgggaatcctaggggaatggaggtggtggacgataagaggatggttgagggcaggagtttaaaggacacagaagctaggagagcagaaaatgtactccaccaccttctgtctaacttgtctcttaaaagtgcttttacattttaacttttttaaaaaatgtgggccgggcatagtggctcatgcctgtaatcccagcactttgggaggccgaggtgggcggatcacctgaggtcaagagttcaagaccagcctgaccaatatgatgaaaccccatctctactaaaaatacaaaaatagccaggtgtggtggcacatgcctgtcatcccagctactcaggaggctgaggtgggagaatcgcttgaacccgggaggtggaggttgcagtgagccgagatcatgccattgcactctagcctgggcaacgagagtgaaactctgtctcaataaataaataaataaataaaaaataaaaaagtgtgaacttaaatatatttatatgtgtgtacatatattttcttttttaatattctggttaaatgagaggccatcgggcctctttttaagagtctaatgatgtgtatatctaatgcccattccagctggattgtaacactgcttggggaagataacttaaaaaaaagtagtaccgagattacagcagctagtgtcctaaatggaaaagaagtgaaactaaatgtcataggagaaatcctttcagttttgtgcagtggttcatttgctgttaaatctaccccattaccattccccttactccttgaaaataaagtgatcttcatgttacaaaaaaaaaaaaaaaaaaaaaaaaaaaaaaaaaaaaaacaaacaaaaaacaaaaacaaaaaaaaacgagagcaaagagcacccgcaggggagcgcagacagcagcaacgctgctacacaggagagcgagagatgagagacaaagtgtcgtagaggagtgttgaggcacaccagggacgcgaggcgagaggagcggcgacaagcgtgcggagaggatggcgagacagaagagcgagaagaagcggacacaaaaagagaaaaggaagagggagaggaaagaggggcggggaagagagggtaggaggggcgagaggaggagacagagagatacaagagagagagggaaagaggaaacgaaaggaggaggggaaggatgagtgggcacggcggtagacgacggagggggggaaggtggatagacaagaagaaagaggcggtaatcgagagcggggagaagaaagagggagagaaagag

SEQ ID NO: 38613 - DNA, 1008 bp, Homo sapiens
aattctcccacagggagaggccccgtgggtattctcccacaatctgcagcctccaccaggccttgagtagctttgggtgcagagccaggagggcgtttggctgtcctaggtctagcccctggcccaatcccagccccattccaggcccactcaaaagccaaggcccaatcccaggtccaggctcaatcctaggccctggcctgattccaagccaggcttactcccaggcccaggcttagtcctagccccaatcccaggtcctggcccaatcccaaacttaggatccctcccagccccagccctagtccccttgtgacctcagagcacttatgcctccaatttcttgccagacagtcattccctgacttcacagagctcctcccacccctagaccagttcgaggaatccttggtctccaccacgacatctcagtaccaagagggggatggctctatggacaaaaagactcgggccccaagtgattaatggatttatagggggcctgtgtctgcaaagtcctgcggataccagtggacctggagtggctggttggtctacactgctggtgaatgcaccaccaccatttaaccaccctgccgctggtgggcatttgctgtcttcactgtgtggccatcacgactagctctgctatgaatgcacctgccctcatttgagttgagcctgagcatttcgcagctgggattggagtcgctgctcatggggatgtttggcattagtggatgctacttgagagctttgtaaagagctttactcagcacttctgatagtcagcattctccctgacacttaggattgtgagactttttaatgtttgtggatccaatggcttatggcttccctgatgactgagaggttgagaagttctcacatgttaattgaaccttagaaatcctcatatgtgtccatttgtttgcccatttttcttcatttatttgaatgtatttttatattctcttgataattaaagtgctgcaaacaccccccaaa

SEQ ID NO: 38614 - DNA, 437 bp, Homo sapiens
gaactattatgactctttgaggtctatgaggcttcatccctgtggtaaggggccagaccacctgtaaggaagtggtgttcccactgctggtcatcctggggcaaggctggagaactgtttcttctcttggttcctgttgtcttgggccttgcctctgcagaataagatgcacttgaagactttttcccaggtcatggggaatgaagacttctccttgcagggaggaggaataactggacagcccccaaagagtacccacatagggccaggcgcgggtggctcacgcctctcatcccagcactttgggaggccgaggcagacagatcacgaggtcaggagttcgagaccagcctggccaacatggtgaaaccccatctctactaaaaatacaaaaagtagccaggcatggtagtgctgcatgcctataatcccagcta

SEQ ID NO: 38615 - DNA, 410 bp, Homo sapiens
tatcatggtgtggtccaggactggtggtacccttcactctgcaaagcccctgtaagggagacccaccgtcctggactgcagattcttcccacaaataacctttgaaggacaatgggcagcccacagttaaagataacaaggatagaaatggttaggcgaatattcatggagagacttgagtccgtttggcaaatcgggctgatttccagtgaatacctacagtgggcgtaggacaattaaacatgtcaaaaatgtagtctcccctgtaaacattagattctcctagtaattggccgggcacggtggctcatgcctgtaatcccagcactttgggaggccgaggtgggcggatcatgaggtcaggagatcgagaccatcctggctaacacggtgaaaccccgtctctacta

SEQ ID NO: 38616 - DNA, 571 bp, Homo sapiens
tggtgaagtaaccatctttgagactgaggttgggttttttgagctggggagattaaggtggcagtgagctatgattgcatcagtacactacagcttgggtgacagctacatataaatatgtatatataaatatagataagtaaataaaagccatctttgtgccatgcatggtggctcactcctgtaatcccaacactgggaagctgaggtactgagatgggaggatgacttgagaccagcctgggaaacatggcaaaattccatctctacaaaaaatgcagaagttatcccagggtggtagcatgtccctgtagtcccagctactcggaggcctaaggtgggagaattacttgcaaggtcaaggctgcagggagctgaggtggcgccacaaccctccaaacggtgacagcccctgtctccaaaaaaaaaagtttttaaactttccaattgtaaaaggatcctagttttataaaataggaatgtgttttgccttccccccatagagagccagacatgtttgaaatgtagtatttgagaagcacaaaataaacgtcttaacattatagaactg

SEQ ID NO: 38617 - DNA, 492 bp, Homo sapiens
agcttgctgctttcctcccctcgcgcctctagagcccatgaaggagctctggtgctgggcagagactcccagtggttcaggggctaggcatagtggggacctttctcaggggcactgacaagtgccttagcgagtttggcatggaagaacatgaacagaaagctggggcgggggggatgcgtagagttcctgcaattatgcggggtggaggggggctgagagttattatgatttatatttcattaaatatgatttcatctgtatccaaaggaaggtgaggcttcaaacattcagtttatgcatacaaaaagccaaggaacacagtttgcatctccagccaggtcaatggccaatgataagaggatgcagaagactcagtttctcaggagcacaaccagagtctgggcagcacctctgatcttctgcggggtgctgcgagaaccatgtggccctcgggaaagcatgagctgggtgcccttggctgaggatagt

SEQ ID NO: 38618 - DNA, 825 bp, Homo sapiens
tttgagacagagtcttggctctgttgcccaggctggagtgcagtggcactatctcagctcactgcaacctctgcctctcggcactacaggtgtgtaccaccacgctgggctaatttttgtatttttagtacagatggggtttcaccatattggccaggctggtcttgaactcctgacctcataatctacctgccttggcctcccaaagtgctgggattacaagcgtgagccactgcgcccggccagaccactataaaggataaaattatgagttaatatatgaattaaaaacagaacaagtccacactgatctgaaagtaagtgtggaggcaggaggaagagaaacatcttctttagagaagaaagccaaataattaaatacataagggattacagaaatagaaaatcaccatttttacaatcactatagtatactattactgattcaggtaagaatcagtgaatactaaaacaactatgtgaaagactgtcgggaaaaaggattgtcacagtgtcaaaatatcattcccacagattgccttattaattacaaaaagaacaaagtacctttacaactgggaaatctggaagcactgccttaaccaagtgatcaaacttactaccaccaatgataagcacaaattcacaccatgtgccttctaatgcaatatactaatatgcattcgaatgcatattctaatgcaataatccatgtactatgcttgacaaacacggttaacctgaatttaatcatgaggaaacaatcaaacaaatccaaactaaggtggcataaaacaactagcctggattcttaaattaaaaaaa

SEQ ID NO: 38619 - DNA, 500 bp, Homo sapiens
aaggttgtggtggcctttgtgcaggttgtaaatttttgtagtcttttgatagttcttgttatcaaccatatgtacatgagaacccttccccttcatggcgtttcctggctccgtttgccagggttttaatacgagtgactccattttgaatctgacaactttcacatttccccttttgatcaaggtctttctcaaaagcatcactgatcaatcatcctgtatttaggttttgatatctcttggtgccagtctgccctcatgttgaagggagtcactggtaactaggaattagcatcaaaaccctttagccacatttgaacaacaaaagaggtttggagggagtggatctcaggctaagtctacctggagtccactgttaagttcaattctgtctgttccataggcactgtctatcatctcaaagtgctgggagagcattattctcttaggagttgcatttctatgcaaatttgacaagaaacaggtatgaagttcttaaa

SEQ ID NO: 38620 - DNA, 390 bp, Homo sapiens
ataggccccagtgtgtgttgctccctactatgtgtccatgtgttctcatcatttagctcccacttataagtgagaacatgtggtatttggttttctgttcctgtgttagtttactgaggataatggcctccagctgcatccatgttcccgtaaaagacgtgatctcatttatgtttatggctgcatagtattccatggtgtatatgtcccacatctttatgcaatctgtcattaatgggacttaggttgattccatggctttgctattgtgcatagtgacagcagagattcttgctgcccagaaatttatggagaaaaaggccacagcagtcgctgattttccatagctttaactgacttggaccagatttgtgcactaacaaataagga

SEQ ID NO: 38621 - DNA, 292 bp, Homo sapiens
tgtttctactaaacacgaaatctaaactatttcctggaaactccaggcatttcataacaccccttcctcctcctcctgcaattcctcagtgtgtgcccctaaagtgctcagccccactgccacagccccacttctgtgaaatagcatttccccctgccccaaccttcaaggccacttcaggcctcattccctccaggaaccttcctgccctgccctccctgttcacctccccaacactgtattttgtagcttggtgtagtctctatttcagcaagaaagaagccgtcctctt

SEQ ID NO: 38622 - DNA, 1428 bp, Homo sapiens
gtgctgtgaggcttgcccgcggacagtaaacttgcaggggcgagagggagggacatcgattaaacctaaatcgtgggcgttcagtcctcagggcaccgagcgcgtgaaaactccagcggactctgctggaaaggagatcatgccctctaagtctctttccaacctctcggtgaccaccggcgcgaatgagagcggttccgttcccgaggggtgggaaagggatttcctgccggcctcggacgggaccaccacggagttggtgatccgctgtgtgatcccgtccctctacctgctcatcatcaccgtgggcttgctgggcaacatcatgctggtgaagatcttcatcaccaacagcgccatgaggagcgtccccaacatcttcatctctaacctggcggccggggacttgctgctgctgctcacctgcgtcccggtggacgcctcgcgctacttcttcgacgagtggatgtttggcaaggtgggctgcaaactgatccctgtcatccagctcacttccgtgggggtttccgtgttcactctcactgccctcagcgccgacaggtacagagccatcgttaaccccatggacatgcagacgtcaggggcattgctgcggacctgtgtgaaggccatgggtatctgggtggtctccgtgttgctggcagttcccgaagcggtgttttcagaagtggctcgcatcagtagcttggataatagcagcttcacagcatgtatcccataccctcaaacagatgaattacatccaaagattcattcagtgctcattttcttggtctatttcctcataccacttgctattattagcatttattattatcatattgcaaagaccttaattaaaagcgcacacaatcttcctggagaatacaatgaacataccaaaaaacagatggaaacacggaaacgcctggctaaaattgtgcttgtctttgtgggctgtttcatcttctgttggtttccaaaccacatcctttacatgtatcggtctttcaactataatgagattgatccatctctaggccacatgattgtcaccttagttgcccgggttctcagttttggcaattcttgtgtcaacccatttgctctttacctactcagtgaaagcttcaggaggcatttcaacagccaactctgctgtgggaggaagtcctatcaagagagaggaaccagctacctactcagctcttcagcggtgcgtatgacatctctgaaaagcaatgctaagaacatggtgaccaattctgttttactaaatgggcacagcatgaagcaggaaatggcaatgtgattttggccattcaactcactacctggagagaacttagtaactgttaaaattcctattcggcagatcagaacttgctgttgcttagctaatttattaggcaattgcatgattgactc

SEQ ID NO: 38623 - DNA, 1438 bp, Homo sapiens
gtgctgtgaggcttgcccgcggacagtaaacttgcaggggcgagagggagggacatcgattaaacctaaatcgtgggcgttcagtcctcagggcaccgagcgcgtgaaaactccagcggactctgctggaaaggagatcatgccctctaagtctctttccaacctctcggtgaccaccggcgcgaatgagagcggttccgttcccgaggggtgggaaagggatttcctgccggcctcggacgggaccaccacggagttggtgatccgctgtgtgatcccgtccctctacctgctcatcatcaccgtgggcttgctgggcaacatcatgctggtgaagatcttcatcaccaacagcgccatgaggagcgtccccaacatcttcatctctaacctggcggccggggacttgctgctgctgctcacctgcgtcccggtggacgcctcgcgctacttcttcgacgagtggatgtttggcaaggtgggctgcaaactgatccctgtcatccagctcacttccgtgggggtttccgtgttcactctcactgccctcagcgccgacaggtacagagccatcgttaaccccatggacatgcagacgtcaggggcattgctgcggacctgtgtgaaggccatgggtatctgggtggtctccgtgttgctggcagttcccgaagcggtgttttcagaagtggctcgcatcagtagcttggataatagcagcttcacagcatgtatcccataccctcaaacagatgaattacatccaaagattcattcagtgctcattttcttggtctatttcctcataccacttgctattattagcatttattattatcatattgcaaagaccttaattaaaagcgcacacaatcttcctggagaatacaatgaacataccaaaaaacagatggaaacacggaaacgcctggctaaaattgtgcttgtctttgtgggctgtttcatcttctgttggtttccaaaccacatcctttacatgtatcggtctttcaactataatgagattgatccatctctaggccacatgattgtcaccttagttgcccgggttctcagttttggcaattcttgtgtcaacccatttgctctttacctactcagtgaaagcttcaggaggcatttcaacagccaactctgctgtgggaggaagtcctatcaagagagaggaaccagctacctactcagctcttcagcggcatagtcctaaagctttacatttactatctaatttaatcatcaatataatcactgaggtgaacaagagaaggatctaatttggcgagatggataccagatgtgttcttgatctggagagactgtttcattaactcacagaaaatgaaggtgaagataaacatggctggtctgttattcttttttactttcttatgtcaagtaataaaaaagcaaaaataaa

SEQ ID NO: 38624 - DNA, 470 bp, Homo sapiens
gcctactactactaaattcgcggccgcgtcgacactttttgtgctttaaatcatacattatacactgctttatttgctttacatatattatcagatttctcatattagcccataataaggtagacattactatcctgattttacattgaagaaactaaaatattcagaggttaagtaaattactcaaggtcacacaggtaagattaaagtttaggtttcaaattcaggtatgtttgctacaaaaccttgtcactgtgttagactgcctctaaagtgagtaaggtaaatgaaataaatgctttgtatgtttaaaattttgttataaaggaaaggaaataatgaattaatgaaatgttcaaattacagactttaaagtaaatacagatttcgttttatactagtcataaggtaattcagtgttagtagttaataccattaaatataatgtgataatcagctagcgaaaaaga

SEQ ID NO: 38625 - DNA, 239 bp, Homo sapiens
atgagtctcggtcatgtaatctacaaaatgagggaaatgtttccaattcctatggacttcagataataattcagttataaattagattcctatttcagtgattgtctgtgtttagcaaagcatgattatatcctcttccccttcagggtcaacactggctctgacttcctgggccagcttctgttgacggcatctccaagtctaggcaactgccttggtcttgctgtggatctaaattg

SEQ ID NO: 38626 - DNA, 456 bp, Homo sapiens
ggccctactgatgactaatcctcagttggggagtgggagaagctgagtgtcacagagagaacacagcctcaggatggagacagccaggccccactcaccttgtgactgcaggaagcaccgagcctctctgagctctggtctcaccaccgggatgaggccacccactatgtgcgtgcagatgcagcaggcagcctggctgtggaggggaaggagggcagcaggcaagggttcaaggtgtggagcctatagggcagcacagctgccagtcatgtggtagtggaagctcagaacatcggagatgggtcctctccagcccccggttcctcttgctgagtcccacattgcctgtgctctcctggttaccgagcaagcagcagccattacaatggggggccgtggagagtggcgatggggctccttagtttccagctgagccctgcagggaatggcttttag

SEQ ID NO: 38627 - DNA, 776 bp, Homo sapiens
ggagatgaatgaggtgagtcctgtgattaccccggtttaatgttttgagagagagtccagtctgtagtgcaggggggaagaacccaagtcgagcctggaagactccctgactagaaatagagctaaaagttgggagtgaataaagtgacaagagtcactggaatgtctaccaggcaagatatctgaagatctgtaactccctttgagttttaagctgagcaataattagcacatgcatggaaggaaactacctgaggccaggaacagaatcacctggaaggacagaggtaacagtgtctggcattcacacagagtcaacatagtgcctgttacccagaaatcacactggaaaacctcatgtttcataaggcatttggtagaatactcagaaaggtcttgtcttggtaatgggggataattagccctgtaatacgaggactgctctcgtcccatttaataaatcatgaaaccaaaacctgaaaggattgaactattttcacatacattaactgtgtcccagaacaaagctgatttggtttggctgtatctccacccaaatctcatcttgaactgtagttcccatgatccctacatgtcatgggagggacccagtgggaggtaatttaatcatgggggccgttactcccatgcttttctcatgattgtgagtgagttctatgagatctgatggtttatgaggggcttttccccttttgcttggcacttttccttgctgctgccatgtgaagagggatatgtttgcttctccttccacc

SEQ ID NO: 38628 - DNA, 362 bp, Homo sapiens
tctaaagaaaacctgccttgcaaaggaaaatgctttcttactttgaatagaaagtgaaagataacttacaaaatcacaaaagagcaatgtgtttcctaggtaggtatgtttttgaaagagattgaagatagacattactactagcctgccagcccctactagcctgccagccccagacttactgagggtgaagaaagcttgaaataatttaagagaaaggtatagtgctttcccaagagctctactacaagcaagtctgatgctaagcatctaacttatttattagcctataaagagaaagtaaaagaaatggagaccataaaaatcagataagagattcatgtatagcagattcacagagg

SEQ ID NO: 38629 - DNA, 787 bp, Homo sapiens
aaagtactgggattacaggtgtgagccactgcccctggcctattccagattcttaatctgggatccatgcacctctgaaggcatatataaatcccatgaaattgcaaaattttgtgtaaacgtgaattgttttagagagggagttttaaaaatcagtttcttaagggaacttatggctcaaaagtagttaagaaccattgttttatggttatttgagaaccttctgtgcctaatggtgatttgagaaccttctgtgcctatgtcccatcatctcctccatccttccctcacacccctcagcctctaatgcccagcccccttgcttttgtggtctgcctttgaccccttaagtttctgctctttgggcagctgctatgtgtaccaatttggcattgtttagtctttttggcttctacactttgaaacattagtgctttgctgtcctttagcagtgctttggctgtcagaaatgaaatttctgggctggccatggtggctcatacctgtaatccaagcactttgggaggctgagtggggatgattgcttgagcccaggacttcaagaccagtcctgacaactgacaacatagcaagatcccatctcaaaaaaaaaaaaaaaagaaaaaattagccaggcatggtggtgcatgcctgtagtctcaactacttgggaggtagaggtggaaggatcacttgaacctgggagttcaaggctgcagtgcatcatgattgtgccactacactgcagcctgggtgacagtgtaagaccctgtctaaaaaaaaataa

SEQ ID NO: 38630 - DNA, 372 bp, Homo sapiens
tcttgagacagggattctctatgacatccaggctggagtgcagtggcaagtcacagctcactgcagccttaatctcctgggctcaagtgaattatgatagtcactacactacagcctgggtgacaggatgagagcctgtctggagaaaaataataataataatataacttatgccttattcactgaattagtattttgcttggatccctgagccaccataaaagaagtgagaagaccttaaggctgccacactatgaggaaggcaaggtaacagactacgtacaggtgctcaagtcagcagtcacagtctttgagtcctgttaggcaaggcaccaaacatgagtgaacaaactttcagattattccaacatc

SEQ ID NO: 38631 - DNA, 292 bp, Homo sapiens
gcactacaaagtctctagagcaaatttagaccctattatcagatcaagagtgctgtaacctcaaatcaacattccccagctggctcagagtggaacctacctcaaggggtcacttaggtaacctttaagtcaaggagacagcctttctctccttggtctcgaacaccatctttggaaaacaaaatgtgtataaaaactacgaagggctgcatgcagtttggttagaaactctgggggaacaaaacagagtggtagaagacatttctaccagattctacaaccaggtcaaagt

SEQ ID NO: 38632 - DNA, 588 bp, Homo sapiens
tcgcctaggctggagggcagtggcatgatctcagctcactgaaacctccacctcccgggttcaagcgattcccctgcctcagcctcctgagtagtgtgggactacaggcgtattcaccatgcccggctaattttttttttttagtagaaacggggtttcaccatgttggccaggatggtctcaatctcctgacctcgtgactcgctcgcctcagcctctgaaagtgctgggattacaggtgtgagccactgcgcctggcctatatgaattttatatttacctgctcccttcaccaggagatcatgctgctgtgatgtcgagttttcttaacagcataaggaagacttgccctcttgccctatcaaagagaatagttttggaggggagaagtgggaccaaaaaagatgcagttttcatttgtattgggaaatgtgaaaataaaattgacaactcttttagttaaaaacaaaaaaaagaaaaggaaacaagatgtggggctgccatatgtaataccgtggattccacggatcttctactctggaggcaaatattatctttgctgaagccagaccaacctgacacaaagac

SEQ ID NO: 38633 - DNA, 616 bp, Homo sapiens
actggaattctctttgttctgcccgacatttgggggtgtccaaggacctgtgtttttaacaaagatgactttatgaccgttctaaggattgaacagattcctgcacagggtgccaggtttcaagttaggtcctcttagtataagctctctttttttctgaatgtaaacctatttgcattgtcatttctaataatccagtaggtttctggatattgtaaagatactgagtacagatataactgtgtaaatttcatagtgttttattttgaggtgagagttttgttatagtttataaaagatattttcctattcagacctcagggctattttgggacctacaaataaatgtgattcccagcagcttcaatttttgatattcaaaaagttaataatctttaagctaaatataatgtgatatgattcagaaaaaaatgtttttcccttttaacttctaacaaattatgtatctaatgtttaaaaaatatggaaaaaagggataatgtaaaaatgtgggagaattgtggctaaagaataaaaaatcacttgttaaaacgcattcttatggtacaaatgtgtgatatttaaataaacttaagtgtgtataaattagagaatg

SEQ ID NO: 38634 - DNA, 494 bp, Homo sapiens
tgggtgagctcgtgggaactgagaaactgtgtctagggcttccttagttatactgaatgctgcatgtagaggtctgcagggtggccagctgatggctggcggaagatctgctgacttggattcagttactactaaaatggcaggtttagaaagaggagagaacttctagatccagaggaaataatcaggtaagtatgctaagatgtgtgtatgtgttagccaggcacggtggctcacgcctgtaatcccagcactttgtgaggctgaggcaggtggatcaccaggtcaggagctcaagaccagtctggccaacatggtgaaaccccgtctttactaaaaatacaaaaattagctgggtgtggtggcgggcgcctgtaatcccagctactcgggaagctgaggcagagaatcacttgaacccgcaaggcagaggttgcagtgagccgagatcatgccactgcactccagcctgggcgacagagcgagtttccatc

SEQ ID NO: 38635 - DNA, 1360 bp, Homo sapiens
tggggcccgagctcggaggcggccgggcggcgcggagtcctcctggatcgtggcaatgggcagacacagagcagaaagtggcggacttgggcggccacaggtaactttctcgcaaggagctgaattctttcactaaagggtacaagcccgagggacgagctgcgcgatgattggctggggagctccctcaggtgagctgccattggcagaggcgcgctcaggtaaggcccttctccgagtgcaggtaactcactccgaagtttacctgagtggagcggcggcatgcttgcagctcggcggcagcctgtgagagctgagggtcagttcttcgagtagatctcaagctgcgttttcctccttctccaaagcagggatgggaaggtggaggctactggttgaagagaagaaaggggttgggggaatgcaacacctgcaaacactagggattgtgggtcgagcggaagagctaatgagagccgagctcaggtatcccaagtcaaccagaatcaaatgcgcagtacgccacaaggcatttaatgcccacagtaacagggctgtttgacagtggcagaagaggacgggactaaagttactttgtgctgagagggggaaagaagcacaaagtttggtctgttgcgtaattgaatttttaacactcttatccacaacaaacactttttcgtgtcctgctgtgtaaaagacatcagatatattacagattttcaaacaggtgagcatccttttacgagctgggcaggtggggagtggcgtggttttgatggagtgaggagatttggttgaatgaacgctaagatggccagacgcacctcttcgatctcaactctgcagcctgggattccagagctgcaaacaaccactgaattcgttctgtaaacctgttgtcatttgacgtttccaggcaggcatcaacatttacattgtaattcaatagacgctactactacaaaggagctttattcttccagcttaatatggttgctgcgggaacactgcaggatgaaactgactttttttgtggtaatgtttctcctggttgggaacaacgcaaattagcaaaggcgtaatttataaccgctgctaccaaagagtgaagtatttgtggaagttctgactggaatctagctcgtacatatggattgtggaaataaaggaggacgtggaaagcttgccatattttatttcaagttaatactaaagctgccagacttaatacaactttcttttaatctttatggatcacatattttctgaaaattacatgataaaacaaggtttggtttgttccatgtgtccattttcaacaataaatttcaaaattgtatttttaaaaaacaatata

SEQ ID NO: 38636 - DNA, 1098 bp, Homo sapiens
ggcccagccttctccagtatctcatcagcaacagcctcagcagtctcctttgccacctggtattaaacctaccatccaaatcaaacaggagtcaggtgttaaaatcatcacacaacaggttcaaccaagtaaaatcttacccaaaccagtgacagcaactctacccaccagtagcaattcccctattatggtggttagcagtaatggtgcaattatgacaactaaactggtaaccactcctactggcacacaagcaacctatacccggccaacagtgagcccatccattggtcggatggctgcaacccctggagctgcaacctatgtgaaaactacgagtggtagcatcattacagtagtacccaaatcattagctaccttggggggcaagataattagcagtaatatagtttctggaacgactaccaaaatcactacaatcccaatgacttccaagcccaacgtgattgttgtacaaaagactacaggaaaaggaacgaccattcaaggcctcccgggcaaaaatgttgtcacaacgttgctaaatgctggaggagaaaagactattcagacagtgccaacaggagcaaagccagctatccttactgctacaagacccatcaccaaaatgattgtaacgcagccaaaaggaataggttctacagttcaaccagcagctaaaatcatcccaacaaaaattgtttatgggcagcaagggaaaacgcaggttcttattaaacccaaaccagtgacttttcaagcgacagttgttagtgaacaaacaagacagctagtaacagaaacattacagcaagcatccagggtagcagaggctggtaattcatctattcaggaaggaaaagaagaaccacagaattatacagatagtagttcctcttctacagagtcctcccagagttcccaaggtaagatctattttacttctgatttatataagtactactgacatagtgcccaaattctaaaatagaggttgcttctacacatttcacaacaaatttgtatgctctatcaattcttttccttttttttttttttttttattgtttgatgttaaatcggtgagctgaaatttta

SEQ ID NO: 38637 - DNA, 995 bp, Homo sapiens
ggcccagccttctccagtatctcatcagcaacagcctcagcagtctcctttgccacctggtattaaacctaccatccaaatcaaacaggagtcaggtgttaaaatcatcacacaacaggttcaaccaagtaaaatcttacccaaaccagtgacagcaactctacccaccagtagcaattcccctattatggtggttagcagtaatggtgcaattatgacaactaaactggtaaccactcctactggcacacaagcaacctatacccggccaacagtgagcccatccattggtcggatggctgcaacccctggagctgcaacctatgtgaaaactacgagtggtagcatcattacagtagtacccaaatcattagctaccttggggggcaagataattagcagtaatatagtttctggaacgactaccaaaatcactacaatcccaatgacttccaagcccaacgtgattgttgtacaaaagactacaggaaaaggaacgaccattcaaggcctcccgggcaaaaatgttgtcacaacgttgctaaatgctggaggagaaaagactattcagacagtgccaacaggagcaaagccagctatccttactgctacaagacccatcaccaaaatgattgtaacgcagccaaaaggaataggttctacagttcaaccagcagctaaaatcatcccaacaaaaattgtttatgggcagcaagggaaaacgcaggttcttattaaacccaaaccagtgacttttcaagcgacagttgttagtgaacaaacaagacagctagtaacagaaacattacagcaagcatccagggtagcagaggctggtaattcatctattcaggaaggaaaagaagaaccacaagattcccagcctgtagttcatgtaattgcttcccggcgtcaggattggtcagaacatgagattgcaatggagactagccctaccataatttatcaggatgtatccagtgaatcacaatcag

SEQ ID NO: 38638 - DNA, 946 bp, Homo sapiens
ggcccagccttctccagtatctcatcagcaacagcctcagcagtctcctttgccacctggtattaaacctaccatccaaatcaaacaggagtcaggtgttaaaatcatcacacaacaggttcaaccaagtaaaatcttacccaaaccagtgacagcaactctacccaccagtagcaattcccctattatggtggttagcagtaatggtgcaattatgacaactaaactggtaaccactcctactggcacacaagcaacctatacccggccaacagtgagcccatccattggtcggatggctgcaacccctggagctgcaacctatgtgaaaactacgagtggtagcatcattacagtagtacccaaatcattagctaccttggggggcaagataattagcagtaatatagtttctggtaggtatatctgaaatatgttaaaggtataggtggccttcattgagaggaaaaaaaaaacttacttcattgaaggattatatttgatctcaattttttgcttagaaatctaaagctttgttttagtccttatgtttcatgattaaataaagtttttagttttaatattcaatattcacatataaagcttttgatagttttaaaatggaaagaacctttagttgcttttagtcagagtggaaagattatagtttaaatttgcatagagatttttcatttgcaaagtatccttctatttgtcaacctattcagaccccataacaactctgaggtggttgctattgtgctgaatttacaaatgaagatagatttggctttagagagatcaaattgacctgtccaagaccaattagagttagaaagtggaagaactcttatttgttctgaatatgttttagggaacatatctcataatttcaattactgatgtcactttagtttattaaaaataaaaatatttgaatacttta

SEQ ID NO: 38639 - DNA, 2547 bp, Homo sapiens
aggagtgtgggaggggcagtggaactggagtcagctaatggctgacgcactacgcgcagagggaaagacgggtcaccaatagcgacacggatatggccccgcgggcggggtttaggcccaaagtggtgtcggagcagcgcctattagtgtcatcctcaccgtcacggccggcgcctcctcctggattcattcactcgctcttttcattcacgaaggtagtgaggcctagtggaaagccatggagagcgctctccccgccgccggcttcctgtactgggtcggcgcgggcaccgtggcctacctagccctgcgtatttcgtactcgctcttcacggccctccgggtctggggagtggggaatgaggcgggggtcggcccggggctcggagaatgggcagttgtcacaggtagtactgatggaattggaaaatcatatgcagaagagttagcaaagcatggaatgaaggttgtccttatcagcagatcaaaggataaacttgaccaggtttccagtgaaataaaagaaaaattcaaagtggagacaagaaccattgctgttgactttgcatcagaagatatttatgataaaattaaaacaggcttggctggtcttgaaatcggcatcttagtgaacaacgtgggaatgtcgtatgagtatcctgaatactttttggatgttcctgacttggacaatgtgatcaagaaaatgataaatattaatattctttctgtttgtaagatgacacaattggtactgcctggcatggtggaaagatccaaaggggctattctgaacatttcatctggcagtggcatgctccctgtcccactcttgaccatctattctgcaaccaagacttttgtagatttcttctctcagtgcctccatgaggagtataggagcaagggcgtctttgtgcagagtgtcctgccatacttcgtagctacaaaactggctaaaatccggaagccaactttggataagccctctccggagacgtttgtgaagtctgcaattaaaacagtcggcctgcaatcccgaaccaatggatacctgatccatgctcttatgggctcgataatctcaaacctgccttcttggatttatttgaaaatagtcatgaatatgaacaagtctacacgggctcactatctgaagaaaaccaagaagaactaagcattgataactgcattgtaacttggccagatgctccagcatatgcacgttcactgcaaagcaccctactggttttgaaaatctgaccttgtcatttcaatagttattaacatgactaaatattatcttaattaagaggaaaatagaagttgcttttaggggtttctgacatatattctggatactatccgaggtaattttgaagtttaatataaatgctcatatcaaatgaatatagaactaatattgtcgggaacacctaatagaaaggaatactattatagcaaatcacagaatgatagactcaagcataaaacttggcagttttatctgcttcaaaatgccattgatcattattcctgtattttctctgaaactgattataaaaaccaatgtccagctactctttgtttttgacacttgaagaaatggagatcgatttgatttgtttataagcagacacactgcaatttacaaagatctctttacggttttataaaattatcttccagtttgtacatttatatggaattgttctttatcaagggtagctaatgacatgaaaataattgtgaaatatggaattatttctgacacatgaagcccactaaactatgctttcttataatgcatatttcttctcagtttaaatgtatgtaaatatcgaagctatatggtatgatttataaagataaatgggccaaagtgtacattgagactggcagccatctatggtaccactgaaaccctgacccagaaaagtggcttgcttggacacccagctgcctttgtttctgcattaaaccaatattgatcacacatatgacacaggctagtcctataaaagtaatgacttcatagaaatggcattataatttttaagttgatactctacaggtagctattgatataattagttttaataaaacatgctgcaaccatggtatacaacaaaaatacatttctttggtgattgaaattaaggccgtatttacaatgacttaatataagactgacttttatcctgcttcataacttgtatggagaactcaccaagaaagaattcaatactgtgaaatatgcagcaagaagattggtctttacctaggctgtgtttcctaagctctgagttttcagcaccagtagatttgtattaaaagaaaaaaaaatggggccttagcttctggcttttaattttgccagctaaggacataaaacaaaaataaacaaacaaaaacaaatagccatctgctatcagcatcattatgtaaaagaaaatatattttagcccctaaaattaggaagaatgtaatctcagaataaaggttgtcatttaagttgaataaatatatagctttatgaaaaacaca

SEQ ID NO: 38640 - DNA, 2232 bp, Homo sapiens
  misc_feature (44)..(44): n is a, c, g, or t
taaatataaatctcacgagtaattaatatatagaatataaaaancttaactgcaactgatctcttaattttccaccgctacagttgtcacaggtagtactgatggaattggaaaatcatatgcagaagagttagcaaagcatggaatgaaggttgtccttatcagcagatcaaaggataaacttgaccaggtttccagtgaaataaaagaaaaattcaaagtggagacaagaaccattgctgttgactttgcatcagaagatatttatgataaaattaaaacaggcttggctggtcttgaaatcggcatcttagtgaacaacgtgggaatgtcgtatgagtatcctgaatactttttggatgttcctgacttggacaatgtgatcaagaaaatgataaatattaatattctttctgtttgtaagatgacacaattggtactgcctggcatggtggaaagatccaaaggggctattctgaacatttcatctggcagtggcatgctccctgtcccactcttgaccatctattctgcaaccaagacttttgtagatttcttctctcagtgcctccatgaggagtataggagcaagggcgtctttgtgcagagtgtcctgccatacttcgtagctacaaaactggctaaaatccggaagccaactttggataagccctctccggagacgtttgtgaagtctgcaattaaaacagtcggcctgcaatcccgaaccaatggatacctgatccatgctcttatgggctcgataatctcaaacctgccttcttggatttatttgaaaatagtcatgaatatgaacaagtctacacgggctcactatctgaagaaaaccaagaagaactaagcattgataactgcattgtaacttggccagatgctccagcatatgcacgttcactgcaaagcaccctactggttttgaaaatctgaccttgtcatttcaatagttattaacatgactaaatattatcttaattaagaggaaaatagaagttgcttttaggggtttctgacatatattctggatactatccgaggtaattttgaagtttaatataaatgctcatatcaaatgaatatagaactaatattgtcgggaacacctaatagaaaggaatactattatagcaaatcacagaatgatagactcaagcataaaacttggcagttttatctgcttcaaaatgccattgatcattattcctgtattttctctgaaactgattataaaaaccaatgtccagctactctttgtttttgacacttgaagaaatggagatcgatttgatttgtttataagcagacacactgcaatttacaaagatctctttacggttttataaaattatcttccagtttgtacatttatatggaattgttctttatcaagggtagctaatgacatgaaaataattgtgaaatatggaattatttctgacacatgaagcccactaaactatgctttcttataatgcatatttcttctcagtttaaatgtatgtaaatatcgaagctatatggtatgatttataaagataaatgggccaaagtgtacattgagactggcagccatctatggtaccactgaaaccctgacccagaaaagtggcttgcttggacacccagctgcctttgtttctgcattaaaccaatattgatcacacatatgacacaggctagtcctataaaagtaatgacttcatagaaatggcattataatttttaagttgatactctacaggtagctattgatataattagttttaataaaacatgctgcaaccatggtatacaacaaaaatacatttctttggtgattgaaattaaggccgtatttacaatgacttaatataagactgacttttatcctgcttcataacttgtatggagaactcaccaagaaagaattcaatactgtgaaatatgcagcaagaagattggtctttacctaggctgtgtttcctaagctctgagttttcagcaccagtagatttgtattaaaagaaaaaaaaatggggccttagcttctggcttttaattttgccagctaaggacataaaacaaaaataaacaaacaaaaacaaatagccatctgctatcagcatcattatgtaaaagaaaatatattttagcccctaaaattaggaagaatgtaatctcagaataaaggttgtcatttaagttgaataaatatatagctttatgaaaaacaca

SEQ ID NO: 38641 - DNA, 2430 bp, Homo sapiens
actggatcctattaaataattcaatggtagcggtgtaattttggttggaaccagcacggattcccaagtcgtgactgcaaaaagtggtcaaacctgtcctgacacccagaggtctgcatgaggggtggccactgaaggaggagttctcaaaggccacaggtgatgaagagcttggatgaataaacttagaagtcccaggaaaatagcaaaaatttcatctcctgaagaaatttgaagatttttttggatattcttttaaaggtgaaacttttcttctttagttgtcacaggtagtactgatggaattggaaaatcatatgcagaagagttagcaaagcatggaatgaaggttgtccttatcagcagatcaaaggataaacttgaccaggtttccagtgaaataaaagaaaaattcaaagtggagacaagaaccattgctgttgactttgcatcagaagatatttatgataaaattaaaacaggcttggctggtcttgaaatcggcatcttagtgaacaacgtgggaatgtcgtatgagtatcctgaatactttttggatgttcctgacttggacaatgtgatcaagaaaatgataaatattaatattctttctgtttgtaagatgacacaattggtactgcctggcatggtggaaagatccaaaggggctattctgaacatttcatctggcagtggcatgctccctgtcccactcttgaccatctattctgcaaccaagacttttgtagatttcttctctcagtgcctccatgaggagtataggagcaagggcgtctttgtgcagagtgtcctgccatacttcgtagctacaaaactggctaaaatccggaagccaactttggataagccctctccggagacgtttgtgaagtctgcaattaaaacagtcggcctgcaatcccgaaccaatggatacctgatccatgctcttatgggctcgataatctcaaacctgccttcttggatttatttgaaaatagtcatgaatatgaacaagtctacacgggctcactatctgaagaaaaccaagaagaactaagcattgataactgcattgtaacttggccagatgctccagcatatgcacgttcactgcaaagcaccctactggttttgaaaatctgaccttgtcatttcaatagttattaacatgactaaatattatcttaattaagaggaaaatagaagttgcttttaggggtttctgacatatattctggatactatccgaggtaattttgaagtttaatataaatgctcatatcaaatgaatatagaactaatattgtcgggaacacctaatagaaaggaatactattatagcaaatcacagaatgatagactcaagcataaaacttggcagttttatctgcttcaaaatgccattgatcattattcctgtattttctctgaaactgattataaaaaccaatgtccagctactctttgtttttgacacttgaagaaatggagatcgatttgatttgtttataagcagacacactgcaatttacaaagatctctttacggttttataaaattatcttccagtttgtacatttatatggaattgttctttatcaagggtagctaatgacatgaaaataattgtgaaatatggaattatttctgacacatgaagcccactaaactatgctttcttataatgcatatttcttctcagtttaaatgtatgtaaatatcgaagctatatggtatgatttataaagataaatgggccaaagtgtacattgagactggcagccatctatggtaccactgaaaccctgacccagaaaagtggcttgcttggacacccagctgcctttgtttctgcattaaaccaatattgatcacacatatgacacaggctagtcctataaaagtaatgacttcatagaaatggcattataatttttaagttgatactctacaggtagctattgatataattagttttaataaaacatgctgcaaccatggtatacaacaaaaatacatttctttggtgattgaaattaaggccgtatttacaatgacttaatataagactgacttttatcctgcttcataacttgtatggagaactcaccaagaaagaattcaatactgtgaaatatgcagcaagaagattggtctttacctaggctgtgtttcctaagctctgagttttcagcaccagtagatttgtattaaaagaaaaaaaaatggggccttagcttctggcttttaattttgccagctaaggacataaaacaaaaataaacaaacaaaaacaaatagccatctgctatcagcatcattatgtaaaagaaaatatattttagcccctaaaattaggaagaatgtaatctcagaataaaggttgtcatttaagttgaataaatatatagctttatgaaaaacaca

SEQ ID NO: 38642 - DNA, 1749 bp, Homo sapiens
  misc_feature (26)..(26): n is a, c, g, or t
  misc_feature (29)..(29): n is a, c, g, or t
gttctagaggatcccgtggatgcaangtncactcttgaccatctattctgcaaccaagacttttgtagatttcttctctcagtgcctccatgaggagtataggagcaagggcgtctttgtgcagagtgtcctgccatacttcgtagctacaaaactggctaaaatccggaagccaactttggataagccctctccggagacgtttgtgaagtctgcaattaaaacagtcggcctgcaatcccgaaccaatggatacctgatccatgctcttatgggctcgataatctcaaacctgccttcttggatttatttgaaaatagtcatgaatatgaacaagtctacacgggctcactatctgaagaaaaccaagaagaactaagcattgataactgcattgtaacttggccagatgctccagcatatgcacgttcactgcaaagcaccctactggttttgaaaatctgaccttgtcatttcaatagttattaacatgactaaatattatcttaattaagaggaaaatagaagttgcttttaggggtttctgacatatattctggatactatccgaggtaattttgaagtttaatataaatgctcatatcaaatgaatatagaactaatattgtcgggaacacctaatagaaaggaatactattatagcaaatcacagaatgatagactcaagcataaaacttggcagttttatctgcttcaaaatgccattgatcattattcctgtattttctctgaaactgattataaaaaccaatgtccagctactctttgtttttgacacttgaagaaatggagatcgatttgatttgtttataagcagacacactgcaatttacaaagatctctttacggttttataaaattatcttccagtttgtacatttatatggaattgttctttatcaagggtagctaatgacatgaaaataattgtgaaatatggaattatttctgacacatgaagcccactaaactatgctttcttataatgcatatttcttctcagtttaaatgtatgtaaatatcgaagctatatggtatgatttataaagataaatgggccaaagtgtacattgagactggcagccatctatggtaccactgaaaccctgacccagaaaagtggcttgcttggacacccagctgcctttgtttctgcattaaaccaatattgatcacacatatgacacaggctagtcctataaaagtaatgacttcatagaaatggcattataatttttaagttgatactctacaggtagctattgatataattagttttaataaaacatgctgcaaccatggtatacaacaaaaatacatttctttggtgattgaaattaaggccgtatttacaatgacttaatataagactgacttttatcctgcttcataacttgtatggagaactcaccaagaaagaattcaatactgtgaaatatgcagcaagaagattggtctttacctaggctgtgtttcctaagctctgagttttcagcaccagtagatttgtattaaaagaaaaaaaaatggggccttagcttctggcttttaattttgccagctaaggacataaaacaaaaataaacaaacaaaaacaaatagccatctgctatcagcatcattatgtaaaagaaaatatattttagcccctaaaattaggaagaatgtaatctcagaataaaggttgtcatttaagttgaataaatatatagctttatgaaaaacaca

SEQ ID NO: 38643 - DNA, 3373 bp, Homo sapiens
aggagtgtgggaggggcagtggaactggagtcagctaatggctgacgcactacgcgcagagggaaagacgggtcaccaatagcgacacggatatggccccgcgggcggggtttaggcccaaagtggtgtcggagcagcgcctattagtgtcatcctcaccgtcacggccggcgcctcctcctggattcattcactcgctcttttcattcacgaaggtagtgaggcctagtggaaagccatggagagcgctctccccgccgccggcttcctgtactgggtcggcgcgggcaccgtggcctacctagccctgcgtatttcgtactcgctcttcacggccctccgggtctggggagtggggaatgaggcgggggtcggcccggggctcggagaatgggcagttgtcacaggtagtactgatggaattggaaaatcatatgcagaagagttagcaaagcatggaatgaaggttgtccttatcagcagatcaaaggataaacttgaccaggtttccagtgaaataaaagaaaaattcaaagtggagacaagaaccattgctgttgactttgcatcagaagatatttatgataaaattaaaacaggcttggctggtcttgaaatcggcatcttagtgaacaacgtgggaatgtcgtatgagtatcctgaatactttttggatgttcctgacttggacaatgtgatcaagaaaatgataaatattaatattctttctgtttgtaagatgacacaattggtactgcctggcatggtggaaagatccaaaggggctattctgaacatttcatctggcagtggcatgctccctgtcccactcttgaccatctattctgcaaccaagacttttgtagatttcttctctcagtgcctccatgaggagtataggagcaagggcgtctttgtgcagagtgtcctgccatacttcgtagctacaaaactggctaaaatccggaagccaactttggataagccctctccggagacgtttgtgaagtctgcaattaaaacagtcggcctgcaatcccgaaccaatggatacctgatccatgctcttatgggctcgataatctcaaacctgccttcttggatttatttgaaaatagtcatgaatatgaacaagtctacacgggctcactatctgaagaaaaccaagaagaactaagcattgataactgcattgtaacttggccagatgctccagcatatgcacgttcactgcaaagcaccctactggttttgaaaatctgaccttgtcatttcaatagttattaacatgactaaatattatcttaattaagaggaaaatagaagttgcttttaggggtttctgacatatattctggatactatccgaggtaattttgaagtttaatataaatgctcatatcaaatgaatatagaactaatattgtcgggaacacctaatagaaaggaatactattatagcaaatcacagaatgatagactcaagcataaaacttggcagttttatctgcttcaaaatgccattgatcattattcctgtattttctctgaaactgattataaaaaccaatgtccagctactctttgtttttgacacttgaagaaatggagatcgatttgatttgtttataagcagacacactgcaatttacaaagatctctttacggttttataaaattatcttccagtttgtacatttatatggaattgttctttatcaagggtagctaatgacatgaaaataattgtgaaatatggaattatttctgacacatgaagcccactaaactatgctttcttataatgcatatttcttctcagtttaaatgtatgtaaatatcgaagctatatggtatgatttataaagataaatgggccaaagtgtacattgagactggcagccatctatggtaccactgaaaccctgacccagaaaagtggcttgcttggacacccagctgcctttgtttctgcattaaaccaatattgatcacacatatgacacaggctagtcctataaaagtaatgacttcatagaaatggcattataatttttaagttgatactctacaggtagctattgatataattagttttaataaaacatgctgcaaccatggtatacaacaaaaatacatttctttggtgattgaaattaaggccgtatttacaatgacttaatataagactgacttttatcctgcttcataacttgtatggagaactcaccaagaaagaattcaatactgtgaaatatgcagcaagaagattggtctttacctaggctgtgtttcctaagctctgagttttcagcaccagtagatttgtattaaaagaaaaaaaaatggggccttagcttctggcttttaattttgccagctaaggacataaaacaaaaataaacaaacaaaaacaaatagccatctgctatcagcatcattatgtaaaagaaaatatattttagcccctaaaattaggaagaatgtaatctcagaataaaggttgtcatttaagttgaataaatatatagctttatgaaaaacacattgtttgcccttttttcctctcatttcattgtagaaatggtgacaccacaatgacctggacagtattttatctgctttcacacattggttggttagttggttggttggttggttggtgagttggttttagtgtagtggtggtagatagaggagggattctcttgcaagtatacaaaatactctctttttcttttatcccagttagaaaatagttgtaggctaagcacagtggcttacacctgtaaactcaatgctttgggaggctgagacaggaggattgcttgagcccgggagttcaagcccagcccgggcaacgtagcaagctcttgtctctacaaaaaaattaaaaaataaaaaattagccaggtgtggtggcacgcacctgtagtcccagctacttggaaggctgaggcaggaggattgcctgagcccagggattagaagctaccgtgatgctatgttgactactactgcactccagtctgatgacatagtaagccctgtctcaaaaaaaaaaaaaaaaaaaaaccaaactggtccagggggtttccgcccccccaagggcttatcctcttggagagcctcctaagtaagaacttaagagtccttcgtggacaagccaaatttccctcactttgcataggggttcacactgtgtgcacgggacacgtttgcacgaaaaatctaagggagggtaacgctacttatagtgccttgttaacggtgtggaacacaacctttggtctttttaaaaacccattttggcccaaattggggtcgtccttttaacctttcaaaagttagttttacaaccttcgaaataacg

SEQ ID NO: 38644 - DNA, 2562 bp, Homo sapiens
aggagtgtgggaggggcagtggaactggagtcagctaatggctgacgcactacgcgcagagggaaagacgggtcaccaatagcgacacggatatggccccgcgggcggggtttaggcccaaagtggtgtcggagcagcgcctattagtgtcatcctcaccgtcacggccggcgcctcctcctggattcattcactcgctcttttcattcacgaaggtagtgaggcctagtggaaagccatggagagcgctctccccgccgccggcttcctgtactgggtcggcgcgggcaccgtggcctacctagccctgcgtatttcgtactcgctcttcacggccctccgggtctggggagtggggaatgaggcgggggtcggcccggggctcggagaatgggcagttgtcacaggtagtactgatggaattggaaaatcatatgcagaagagttagcaaagcatggaatgaaggttgtccttatcagcagatcaaaggataaacttgaccaggtttccagtgaaataaaagaaaaattcaaagtggagacaagaaccattgctgttgactttgcatcagaagatatttatgataaaattaaaacaggcttggctggtcttgaaatcggcatcttagtgaacaacgtgggaatgtcgtatgagtatcctgaatactttttggatgttcctgacttggacaatgtgatcaagaaaatgataaatattaatattctttctgtttgtaagatgacacaattggtactgcctggcatggtggaaagatccaaaggggctattctgaacatttcatctggcagtggcatgctccctgtcccactcttgaccatctattctgcaaccaagacttttgtagatttcttctctcagtgcctccatgaggagtataggagcaagggcgtctttgtgcagagtgtcctgccatacttcgtagctacaaaactggctaaaatccggaagccaactttggataagccctctccggagacgtttgtgaagtctgcaattaaaacagtcggcctgcaatcccgaaccaatggatacctgatccatgctcttatgggctcgataatctcaaacctgccttcttggatttatttgaaaatagtcatgaatatgaacaagtctacacgggctcactatctgaagaaaaccaagaagaactaagcattgataactgcattgtaacttggccagatgctccagcatatgcacgttcactgcaaagcaccctactggttttgaaaatctgaccttgtcatttcaatagttattaacatgactaaatattatcttaattaagaggaaaatagaagttgcttttaggggtttctgacatatattctggatactatccgaggtaattttgaagtttaatataaatgctcatatcaaatgaatatagaactaatattgtcgggaacacctaatagaaaggaatactattatagcaaatcacagaatgatagactcaagcataaaacttggcagttttatctgcttcaaaatgccattgatcattattcctgtattttctctgaaactgattataaaaaccaatgtccagctactctttgtttttgacacttgaagaaatggagatcgatttgatttgtttataagcagacacactgcaatttacaaagatctctttacggttttataaaattatcttccagtttgtacatttatatggaattgttctttatcaagggtagctaatgacatgaaaataattgtgaaatatggaattatttctgacacatgaagcccactaaactatgctttcttataatgcatatttcttctcagtttaaatgtatgtaaatatcgaagctatatggtatgatttataaagataaatgggccaaagtgtacattgagactggcagccatctatggtaccactgaaaccctgacccagaaaagtggcttgcttggacacccagctgcctttgtttctgcattaaaccaatattgatcacacatatgacacaggctagtcctataaaagtaatgacttcatagaaatggcattataatttttaagttgatactctacaggtagctattgatataattagttttaataaaacatgctgcaaccatggtatacaacaaaaatacatttctttggtgattgaaattaaggccgtatttacaatgacttaatataagactgacttttatcctgcttcataacttgtatggagaactcaccaagaaagaattcaatactgtgaaatatgcagcaagaagattggtctttacctaggctgtgtttcctaagctctgagttttcagcaccagtagatttgtattaaaagaaaaaaaaatggggccttagcttctggcttttaattttgccagctaaggacataaaacaaaaataaacaaacaaaaacaaatagccatctgctatcagcatcattatgtaaaagaaaatatattttagcccctaaaattaggaagaatgtaatctcagaataaaggtatattcgctccaatccatctggttttgcaaaactctaatgaatggtatatagtaataa

SEQ ID NO: 38645 - DNA, 2493 bp, Homo sapiens
aggagtgtgggaggggcagtggaactggagtcagctaatggctgacgcactacgcgcagagggaaagacgggtcaccaatagcgacacggatatggccccgcgggcggggtttaggcccaaagtggtgtcggagcagcgcctattagtgtcatcctcaccgtcacggccggcgcctcctcctggattcattcactcgctcttttcattcacgaaggtagtgaggcctagtggaaagccatggagagcgctctccccgccgccggcttcctgtactgggtcggcgcgggcaccgtggcctacctagccctgcgtatttcgtactcgctcttcacggccctccgggtctggggagtggggaatgaggcgggggtcggcccggggctcggagaatgggcagttgtcacaggtagtactgatggaattggaaaatcatatgcagaagagttagcaaagcatggaatgaaggttgtccttatcagcagatcaaaggataaacttgaccaggtttccagtgaaataaaagaaaaattcaaagtggagacaagaaccattgctgttgactttgcatcagaagatatttatgataaaattaaaacaggcttggctggtcttgaaatcggcatcttagtgaacaacgtgggaatgtcgtatgagtatcctgaatactttttggatgttcctgacttggacaatgtgatcaagaaaatgataaatattaatattctttctgtttgtaagatgacacaattggtactgcctggcatggtggaaagatccaaaggggctattctgaacatttcatctggcagtggcatgctccctgtcccactcttgaccatctattctgcaaccaagacttttgtagatttcttctctcagtgcctccatgaggagtataggagcaagggcgtctttgtgcagagtgtcctgccatacttcgtagctacaaaactggctaaaatccggaagccaactttggataagccctctccggagacgtttgtgaagtctgcaattaaaacagtcggcctgcaatcccgaaccaatggatacctgatccatgctcttatgggctcgataatctcaaacctgccttcttggatttatttgaaaatagtcatgaatatgaacaagtctacacgggctcactatctgaagaaaaccaagaagaactaagcattgataactgcattgtaacttggccagatgctccagcatatgcacgttcactgcaaagcaccctactggttttgaaaatctgaccttgtcatttcaatagttattaacatgactaaatattatcttaattaagaggaaaatagaagttgcttttaggggtttctgacatatattctggatactatccgaggtaattttgaagtttaatataaatgctcatatcaaatgaatatagaactaatattgtcgggaacacctaatagaaaggaatactattatagcaaatcacagaatgatagactcaagcataaaacttggcagttttatctgcttcaaaatgccattgatcattattcctgtattttctctgaaactgattataaaaaccaatgtccagctactctttgtttttgacacttgaagaaatggagatcgatttgatttgtttataagcagacacactgcaatttacaaagatctctttacggttttataaaattatcttccagtttgtacatttatatggaattgttctttatcaagggtagctaatgacatgaaaataattgtgaaatatggaattatttctgacacatgaagcccactaaactatgctttcttataatgcatatttcttctcagtttaaatgtatgtaaatatcgaagctatatggtatgatttataaagataaatgggccaaagtgtacattgagactggcagccatctatggtaccactgaaaccctgacccagaaaagtggcttgcttggacacccagctgcctttgtttctgcattaaaccaatattgatcacacatatgacacaggctagtcctataaaagtaatgacttcatagaaatggcattataatttttaagttgatactctacaggtagctattgatataattagttttaataaaacatgctgcaaccatggtatacaacataagactgacttttatcctgcttcataacttgtatggagaactcaccaagaaagaattcaatactgtgaaatatgcagcaagaagattggtctttacctaggctgtgtttcctaagctctgagttttcagcaccagtagatttgtattaaaagaaaaaaaaatggggccttagcttctggcttttaattttgccagctaaggacataaaacaaaaataaacaaacaaaaacaaatagccatctgctatcagcatcattatgtaaaagaaaatatattttagcccctaaaattaggaagaatgtaatctcagaataaaggttgtcatttaagttgaataaatatatagctttatgaaaaacaca

SEQ ID NO: 38646 - DNA, 2337 bp, Homo sapiens
aggagtgtgggaggggcagtggaactggagtcagctaatggctgacgcactacgcgcagagggaaagacgggtcaccaatagcgacacggatatggccccgcgggcggggtttaggcccaaagtggtgtcggagcagcgcctattagtgtcatcctcaccgtcacggccggcgcctcctcctggattcattcactcgctcttttcattcacgaaggtagtgaggcctagtggaaagccatggagagcgctctccccgccgccggcttcctgtactgggtcggcgcgggcaccgtggcctacctagccctgcgtatttcgtactcgctcttcacggccctccgggtctggggagtggggaatgaggcgggggtcggcccggggctcggagaatgggcagttgtcacaggtagtactgatggaattggaaaatcatatgcagaagagttagcaaagcatggaatgaaggttgtccttatcagcagatcaaaggataaacttgaccaggtttccagtgaaataaaagaaaaattcaaagtggagacaagaaccattgctgttgactttgcatcagaagatatttatgataaaattaaaacaggcttggctggtcttgaaatcggcatcttagtgaacaacgtgggaatgtcgtatgagtatcctgaatactttttggatgttcctgacttggacaatgtgatcaagaaaatgataaatattaatattctttctgtttgtaagatgacacaattggtactgcctggcatggtggaaagatccaaaggggctattctgaacatttcatctggcagtggcatgctccctgtcccactcttgaccatctattctgcaaccaagacttttgtagatttcttctctcagtgcctccatgaggagtataggagcaagggcgtctttgtgcagagtgtcctgccatacttcgtagctacaaaactggctaaaatccggaagccaactttggataagccctctccggagacgtttgtgaagtctgcaattaaaacagtcggcctgcaatcccgaaccaatggatacctgatccatgctcttatgggctcgataatctcaaacctgccttcttggatttatttgaaaatagtcatgaatatgaacaagtctacacgggctcactatctgaagaaaaccaagaagaactaagcattgataactgcattgtaacttggccagatgctccagcatatgcacgttcactgcaaagcaccctactggttttgaaaatctgaccttgtcatttcaatagttattaacatgactaaatattatcttaattaagaggaaaatagaagttgcttttaggggtttctgacatatattctggatactatccgaggtaattttgaagtttaatataaatgctcatatcaaatgaatatagaactaatattgtcgggaacacctaatagaaaggaatactattatagcaaatcacagaatgatagactcaagcataaaacttggcagttttatctgcttcaaaatgccattgatcattattcctgtattttctctgaaactgattataaaaaccaatgtccagctactctttgtttttgacacttgaagaaatggagatcgatttgatttgtttataagcagacacactgcaatttacaaagatctctttacggttttataaaattatcttccagtttgtacatttatatggaattgttctttatcaagggtagctaatgacatgaaaataattgtgaaatatggaattatttctgacacatgaagcccactaaactatgctttcttataatgcatatttcttctcagtttaaatgtatgtaaatatcgaagctatatggtatgatttataaagataaatgggccaaagtgtacattgagactggcagccatctatggtaccactgaaaccctgacccagaaaagtggcttgcttggacacccagctgcctttgtttctgcattaaaccaatattgatcacacatatgacacaggctagtcctataaaagtaatgacttcatagaaatggcattataatttttaagttgatactctacaggtagctattgatataattagttttaataaaacatgctgcaaccatggtatacaacaaaaatacatttctttggtgattgaaattaaggccgtatttacaatgacttaatataagactgacttttatcctgcttcataacatctgctatcagcatcattatgtaaaagaaaatatattttagcccctaaaattaggaagaatgtaatctcagaataaaggttgtcatttaagttgaataaatatatagctttatgaaaaacaca

SEQ ID NO: 38647 - DNA, 1148 bp, Homo sapiens
ttatcaagggtagctaatgacatgaaaataattgtgaaatatggaattatttctgacacatgaagcccactaaactatgctttcttataatgcatatttcttctcagttaattttttttttttaatttttattttttgagacggagtctcgctctgtcgcccaggctggagtgcagtggcgggatctcggctcactgcaagctccgcctcccgggttcacaccattctcctgcctcagcctcccaagtagctgggactacaggcacccgccactacgcccggctaattttttgtatttttagtagagacggggtttcaccgttttggccgggatggtctcgatctcctgacctcgtgatccgcccgcctcggcctcccaaagtgctgggattacaggcgtgagccaccgcgcccggccctcagtttaaatgtatgtaaatatcgaagctatatggtatgatttataaagataaatgggccaaagtgtacattgagactggcagccatctatggtaccactgaaaccctgacccagaaaagtggcttgcttggacacccagctgcctttgtttctgcattaaaccaatattgatcacacatatgacacaggctagtcctataaaagtaatgacttcatagaaatggcattataatttttaagttgatactctacaggtagctattgatataattagttttaataaaacatgctgcaaccatggtatacaacaaaaatacatttctttggtgattgaaattaaggccgtatttacaatgacttaatataagactgacttttatcctgcttcataacttgtatggagaactcaccaagaaagaattcaatactgtgaaatatgcagcaagaagattggtctttacctaggctgtgtttcctaagctctgagttttcagcaccagtagatttgtattaaaagaaaaaaaaatggggccttagcttctggcttttaattttgccagctaaggacataaaacaaaaataaacaaacaaaaacaaatagccatctgctatcagcatcattatgtaaaagaaaatatattttagcccctaaaattaggaagaatgtaatctcagaataaaggttgtcatttaagttgaataaatatatagctttatgaaaaacaca

SEQ ID NO: 38648 - DNA, 889 bp, Homo sapiens
actagttctagatcgcgagcggccgactcttttgtatttttagtagagacggggtttcaccgttttggccgggatggtctcgatctcctgacctcgtgatccgcccgcctcggcctcccaaagtgctgggattacaggcgtgagccaccgcgcccggccctcagtttaaatgtatgtaaatatcgaagctatatggtatgatttataaagataaatgggccaaagtgtacattgagactggcagccatctatggtaccactgaaaccctgacccagaaaagtggcttgcttggacacccagctgcctttgtttctgcattaaaccaatattgatcacacatatgacacaggctagtcctataaaagtaatgacttcatagaaatggcattataatttttaagttgatactctacaggtagctattgatataattagttttaataaaacatgctgcaaccatggtatacaacaaaaatacatttctttggtgattgaaattaaggccgtatttacaatgacttaatataagactgacttttatcctgcttcataacttgtatggagaactcaccaagaaagaattcaatactgtgaaatatgcagcaagaagattggtctttacctaggctgtgtttcctaagctctgagttttcagcaccagtagatttgtattaaaagaaaaaaaaatggggccttagcttctggcttttaattttgccagctaaggacataaaacaaaaataaacaaacaaaaacaaatagccatctgctatcagcatcattatgtaaaagaaaatatattttagcccctaaaattaggaagaatgtaatctcagaataaaggttgtcatttaagttgaataaatatatagctttatgaaaaacaca

SEQ ID NO: 38649 - DNA, 837 bp, Homo sapiens
tgcaattatactctaaattccactacactacattaaagtaaatggacattccagaatatagatgtgattatagtcttaaactaattattattaaaccaatgattgctgaaaatcagtgatgcatttgttatagagtataactcatcgtttacagtatgttttagttggcagtatcatacatagatggttaaaccatctatggtaccactgaaaccctgacccagaaaagtggcttgcttggacacccagctgcctttgtttctgcattaaaccaatattgatcacacatatgacacaggctagtcctataaaagtaatgacttcatagaaatggcattataatttttaagttgatactctacaggtagctattgatataattagttttaataaaacatgctgcaaccatggtatacaacaaaaatacatttctttggtgattgaaattaaggccgtatttacaatgacttaatataagactgacttttatcctgcttcataacttgtatggagaactcaccaagaaagaattcaatactgtgaaatatgcagcaagaagattggtctttacctaggctgtgtttcctaagctctgagttttcagcaccagtagatttgtattaaaagaaaaaaaaatggggccttagcttctggcttttaattttgccagctaaggacataaaacaaaaataaacaaacaaaaacaaatagccatctgctatcagcatcattatgtaaaagaaaatatattttagcccctaaaattaggaagaatgtaatctcagaataaaggttgtcatttaagttgaataaatatatagctttatgaaaaacaca

SEQ ID NO: 38650 - DNA, 1073 bp, Homo sapiens
aggagtgtgggaggggcagtggaactggagtcagctaatggctgacgcactacgcgcagagggaaagacgggtcaccaatagcgacacggatatggccccgcgggcggggtttaggcccaaagtggtgtcggagcagcgcctattagtgtcatcctcaccgtcacggccggcgcctcctcctggattcattcactcgctcttttcattcacgaaggtagtgaggcctagtggaaagccatggagagcgctctccccgccgccggcttcctgtactgggtcggcgcgggcaccgtggcctacctagccctgcgtatttcgtactcgctcttcacggccctccgggtctggggagtggggaatgaggcgggggtcggcccggggctcggagaatgggcagttgtcacaggtagtactgatggaattggaaaatcatatgcagaagagttagcaaagcatggaatgaaggttgtccttatcagcagatcaaaggataaacttgaccaggtttccagtgaaataaaagaaaaattcaaagtggagacaagaaccattgctgttgactttgcatcagaagatatttatgataaaattaaaacaggcttggctggtcttgaaatcggcatcttagtgaacaacgtgggaatgtcgtatgagtatcctgaatactttttggatgttcctgacttggacaatgtgatcaagaaaatgataaatattaatattctttctgtttgtaagatgacacaattggtactgcctggcatggtggaaagatccaaaggggctattctgaacatttcatctggcagtggcatgctccctgtcccactcttgaccatctattctgcaaccaagacttttgtagatttcttctctcagtgcctccatgaggagtataggagcaagggcgtctttgtgcagagtgtcctgccatacttcgtagctacaaaactggctaaaatccggaagccaactttggataagccctctccggagacgtttgtgaagtctgcaattaaaaccagatgcggccgtcgttattagttttattgtttcgtattgtcattaataa

SEQ ID NO: 38651 - DNA, 512 bp, Homo sapiens
ccccggtagatttgtattaaaagaaaaaaaaatgggcaggtagctattgatataattagttttaataaaacatgctgcaaccatggtatacaacaaaaatacatttctttggtgattgaaattaaggccgtatttacaatgacttaatataagactgacttttatcctgcttcataacttgtatggagaactcaccaagaaagaattcaatactgtgaaatatgcagcaagaagattggtctttacctaggctgtgtttcctaagctctgagttttcagcaccagtagatttgtattaaaagaaaaaaaaatggggccttagcttctggcttttaattttgccagctaaggacataaaacaaaaataaacaaacaaaaacaaatagccatctgctatcagcatcattatgtaaaagaaaatatattttagcccctaaaattaggaagaatgtaatctcagaataaaggttgtcatttaagttgaataaatatatagctttatgaaaaacaca

SEQ ID NO: 38652 - DNA, 855 bp, Homo sapiens
aggagtgtgggaggggcagtggaactggagtcagctaatggctgacgcactacgcgcagagggaaagacgggtcaccaatagcgacacggatatggccccgcgggcggggtttaggcccaaagtggtgtcggagcagcgcctattagtgtcatcctcaccgtcacggccggcgcctcctcctggattcattcactcgctcttttcattcacgaaggtagtgaggcctagtggaaagccatggagagcgctctccccgccgccggcttcctgtactgggtcggcgcgggcaccgtggcctacctagccctgcgtatttcgtactcgctcttcacggccctccgggtctggggagtggggaatgaggcgggggtcggcccggggctcggagaatgggcagttgtcacaggtagtactgatggaattggaaaatcatatgcagaagagttagcaaagcatggaatgaaggttgtccttatcagcagatcaaaggataaacttgaccaggtttccagtgaaataaaagaaaaattcaaagtggagacaagaaccattgctgttgactttgcatcagaagatatttatgataaaattaaaacaggcttggctggtcttgaaatcggcatcttaggttgggctggcttaaagccccagccctctagtcacagagttggtctttctggtgtccaaccccatcctgggtcatcttgattccactactgagtatatatcaaaaacgaagaaactcaatatattgaagagatatctgcactctatgtttattgcagcactattcacagtagccaaaatatggaatcagcctaacagtctatcagcagatgaatggataaagaaaa

SEQ ID NO: 38653 - DNA, 2866 bp, Homo sapiens
aggagtgtgggaggggcagtggaactggagtcagctaatggctgacgcactacgcgcagagggaaagacgggtcaccaatagcgacacggatatggccccgcgggcggggtttaggcccaaagtggtgtcggagcagcgcctattagtgtcatcctcaccgtcacggccggcgcctcctcctggattcattcactcgctcttttcattcacgaaggtagtgaggcctagtggaaagccatggagagcgctctccccgccgccggcttcctgtactgggtcggcgcgggcaccgtggcctacctagccctgcgtatttcgtactcgctcttcacggccctccgggtctggggagtggggaatgaggcgggggtcggcccggggctcggagaatgggcagttgtcacaggtagtactgatggaattggaaaatcatatgcagaagagttagcaaagcatggaatgaaggttgtccttatcagcagatcaaaggataaacttgaccaggtttccagtgaaataaaagaaaaattcaaagtggagacaagaaccattgctgttgactttgcatcagaagatatttatgataaaattaaaacaggcttggctggtcttgaaatcggcatcttagtgaacaacgtgggaatgtcgtatgagtatcctgaatactttttggatgttcctgacttggacaatgtgatcaagaaaatgataaatattaatattctttctgtttgtaagatgacacaattggtactgcctggcatggtggaaagatccaaaggggctattctgaacatttcatctggcagtggcatgctccctgtcccactcttgaccatctattctgcaaccaagacttttgtagatttcttctctcagtgcctccatgaggagtataggagcaagggcgtctttgtgcagagtgtcctgccatacttcgtagctacaaaactggctaaaatccggaagccaactttggataagccctctccggagacgtttgtgaagtctgcaattaaaacagtcggcctgcaatcccgaaccaatggatacctgatccatgctcttatgggctcgataatctcaaacctgccttcttggatttatttgaaaatagtcatgaatatgaacaagtctacacgggctcactatctgaagaaaaccaagaagaactaagcattgataactgcattgtaacttggccagatgctccagcatatgcacgttcactgcaaagcaccctactggttttgaaaatctgaccttgtcatttcaatagttattaacatgactaaatattatcttaattaagaggaaaatagaagttgcttttaggggtttctgacatatattctggatactatccgaggtaattttgaagtttaatataaatgctcatatcaaatgaatatagaactaatattgtcgggaacacctaatagaaaggaatactattatagcaaatcacagaatgatagactcaagcataaaacttggcagttttatctgcttcaaaatgccattgatcattattcctgtattttctctgaaactgattataaaaaccaatgtccagctactctttgtttttgacacttgaagaaatggagatcgatttgatttgtttataagcagacacactgcaatttacaaagatctctttacggttttataaaattatcttccagtttgtacatttatatggaattgttctttatcaagggtagctaatgacatgaaaataattgtgaaatatggaattatttctgacacatgaagcccactaaactatgctttcttataatgcatatttcttctcagtttaaatgtatgtaaatatcgaagctatatggtatgatttataaagataaatgggccaaagtgtacattgagactggcagccatctatggtaccactgaaaccctgacccagaaaagtggcttgcttggacacccagctgcctttgtttctgcattaaaccaatattgatcacacatatgacacaggctagtcctataaaagtaatgacttcatagaaatggcattataatttttaagttgatactctacaggtagctattgatataattagttttaataaaacatgctgcaaccatggtatacaacaaaaatacatttctttggtgattgaaattaaggccgtatttacaatgacttaatataagactgacttttatcctgcttcataacttgtatggagaactcaccaagaaagaattcaatactgtgaaatatgcagcaagaagattggtctttacctaggctgtgtttcctaagctctgagttttcagcaccagtagatttgtattaaaagaaaaaaaaatggggccttagcttctggcttttaattttgccagctaaggacataaaacaaaaataaacaaacaaaaacaaatagccatctgctatcagcatcattatgtaaaagaaaatatattttagcccctaaaattaggaagaatgtaatctcagaataaaggttgtcatttaagttgaataaatatatagctttatgaaaaacacaaaaaacaacaacgaagaaaaaaaaaaaactcttgttcgggcgcgcctctgggcccttgggaaaaacttttctgaaacccattcgcgttgggagcgccgggggccccagtggggttaggtgaacactgggcccaaggcggtttccccggaggagaacccgcggggccagaaacaagggcgttggggtttctctcccccattaaagaaagcgccgcgggggaaaccgcgaggtttttgagaccattccccaaggggagttccagagggccaaaaacgggaattctcaaccaggggttccaaggaactcgattaaaatacga

SEQ ID NO: 38654 - DNA, 2863 bp, Homo sapiens
aggagtgtgggaggggcagtggaactggagtcagctaatggctgacgcactacgcgcagagggaaagacgggtcaccaatagcgacacggatatggccccgcgggcggggtttaggcccaaagtggtgtcggagcagcgcctattagtgtcatcctcaccgtcacggccggcgcctcctcctggattcattcactcgctcttttcattcacgaaggtagtgaggcctagtggaaagccatggagagcgctctccccgccgccggcttcctgtactgggtcggcgcgggcaccgtggcctacctagccctgcgtatttcgtactcgctcttcacggccctccgggtctggggagtggggaatgaggcgggggtcggcccggggctcggagaatgggcagttgtcacaggtagtactgatggaattggaaaatcatatgcagaagagttagcaaagcatggaatgaaggttgtccttatcagcagatcaaaggataaacttgaccaggtttccagtgaaataaaagaaaaattcaaagtggagacaagaaccattgctgttgactttgcatcagaagatatttatgataaaattaaaacaggcttggctggtcttgaaatcggcatcttagtgaacaacgtgggaatgtcgtatgagtatcctgaatactttttggatgttcctgacttggacaatgtgatcaagaaaatgataaatattaatattctttctgtttgtaagatgacacaattggtactgcctggcatggtggaaagatccaaaggggctattctgaacatttcatctggcagtggcatgctccctgtcccactcttgaccatctattctgcaaccaagacttttgtagatttcttctctcagtgcctccatgaggagtataggagcaagggcgtctttgtgcagagtgtcctgccatacttcgtagctacaaaactggctaaaatccggaagccaactttggataagccctctccggagacgtttgtgaagtctgcaattaaaacagtcggcctgcaatcccgaaccaatggatacctgatccatgctcttatgggctcgataatctcaaacctgccttcttggatttatttgaaaatagtcatgaatatgaacaagtctacacgggctcactatctgaagaaaaccaagaagaactaagcattgataactgcattgtaacttggccagatgctccagcatatgcacgttcactgcaaagcaccctactggttttgaaaatctgaccttgtcatttcaatagttattaacatgactaaatattatcttaattaagaggaaaatagaagttgcttttaggggtttctgacatatattctggatactatccgaggtaattttgaagtttaatataaatgctcatatcaaatgaatatagaactaatattgtcgggaacacctaatagaaaggaatactattatagcaaatcacagaatgatagactcaagcataaaacttggcagttttatctgcttcaaaatgccattgatcattattcctgtattttctctgaaactgattataaaaaccaatgtccagctactctttgtttttgacacttgaagaaatggagatcgatttgatttgtttataagcagacacactgcaatttacaaagatctctttacggttttataaaattatcttccagtttgtacatttatatggaattgttctttatcaagggtagctaatgacatgaaaataattgtgaaatatggaattatttctgacacatgaagcccactaaactatgctttcttataatgcatatttcttctcagtttattttttattttattttttttttttttgagacggagtctcgctctgtcgcccaggctggagtgcagtggcgggatctcggctcactgcaagctccgcctcccgggttcacgccattctcctgcctcagcctcccaagtagctgggactacaggcacccgccactacgcccggctaattttttgtatttttagtagagacggggtttcaccgttttagccgggatggtctcgatctcctgacctcgtgatccgcccgcctcggcctcccaaagtgctgggattacaggcgtgagccaccgcgcccggccctcagtttaaatgtatgtaaatatcgaagctatatggtatgatttataaagataaatgggccaaagtgtacattgagactggcagccatctatggtaccactgaaaccctgacccagaaaagtggcttgcttggacacccagctgcctttgtttctgcattaaaccaatattgatcacacatatgacacaggctagtcctataaaagtaatgacttcatagaaatggcattataatttttaagttgatactctacaggtagctattgatataattagttttaataaaacatgctgcaaccatggtatacaacaaaaatacatttctttggtgattgaaattaaggccgtatttacaatgacttaatataagactgacttttatcctgcttcataacttgtatggagaactcaccaagaaagaattcaatactgtgaaatatgcagcaagaagattggtctttacctaggctgtgtttcctaagctctgagttttcagcaccagtagatttgtattaaaagaaaaaaaaatggggccttagcttctggcttttaattttgccagctaaggacataaaacaaaaataaacaaacaaaaacaaatagccatctgctatcagcatcattatgtaaaagaaaatatattttagcccctaaaattaggaagaatgtaatctcagaataaaggttgtcatttaagttgaataaatatatagctttatgaaaaacaca

SEQ ID NO: 38655 - DNA, 1681 bp, Homo sapiens
gtataatattgtcccccgacacacacctgcaaacaacgccccacgacaaaccttcaagtgtcctgccatacttcgtagctacaaaactggctaaaatccggaagccaactttggataagccctctccggagacgtttgtgaagtctgcaattaaaacagtcggcctgcaatcccgaaccaatggatacctgatccatgctcttatgggctcgataatctcaaacctgccttcttggatttatttgaaaatagtcatgaatatgaacaagtctacacgggctcactatctgaagaaaaccaagaagaactaagcattgataactgcattgtaacttggccagatgctccagcatatgcacgttcactgcaaagcaccctactggttttgaaaatctgaccttgtcatttcaatagttattaacatgactaaatattatcttaattaagaggaaaatagaagttgcttttaggggtttctgacatatattctggatactatccgaggtaattttgaagtttaatataaatgctcatatcaaatgaatatagaactaatattgtcgggaacacctaatagaaaggaatactattatagcaaatcacagaatgatagactcaagcataaaacttggcagttttatctgcttcaaaatgccattgatcattattcctgtattttctctgaaactgattataaaaaccaatgtccagctactctttgtttttgacacttgaagaaatggagatcgatttgatttgtttataagcagacacactgcaatttacaaagatctctttacggttttataaaattatcttccagtttgtacatttatatggaattgttctttatcaagggtagctaatgacatgaaaataattgtgaaatatggaattatttctgacacatgaagcccactaaactatgctttcttataatgcatatttcttctcagtttaaatgtatgtaaatatcgaagctatatggtatgatttataaagataaatgggccaaagtgtacattgagactggcagccatctatggtaccactgaaaccctgacccagaaaagtggcttgcttggacacccagctgcctttgtttctgcattaaaccaatattgatcacacatatgacacaggctagtcctataaaagtaatgacttcatagaaatggcattataatttttaagttgatactctacaggtagctattgatataattagttttaataaaacatgctgcaaccatggtatacaacaaaaatacatttctttggtgattgaaattaaggccgtatttacaatgacttaatataagactgacttttatcctgcttcataacttgtatggagaactcaccaagaaagaattcaatactgtgaaatatgcagcaagaagattggtctttacctaggctgtgtttcctaagctctgagttttcagcaccagtagatttgtattaaaagaaaaaaaaatggggccttagcttctggcttttaattttgccagctaaggacataaaacaaaaataaacaaacaaaaacaaatagccatctgctatcagcatcattatgtaaaagaaaatatattttagcccctaaaattaggaagaatgtaatctcagaataaaggttgtcatttaagttgaataaatatatagctttatgaaaaacaca

SEQ ID NO: 38656 - DNA, 1743 bp, Homo sapiens
aggagtgtgggaggggcagtggaactggagtcagctaatggctgacgcactacgcgcagagggaaagacgggtcaccaatagcgacacggatatggccccgcgggcggggtttaggcccaaagtggtgtcggagcagcgcctattagtgtcatcctcaccgtcacggccggcgcctcctcctggattcattcactcgctcttttcattcacgaaggtagtgaggcctagtggaaagccatggagagcgctctccccgccgccggcttcctgtactgggtcggcgcgggcaccgtggcctacctagccctgcgtatttcgtactcgctcttcacggccctccgggtctggggagtggggaatgaggcgggggtcggcccggggctcggagaatgggcagttgtcacaggtagtactgatggaattggaaaatcatatgcagaagagttagcaaagcatggaatgaaggttgtccttatcagcagatcaaaggataaacttgaccaggtttccagtgaaataaaagaaaaattcaaagtggagacaagaaccattgctgttgactttgcatcagaagatatttatgataaaattaaaacaggcttggctggtcttgaaatcggcatcttagtgaacaacgtgggaatgtcgtatgagtatcctgaatactttttggatgttcctgacttggacaatgtgatcaagaaaatgataaatattaatattctttctgtttgtaagatgacacaattggtactgcctggcatggtggaaagatccaaaggggctattctgaacatttcatctggcagtggcatgctccctgtcccactcttgaccatctattctgcaaccaagacttttgtagatttcttctctcagtgcctccatgaggagtataggagcaagggcgtctttgtgcagagtgtcctgccatacttcgtagctacaaaactggctaaaatccggaagccaactttggataagccctctccggagacgtttgtgaagtctgcaattaaaacagtcggcctgcaatcccgaaccaatggatacctgatccatgctcttatgggctcgataatctcaaacctgccttcttggatttatttgaaaatagtcatgaatatgaacaagtctacacgggctcactatctgaagaaaaccaagaagaactaagcattgataactgcattgtaacttggccagatgctccagcatatgcacgttcactgcaaagcaccctactggttttgaaaatctgaccttgtcatttcaatagttattaacatgactaaatattatcttaattaagaggaaaatagaagttgcttttaggggtttctgacatatattctggatactatccgaggtaattttgaagtttaatataaatgctcatatcaaatgaatatagaactaatattgtcgggaacacctaatagaaaggaatactattatagcaaatcacagaatgatagactcaagcataaaacttggcagttttatctgcttcaaaatgccattgatcattattcctgtattttctctgaaactgattataaaaaccaatgtccagctactctttgtttttgacactttgcatccagagacactttgcatccagagacactttgcatccagagacactttgcatccagagacactttgcatccagagacacttgcatccagagacacttgcatccagagacacttgcatccgaggggatcctctgaacgcta

SEQ ID NO: 38657 - DNA, 1255 bp, Homo sapiens
aggagtgtgggaggggcagtggaactggagtcagctaatggctgacgcactacgcgcagagggaaagacgggtcaccaatagcgacacggatatggccccgcgggcggggtttaggcccaaagtggtgtcggagcagcgcctattagtgtcatcctcaccgtcacggccggcgcctcctcctggattcattcactcgctcttttcattcacgaaggtagtgaggcctagtggaaagccatggagagcgctctccccgccgccggcttcctgtactgggtcggcgcgggcaccgtggcctacctagccctgcgtatttcgtactcgctcttcacggccctccgggtctggggagtggggaatgaggcgggggtcggcccggggctcggagaatgggcagttgtcacaggtagtactgatggaattggaaaatcatatgcagaagagctactcaggaggctgaggcaggagaatcgcttgaacccaggaggtggaggttgcagtgagccgagatcacaccgtggcactccagcctgggtgacagagcaagactctgtctcaaaaaaattagcaaagcatggaatgaaggttgtccttatcagcagatcaaaggataaacttgaccaggtttccagtgaaataagcaattatacttgagacctgaattacaatatggcaaagactcttaactaacttctactcaatcaaccagatggataaaccaatgctgttcatttgtttgttctgtgtataatgcttatatacttttatcctcacaaatcaaattgtttacttattaagagtcaatttgtgtttgtttccaaacttatgttgggtatattttttattaaatattctgtaaaatgatgaactattagtgtaaaagctagagttagttctataaaaactaagttgaatgctctaaaaaaagtgagtaaaattacttctttgaaaaattggccgtcaaattagtgttgaacaaagacaaatgtaaaatattggaagaacttacaaaaaagaaatctgctctcctgattgtttcatatgtgttgaagtttgtgctgtactttactagaactgaaattgtaatcataaatgatagaatatgggtgtgatgcatgcaagaaagactggaattcaagtccgcagatccaatctcaaagacaaggtcttggccctacacagaggattggtgaatgaattacatttatacatggtttaagtgaaaataaaatgattaccatgtgtatttatctc

SEQ ID NO: 38658 - DNA, 1190 bp, Homo sapiens
aggagtgtgggaggggcagtggaactggagtcagctaatggctgacgcactacgcgcagagggaaagacgggtcaccaatagcgacacggatatggccccgcgggcggggtttaggcccaaagtggtgtcggagcagcgcctattagtgtcatcctcaccgtcacggccggcgcctcctcctggattcattcactcgctcttttcattcacgaaggtagtgaggcctagtggaaagccatggagagcgctctccccgccgccggcttcctgtactgggtcggcgcgggcaccgtggcctacctagccctgcgtatttcgtactcgctcttcacggccctccgggtctggggagtggggaatgaggcgggggtcggcccggggctcggagaatgggcagttgtcacaggtagtactgatggaattggaaaatcatatgcagaagagttagcaaagcatggaatgaaggttgtccttatcagcagatcaaaggataaacttgaccaggtttccagtgaaataagcaattatacttgagacctgaattacaatatggcaaagactcttaactaacttctactcaatcaaccagatggataaaccaatgctgttcatttgtttggtaaaacatactaactgatgtccccagttttgctgaccatttgtggccaggaagcttctgtgtataatgcttatatacttttatcctcacaaatcaaattgtttacttattaagagtcaatttgtgtttgtttccaaacttatgttgggtatattttttattaaatattctgtaaaatgatgaactattagtgtaaaagctagagttagttctataaaaactaagttgaatgctctaaaaaaagtgagtaaaattacttctttgaaaaattggccgtcaaattagtgttgaacaaagacaaatgtaaaatattggaagaacttacaaaaaagaaatctgctctcctgattgtttcatatgtgttgaagtttgtgctgtactttactagaactgaaattgtaatcataaatgatagaatatgggtgtgatgcatgcaagaaagactggaattcaagtccgcagatccaatctcaaagacaaggtcttggccctacacagaggattggtgaatgaattacatttatacatggtttaagtgaaaataaaatgattaccatgtgtatttatctc

SEQ ID NO: 38659 - DNA, 840 bp, Homo sapiens
  misc_feature (75)..(75): n is a, c, g, or t
  misc_feature (182)..(182): n is a, c, g, or t
  misc_feature (228)..(228): n is a, c, g, or t
  misc_feature (265)..(265): n is a, c, g, or t
gagactatgttgaagaagagtggtgagagtgggctcctcgtcttgttccagttctcaaagggaatgctttcaccntttccccattcagtattatgttggctgtgggttgtatagatggcttttattacattaagggatcatggcacaagttgcagtttccaccctgcccatggaagatgagnagtccatggaagatgaggagtccattgaagatgaggagtctgttgnagatgattccgtggagagcaggatggtggtgacattnctcatatcagctctcgagtccacgatgttggaattcctgatgaatctgcagtcagcattttgcatgaactgtgtgtggattcattgcctacattggatgatgaagacttgagtgttgctactaagtgtgtccccgagaaagtgtcagagcctttacgtggaccttctcatgaaaaaggaaacagaatagtcaatggaaaaggaaaagggctcctgcaaacattcttccttggaagcttagcactgaagtggaagatcctgtgtgaaaggagcagtaccacagaaagaatgtgcccgaccttggagaggcagaacaaagctttaccaggggccttcgagggaagagccagaacggtgtcgacacgaacagtggacaagaaagcactcccgggtgccaagcaaggggacttagttccaaaagccaaaagtcggcaccaattacgcacttagtccgaaacactgtgttctgttcctagtaccattcttactggatggctcgttggacaggattaacccaacggagaggacacggactgggggaaactttgtcctcgaggccaatttcccccaggaaag

SEQ ID NO: 38660 - DNA, 317 bp, Homo sapiens
agggggaagctggatataaactggcagttaaaaaaattgtaaagaaatcaacttgctcattttcattgtgtatttttgctctcaagcattttgcatgaactgtgtgtggattcattgcctacattggatgatgaagacttgagtgttgctactaaggtaaagtggtctcttgtaaaattaatcttctcactctgagtgtagttttgcatagtatttacttttcaaatttagcagtggtttacctatcattgttttatggtggtaatggaaagctggtcagagaaaaacatacacatggctagttgattcaaaaaatg

SEQ ID NO: 38661 - DNA, 1036 bp, Homo sapiens
  misc_feature (75)..(75): n is a, c, g, or t
  misc_feature (182)..(182): n is a, c, g, or t
  misc_feature (228)..(228): n is a, c, g, or t
  misc_feature (265)..(265): n is a, c, g, or t
gagactatgttgaagaagagtggtgagagtgggctcctcgtcttgttccagttctcaaagggaatgctttcaccntttccccattcagtattatgttggctgtgggttgtatagatggcttttattacattaagggatcatggcacaagttgcagtttccaccctgcccatggaagatgagnagtccatggaagatgaggagtccattgaagatgaggagtctgttgnagatgattccgtggagagcaggatggtggtgacattnctcatatcagctctcgagtccacgatgttggaattcctgatgaatctgcagtcagcattttgcatgaactgtgtgtggattcattgcctacattggatgatgaagacttgagtgttgctactaaggccctggtgtgtgatgttccccatcctgtgtccaagtgttctcattgttcagttcccacctatgagtgagaacatgtggtgtttggttttctgtccttgcaacagtttgctcagaatgatggtttccagcttcatccatgtccctacaaagtacatgaactcatcattttttatgctgcatagtattccatggtgttgtgtccccgagaaagtgtcagagcctttacgtggaccttctcatgaaaaaggaaacagaatagtcaatggaaaaggaaaagggctcctgcaaacattcttccttggaagcttagcactgaagtggaagatcctgtgtgaaaggagcagtaccacagaaagaatgtgcccgaccttggagaggcagaacaaagctttaccaggggccttcgagggaagagccagaacggtgtcgacacgaacagtggacaagaaagcactcccgggtgccaagcaaggggacttagttccaaaagccaaaagtcggcaccaattacgcacttagtccgaaacactgtgttctgttcctagtaccattcttactggatggctcgttggacaggattaacccaacggagaggacacggactgggggaaactttgtcctcgaggccaatttcccccaggaaag

SEQ ID NO: 38662 - DNA, 679 bp, Homo sapiens
tctttcatataatgttaaaaaggaaaggaaacagcctggaactggcaaaaatcattattagtggcagatccagaattttcatatagtagtttcatagaagcagtaatttgagtgggttatgggtggctaggaaacttgtcttgaagctgcatttattttgccaacactttgatgttactttgataccaagtgtatgggagtcattggggatgtggtagactgggattaagctgatggccacccctttacttgctggaaattaatgccggctattttttattttttccttaagtcccagtacccagatagaagtgatttgtgataataacatagggatagtgaaagaaatatcttaagggctcactgaggctcagtttactgcagtgtggcaaaagtcgtgaatgacaagttacgtgacaagctataaggatttgtattgctctttttgagcaaagattatggactgtcttgactataaagggtggatttgtaaactttcagttgatttttttagatgtcaatgaatgctttttgtatgatttttaaaagtatgattgtattctcataacgttcctgttaggtaattttggcaatcaccacccttatgtatagggaaatgtgtacacaaatctgttcgtgccccaaagcttctcaataaaaattggaattcaatttagat

SEQ ID NO: 38663 - DNA, 410 bp, Homo sapiens
aaaatgattgcattgtgtgacttatatcgttgtatttattggcttgagtgcagggagattttagaaaaagaatctggtttttgttatcaaagatcttggagtggggatgagagagtgctgggaaatttcggagctagactggaatgagtctaaggaaacttgccagtccattataccttcagttataaaaggagaaaactcatttggtttaaattcgtttgtttagaatagcattaaaaggcgattcttcctatttaaagaacagagttgtctgccattctctcgtttattcctcctccctcccgtgcccttgtatattttcttagtgactgagcacctgagccagcactgattttttgtgtgttttgttgtttttgttttgggagacggagtctcgctctgtcgcccag

SEQ ID NO: 38664 - DNA, 1006 bp, Homo sapiens
gagtgagaccccaaataaaaaaaaaaaaaacaaaaaacctcttatgactcatgggctagaaccacccacctcatgccaatccactgacactgagaatggcattgtgattggctttcaatagtattttcccccagagatgaggtcatcttccatgaaggtcagatatctacagaaataattgatgttagcaaggaagaagcagagaatgggtattgatagacaatgtctgctctagggatgggtcattctgccaacattcagcagatcccctatctactcccaaaatgcctggtaccagctaatagttaacatcttctgagagcattacttaaagtctttacatatcttcacttatttaacccacaaatcaacccttaaaggtaggttctgatgtagtgggttggtgcaaaagtaattggagttttgccattttaatgcaattacttttgcaccaatctaatatatccccattttctaggtggggaacatgaggcacagagtggttatgtcttacccacagtcatttgcaagggagtggcagagcctagatacaaaccatgtcaatctgcctctgagtctacgtagtatatccactatactaaactgcccttctaccttacaaagcagaacaagatcaggttctcacttttaaggagtctacagtctagtataggagccagcaaactttctctgtaaaggtctggagactaaatactaggttttgcagcagtatggtctctgttgtaactactcagcttttccactgtagcgtaaaaacagttgtagacaattcataaacaagtgtggctgtgttccaataaaacttgatttacaaaaataggcagctggccgggtttgtcccatgagtcagtttgtggacctgcggtctagtgagttagaatactgcttaccaaattttaatgtgtgtgtgattcacgtgggatcgggttaaaatgcaaattttgattcaataggtccggagtgaggcctagtaaaagtgtaagtg

SEQ ID NO: 38665 - DNA, 336 bp, Homo sapiens
ctctctctcctgccactttgtgaagagatctgccttgcttaccttcaccttccaccatgagagtgtttcccaaggcttccccaggcacacagaattgtgaatcaatcaaacctcttttcttcataaattacccagtctcaggtagtatctttatagcagcgtgagaacagactattacaatgggtatagagtttcaccttggactgatagaaaagttttggaaatagatagtggtgatggctgcaaaacattgtgaatgtatctaatgtcactgaattgtacacttaaaagtggttaaaatgataaatgttatgtatgttttaccacaaaaaaaaa

SEQ ID NO: 38666 - DNA, 3137 bp, Homo sapiens
cggtcccgtcgccgccgccccgcactcgggcgagcgcgggagccgcgcagtagacggagcgcgcccggccgagcgggccatggccgcgggggccgccgccgcaggtggtggcgcgcggtgaggagagcgcggcgccccctccggggcggatggaacgcggctcggcgggcgggcagtgccggcgtccgcggctggaatggtgctggctgtgttggtcggtgcctgcgttctgaagcccgagaggagccacaatggagacgccgccgctgcctcccgcatgcacaaagcagggtcatcagaagcctctcgattcaaaagatgataataccgaaaaacactgcccagtgacagtgaatccttggcatatgaagaaagctttcaaagtcatgaacgaattaagaagtcaaaatttgctgtgcgatgtcacaattgtggcagaagacatggaaatttctgctcatagagtggtgctggccgcctgtagtccttattttcatgccatgtttacaggtgagatgagtgagagccgagcaaagagagttagaataaaagaggtagatggctggaccctgaggatgctaattgattatgtttacactgcagaaattcaggttacagaagaaaatgtacaggtacttctcccagcagctggtctcttacagttacaggatgtgaagaagacttgttgtgaatttttggaatcccagcttcaccctgtcaactgcttaggaatccgggcttttgctgatatgcatgcatgtaccgaccttctgaacaaggccaacacctatgcagagcaacattttgcagatgttgtacttagtgaagaatttctcaatcttggcatcgaacaagtgtgcagcttaatctcaagtgacaaacttaccatttcttcagaagagaaggtatttgaagcagtaatagcatgggtgaaccatgacaaggatgtgaggcaagagtttatggcccgactgatggaacatgtacggttacctttgcttcctcgggaatatttagttcagagggttgaagaggaagcattggtcaagaatagcagtgcttgcaaagattacctcattgaagcaatgaagtaccatttgctgccaacagagcagcgtatattaatgaagagtgtccggacccggctgaggacacccatgaaccttcccaaattgatggtggtggttgggggccaagcaccaaaggctatccggagtgtggaatgctatgactttaaagaagaaaggtggcaccaagtagcagagttgccttccaggaggtgcagagcaggcatggtctacatggctggacttgtttttgctgttggtggctttaatggctcattaagagttcgcactgtagattcctacgaccctgtgaaggaccagtggaccagcgttgctaacatgagagaccggagaagcactttgggagctgctgtgttaaatggattattatacgctgtgggaggctttgatgggagtacaggtttgtcatctgtggaagcatacaacataaagtctaatgagtggtttcatgtagctcccatgaatacaaggaggagcagtgttggtgtgggtgttgttggaggtttgctctatgctgtaggaggttatgatggagcatcacgtcagtatcttagcacagtagaatgctataatgctacaacaaatgagtggacctatatagcagaaatgagcaccaggcggagtggagcaggtgttggtgtgttaaacaatttattgtatgctgtaggaggtcatgatggccctttagtacgaaaaagtgttgaagtatatgaccccaccactaacgcatggagacaggttgcagatatgaacatgtgcagaagaaatgcaggagtttgtgcagttaatggtctgttatatgttgttggaggggatgatggttcctgtaacttggcgtcagtagaatattataacccaacaaccgataaatggacagttgtgtcatcgtgtatgagcacagggagaagttatgcaggggtcacagttattgataaaccattatgagcctgaaggacattttcagcatatttatacatgagaaacagccttcaacaagtatttgtgaagtgactgagaatctagcacttctccacttgtagctgcactttaagtctcagcagaagatacgatcgtctgcctttataggcctcagatactgaagattatttttggtagaagcaccgtgtaggctttttctgcaatgagcagcagctgactgaattttcataagaaacttggactgcaggacttaatctgtagtctttagacaacagttgctttcataaagactagttcttatcaaccttgaatgactacagattattttgtgaaggaggatgaagtaatgtgtgttcttgtaaaattaaattttatctttatttcttctaaaaatctgtataccaggaactgaaaatctttgaacagatattaaaatctacgtaagtatacaaactagttgagggatacactgtttgcttttataaaataactttgattacatgaatataataaattatgtgcatataaatgtgtgtctatatgctttcctttaaatatgtttgaaaagatgtttgaaacttgattatactatttataattggcacagtactttgaattatgccagtactacattgtaaaacagagttgtattttttgatatttaacaatgcttaacactttaaatgccacttctgaggaatggacctggtgtaacacacttgaatatgtgtgatgccaaactttttaaaatacaatataaattatgcttatttattattttctttagtttaatcttggtcatgttttggtgtgtatttttaatttttttcttaaattaacactttggcatgaacattactgcaggtttttgatgaatataatgaatgtatggaattcaattgaatttgcatggtcttcggaattttttctgtgtgtataaatttagctgctattaacagaagagagaactttctgtgagtagccatgtgtgttgatcagatacagtttttctgagatcttcaattaatctcactttaaaaatgaccaaaacatgtctttcttgaattaactttgaataaaagtttgtatattatttgtttcacagtgttc

SEQ ID NO: 38667 - DNA, 3030 bp, Homo sapiens
cggtcccgtcgccgccgccccgcactcgggcgagcgcgggagccgcgcagtagacggagcgcgcccggccgagcgggccatggccgcgggggccgccgccgcaggtggtggcgcgcggtgaggagagcgcggcgccccctccggggcggatggaacgcggctcggcgggcgggcagtgccggcgtccgcggctggaatggtgctggctgtgttggtcggtgcctgcgttctgaagcccgagaggagccacaatggagacgccgccgctgcctcccgcatgcacaaagcagggtcatcagaagcctctcgattcaaaagatgataataccgaaaaacactgcccagtgacagtgaatccttggcatatgaagaaagctttcaaagtcatgaacgaattaagaaggtgagatgagtgagagccgagcaaagagagttagaataaaagaggtagatggctggaccctgaggatgctaattgattatgtttacactgcagaaattcaggttacagaagaaaatgtacaggtacttctcccagcagctggtctcttacagttacaggatgtgaagaagacttgttgtgaatttttggaatcccagcttcaccctgtcaactgcttaggaatccgggcttttgctgatatgcatgcatgtaccgaccttctgaacaaggccaacacctatgcagagcaacattttgcagatgttgtacttagtgaagaatttctcaatcttggcatcgaacaagtgtgcagcttaatctcaagtgacaaacttaccatttcttcagaagagaaggtatttgaagcagtaatagcatgggtgaaccatgacaaggatgtgaggcaagagtttatggcccgactgatggaacatgtacggttacctttgcttcctcgggaatatttagttcagagggttgaagaggaagcattggtcaagaatagcagtgcttgcaaagattacctcattgaagcaatgaagtaccatttgctgccaacagagcagcgtatattaatgaagagtgtccggacccggctgaggacacccatgaaccttcccaaattgatggtggtggttgggggccaagcaccaaaggctatccggagtgtggaatgctatgactttaaagaagaaaggtggcaccaagtagcagagttgccttccaggaggtgcagagcaggcatggtctacatggctggacttgtttttgctgttggtggctttaatggctcattaagagttcgcactgtagattcctacgaccctgtgaaggaccagtggaccagcgttgctaacatgagagaccggagaagcactttgggagctgctgtgttaaatggattattatacgctgtgggaggctttgatgggagtacaggtttgtcatctgtggaagcatacaacataaagtctaatgagtggtttcatgtagctcccatgaatacaaggaggagcagtgttggtgtgggtgttgttggaggtttgctctatgctgtaggaggttatgatggagcatcacgtcagtatcttagcacagtagaatgctataatgctacaacaaatgagtggacctatatagcagaaatgagcaccaggcggagtggagcaggtgttggtgtgttaaacaatttattgtatgctgtaggaggtcatgatggccctttagtacgaaaaagtgttgaagtatatgaccccaccactaacgcatggagacaggttgcagatatgaacatgtgcagaagaaatgcaggagtttgtgcagttaatggtctgttatatgttgttggaggggatgatggttcctgtaacttggcgtcagtagaatattataacccaacaaccgataaatggacagttgtgtcatcgtgtatgagcacagggagaagttatgcaggggtcacagttattgataaaccattatgagcctgaaggacattttcagcatatttatacatgagaaacagccttcaacaagtatttgtgaagtgactgagaatctagcacttctccacttgtagctgcactttaagtctcagcagaagatacgatcgtctgcctttataggcctcagatactgaagattatttttggtagaagcaccgtgtaggctttttctgcaatgagcagcagctgactgaattttcataagaaacttggactgcaggacttaatctgtagtctttagacaacagttgctttcataaagactagttcttatcaaccttgaatgactacagattattttgtgaaggaggatgaagtaatgtgtgttcttgtaaaattaaattttatctttatttcttctaaaaatctgtataccaggaactgaaaatctttgaacagatattaaaatctacgtaagtatacaaactagttgagggatacactgtttgcttttataaaataactttgattacatgaatataataaattatgtgcatataaatgtgtgtctatatgctttcctttaaatatgtttgaaaagatgtttgaaacttgattatactatttataattggcacagtactttgaattatgccagtactacattgtaaaacagagttgtattttttgatatttaacaatgcttaacactttaaatgccacttctgaggaatggacctggtgtaacacacttgaatatgtgtgatgccaaactttttaaaatacaatataaattatgcttatttattattttctttagtttaatcttggtcatgttttggtgtgtatttttaatttttttcttaaattaacactttggcatgaacattactgcaggtttttgatgaatataatgaatgtatggaattcaattgaatttgcatggtcttcggaattttttctgtgtgtataaatttagctgctattaacagaagagagaactttctgtgagtagccatgtgtgttgatcagatacagtttttctgagatcttcaattaatctcactttaaaaatgaccaaaacatgtctttcttgaattaactttgaataaaagtttgtatattatttgtttcacagtgttc

SEQ ID NO: 38668 - DNA, 1256 bp, Homo sapiens
cggtcccgtcgccgccgccccgcactcgggcgagcgcgggagccgcgcagtagacggagcgcgcccggccgagcgggccatggccgcgggggccgccgccgcaggtggtggcgcgcggtgaggagagcgcggcgccccctccggggcggatggaacgcggctcggcgggcgggcagtgccggcgtccgcggctggaatggtgctggctgtgttggtcggtgcctgcgttctgaagcccgagaggagccacaatggagacgccgccgctgcctcccgcatgcacaaagcagggtcatcagaagcctctcgattcaaaagatgataataccgaaaaacactgcccagtgacagtgaatccttggcatatgaagaaagctttcaaagtcatgaacgaattaagaagtcaaaatttgctgtgcgatgtcacaattgtggcagaagacatggaaatttctgctcatagagtggtgctggccgcctgtagtccttattttcatgccatgtttacaggtgagatgagtgagagccgagcaaagagagttagaataaaagaggtagatggctggaccctgaggatgctaattgattatgtttacactgcagaaattcaggttacagaagaaaatgtacaggtacttctcccagcagctggtctcttacagttacaggatgtgaagaagacttgttgtgaatttttggaatcccagcttcaccctgtcaactgcttaggaatccgggcttttgctgatatgcatgcatgtaccgaccttctgaacaaggccaacacctatgcagagcaacattttgcagatgttgtacttagtgaagaatttctcaatcttggcatcgaacaagtgtgcagcttaatctcaagtgacaaacttaccatttcttcagaagagaaggtatttgaagcagtaatagcatgggtgaaccatgacaaggatgtgaggcaagagtttatggcccgactgatggaacatgtacggttacctttgcttcctcgggaatatttagttcagagggttgaagaggaagcattggtcaagaatagcagtgcttgcaaagattacctcattgaagcaatgaagtaccatttgctgccaacagagcagcgtatattaatgaagagtgtccggacccggctgaggacacccatgaaccttcccaaattgatggtggtggttgggggccaagcaccaaaggctatccggagtgtggaatgctatgactatcagacgacacggtaatccttg

SEQ ID NO: 38669 - DNA, 3089 bp, Homo sapiens
cggtcccgtcgccgccgccccgcactcgggcgagcgcgggagccgcgcagtagacggagcgcgcccggccgagcgggccatggccgcgggggccgccgccgcaggtggtggcgcgcggtgaggagagcgcggcgccccctccggggcggatggaacgcggctcggcgggcgggcagtgccggcgtccgcggctggaatggtgctggctgtgttggtcggtgcctgcgttctgaagcccgagaggagccacaatggagacgccgccgctgcctcccgcatgcacaaagcagggtcatcagaagcctctcgattcaaaagatgataataccgaaaaacactgcccagtgacagtgaatccttggcatatgaagaaagctttcaaagtcatgaacgaattaagaagtcaaaatttgctgtgcgatgtcacaattgtggcagaagacatggaaatttctgctcatagagtggtgctggccgcctgtagtccttattttcatgccatgtttacaggtgagatgagtgagagccgagcaaagagagttagaataaaagaggtagatggctggaccctgaggatgctaattgattatgtttacactgcagaaattcaggttacagaagaaaatgtacagacttgttgtgaatttttggaatcccagcttcaccctgtcaactgcttaggaatccgggcttttgctgatatgcatgcatgtaccgaccttctgaacaaggccaacacctatgcagagcaacattttgcagatgttgtacttagtgaagaatttctcaatcttggcatcgaacaagtgtgcagcttaatctcaagtgacaaacttaccatttcttcagaagagaaggtatttgaagcagtaatagcatgggtgaaccatgacaaggatgtgaggcaagagtttatggcccgactgatggaacatgtacggttacctttgcttcctcgggaatatttagttcagagggttgaagaggaagcattggtcaagaatagcagtgcttgcaaagattacctcattgaagcaatgaagtaccatttgctgccaacagagcagcgtatattaatgaagagtgtccggacccggctgaggacacccatgaaccttcccaaattgatggtggtggttgggggccaagcaccaaaggctatccggagtgtggaatgctatgactttaaagaagaaaggtggcaccaagtagcagagttgccttccaggaggtgcagagcaggcatggtctacatggctggacttgtttttgctgttggtggctttaatggctcattaagagttcgcactgtagattcctacgaccctgtgaaggaccagtggaccagcgttgctaacatgagagaccggagaagcactttgggagctgctgtgttaaatggattattatacgctgtgggaggctttgatgggagtacaggtttgtcatctgtggaagcatacaacataaagtctaatgagtggtttcatgtagctcccatgaatacaaggaggagcagtgttggtgtgggtgttgttggaggtttgctctatgctgtaggaggttatgatggagcatcacgtcagtatcttagcacagtagaatgctataatgctacaacaaatgagtggacctatatagcagaaatgagcaccaggcggagtggagcaggtgttggtgtgttaaacaatttattgtatgctgtaggaggtcatgatggccctttagtacgaaaaagtgttgaagtatatgaccccaccactaacgcatggagacaggttgcagatatgaacatgtgcagaagaaatgcaggagtttgtgcagttaatggtctgttatatgttgttggaggggatgatggttcctgtaacttggcgtcagtagaatattataacccaacaaccgataaatggacagttgtgtcatcgtgtatgagcacagggagaagttatgcaggggtcacagttattgataaaccattatgagcctgaaggacattttcagcatatttatacatgagaaacagccttcaacaagtatttgtgaagtgactgagaatctagcacttctccacttgtagctgcactttaagtctcagcagaagatacgatcgtctgcctttataggcctcagatactgaagattatttttggtagaagcaccgtgtaggctttttctgcaatgagcagcagctgactgaattttcataagaaacttggactgcaggacttaatctgtagtctttagacaacagttgctttcataaagactagttcttatcaaccttgaatgactacagattattttgtgaaggaggatgaagtaatgtgtgttcttgtaaaattaaattttatctttatttcttctaaaaatctgtataccaggaactgaaaatctttgaacagatattaaaatctacgtaagtatacaaactagttgagggatacactgtttgcttttataaaataactttgattacatgaatataataaattatgtgcatataaatgtgtgtctatatgctttcctttaaatatgtttgaaaagatgtttgaaacttgattatactatttataattggcacagtactttgaattatgccagtactacattgtaaaacagagttgtattttttgatatttaacaatgcttaacactttaaatgccacttctgaggaatggacctggtgtaacacacttgaatatgtgtgatgccaaactttttaaaatacaatataaattatgcttatttattattttctttagtttaatcttggtcatgttttggtgtgtatttttaatttttttcttaaattaacactttggcatgaacattactgcaggtttttgatgaatataatgaatgtatggaattcaattgaatttgcatggtcttcggaattttttctgtgtgtataaatttagctgctattaacagaagagagaactttctgtgagtagccatgtgtgttgatcagatacagtttttctgagatcttcaattaatctcactttaaaaatgaccaaaacatgtctttcttgaattaactttgaataaaagtttgtatattatttgtttcacagtgttc

SEQ ID NO: 38670 - DNA, 2969 bp, Homo sapiens
cggtcccgtcgccgccgccccgcactcgggcgagcgcgggagccgcgcagtagacggagcgcgcccggccgagcgggccatggccgcgggggccgccgccgcaggtggtggcgcgcggtgaggagagcgcggcgccccctccggggcggatggaacgcggctcggcgggcgggcagtgccggcgtccgcggctggaatggtgctggctgtgttggtcggtgcctgcgttctgaagcccgagaggagccacaatggagacgccgccgctgcctcccgcatgcacaaagcagggtcatcagaagcctctcgattcaaaagatgataataccgaaaaacactgcccagtgacagtgaatccttggcatatgaagaaagctttcaaagtcatgaacgaattaagaagtcaaaatttgctgtgcgatgtcacaattgtggcagaagacatggaaatttctgctcatagagtggtgctggccgcctgtagtccttattttcatgccatgtttacaggtgagatgagtgagagccgagcaaagagagttagaataaaagaggtagatggctggaccctgaggatgctaattgattatgtttacactgcagaaattcaggttacagaagaaaatgtacagcattttgcagatgttgtacttagtgaagaatttctcaatcttggcatcgaacaagtgtgcagcttaatctcaagtgacaaacttaccatttcttcagaagagaaggtatttgaagcagtaatagcatgggtgaaccatgacaaggatgtgaggcaagagtttatggcccgactgatggaacatgtacggttacctttgcttcctcgggaatatttagttcagagggttgaagaggaagcattggtcaagaatagcagtgcttgcaaagattacctcattgaagcaatgaagtaccatttgctgccaacagagcagcgtatattaatgaagagtgtccggacccggctgaggacacccatgaaccttcccaaattgatggtggtggttgggggccaagcaccaaaggctatccggagtgtggaatgctatgactttaaagaagaaaggtggcaccaagtagcagagttgccttccaggaggtgcagagcaggcatggtctacatggctggacttgtttttgctgttggtggctttaatggctcattaagagttcgcactgtagattcctacgaccctgtgaaggaccagtggaccagcgttgctaacatgagagaccggagaagcactttgggagctgctgtgttaaatggattattatacgctgtgggaggctttgatgggagtacaggtttgtcatctgtggaagcatacaacataaagtctaatgagtggtttcatgtagctcccatgaatacaaggaggagcagtgttggtgtgggtgttgttggaggtttgctctatgctgtaggaggttatgatggagcatcacgtcagtatcttagcacagtagaatgctataatgctacaacaaatgagtggacctatatagcagaaatgagcaccaggcggagtggagcaggtgttggtgtgttaaacaatttattgtatgctgtaggaggtcatgatggccctttagtacgaaaaagtgttgaagtatatgaccccaccactaacgcatggagacaggttgcagatatgaacatgtgcagaagaaatgcaggagtttgtgcagttaatggtctgttatatgttgttggaggggatgatggttcctgtaacttggcgtcagtagaatattataacccaacaaccgataaatggacagttgtgtcatcgtgtatgagcacagggagaagttatgcaggggtcacagttattgataaaccattatgagcctgaaggacattttcagcatatttatacatgagaaacagccttcaacaagtatttgtgaagtgactgagaatctagcacttctccacttgtagctgcactttaagtctcagcagaagatacgatcgtctgcctttataggcctcagatactgaagattatttttggtagaagcaccgtgtaggctttttctgcaatgagcagcagctgactgaattttcataagaaacttggactgcaggacttaatctgtagtctttagacaacagttgctttcataaagactagttcttatcaaccttgaatgactacagattattttgtgaaggaggatgaagtaatgtgtgttcttgtaaaattaaattttatctttatttcttctaaaaatctgtataccaggaactgaaaatctttgaacagatattaaaatctacgtaagtatacaaactagttgagggatacactgtttgcttttataaaataactttgattacatgaatataataaattatgtgcatataaatgtgtgtctatatgctttcctttaaatatgtttgaaaagatgtttgaaacttgattatactatttataattggcacagtactttgaattatgccagtactacattgtaaaacagagttgtattttttgatatttaacaatgcttaacactttaaatgccacttctgaggaatggacctggtgtaacacacttgaatatgtgtgatgccaaactttttaaaatacaatataaattatgcttatttattattttctttagtttaatcttggtcatgttttggtgtgtatttttaatttttttcttaaattaacactttggcatgaacattactgcaggtttttgatgaatataatgaatgtatggaattcaattgaatttgcatggtcttcggaattttttctgtgtgtataaatttagctgctattaacagaagagagaactttctgtgagtagccatgtgtgttgatcagatacagtttttctgagatcttcaattaatctcactttaaaaatgaccaaaacatgtctttcttgaattaactttgaataaaagtttgtatattatttgtttcacagtgttc

SEQ ID NO: 38671 - DNA, 3002 bp, Homo sapiens
tcctccatgtggccacccatgtgacatgaagttggtgtcactaggtaccacgttgtctgtcccatccaacaggaaaaatagcctgttggccagtgaataaggtaggaatccaggtggtcccctgagggtcttctgacaggctcctttatcaggctcttctcatggtatgagcaccgcagcttgctgacagtggcaacgttctcaagcttcacagactccgtcacttggcctggaggggaattctaggtgtccagccccaggacaggcattttggcaccatgattgagcacgatatggtgagccatcctcacaggattaagaagaattctggacagaaatatagttgtaagtaagcatcagtcagcctgcactttgacccacttccttgtaaccaacagtgacgtagcactaggtaacatttgcatccccgttgttcctatagatacaatttctgaccttagaatcacaaggcttttgtttaaaatagatgggatctctgacattagaatcataagatttttgtttaagacttgcttaagatgtttttcagatcctgaattccagcaaaacagccgacaccaaccagtttgaagacccccacagaggaatgtgatcagcatgaaaatacagcttcgtctccctctcccatgactccaccctgcacacttcgaccaatcaaccatctccacactccagtctccactcccaaacccttaaaaaccccagccccaaactcctcagggagatggatttgacgtttcctcccatttcctccttcggtggccctacgatgaaacctctttctctgctacaaccctatgcctcggcgtattcactttctggtcccatccagcgatggacccatcgtggttaccgtggctggccaagcctgctgtgcttcacagaccccactcaggatcacaccacttcgttccactgtttggagatgccatgtttgcttatcccttcatcagctgatgagcatttgtgctgttttcactttttggctattacgaaaatgttgctacgagcatccatgatattcgcccatttaaaaaagtgtttttcaccattactgctgtgggaaatttctccctggctctgtcctttctttgtagcccagccttcccccaggttttggctctccctctctggctcaatgtcagctccttgtctcacctcctagagcaattccactctcccacctcctgctgcggcatttccaaagcctctgcttagcaagggaccacccattctgcacctctccccttagggctgcaagcacctgcacaaacttggtggttatcctatgcctcaactcaatcaaattctctcagttttccatcagcaatctttttaagccaaagggaaggcaaggacttgatcttcacatcacatgaatcatgacacctgccttagaaggcagaagcaactgtagttggaatagcaattgtttttcaacatatgggatgatatcaaggctctttcctccccatatgtcctgccctgttagtggctggggctgagggttttcccaggaagccagattgtcctcacaagttcctcaggaccctagggcttccacagatagtaggactgttatcagaaagaagtctcgatccagacgccgagagagggttcttggatatcgcccaagaaagaattcagggggagtccatagagtgaagtgaaagcaagtttgttaagaaaacaaaggagtaaagaatggctactccataggcagagcagctccgagggctgctggttgcccatttttttttttttttttctttgagatggagtctggctctgtcgcccaggctggagtgcggtggcacaatctcggctcactgcaagctccgcctcccgggttcacgccattctcctgcctcagcctcccgagtagctgggactacaggcgcccgccaccatgcccggctaattttttgtatttttagtagagatgaggtttcacatgttagccaggatggtctcgatctcctgacctcgtgatccacccgcctcggcctcccaaagtgctgggatgacaggcgtgactcgtgatccacccgcctcggcctcccaaagtgctgggattacaggcgtgagtcaccacgccgggccggttgcccatttttatgattatttcttgattatatgctaaacaagagctggattattcatgagggaaaggggtgggcaattcctggaacggagggttcctcccccttttagaccgtgtaggataacttcttgacattgccctggcatttgtaaactgtcatggcgcaggtgggagtgtctcttagcatgctaatgcattataattagcatataatgagcagtgaggtcgaccagaggccactctcatcaccattttgggtttggtgggttttggccacttatctactgcaacctgttttatcagtaaggtctttatgacctgtatcttgtggtgacctcctgtctcatcctgtgacttagaatgcctaacaggctggggacgcagcccagcagatctcagcctcattttactcagcccctcatcactctgattcaaatgcctctgacatgaccacgcagatttgagaaacaggccctcagccaaccagactctggctctacgacacacttaatactgtgaaaagaagattacgggtcatagtcacaaataccaggggtgcaaaacttcagattagaagacacttgtcagactcagaggctcatccaactccacggagatcattatcaccacaagttcttcagacaggtgtggaggttttctaagggatatttttattttctggattgcaattttgtttaggaagagatgaaagtgaggatcaactactttgaggattgtacaactttgtaaattgcacaaatatgacggcatatttatatctgcctgcatttgtgaaaacaaacttgtcaaggagcttatttctggaaagggtcaatgattctagaaaaaaaaaaaagataaatatgagacccttcag

SEQ ID NO: 38672 - DNA, 3104 bp, Homo sapiens
tcctccatgtggccacccatgtgacatgaagttggtgtcactaggtaccacgttgtctgtcccatccaacaggaaaaatagcctgttggccagtgaataaggtaggaatccaggtggtcccctgagggtcttctgacaggctcctttatcaggctcttctcatggtatgagcaccgcagcttgctgacagtggcaacgttctcaagcttcacagactccgtcacttggcctggaggggaattctaggtgtccagccccaggacaggcattttggcaccatgattgagcacgatatggtgagccatcctcacaggattaagaagaattctggacagaaatatagttgtaagtaagcatcagtcagcctgcactttgacccacttccttgtaaccaacagtgacgtagcactaggtaacatttgcatccccgttgttcctatagatacaatttctgaccttagaatcacaaggcttttgtttaaaatagatgggatctctgacattagaatcataagatttttgtttaagacttgcttaagatgtttttcagatcctgaattccagcaaaacagccgacaccaaccagtttgaagacccccacagaggaatgtgatcagcatgaaaatacagcttcgtctccctctcccatgactccaccctgcacacttcgaccaatcaaccatctccacactccagtctccactcccaaacccttaaaaaccccagccccaaactcctcagggagatggatttgacgtttcctcccatttcctccttcggtggccctacgatgaaacctctttctctgctacaaccctatgcctcggcgtattcactttctggtcccatccagcgatggacccatcgtggttaccgtggctggccaagcctgctgtgcttcacagaccccactcaggatcacaccacttcgttccactgtttggagatgccatgtttgcttatcccttcatcagctgatgagcatttgtgctgttttcactttttggctattacgaaaatgttgctacgagcatccatgatattcgcccatttaaaaaagtgtttttcaccattactgctgtgggaaatttctccctggctctgtcctttctttgtagcccagccttcccccaggttttggctctccctctctggctcaatgtcagctccttgtctcacctcctagagcaattccactctcccacctcctgctgcggcatttccaaagcctctgcttagcaagggaccacccattctgcacctctccccttagggctgcaagcacctgcacaaacttggtggttatcctatgcctcaactcaatcaaattctctcagttttccatcagcaatctttttaagccaaagggaaggcaaggacttgatcttcacatcacatgaatcatgacacctgccttagaaggcagaagcaactgtagttggaatagcaattgtttttcaacatatgggatgatatcaaggctctttcctccccatatgtcctgccctgttagtggctggggctgagggttttcccaggaagccagattgtcctcacaagttcctcaggaccctagggcttccacagatagtaggactgttatcagaaagaagtctcgatccagacgccgagagagggttcttggatatcgcccaagaaagaattcagggggagtccatagagtgaagtgaaagcaagtttgttaagaaaacaaaggagtaaagaatggctactccataggcagagcagctccgagggctgctggttgcccatttttttttttttttttctttgagatggagtctggctctgtcgcccaggctggagtgcggtggcacaatctcggctcactgcaagctccgcctcccgggttcacgccattctcctgcctcagcctcccgagtagctgggactacaggcgcccgccaccatgcccggctaattttttgtatttttagtagagatgaggtttcacatgttagccaggatggtctcgatctcctgacctcgtgatccacccgcctcggcctcccaaagtgctgggatgacaggcgtgactcgtgatccacccgcctcggcctcccaaagtgctgggattacaggcgtgagtcaccacgccgggccggttgcccatttttatgattatttcttgattatatgctaaacaagagctggattattcatgagggaaaggggtgggcaattcctggaacggagggttcctcccccttttagaccgtgtaggataacttcttgacattgccctggcatttgtaaactgtcatggcgcaggtgggagtgtctcttagcatgctaatgcattataattagcatataatgagcagtgaggtcgaccagaggccactctcatcaccattttgggtttggtgggttttggccacttatctactgcaacctgttttatcagtaaggtctttatgacctgtatcttgtggtgacctcctgtctcatcctgtgacttagaatgcctaacaggctggggacgcagcccagcagatctcagcctcattttactcagcccctcatcactctgattcaaatgcctctgacatgaccacgcagatttgagaaacaggccctcagccaaccagactctggctctacgacacacttaatactgtgaaaagaagattacgggtcatagtcacaaataccaggggtgcaaaacttcagattagaagacacttgtcagactcagaggctcatccaactccacggagatcattatcaccacaagttcttcagacaggtgtggaggttttctaagggatatttttattttctggattgcaattttgtttaggaagagatgaaagtgaggatcaactactttgaggattgtacaactttgtaaattgcacaaatatgacggcatatttatatctgcctgcatttgtgaaaacaaacttgtcaaggagcttatttctggaaagggtcaatgattctagaaaaaaaaaaaagataaatatgagacccttcagtaaaaagaaacttactctagggaagttttttgtttttttaaagaagcagtattcactcgtgtttttaaaaaggaacatggatttcaacaataatataatgag

SEQ ID NO: 38673 - DNA, 569 bp, Homo sapiens
tatgctgaagacctggcaggaggcaactcctgacacccccacagggttagactgtaaaacctcttccatgacttgctgactctataggataatagcaacaggaaaagaactgagggacgtgcagatgaggatgaatagggccccaacaccagtgcctgaggctgaggttagaactgactacaaagacacaggaaaccaagggcccagtctcccctccacgctgaaatacgcaccctcttgtctgggtcatgtctactatgtgaatacttgaccatggaggtctggggctctggtggcttccatagctggctagtctcttgatggagagaaatcagggcttctctcatccatgctggaatttcatttagatgtcaacttccaagtttccctttttccagatgggattatagtcctgcttctggaacagggtagctgtgtgtggtccaggatagttcaattatctggccctttgttcacttcttacaatcattgatacagtcaacaaaaattggttaaaaacaatatatgccagacatatatccctgagttctgggacaataaccaaaatt

SEQ ID NO: 38674 - DNA, 413 bp, Homo sapiens
atagattagatagatatggatagatggatatggatagataggatagattagatagatggattgatagataagatggatggatggatgaatggatggatctataggtagatggatagatggctagatggaggaatttctgtgtactgttcacatgttctttagtctgttcaaaaatgtactttgcattgggatgctgcccccagcctgcctacatcatgcctttttcctgatgacacgtgttcctgtcactgacgcccgggagctgtttttgagggcagcttgcccagcgtgctagtgacaggaggctggtgctaggaatgaaggttatttggtcttctcactggcatcactgtttggtattctaatcccatgagatcgttgtaaacaatagcaaagttgttcatgaactggca

SEQ ID NO: 38675 - DNA, 664 bp, Homo sapiens
tagctggccgtggtggcatgctcctgtagtcccagctactcaggaggctgaggcaggaaaatcacttgaacccaggaggtggaggttgcagtgaactgagaccgtgccactgcactccagcctgggtggcagagcgagactctgtctcaaaaaaaaaaaaagaaagttgtgaatttgatgtaagcttaggaaatgaataaaatttataggcatctgtataatgtacaacttgacacggactttcttttatccttagtttctttcacggactctagaacttttatcagaatatactgggtaaaacattggggggagggatcctgagtaggtgattgggtcagaaagatgccttcagttttggtcagtgtctaaaagttaagtctgtttaggccaagcatggtggctcacgcctgaaatcccagcactttgggaggccgaggcaagtggatcacaaggtcaggagatgagaccatcttagccaacatggtgaaaccccgtctctactaaaatacaaaaaaattagccaggcgtggtggtgcgtgcctataatcccagctacttgggaggctgaggcaggggaatcgcttgaacccgggaggcagaggtcacgccactgcactccagcctggcaacagagcaagactccgtctcaaaaaaaaaaaaa

SEQ ID NO: 38676 - DNA, 356 bp, Homo sapiens
cacctgcttggagaaaagtcaaatctccaggtaatttttgaaaagtcatgttctaactcagtatttttatttctcaaataacttattcaaatgtttctctgatttgttcaaaattgataattttatgttttaaatgtctcagggtctataaatgctaaccttaaaaaaactaacttgctgtaactgtggatattttctttggagcatggggatcattgtagggacaaatactggaatgagtctaattatatccaaaccactccactaaatcgctgctgaaagcacaagccaacgataccgtacatccgagttcaggaaatccatacccttagtttgctgagattggctgaggacaa

SEQ ID NO: 38677 - DNA, 355 bp, Homo sapiens
ttgctagtaagtggcagagctggctttgaacctggtcctaatgactctaatgcctcctctttcattctaactaatcagtgcttctcagtcttccgccccaatatttctaaggtccaaggagaatgtagagaacttcaggagttttggggtggtagaaaggggaggtggttagagaggagaatgttagcttgagatggttaaagactattgttttttcttaaaaagaaatggtttttggctgggcgcagtggctcacacctgtaatcccagcactttaggaggctcagacaagaggatcacttgagcccaggagtttgagatcagcctgggcaacctagtgagaccctgtctctac

SEQ ID NO: 38678 - DNA, 525 bp, Homo sapiens
cagtgccagactctcgggagaaggggcataaaggacagaaaataaaatgagttgatctttgagcacagcgacagggattttttgtacatcgtgccttacagagcgagcgctgggaggaggaatcatcaccctgctgagaagtaatgggtgcagaataaatcgagtaagaaggaatggacttttctggcggatgcttactgatctaacaactggatgactgaggaatgcggtcctaagtgaccccgggctggctgtggggccaacagcgtgcgggatctgactaacagcgtgtggcagccgagcgactgcagcagcggcggggaccccattgactgtccagccccgagagcggcaggagcgcggtggatcctggctcggaccaaggcctctcccctgcgccgactgcagaccaaccctccaccaggagcctcgcgggggggcgccgtgggcaccgcagccaggtgcaggcgcctccgcgccctcactccccacgccgaggaggtggccctggctccctgcggccgc

SEQ ID NO: 38679 - DNA, 207 bp, Homo sapiens
attatacttagcagtaagttgggttagcagcatggtgtaaaggtcaggtatgcaaggtgcccctgaatcctttctagttatttgcaggggtcccaaggtggttcaggatagtgtttaaagttctccccaaactgaacctttctgaaatcttcagactgtttagctaacttttttttcaccattatttttcattttgctcacctctgc

SEQ ID NO: 38680 - DNA, 326 bp, Homo sapiens
aactttaaattttgaaatgatttcagactcacagaaaagttgtaaaaatattacaggtaatttctgaatacacttcactcatatttaccacatttactttatctttctatctatatctgtatttactggaagcatttcagagtaagttgcaggcctagtggccctttactcctaaatatgtctgtacttcctaaaaacaagtaaattttcttatgtaactatagcaccataatcaaaatcaggatttggacattaacatattactgtcttccaatttagggactatattcaaatttccccagttgcctcattaatgccttttgtgg

SEQ ID NO: 38681 - DNA, 367 bp, Homo sapiens
ttttttcttttgtcctcctgactgtgctgtttttccctctactccaaattctcaaaggacttaaaagctagcattcagtaaacaacttatttttttctcaggaaaatatgtaagtgatcatacagctgaggagacatgggttattaaatattttgtattaatgattactctgacaatttagtatcaaaataagctcttatttatgccctaatcaacagcacaaatatgaataaatgctagcacagaaaatcagaaattcctgacaactatttaatcaatagttacttgctccttgtcggacatcagtgaatgagtgaaagcatcacagtgaccagtcctcagtcagacagattctcttccttcacaa

SEQ ID NO: 38682 - DNA, 132 bp, Homo sapiens
aattgtattccaaatcttttggaacagatgaccactgtagccacctattatgaatgttctgcgataagcacttgccgatatcagttctgtaaactacatttattgcaacaatgtttattataccaaaaagtc

SEQ ID NO: 38683 - DNA, 490 bp, Homo sapiens
gcggctactactactaaattcgcggccgctcgacagcctgagctctgagaatcattctcctcatcttattttccataactttgtcctggaaaatgcagtctgggggaaagcattttaaatagtaatcatctgagtctagtccagaatttggaatccaagggcaggcggatactttgtcataaacaggagcaataatacgtagataatgcagtcagtggaggaaaagtctggcgctgctgtggctctgactgctcctggattagttactagaccaaatgctgcaaactggtccattgctttgctttgagcaagcaccttattttatttaacccctgcatatacacttaagacattgtatccacatgtttctaattcatttacacttcactcatcagcatctgttgggtaagcaccctgtcacctccaagttttatgagctgtgtttactaggctgcaattcttgaacagggatatcgtatattccacaaaa

SEQ ID NO: 38684 - DNA, 884 bp, Homo sapiens
  misc_feature (1)..(2): n is a, c, g, or t
  misc_feature (6)..(6): n is a, c, g, or t
  misc_feature (8)..(8): n is a, c, g, or t
  misc_feature (10)..(10): n is a, c, g, or t
  misc_feature (13)..(13): n is a, c, g, or t
  misc_feature (16)..(16): n is a, c, g, or t
  misc_feature (18)..(18): n is a, c, g, or t
nnaggnantnggnacnanaatacaaggagctcatgtggttcaattagcttatttaaattcaaaagaagcccaaaagcctaatctgtcacttgccttagagtagagctatttcagtctcatagttaatgtcataaattaagccttgatgtaaataaccattttattcccctacacttttacttgcccatatccttctggaaatgtactgggaggaagaagaggaggttcaggccaaatgttagactcagccttggcctatgtgactgagacctgtataaatggactaataagaatcggctcacccactctaaccacagcctttattgcttccccactttcaaagaccttgagagcttttgaaactatggggaaactgaggctgggaacatctgatacacccagtcagcttagtcacttagtaaataactgctgaacaacttacgtggcacaaggacgaaaacagaggtctgtttgatcgaaattttcacttccaagctgtgtacactgtgggtacttaataaatcctcctagacttaattgattttgacttaattcaccacttctgctgaatctcctcaaacctcatcacgtagacgtctcataattctcagaacatacctggaccattgccaacatacatccctggtgtcactttttactgtaactgttgtttcatgtggctttccccttttactagattaggagcattcaaggagaaaatagatctggaaaaaatatagataacaatttacgtttcttcctgagcaactcctgctctaacaactgtcagaaggagttgagatataggaacaggatcacccctatttgacagatgagaaaattgaggcacaggcacagactattatacgttatttgtaaaaaaa

SEQ ID NO: 38685 - DNA, 821 bp, Homo sapiens
agccgagatcatgccattgcactccagcgtgggcaatcaagagtgaaactctgtctaaaaaaaaaaaaaaaaaaagtttcagaattaaagacttggggaaaaataaacctttcctggcaattctgatgtagcagcccatggagctgtattcaagattcattgaaagaacccccttgaagccagctgtcctctcttgcagcatgattttaaaggaagcatgttgatcaagaacccttcataccatcttaagggttctagtttgcaagtacgggaagagcccttcctatggcaaaggaaagatccccttagttgcaattaacaggtatcttcctggaatttaatctttaactgattacccaaagtctcaactgctctctcttctcttccataagtgacaagatacggggctgaaatgcttgctgcttacatgatcagtagcctggagaagtaacagaacatacacacgttataatactgattcttgtgatttcaaggtgatgaaaacctctctctttctggcctcaaatttctccttctggactcaaatcccttcagttttctatgggaggatactttaggagaccaaaccgtaaagaaaaacaagtatgtgattgtcaaaaaaacaaaaaaattgaccgctcctctttccgctgccccaatcagaaagaggagctgtgatgtggtagaggggcacatggagggcttctgagggctggcaatgttctttttttttttctcacctgagtggtagtaacataaggtttcattttacaataggttattaaactctacgatgagttttgtgcacttttaagggtgtg

SEQ ID NO: 38686 - DNA, 420 bp, Homo sapiens
tctgaaacccttaaagtaaggagcagcaaatttcctgtaataggccaaatagtaaatatttaggctatgtggactatatagtctactgccgactctgtcattgtatcatgaaagcagccatagactatatgtaaatgaatgggtgtggctgagcttcagtaaaactttatttgccaaaagtctgtgatcctggtttagccccttggctggagtttgctgatccctgcattgaaggaaaatctgaggtgaaaactcttagcttactaatagctatcttttgtcaactccatttatatggttgattataatattcctgtcattcttggtaatatttgatacatatatttgaaagaaatgcatgagtcacctgagaggaaggaggttgagaagtcagacatatggcctgatgaactgaaatgg

SEQ ID NO: 38687 - DNA, 414 bp, Homo sapiens
aggccctttttggaaggattttttaaagtacagtcctacatcactcaatcatggggacattctttctgagaaatgcatcatcagtcgatttcatcgaacacctagagtgccctcaaacccagatggtacagcctactgctacacacctaggctctgtggcatagcctattgctcctgggctgcaaacctgtacagcacgtgacagtgctgaacacggtagcaagtgtaacacaagtaggtatctgtatatctaaacatagaaaagctaagtcaaaatacagtgttgtcatcttatgggaccgctgtctcatgcagtgcatgactgtatacaacttcaaagctttgccgattgtcttggttttctttaaacagttttggagttttttttttttaataaagatttttaactaatga

SEQ ID NO: 38688 - DNA, 304 bp, Homo sapiens
cttgagcactgtattaagaagaaattctcctagtttcttccaagtaacagattcactttgttattgttgagagtccgttcagtcattacagcttctgtaacatcagtgactaaaataatgaaactattttctctataaaaatgtttaatttttgttacaacaggttagaggtttaatctgttgtttggcttagattcgagtcattgcctctgacactacctttttaatagcagctccatcccccaccaaccccaagcagatggcagttcccttacaagtctaaggatataggggaggaagacaa

SEQ ID NO: 38689 - DNA, 227 bp, Homo sapiens
tgtttattccatatgttgtcaacttactggcatagggtagtacatcatattcccttatctttttatatgtgtagcatctttgaggatataacctctctgattcctgatattggcaatttgtgttttttaatcctctctttttaaattttcagtttggctagagtttatcaattttatattttcaaagaaccatatatgcttttattattttctccattattttttct

SEQ ID NO: 38690 - DNA, 364 bp, Homo sapiens
acatacccgagactgattaatttataaagaaaagaggtttaattgacttatagttatgcatggctggggaggcctcaggaaacttacagtcatggcggaaggggaagaggcacgtcttacatggtggcaggcgagagagagaagagggaacaagggaggagcttccaaacagttataaaaccatcagatctcttgagaactcactcactatcatgagaacagcatgagggaaaccacctgcatgatccgatcacctcccacctggtccctccctcaataactggggattacaactcaagatgagatttgggtgggaatacaaagcctagccatatcaaatagtaaatatattttcttattatta

SEQ ID NO: 38691 - DNA, 997 bp, Homo sapiens
agaacacctgcacagaaacagacccacagaaacttgttttgtttgttctgacacttttttcacactgcactgtcatggcttgtctatgagtgctctggtcatctcgccagaccatgagctcaccacaggcagaacctggcacattttgtcctttgacacaggcttgcagggtgattaaaagatttttctcctgtgatacattttatttgcacaagttatctggtttgagtcaaaaaacctaattgtattgacaaacaggccccttggcaaagatgtttattggcataccttaaatttgccaaggttatctccttcctcatcttactgagctcctcacccttaatcttccctgatcatctccttccttaccccgttaagtgccccactcaccctaaaacacactggataatgatgtttattacccaacaatgaaaatattgttatttatggttataatcaggatgtcatcaaatatgaatgctcacatttggtgagggcctttcaactgattgtttatgtaaatgaaagtgttcgctcatcatcacatccattttgggaagaaacaatcagccaggcgggttgtttctctctataatatctttttagtattcagttcactgaaaaccaatctgcaacaaaagaaaaaaaaactacaaatttaaggttagatgtaaacctatagcaaatgttagcatgccctggaatgacacaggcagaagctcaattgcaattcctcttcactgggaaacttagaatgggcctccaatctggatgcagtttccaatagagaactagcctttccatcccagtttctcccacttagcatgaagtggacaaggccattatgcagtggatgtaaccaccccagccctggaattgggccatctatatgatctcaagtttgtcacatttacaagcaagtcttagttaacttatctgttgtattagtctgttctcacactgctaataaagacatacctgagactggtttatgaat

SEQ ID NO: 38692 - DNA, 998 bp, Homo sapiens
ttgcagtcttttactacaggaatgtgaagatatatttaaaaatagaatactttaaaatcaggaaatgtattttgctctcttgaagaaaatagatatgatttggcaaaggataaaattagccataaatgataaagatttttttaacatctgaacttgtcattagcactaagatgagctgcttaccaggaactaagaagaattaacatcatcaagtttaaaatcgatcattttaaatatgaaggagatttaaacatctcaaccccatgaatcaattgtgctgataactatccagtctcattggatagtgggctcatcaaattgaggatattcaggagttaaagagatcagcacagaagagtgagaccaaatgctttttcttcatttcatttactgttataatgactgatgagtataaagggatttataagggcttttcatttcaaattacatttttctttaaatatccaaagttcttatgtggaaacaactgcaatttttatgaataggctggtcttgcctttaaaaatatgtttttaaagagcaaattctgcagaattaattattaaaaagactatgggactttggagaggctttcattaacattgtccctaaactacccttagttctacccagtggctcagaacttggggcaattttttttcccaggttatatgtggcaatgtctggagacattggttgtcacaacttcgggggacagtaccggcatttatgcatagcggtcaggggtgcagctaaacatcctacagtacacaacccacacatcaggagcaagaacacatccaattcaaaatgtcagtaatgccaagactgagaacccctggagtaagcctcacaaaagctcttatgacctcacagggcagctgtcttattgtaatcccaaatctacctcagtgatttccttgacattcaaaacacctgtctctactgaactttagagttcttgatttaccaccactggaatttgctctaccaatggc

SEQ ID NO: 38693 - DNA, 944 bp, Homo sapiens
ttgcagtcttttactacaggaatgtgaagatatatttaaaaatagaatactttaaaatcaggaaatgtattttgctctcttgaagaaaatagatatgatttggcaaaggataaaattagccataaatgataaagatttttttaacatctgaacttgtcattagcactaagatgagctgcttaccaggaactaagaagaattaacatcatcaagtttaattgtgctgataactatccagtctcattggatagtgggctcatcaaattgaggatattcaggagttaaagagatcagcacagaagagtgagaccaaatgctttttcttcatttcatttactgttataatgactgatgagtataaagggatttataagggcttttcatttcaaattacatttttctttaaatatccaaagttcttatgtggaaacaactgcaatttttatgaataggctggtcttgcctttaaaaatatgtttttaaagagcaaattctgcagaattaattattaaaaagactatgggactttggagaggctttcattaacattgtccctaaactacccttagttctacccagtggctcagaacttggggcaattttttttcccaggttatatgtggcaatgtctggagacattggttgtcacaacttcgggggacagtaccggcatttatgcatagcggtcaggggtgcagctaaacatcctacagtacacaacccacacatcaggagcaagaacacatccaattcaaaatgtcagtaatgccaagactgagaacccctggagtaagcctcacaaaagctcttatgacctcacagggcagctgtcttattgtaatcccaaatctacctcagtgatttccttgacattcaaaacacctgtctctactgaactttagagttcttgatttaccaccactggaatttgctctaccaatggc

SEQ ID NO: 38694 - DNA, 406 bp, Homo sapiens
tgcggtcgctctagaggatcaccctctctagacgaggaagaaggcatacataattacttcagtgtaatcctttatatcagagtaatctttcaggaactaaaatagcaattgttaataaaatttagtttctcattatagtctaaaagcaaaataaattctgaagtagtccaataacagaactgtatgacccctttagaaataaaatttatcatgaaatgctagttcttttaagtttgtattaagtttaaatggtaaaatgcatataatttaaattttatgtatttttatttcagaacattttttaaaatattaaaaattattttttagtcttgtagtcattacaaaattataaacgagttgtatactggttcctttttgaggtctacaaacatgctcgtgtatcttc

SEQ ID NO: 38695 - DNA, 406 bp, Homo sapiens
gttcgacgtgagccgaaaaaactggccacgaagtgattgttaccttgataagttaccttttccattcctcttacactggtaagattctgtgaattcaaatgtttgcttaataactttctaaaggcacaataagaaagaagacattctgggaaatgaattgtgcactaattgtaagttgagctctggaagaaacagaaaagagtcatccacctgagctctctggaggtccctgctttttgctccaaggaagccactactgagaaagtaaggttagatcttttattcatttatatgaacagggcttatacatttctatcaggaagaatatcagaggattctcatccaagcaaacgttgatgaaacatcattgacagggtaatgacattctgaatggaaaaaacgtgaa

SEQ ID NO: 38696 - DNA, 367 bp, Homo sapiens
ccttccccagatatttgcgaggctttttctcccccaccctcttgaaatatcacctccccagtaaggtttactcccaggcaccttctgcagagtctcagcttcccacacccctcctgatgttcagtacagcagacggcttttcacataggctgtaatttcctgatgttctgcgcttgtttgtttactgtctgtgtctgtgaggaggatccaagtgcgcgaggatgttgtgatttgctttgctttgggaatcccaggtgtcagcagtcatcactggcccacagtgtgcgttcaagaagtcttacctgacccaggtgtggtgactcacacctgtaaacccagaatgttgggaagccgaggtgggaagatt

SEQ ID NO: 38697 - DNA, 475 bp, Homo sapiens
tcttcctccggcgcggggctaagtgcaggcccgggggtccctagagccgccggggccggcgcgtccggcgctgggggactgttgggtcagaaagtcttcagggagcagctgttgcgccctccctaggcccgccgcttggagacgccccgccccctgccttcaacggccgcccgccccgccccgcaccgccccggccccgccccctgtgaggaacttttatacagtaagtctgactcttactgcactggcagagctgagagaactgatatctggcatgggataacatggaaaggctgtaaacagattgcagaaacctggatccagacacctgggctgatgacttaacgcagggcaaccttaagattcactgcagggcatttagtactgctatgcagagggaaaaggtgctcctgaggcatttattatctgttttccaagaggtaggttagcataaaccaaaccagatgggcccagc

SEQ ID NO: 38698 - DNA, 551 bp, Homo sapiens
atctgagatatttaaaaaatatacattttctgttttttgagctttttttttttgcatttcttgaaaggctttttatttcaaagataaaatacagtcacaaaatacctaaataatccaacagcagcatgtgtatggaacaaaatgagcttctctaaatcctaaagtctagaaaacaaagtttttttaatgagaaaggggaaattataaacaaaaaatggccaaatgcaactatgaattgccactaaatattcagtgtgtatatatatgttcagcaaaaggcaaggacacttcatcttctactaatgagtttttaggactcggtactaggttaggacagcaatcaaacaaaggtctcacatgccttacaatgatgctgggtagatatatgtgctccttatgtaaccaagtaaaatgatctcagactgctaataactatagttaaataaatatgttattaacaaagggttgcaaaaacaagggtaagatggtatgaattgataacagtagcaataaaaaacttcctagaagttgtaagttgagctttcaaaaaa

SEQ ID NO: 38699 - DNA, 321 bp, Homo sapiens
ggtctttaacgtctgctcccaaaaaagttaataaaaatcaatgatataactgactaatccaaaaccagtggcaatagatgccctagaaggatatttaccatccgtctgttaatagctctgttgtgtgttttaaggagcactttagcaaagtgttgaatgttaatgattttcatatagtggtgtcttgaaaatatgtagtttgtggtcaggtgtggtagctcacacttgtaatcccagcactttgggaggcccaggagaatcacttgagcccaggagtttgcgaccagcctgggcatcatagcaagaccctgtctctaccaa

SEQ ID NO: 38700 - DNA, 420 bp, Homo sapiens
gtggctgttcaatgtcatttcaccttatgaattctgaagattttcaacgtgaaaaccaggctcccaaggccttcgtagttgttcactatttctcaaccttggttacacgttagaaatgcttggggaggttttaaaattctccatgcccagaccaattaaatcagaatctctgaacaggaaacccagacagcagaatttttaaggcttcccgggtgattccaatgtgtagaatcgctgctctaacaagacatgttagctccaccctcagactctaaagctgatcagctggggtataagcttttctgagtaggaaacagctgagtataagcaagggcatttctttgggtgcagcaaggtacaaaataaggttaagcagccacccagcagcgaataaagttacactttaatttcgaaataaag

SEQ ID NO: 38701 - DNA, 345 bp, Homo sapiens
aaataaaatctcagtggtataccattacatacctatcagattgcaaacattgagaagtctgtgataatatcagctgggtgacaatatcagctggtgagtatatggaccagcaggagctctaagattgggagtaaattggtactgtggaaaggtttttgaaattatctgataaagttgaaaataagtagtagcaattctagggatatacttgtgcacaaatatgctaagatacatgaatggaaatgtttcttgtaaaattgttcagatgaaacaggaactccattgtccattagtaaactataaagcaattaaaactaataatatatacaattgtatgtaaatcca

SEQ ID NO: 38702 - DNA, 93 bp, Homo sapiens
atcactaccacacacaatcactatgtgtgattttttttttccctcaagagaatgtattaaaaggaatgcttcggaattaaaaataaaaatttt

SEQ ID NO: 38703 - DNA, 661 bp, Homo sapiens
tgggcctaggaaaattttgttcagtgtaaactttcattgtattaacactgttctctttattactgattttaatattgttaataaaatacaaataattatagctgccacttgctgagtgcttaccctttgccaggcactgttgtacattttgcacgcattatctgaatttaatcctcatgagaggcgagtacttatattatcttcacttcagccctgaggaaattgaagcttgcaaggttaactttccctaagttcacgttttcatttttctaagaccttaagggaagagactgtgacattctggttttttgaaggcaaaatctgtctacaatcacggatttccaaatacacaaagccatattataatagaaatgtaaattagataatcagaacagcgttacaggaaatgatacactgcaatcattttctttagtttttttttgttgttgtttgtttgttttcattttgtcttaagcttactgagttttgcacagccaggggcttatactaattttgatgataatttaaaatattattggttgattaggattacaattttattgaaggaacagaaagacgttgccagctgaactgttcaatacagtagccactagttacatgtggctatttacatttaaatgtaatgaattaaaaaaaaaaa

SEQ ID NO: 38704 - DNA, 155 bp, Homo sapiens
actgttcacattttccctggtggaagtggatgcaaccactggtgagatatctctggcccttgagaagaatgtgggatatgtaaaataaaaggaattcctccagacaattgattgattgaagagagattataatcaggacagtcattcaacaattc

SEQ ID NO: 38705 - DNA, 389 bp, Homo sapiens
ggccaaggcaggaggattatatgaagccaggaatttgagacaagcctgagcatcaaagtgagaccctttctctaaataaataaataataataataatctatctgctatcttaattcctctttgccatttaacatgacatattcagagtttctggggattagaatgtggacctcttgatgagaaaggacattattctaccatattgccacagttttgactcaattatttctccaaggattgctgtttccttttattggagaattgtctctgcaatcaagatttgggcactgggtgtgcccattggtattggggtatagtttcttttaggccctctcaaatgaaaaagaaaatatatatatgtacactattccatggatacatatagaaat

SEQ ID NO: 38706 - DNA, 465 bp, Homo sapiens
agtaaatcatctgctattaaatttgaagtttatccaacatctctaattaaaaataattttgagggtcttgttgtgaaactgatcaatagatggatatacgatcttccaaaagatgcattttggtcatatttttcacaagcacaagaactcttttgggaatctacagactgtgttaataatctctgtaaagatgtagttttgaacaagaaaattacgacaaaactacaagagtcaaagtttgatgtcgttcttgcagatgcccttggtgcctgtggtgaactgctagctgagcatgttaaaggcatgttaaatacatgtcctttgttgacagtctcctggctacacacttgagaagtataatggaggacttccattccccatttcccgcatacctgctgttctgtctgaattaagtggtaaaatgacattcgtggagaggattaaaaatctaatacatgtgcttta

SEQ ID NO: 38707 - DNA, 439 bp, Homo sapiens
gtgctgtgggtgtttccaggtgagattagcatgtgaagggtggccctccccagggtggtgggcctcgtccaatcagttgggggcctacatagatccaaaggctgagtgagagggcctcctcctgtgacagctgcagctgggacctcggtcttttcctgcctttgggcttggactgaaatgccagctcttcttgggtcttcagccttcaggctggaacctgcagcagcatttctctggttcttgggccttcagactcagactggaccgaaaccatcagctctcctgggcctccagcttgccaacgacaggtctcgggacttgccccttccataagtgcttgagccaggtcttcaggataaatctctttccacctatcctgttggttgtgtttctctggataactcagactaatacaagccagtccttccatactttggta

SEQ ID NO: 38708 - DNA, 374 bp, Homo sapiens
gtgctgtgggtgtttccaggtgagattagcatgtgaagggtggccctccccagggtggtgggcctcgtccaatcagttgggggcctacatagatccaaaggctgagtgagagggcctcctcctgtgacagctgcagctgggacctcggtcttttcctgcctttgggcttggactgaaatgccagctcttcttgggtcttcagccttcaggctggaacctgcagcagcatttctctggttcttgggccttcagactcagactggaccgaaaccatcagctctcctgggcctccagcttgccaacgacaggtctcgggacttgccccttccataagtgcttgagccaggtcttcaggataaatctctttccaccta

SEQ ID NO: 38709 - DNA, 222 bp, Homo sapiens
gttctttggttttcctcatgttccaattgatagttccagaattactgagaaaaaagaagttgcgcatggtggctgatgtgtattttgcaatattaaacaatttacattacttgaattctgtatctgtgcaactatagatacaaaatggataaaccatgatgctgatcctttagactagcaattaaaatatgaacattaaatgctggaattatgaataatttt

SEQ ID NO: 38710 - DNA, 550 bp, Homo sapiens
aattttcaagatatttgttcttgccttagcacatgctttccaggtctaatttcagagctgtctcaatgcttttctaggaaagaatgagggtgtatgggaggaaattgtttgatctacaaggtctgccatcttaatgatcctcatgctaagaacactgcagatgtatgttttgccctcactcatggggaaagaatctatggttctccaattatgctgatgaagtagaagtcaagtaaaagtgaaggtgcgttcatttaaaacataaagattttcagtgactgttaacatctgtctttctgattataaataaaactaactgctgagattttcagatcttaatatgtatttatataacaaaaaccagtaagttaattgttttccatgattagtagcaggtatagaaagatcttcttcagattggtacatgtttaactggcacttgtgtataatatagtaattcccctctttctagaattcaagcctcaataaacccctaactaatcttatgtatttatttccactggtttataggtaagcaaaaataagaata

SEQ ID NO: 38711 - DNA, 793 bp, Homo sapiens
tatccaggtgttcaaatatacacagtgtgtatgcagggctcccaagagttccctggtttccccgatatcctcagacacaaagaccatgactctgctgttgtgggttgcacaggagtagggggcagatgatggacactgggatgggaatggttgtgaatgatctgcccccgcttccatatgtgagtgtaggcaagatacttcctctctctaggcctcagtttccctttttataaaacaatgcctaagactatgtcaagttctaagactctgtactctgggctggggctacaggtaatcgagacacttactttcacctgcttcagactctgaagaggctagatcggagggatgaggccactgcactctggtggaggctggaggcccaaactaaggggtcacatgaagatgctctgtggtctctccccctgtacctagaaagctatttgagctggatccgtccctctgatcgtgacgccttccttgaagaatttcggacatctctgccaaagtcttgtgacctgtagctgccacgttttgaagagcttgagctgggtccccagtgggctgtctctctgtggggagggctttctgcttcaccatcattaggaatgtgaccattcctatataattcctggactggtgagattggtggtaggcctgtgaaatttgccctagttactaccattctcgttttggaggaaacaatctctgccaccaccaagtcattgactttgctcgaggcaccttttttcctgtttctccttttctgttgtcgagtaaaatttcatattta

SEQ ID NO: 38712 - DNA, 2934 bp, Homo sapiens
tttgcatatggatattcaattctcctagctccatttaatttgaaatgattgggcaggtacttttgagcagtgcaagtacagagcggcactgccagcagactacacgcggtagaaagccgaccttggtgagcgtgttggtgctcgacagtgagcagagaaaggatggacgattacggagcgccctcgtctccagttaccgctttctggaaacaccatccgccggggcggagctgttccgccccggtgcggtactacgactcccagcatgcacctcgcagtcggccctcggtggaagcgggaacccaggaggacctgggggtgtggcagcgaggaagggccgagccacggactgtggggccgaaactcgctcccgcccaccctttctcgaggctgtggcctccgcgagagccgagcgggccgcaccgccggccgtgcgactgccccagtcagacacgaccccggcttctagcccgcctaagcctgtttggggttgctgactcgtttcctccccgagtttcccgcgggaactaactcttcaagaggaccaaccgcagcccagagcttcgcagacccggccaaccagaggcgaggttgagagcccggcgggccgcggggagagagcgtcccatctgtcctggaaagcctgggcgggtggattgggaccccgagagaagcaggggagctcggcggggtgcagaagtgcccaggcccctccccgctggggttgggagcttgggcaggccagcttcacccttcctaagtccgcttctggtctccgggcccagcctcggccaccatgtcccgccagaccacctctgtgggctccagctgcctggacctgtggagggaaaagaatgaccggctcgttcgacaggccaaggtggctcagaactccggtctgactctgaggcgacagcagttggctcaggatgcactggaagggctcagagggctcctccatagtctgcaagggctccctgcagctgttcctgttcttcccttggagctgactgtcacctgcaacttcattatcctgagggcaagcttggcccagggtttcacagaggatcaggcccaggatatccagcggagcctagagagagtgctggagacacaggagcagcaggggcccaggttggaacaggggctcagggagctgtgggactctgtccttcgtgcttcctgccttctgccggagctgctgtctgccctgcaccgcctggttggcctgcaggctgccctctggttgagtgctgaccgtcttggggacctggccttgttactagagaccctgaatggcagccagagtggagcctctaaggatctgctgttacttctgaaaacttggagtcccccagctgaggaattagatgctccattgaccctgcaggatgcccagggattgaaggatgtcctcctgacagcatttgcctaccgccaaggtctccaggagctgatcacagggaacccagacaaggcactaagcagccttcatgaagcggcctcaggcctgtgtccacggcctgtgttggtccaggtgtacacagcactggggtcctgtcaccgtaagatgggaaatccacagagagcactgttgtacttggttgcagccctgaaagagggatcagcctggggtcctccacttctggaggcctctaggctctatcagcaactgggggacacaacagcagagctggagagtctggagctgctagttgaggccttgaatgtcccatgcagttccaaagccccgcagtttctcattgaggtagaattactactgccaccacctgacctagcctcaccccttcattgtggcactcagagccagaccaagcacatactagcaagcaggtgcctacagacggggagggcaggagacgctgcagagcattacttggacctgctggccctgttgctggatagctcggagccaaggttctccccacccccctcccctccagggccctgtatgcctgaggtgtttttggaggcagcggtagcactgatccaggcaggcagagcccaagatgccttgactctatgtgaggagttgctcagccgcacatcatctctgctacccaagatgtcccggctgtgggaagatgccagaaaaggaaccaaggaactgccatactgcccactctgggtctctgccacccacctgcttcagggccaggcctgggttcaactgggtgcccaaaaagtggcaattagtgaatttagcaggtgcctcgagctgctcttccgggccacacctgaggaaaaagaacaaggggcagctttcaactgtgagcagggatgtaagtcagatgcggcactgcagcagcttcgggcagccgccctaattagtcgtggactggaatgggtagccagcggccaggataccaaagccttacaggacttcctcctcagtgtgcagatgtgcccaggtaatcgagacacttactttcacctgcttcagactctgaagaggctagatcggagggatgaggccactgcactctggtggaggctggaggcccaaactaaggggtcacatgaagatgctctgtggtctctccccctgtacctagaaagctatttgagctggatccgtccctctgatcgtgacgccttccttgaagaatttcggacatctctgccaaagtcttgtgacctgtagctgccacgttttgaagagcttgagctgggtccccagtgggctgtctctctgtggggagggctttctgcttcaccatcattaggaatgtgaccattcctatataattcctggactggtgagattggtggtaggcctgtgaaatttgccctagttactaccattctcgttttggaggaaacaatctctgccaccaccaagtcattgactttgctcgaggcaccttttttcctgtttctccttttctgttgtcgagtaaaatttcatattta

SEQ ID NO: 38713 - DNA, 935 bp, Homo sapiens
  misc_feature (16)..(16): n is a, c, g, or t
gcgggtggcggccaancttaggctaaggtacgaggctgggtggtgtgtgaggagttgctcagccgcacatcatctctgctacccaagatgtcccggctgtgggaagatgccagaaaaggaaccaaggaactgccatactgcccactctgggtctctgccacccacctgcttcagggccaggcctgggttcaactgggtgcccaaaaagtggcaattagtgaatttagcaggtgcctcgagctgctcttccgggccacacctgaggaaaaagaacaaggggcagctttcaactgtgagcagggatgtaagtcagatgcggcactgcagcagcttcgggcagccgccctaattagtcgtggactggaatgggtagccagcggccaggataccaaagccttacaggacttcctcctcagtgtgcagatgtgcccaggtaatcgagacacttactttcacctgcttcagactctgaagaggctagatcggagggatgaggccactgcactctggtggaggctggaggcccaaactaaggggtcacatgaagatgctctgtggtctctccccctgtacctagaaagctatttgagctggatccgtccctctgatcgtgacgccttccttgaagaatttcggacatctctgccaaagtcttgtgacctgtagctgccacgttttgaagagcttgagctgggtccccagtgggctgtctctctgtggggagggctttctgcttcaccatcattaggaatgtgaccattcctatataattcctggactggtgagattggtggtaggcctgtgaaatttgccctagttactaccattctcgttttggaggaaacaatctctgccaccaccaagtcattgactttgctcgaggcaccttttttcctgtttctccttttctgttgtcgagtaaaatttcatattta

SEQ ID NO: 38714 - DNA, 2387 bp, Homo sapiens
ttacaactattgttctcatatttctcacactaaataaatctctatgagaaaaaaaaaaaaaaaaaaaaaaaaaaaaaaaaaaatgtcctggaaagcctgggcgggtggattgggaccccgagagaagcaggggagctcggcggggtgcagaagtgcccaggcccctccccgctggggttgggagcttgggcaggccagcttcacccttcctaagtccgcttctggtctccgggcccagcctcggccaccatgtcccgccagaccacctctgtgggctccagctgcctggacctgtggagggaaaagaatgaccggctcgttcgacaggccaaggtggctcagaactccggtctgactctgaggcgacagcagttggctcaggatgcactggaagggctcagagggctcctccatagtctgcaagggctccctgcagctgttcctgttcttcccttggagctgactgtcacctgcaacttcattatcctgagggcaagcttggcccagggtttcacagaggatcaggcccaggatatccagcggagcctagagagagtgctggagacacaggagcagcaggggcccaggttggaacaggggctcagggagctgtgggactctgtccttcgtgcttcctgccttctgccggagctgctgtctgccctgcaccgcctggttggcctgcaggctgccctctggttgagtgctgaccgtcttggggacctggccttgttactagagaccctgaatggcagccagagtggagcctctaaggatctgctgttacttctgaaaacttggagtcccccagctgaggaattagatgctccattgaccctgcaggatgcccagggattgaaggatgtcctcctgacagcatttgcctaccgccaaggtctccaggagctgatcacagggaacccagacaaggcactaagcagccttcatgaagcggcctcaggcctgtgtccacggcctgtgttggtccaggtgtacacagcactggggtcctgtcaccgtaagatgggaaatccacagagagcactgttgtacttggttgcagccctgaaagagggatcagcctggggtcctccacttctggaggcctctaggctctatcagcaactgggggacacaacagcagagctggagagtctggagctgctagttgaggccttgaatgtcccatgcagttccaaagccccgcagtttctcattgaggtagaattactactgccaccacctgacctagcctcaccccttcattgtggcactcagagccagaccaagcacatactagcaagcaggtgcctacagacggggagggcaggagacgctgcagagcattacttggacctgctggccctgttgctggatagctcggagccaaggttctccccacccccctcccctccagggccctgtatgcctgaggtgtttttggaggcagcggtagcactgatccaggcaggcagagcccaagatgccttgactctatgtgaggagttgctcagccgcacatcatctctgctacccaagatgtcccggctgtgggaagatgccagaaaaggaaccaaggaactgccatactgcccactctgggtctctgccacccacctgcttcagggccaggcctgggttcaactgggtgcccaaaaagtggcaattagtgaatttagcaggtgcctcgagctgctcttccgggccacacctgaggaaaaagaacaaggggcagctttcaactgtgagcagggatgtaagtcagatgcggcactgcagcagcttcgggcagccgccctaattagtcgtggactggaatgggtagccagcggccaggataccaaagccttacaggacttcctcctcagtgtgcagatgtgcccaggtaatcgagacacttactttcacctgcttcagactctgaagaggctagatcggagggatgaggccactgcactctggtggaggctggaggcccaaactaaggggtcacatgaagatgctctgtggtctctccccctgtacctagaaagctatttgagctggatccgtccctctgatcgtgacgccttccttgaagaatttcggacatctctgccaaagtcttgtgacctgtagctgccacgttttgaagagcttgagctgggtccccagtgggctgtctctctgtggggagggctttctgcttcaccatcattaggaatgtgaccattcctatataattcctggactggtgagattggtggtaggcctgtgaaatttgccctagttactaccattctcgttttggaggaaacaatctctgccaccaccaagtcattgactttgctcgaggcaccttttttcctgtttctccttttctgttgtcgagtaaaatttcatattta

SEQ ID NO: 38715 - DNA, 3088 bp, Homo sapiens
tttgcatatggatattcaattctcctagctccatttaatttgaaatgattgggcaggtacttttgagcagtgcaagtacagagcggcactgccagcagactacacgcggtagaaagccgaccttggtgagcgtgttggtgctcgacagtgagcagagaaaggatggacgattacggagcgccctcgtctccagttaccgctttctggaaacaccatccgccggggcggagctgttccgccccggtgcggtactacgactcccagcatgcacctcgcagtcggccctcggtggaagcgggaacccaggaggacctgggggtgtggcagcgaggaagggccgagccacggactgtggggccgaaactcgctcccgcccaccctttctcgaggctgtggcctccgcgagagccgagcgggccgcaccgccggccgtgcgactgccccagtcagacacgaccccggcttctagcccgcctaagcctgtttggggttgctgactcgtttcctccccgagtttcccgcgggaactaactcttcaagaggaccaaccgcagcccagagcttcgcagacccggccaaccagaggcgaggttgagagcccggcgggccgcggggagagagcgtcccatctgtcctggaaagcctgggcgggtggattgggaccccgagagaagcaggggagctcggcggggtgcagaagtgcccaggcccctccccgctggggttgggagcttgggcaggccagcttcacccttcctaagtccgcttctggtctccgggcccagcctcggccaccatgtcccgccagaccacctctgtgggctccagctgcctggacctgtggagggaaaagaatgaccggctcgttcgacaggccaaggtggctcagaactccggtctgactctgaggcgacagcagttggctcaggatgcactggaagggctcagagggctcctccatagtctgcaagggctccctgcagctgttcctgttcttcccttggagctgactgtcacctgcaacttcattatcctgagggcaagcttggcccagggtttcacagaggatcaggcccaggatatccagcggagcctagagagagtgctggagacacaggagcagcaggggcccaggttggaacaggggctcagggagctgtgggactctgtccttcgtgcttcctgccttctgccggagctgctgtctgccctgcaccgcctggttggcctgcaggctgccctctggttgagtgctgaccgtcttggggacctggccttgttactagagaccctgaatggcagccagagtggagcctctaaggatctgctgttacttctgaaaacttggagtcccccagctgaggaattagatgctccattgaccctgcaggatgcccagggattgaaggatgtcctcctgacagcatttgcctaccgccaaggtctccaggagctgatcacagggaacccagacaaggcactaagcagccttcatgaagcggcctcaggcctgtgtccacggcctgtgttggtccaggtgtacacagcactggggtcctgtcaccgtaagatgggaaatccacagagagcactgttgtacttggttgcagccctgaaagagggatcagcctggggtcctccacttctggaggcctctaggctctatcagcaactgggggacacaacagcagagctggagagtctggagctgctagttgaggccttgaatgtcccatgcagttccaaagccccgcagtttctcattgaggtagaattactactgccaccacctgacctagcctcaccccttcattgtggcactcagagccagaccaagcacatactagcaagcaggtgcctacagacggggagggcaggagacgctgcagagcattacttggacctgctggccctgttgctggatagctcggagccaaggttctccccacccccctcccctccagggccctgtatgcctgaggtgtttttggaggcagcggtagcactgatccaggcaggcagagcccaagatgccttgactctatgtgaggagttgctcagccgcacatcatctctgctacccaagatgtcccggctgtgggaagatgccagaaaaggaaccaaggaactgccatactgcccactctgggtctctgccacccacctgcttcagggccaggcctgggttcaactgggtgcccaaaaagtggcaattagtgaatttagcaggtgcctcgagctgctcttccgggccacacctgaggaaaaagaacaaggggcagctttcaactgtgagcagggatgtaagtcagatgcggcactgcagcagcttcgggcagccgccctaattagtcgtggactggaatgggtagccagcggccaggataccaaagccttacaggacttcctcctcagtgtgcagatgtgcccaggtaatcgagacacttactttcacctgcttcagactctgaagaggctagatcggagggatgaggccactgcactctggtggaggctggaggcccaaactaaggggtcacatgaagatgctctgtggtgaggctcaggcctgctggcttggggctgaggggcagttggtgtcctagagtccttggacctattgtgggtggtgaacactgaaagcgggggtatggctgcccagctttctgccaatctttcacccttaggcatcatccttctttctctccaggtctctccccctgtacctagaaagctatttgagctggatccgtccctctgatcgtgacgccttccttgaagaatttcggacatctctgccaaagtcttgtgacctgtagctgccacgttttgaagagcttgagctgggtccccagtgggctgtctctctgtggggagggctttctgcttcaccatcattaggaatgtgaccattcctatataattcctggactggtgagattggtggtaggcctgtgaaatttgccctagttactaccattctcgttttggaggaaacaatctctgccaccaccaagtcattgactttgctcgaggcaccttttttcctgtttctccttttctgttgtcgagtaaaatttcatattta

SEQ ID NO: 38716 - DNA, 3133 bp, Homo sapiens
tttgcatatggatattcaattctcctagctccatttaatttgaaatgattgggcaggtacttttgagcagtgcaagtacagagcggcactgccagcagactacacgcggtagaaagccgaccttggtgagcgtgttggtgctcgacagtgagcagagaaaggatggacgattacggagcgccctcgtctccagttaccgctttctggaaacaccatccgccggggcggagctgttccgccccggtgcggtactacgactcccagcatgcacctcgcagtcggccctcggtggaagcgggaacccaggaggacctgggggtgtggcagcgaggaagggccgagccacggactgtggggccgaaactcgctcccgcccaccctttctcgaggctgtggcctccgcgagagccgagcgggccgcaccgccggccgtgcgactgccccagtcagacacgaccccggcttctagcccgcctaagcctgtttggggttgctgactcgtttcctccccgagtttcccgcgggaactaactcttcaagaggaccaaccgcagcccagagcttcgcagacccggccaaccagaggcgaggttgagagcccggcgggccgcggggagagagcgtcccatctgtcctggaaagcctgggcgggtggattgggaccccgagagaagcaggggagctcggcggggtgcagaagtgcccaggcccctccccgctggggttgggagcttgggcaggccagcttcacccttcctaagtccgcttctggtctccgggcccagcctcggccaccatgtcccgccagaccacctctgtgggctccagctgcctggacctgtggagggaaaagaatgaccggctcgttcgacaggccaaggtaacacggttgctggcaccctcggtttgcagcctcaagatccctgaaagcgggtttgcagtggatttaccccaacagatggggagggactgagcttgaccaaagagccagaaatgactggagaatgcatcccttgccactgctgcaaggggagaaaaaaggattgatcctcagtgacaacccctccctcatgtggcaggtggctcagaactccggtctgactctgaggcgacagcagttggctcaggatgcactggaagggctcagagggctcctccatagtctgcaagggctccctgcagctgttcctgttcttcccttggagctgactgtcacctgcaacttcattatcctgagggcaagcttggcccagggtttcacagaggatcaggcccaggatatccagcggagcctagagagagtgctggagacacaggagcagcaggggcccaggttggaacaggggctcagggagctgtgggactctgtccttcgtgcttcctgccttctgccggagctgctgtctgccctgcaccgcctggttggcctgcaggctgccctctggttgagtgctgaccgtcttggggacctggccttgttactagagaccctgaatggcagccagagtggagcctctaaggatctgctgttacttctgaaaacttggagtcccccagctgaggaattagatgctccattgaccctgcaggatgcccagggattgaaggatgtcctcctgacagcatttgcctaccgccaaggtctccaggagctgatcacagggaacccagacaaggcactaagcagccttcatgaagcggcctcaggcctgtgtccacggcctgtgttggtccaggtgtacacagcactggggtcctgtcaccgtaagatgggaaatccacagagagcactgttgtacttggttgcagccctgaaagagggatcagcctggggtcctccacttctggaggcctctaggctctatcagcaactgggggacacaacagcagagctggagagtctggagctgctagttgaggccttgaatgtcccatgcagttccaaagccccgcagtttctcattgaggtagaattactactgccaccacctgacctagcctcaccccttcattgtggcactcagagccagaccaagcacatactagcaagcaggtgcctacagacggggagggcaggagacgctgcagagcattacttggacctgctggccctgttgctggatagctcggagccaaggttctccccacccccctcccctccagggccctgtatgcctgaggtgtttttggaggcagcggtagcactgatccaggcaggcagagcccaagatgccttgactctatgtgaggagttgctcagccgcacatcatctctgctacccaagatgtcccggctgtgggaagatgccagaaaaggaaccaaggaactgccatactgcccactctgggtctctgccacccacctgcttcagggccaggcctgggttcaactgggtgcccaaaaagtggcaattagtgaatttagcaggtgcctcgagctgctcttccgggccacacctgaggaaaaagaacaaggggcagctttcaactgtgagcagggatgtaagtcagatgcggcactgcagcagcttcgggcagccgccctaattagtcgtggactggaatgggtagccagcggccaggataccaaagccttacaggacttcctcctcagtgtgcagatgtgcccaggtaatcgagacacttactttcacctgcttcagactctgaagaggctagatcggagggatgaggccactgcactctggtggaggctggaggcccaaactaaggggtcacatgaagatgctctgtggtctctccccctgtacctagaaagctatttgagctggatccgtccctctgatcgtgacgccttccttgaagaatttcggacatctctgccaaagtcttgtgacctgtagctgccacgttttgaagagcttgagctgggtccccagtgggctgtctctctgtggggagggctttctgcttcaccatcattaggaatgtgaccattcctatataattcctggactggtgagattggtggtaggcctgtgaaatttgccctagttactaccattctcgttttggaggaaacaatctctgccaccaccaagtcattgactttgctcgaggcaccttttttcctgtttctccttttctgttgtcgagtaaaatttcatattta

SEQ ID NO: 38717 - DNA, 1719 bp, Homo sapiens
cttgagctcaaggtctagccaggatagatggagataggagaagacggggaggttgtaggcttggagcttctggttgtccttctttccccagagtggagcctctaaggatctgctgttacttctgaaaacttggagtcccccagctgaggaattagatgctccattgaccctgcaggatgcccagggattgaaggatgtcctcctgacagcatttgcctaccgccaaggtctccaggagctgatcacagggaacccagacaaggcactaagcagccttcatgaagcggcctcaggcctgtgtccacggcctgtgttggtccaggtgtacacagcactggggtcctgtcaccgtaagatgggaaatccacagagagcactgttgtacttggttgcagccctgaaagagggatcagcctggggtcctccacttctggaggcctctaggctctatcagcaactgggggacacaacagcagagctggagagtctggagctgctagttgaggccttgaatgtcccatgcagttccaaagccccgcagtttctcattgaggtagaattactactgccaccacctgacctagcctcaccccttcattgtggcactcagagccagaccaagcacatactagcaagcaggtgcctacagacggggagggcaggagacgctgcagagcattacttggacctgctggccctgttgctggatagctcggagccaaggttctccccacccccctcccctccagggccctgtatgcctgaggtgtttttggaggcagcggtagcactgatccaggcaggcagagcccaagatgccttgactctatgtgaggagttgctcagccgcacatcatctctgctacccaagatgtcccggctgtgggaagatgccagaaaaggaaccaaggaactgccatactgcccactctgggtctctgccacccacctgcttcagggccaggcctgggttcaactgggtgcccaaaaagtggcaattagtgaatttagcaggtgcctcgagctgctcttccgggccacacctgaggaaaaagaacaaggggcagctttcaactgtgagcagggatgtaagtcagatgcggcactgcagcagcttcgggcagccgccctaattagtcgtggactggaatgggtagccagcggccaggataccaaagccttacaggacttcctcctcagtgtgcagatgtgcccaggtaatcgagacacttactttcacctgcttcagactctgaagaggctagatcggagggatgaggccactgcactctggtggaggctggaggcccaaactaaggggtcacatgaagatgctctgtggtctctccccctgtacctagaaagctatttgagctggatccgtccctctgatcgtgacgccttccttgaagaatttcggacatctctgccaaagtcttgtgacctgtagctgccacgttttgaagagcttgagctgggtccccagtgggctgtctctctgtggggagggctttctgcttcaccatcattaggaatgtgaccattcctatataattcctggactggtgagattggtggtaggcctgtgaaatttgccctagttactaccattctcgttttggaggaaacaatctctgccaccaccaagtcattgactttgctcgaggcaccttttttcctgtttctccttttctgttgtcgagtaaaatttcatattta

SEQ ID NO: 38718 - DNA, 872 bp, Homo sapiens
gggtcgttctgggtaggatgggtgggggttgtattgatgagattagtagtatggaagtggtagtggtggaagtgggttccctttaatgtgtcccagcccaccaggagacttaagagaaagggactgtggacacaagaagaaatagaggaggatttggggttttggtgactgtgaggctgggaagacacttcttgactttgggagtggtccccaggggcagctttcaactgtgagcagggatgtaagtcagatgcggcactgcagcagcttcgggcagccgccctaattagtcgtggactggaatgggtagccagcggccaggataccaaagccttacaggacttcctcctcagtgtgcagatgtgcccaggtaatcgagacacttactttcacctgcttcagactctgaagaggctagatcggagggatgaggccactgcactctggtggaggctggaggcccaaactaaggggtcacatgaagatgctctgtggtctctccccctgtacctagaaagctatttgagctggatccgtccctctgatcgtgacgccttccttgaagaatttcggacatctctgccaaagtcttgtgacctgtagctgccacgttttgaagagcttgagctgggtccccagtgggctgtctctctgtggggagggctttctgcttcaccatcattaggaatgtgaccattcctatataattcctggactggtgagattggtggtaggcctgtgaaatttgccctagttactaccattctcgttttggaggaaacaatctctgccaccaccaagtcattgactttgctcgaggcaccttttttcctgtttctccttttctgttgtcgagtaaaatttcatattta

SEQ ID NO: 38719 - DNA, 947 bp, Homo sapiens
tatccaggtgttcaaatatacacagtgtgtatgcagggctcccaagagttccctggtttccccgatatcctcagacacaaagaccatgactctgctgttgtgggttgcacaggagtagggggcagatgatggacactgggatgggaatggttgtgaatgatctgcccccgcttccatatgtgagtgtaggcaagatacttcctctctctaggcctcagtttccctttttataaaacaatgcctaagactatgtcaagttctaagactctgtactctgggctggggctacaggtaatcgagacacttactttcacctgcttcagactctgaagaggctagatcggagggatgaggccactgcactctggtggaggctggaggcccaaactaaggggtcacatgaagatgctctgtggtgaggctcaggcctgctggcttggggctgaggggcagttggtgtcctagagtccttggacctattgtgggtggtgaacactgaaagcgggggtatggctgcccagctttctgccaatctttcacccttaggcatcatccttctttctctccaggtctctccccctgtacctagaaagctatttgagctggatccgtccctctgatcgtgacgccttccttgaagaatttcggacatctctgccaaagtcttgtgacctgtagctgccacgttttgaagagcttgagctgggtccccagtgggctgtctctctgtggggagggctttctgcttcaccatcattaggaatgtgaccattcctatataattcctggactggtgagattggtggtaggcctgtgaaatttgccctagttactaccattctcgttttggaggaaacaatctctgccaccaccaagtcattgactttgctcgaggcaccttttttcctgtttctccttttctgttgtcgagtaaaatttcatattta

SEQ ID NO: 38720 - DNA, 1256 bp, Homo sapiens
ggcccccgggtgtcgaatcggccgagggactctgaggcgacagcagttggctcaggatgcactggaagggctcagagggctcctccatagtctgcaagggctccctgcagctgttcctgttcttcccttggagctgactgtcacagcaagcaggtgcctacagacggggagggcaggagacgctgcagagcattacttggacctgctggccctgttgctggatagctcggagccaaggttctccccacccccctcccctccagggccctgtatgcctgaggtgtttttggaggcagcggtagcactgatccaggcaggcagagcccaagatgccttgactctatgtgaggagttgctcagccgcacatcatctctgctacccaagatgtcccggctgtgggaagatgccagaaaaggaaccaaggaactgccatactgcccactctgggtctctgccacccacctgcttcagggccaggcctgggttcaactgggtgcccaaaaagtggcaattagtgaatttagcaggtgcctcgagctgctcttccgggccacacctgaggaaaaagaacaaggggcagctttcaactgtgagcagggatgtaagtcagatgcggcactgcagcagcttcgggcagccgccctaattagtcgtggactggaatgggtagccagcggccaggataccaaagccttacaggacttcctcctcagtgtgcagatgtgcccaggtaatcgagacacttactttcacctgcttcagactctgaagaggctagatcggagggatgaggccactgcactctggtggaggctggaggcccaaactaaggggtcacatgaagatgctctgtggcatcatccttctttctctccaggtctctccccctgtacctagaaagctatttgagctggatccgtccctctgatcgtgacgccttccttgaagaatttcggacatctctgccaaagtcttgtgacctgtagctgccacgttttgaagagcttgagctgggtccccagtgggctgtctctctgtggggagggctttctgcttcaccatcattaggaatgtgaccattcctatataattcctggactggtgagattggtggtaggcctgtgaaatttgccctagttactaccattctcgttttggaggaaacaatctctgccaccaccaagtcattgactttgctcgaggcaccttttttcctgtttctccttttctgttgtcgagtaaaatttcatattta

SEQ ID NO: 38721 - DNA, 247 bp, Homo sapiens
ggaggttgtaggcttggagcttctggttgtccttctttccccagagtggagcctctaaggatctgctgttacttctgaaaacttggagtcccccagctgaggaattagatgctccattgaccctgcaggatgcccagggattgaaggatgtcctcctgacagcatttgcctaccgccaaggtcagctagcaacctgactcatctcttctacctttaagtggtcctccagactcatgccctctctctt

SEQ ID NO: 38722 - DNA, 1225 bp, Homo sapiens
tttgcatatggatattcaattctcctagctccatttaatttgaaatgattgggcaggtacttttgagcagtgcaagtacagagcggcactgccagcagactacacgcggtagaaagccgaccttggtgagcgtgttggtgctcgacagtgagcagagaaaggatggacgattacggagcgccctcgtctccagttaccgctttctggaaacaccatccgccggggcggagctgttccgccccggtgcggtactacgactcccagcatgcacctcgcagtcggccctcggtggaagcgggaacccaggaggacctgggggtgtggcagcgaggaagggccgagccacggactgtggggccgaaactcgctcccgcccaccctttctcgaggctgtggcctccgcgagagccgagcgggccgcaccgccggccgtgcgactgccccagtcagacacgaccccggcttctagcccgcctaagcctgtttggggttgctgactcgtttcctccccgagtttcccgcgggaactaactcttcaagaggaccaaccgcagcccagagcttcgcagacccggccaaccagaggcgaggttgagagcccggcgggccgcggggagagagcgtcccatctgtcctggaaagcctgggcgggtggattgggaccccgagagaagcaggggagctcggcggggtgcagaagtgcccaggcccctccccgctggggttgggagcttgggcaggccagcttcacccttcctaagtccgcttctggtctccgggcccagcctcggccaccatgtcccgccagaccacctctgtgggctccagctgcctggacctgtggagggaaaagaatgaccggctcgttcgacaggccaaggtggctcagaactccggtctgactctgaggcgacagcagttggctcaggatgcactggaagggctcagagggctcctccatagtctgcaagggctccctgcagctgttcctgttcttcccttggagctgactgtcacctgcaacttcattatcctgagggcaagcttggcccagggtttcacagaggatcaggcccaggatatccagcggagcctagagagaggtgagggccagagattgtccctgattcccctgccatcttcagtctgggtttaagttattgcagggagatgggaggataaacaacatctgtcacctccatggagagaggtgcccttctctgtg

SEQ ID NO: 38723 - DNA, 2907 bp, Homo sapiens
tttgcatatggatattcaattctcctagctccatttaatttgaaatgattgggcaggtacttttgagcagtgcaagtacagagcggcactgccagcagactacacgcggtagaaagccgaccttggtgagcgtgttggtgctcgacagtgagcagagaaaggatggacgattacggagcgccctcgtctccagttaccgctttctggaaacaccatccgccggggcggagctgttccgccccggtgcggtactacgactcccagcatgcacctcgcagtcggccctcggtggaagcgggaacccaggaggacctgggggtgtggcagcgaggaagggccgagccacggactgtggggccgaaactcgctcccgcccaccctttctcgaggctgtggcctccgcgagagccgagcgggccgcaccgccggccgtgcgactgccccagtcagacacgaccccggcttctagcccgcctaagcctgtttggggttgctgactcgtttcctccccgagtttcccgcgggaactaactcttcaagaggaccaaccgcagcccagagcttcgcagacccggccaaccagaggcgaggttgagagcccggcgggccgcggggagagagcgtcccatctgtcctggaaagcctgggcgggtggattgggaccccgagagaagcaggggagctcggcggggtgcagaagtgcccaggcccctccccgctggggttgggagcttgggcaggccagcttcacccttcctaagtccgcttctggtctccgggcccagcctcggccaccatgtcccgccagaccacctctgtgggctccagctgcctggacctgtggagggaaaagaatgaccggctcgttcgacaggccaaggtggctcagaactccggtctgactctgaggcgacagcagttggctcaggatgcactggaagggctcagagggctcctccatagtctgcaagggctccctgcagctgttcctgttcttcccttggagctgactgtcacctgcaacttcattatcctgagggcaagcttggcccagggtttcacagaggatcaggcccaggatatccagcggagcctagagagagtgctggagacacaggagcagcaggggcccaggttggaacaggggctcagggagctgtgggactctgtccttcgtgcttcctgccttctgccggagctgctgtctgccctgcaccgcctggttggcctgcaggctgccctctggttgagtgctgaccgtcttggggacctggccttgttactagagaccctgaatggcagccagagtggagcctctaaggatctgctgttacttctgaaaacttggagtcccccagctgaggaattagatgctccattgaccctgcaggatgcccagggattgaaggatgtcctcctgacagcatttgcctaccgccaaggtctccaggagctgatcacagggaacccagacaaggcactaagcagccttcatgaagcggcctcaggcctgtgtccacggcctgtgttggtccaggtgtacacagcactggggtcctgtcaccgtaagatgggaaatccacagagagcactgttgtacttggttgcagccctgaaagagggatcagcctggggtcctccacttctggaggcctctaggctctatcagcaactgggggacacaacagcagagctggagagtctggagctgctagttgaggccttgaatgtcccatgcagttccaaagccccgcagtttctcattgaggtagaattactactgccaccacctgacctagcctcaccccttcattgtggcactcagagccagaccaagcacatactggcaggagacgctgcagagcattacttggacctgctggccctgttgctggatagctcggagccaaggttctccccacccccctcccctccagggccctgtatgcctgaggtgtttttggaggcagcggtagcactgatccaggcaggcagagcccaagatgccttgactctatgtgaggagttgctcagccgcacatcatctctgctacccaagatgtcccggctgtgggaagatgccagaaaaggaaccaaggaactgccatactgcccactctgggtctctgccacccacctgcttcagggccaggcctgggttcaactgggtgcccaaaaagtggcaattagtgaatttagcaggtgcctcgagctgctcttccgggccacacctgaggaaaaagaacaaggggcagctttcaactgtgagcagggatgtaagtcagatgcggcactgcagcagcttcgggcagccgccctaattagtcgtggactggaatgggtagccagcggccaggataccaaagccttacaggacttcctcctcagtgtgcagatgtgcccaggtaatcgagacacttactttcacctgcttcagactctgaagaggctagatcggagggatgaggccactgcactctggtggaggctggaggcccaaactaaggggtcacatgaagatgctctgtggtctctccccctgtacctagaaagctatttgagctggatccgtccctctgatcgtgacgccttccttgaagaatttcggacatctctgccaaagtcttgtgacctgtagctgccacgttttgaagagcttgagctgggtccccagtgggctgtctctctgtggggagggctttctgcttcaccatcattaggaatgtgaccattcctatataattcctggactggtgagattggtggtaggcctgtgaaatttgccctagttactaccattctcgttttggaggaaacaatctctgccaccaccaagtcattgactttgctcgaggcaccttttttcctgtttctccttttctgttgtcgagtaaaatttcatattta

SEQ ID NO: 38724 - DNA, 2739 bp, Homo sapiens
tttgcatatggatattcaattctcctagctccatttaatttgaaatgattgggcaggtacttttgagcagtgcaagtacagagcggcactgccagcagactacacgcggtagaaagccgaccttggtgagcgtgttggtgctcgacagtgagcagagaaaggatggacgattacggagcgccctcgtctccagttaccgctttctggaaacaccatccgccggggcggagctgttccgccccggtgcggtactacgactcccagcatgcacctcgcagtcggccctcggtggaagcgggaacccaggaggacctgggggtgtggcagcgaggaagggccgagccacggactgtggggccgaaactcgctcccgcccaccctttctcgaggctgtggcctccgcgagagccgagcgggccgcaccgccggccgtgcgactgccccagtcagacacgaccccggcttctagcccgcctaagcctgtttggggttgctgactcgtttcctccccgagtttcccgcgggaactaactcttcaagaggaccaaccgcagcccagagcttcgcagacccggccaaccagaggcgagcctcggccaccatgtcccgccagaccacctctgtgggctccagctgcctggacctgtggagggaaaagaatgaccggctcgttcgacaggccaaggtggctcagaactccggtctgactctgaggcgacagcagttggctcaggatgcactggaagggctcagagggctcctccatagtctgcaagggctccctgcagctgttcctgttcttcccttggagctgactgtcacctgcaacttcattatcctgagggcaagcttggcccagggtttcacagaggatcaggcccaggatatccagcggagcctagagagagtgctggagacacaggagcagcaggggcccaggttggaacaggggctcagggagctgtgggactctgtccttcgtgcttcctgccttctgccggagctgctgtctgccctgcaccgcctggttggcctgcaggctgccctctggttgagtgctgaccgtcttggggacctggccttgttactagagaccctgaatggcagccagagtggagcctctaaggatctgctgttacttctgaaaacttggagtcccccagctgaggaattagatgctccattgaccctgcaggatgcccagggattgaaggatgtcctcctgacagcatttgcctaccgccaaggtctccaggagctgatcacagggaacccagacaaggcactaagcagccttcatgaagcggcctcaggcctgtgtccacggcctgtgttggtccaggtgtacacagcactggggtcctgtcaccgtaagatgggaaatccacagagagcactgttgtacttggttgcagccctgaaagagggatcagcctggggtcctccacttctggaggcctctaggctctatcagcaactgggggacacaacagcagagctggagagtctggagctgctagttgaggccttgaatgtcccatgcagttccaaagccccgcagtttctcattgaggtagaattactactgccaccacctgacctagcctcaccccttcattgtggcactcagagccagaccaagcacatactagcaagcaggtgcctacagacggggagggcaggagacgctgcagagcattacttggacctgctggccctgttgctggatagctcggagccaaggttctccccacccccctcccctccagggccctgtatgcctgaggtgtttttggaggcagcggtagcactgatccaggcaggcagagcccaagatgccttgactctatgtgaggagttgctcagccgcacatcatctctgctacccaagatgtcccggctgtgggaagatgccagaaaaggaaccaaggaactgccatactgcccactctgggtctctgccacccacctgcttcagggccaggcctgggttcaactgggtgcccaaaaagtggcaattagtgaatttagcaggtgcctcgagctgctcttccgggccacacctgaggaaaaagaacaaggggcagctttcaactgtgagcagggatgtaagtcagatgcggcactgcagcagcttcgggcagccgccctaattagtcgtggactggaatgggtagccagcggccaggataccaaagccttacaggacttcctcctcagtgtgcagatgtgcccaggtaatcgagacacttactttcacctgcttcagactctgaagaggctagatcggagggatgaggccactgcactctggtggaggctggaggcccaaactaaggggtcacatgaagatgctctgtggtctctccccctgtacctagaaagctatttgagctggatccgtccctctgatcgtgacgccttccttgaagaatttcggacatctctgccaaagtcttgtgacctgtagctgccacgttttgaagagcttgagctgggtccccagtgggctgtctctctgtggggagggctttctgcttcaccatcattaggaatgtgaccattcctatataattcctggactggtgagattggtggtaggcctgtgaaatttgccctagttactaccattctcgttttggaggaaacaatctctgccaccaccaagtcattgactttgctcgaggcaccttttttcctgtttctccttttctgttgtcgagtaaaatttcatattta

SEQ ID NO: 38725 - DNA, 2957 bp, Homo sapiens
tttgcatatggatattcaattctcctagctccatttaatttgaaatgattgggcaggtacttttgagcagtgcaagtacagagcggcactgccagcagactacacgcggtagaaagccgaccttggtgagcgtgttggtgctcgacagtgagcagagaaaggatggacgattacggagcgccctcgtctccagttaccgctttctggaaacaccatccgccggggcggagctgttccgccccggtgcggtactacgactcccagcatgcacctcgcagtcggccctcggtggaagcgggaacccaggaggacctgggggtgtggcagcgaggaagggccgagccacggactgtggggccgaaactcgctcccgcccaccctttctcgaggctgtggcctccgcgagagccgagcgggccgcaccgccggccgtgcgactgccccagtcagacacgaccccggcttctagcccgcctaagcctgtttggggttgctgactcgtttcctccccgagtttcccgcgggaactaactcttcaagaggaccaaccgcagcccagagcttcgcagacccggccaaccagaggcgaggttgagagcccggcgggccgcggggagagagcgtcccatctgtcctggaaagcctgggcgggtggattgggaccccgagagaagcaggggagctcggcggggtgcagaagtgcccaggcccctccccgctggggttgggagcttgggcaggccagcttcacccttcctaagtccgcttctggtctccgggcccagcctcggccaccatgtcccgccagaccacctctgtgggctccagctgcctggacctgtggagggaaaagaatgaccggctcgttcgacaggccaaggtggctcagaactccggtctgactctgaggcgacagcagttggctcaggatgcactggaagggctcagagggctcctccatagtctgcaagggctccctgcagctgttcctgttcttcccttggagctgactgtcacctgcaacttcattatcctgagggcaagcttggcccagggtttcacagaggatcaggcccaggatatccagcggagcctagagagagtgctggagacacaggagcagcaggggcccaggttggaacaggggctcagggagctgtgggactctgtccttcgtgcttcctgccttctgccggagctgctgtctgccctgcaccgcctggttggcctgcaggctgccctctggttgagtgctgaccgtcttggggacctggccttgttactagagaccctgaatggcagccagagtggagcctctaaggatctgctgttacttctgaaaacttggagtcccccagctgaggaattagatgctccattgaccctgcaggatgcccagggattgaaggatgtcctcctgacagcatttgcctaccgccaaggtctccaggagctgatcacagggaacccagacaaggcactaagcagccttcatgaagcggcctcaggcctgtgtccacggcctgtgttggtccaggtgtacacagcactggggtcctgtcaccgtaagatgggaaatccacagagagcactgttgtacttggttgcagccctgaaagagggatcagcctggggtcctccacttctggaggcctctaggctctatcagcaactgggggacacaacagcagagctggagagtctggagctgctagttgaggccttgaatgtcccatgcagttccaaagccccgcagtttctcattgaggtagaattactactgccaccacctgacctagcctcaccccttcattgtggcactcagagccagaccaagcacatactagcaagcaggtgcctacagacggggagggcaggagacgctgcagagcattacttggacctgctggccctgttgctggatagctcggagccaaggttctccccacccccctcccctccagggccctgtatgcctgaggtgtttttggaggcagcggtagcactgatccaggcaggcagagcccaagatgccttgactctatgtgaggagttgctcagccgcacatcatctctgctacccaagatgtcccggctgtgggaagatgccagaaaaggaaccaaggaactgccatactgcccactctgggtctctgccacccacctgcttcagggccaggcctgggttcaactgggtgcccaaaaagtggcaattagtgaatttagcaggtgcctcgagctgctcttccgggccacacctgaggaaaaagaacaaggggcagctttcaactgtgagcagggatgtaagtcagatgcggcactgcagcagcttcgggcagccgccctaattagtcgtggactggaatgggtagccagcggccaggataccaaagccttacaggacttcctcctcagtgtgcagatgtgcccaggtaatcgagacacttactttcacctgcttcagactctgaagaggctagatcggagggatgaggccactgcactctggtggaggctggaggcccaaactaaggggtcacatgaagatgctctgtggcatcatccttctttctctccaggtctctccccctgtacctagaaagctatttgagctggatccgtccctctgatcgtgacgccttccttgaagaatttcggacatctctgccaaagtcttgtgacctgtagctgccacgttttgaagagcttgagctgggtccccagtgggctgtctctctgtggggagggctttctgcttcaccatcattaggaatgtgaccattcctatataattcctggactggtgagattggtggtaggcctgtgaaatttgccctagttactaccattctcgttttggaggaaacaatctctgccaccaccaagtcattgactttgctcgaggcaccttttttcctgtttctccttttctgttgtcgagtaaaatttcatattta

SEQ ID NO: 38726 - DNA, 2798 bp, Homo sapiens
tttgcatatggatattcaattctcctagctccatttaatttgaaatgattgggcaggtacttttgagcagtgcaagtacagagcggcactgccagcagactacacgcggtagaaagccgaccttggtgagcgtgttggtgctcgacagtgagcagagaaaggatggacgattacggagcgccctcgtctccagttaccgctttctggaaacaccatccgccggggcggagctgttccgccccggtgcggtactacgactcccagcatgcacctcgcagtcggccctcggtggaagcgggaacccaggaggacctgggggtgtggcagcgaggaagggccgagccacggactgtggggccgaaactcgctcccgcccaccctttctcgaggctgtggcctccgcgagagccgagcgggccgcaccgccggccgtgcgactgccccagtcagacacgaccccggcttctagcccgcctaagcctgtttggggttgctgactcgtttcctccccgagtttcccgcgggaactaactcttcaagaggaccaaccgcagcccagagcttcgcagacccggccaaccagaggcgaggttgagagcccggcgggccgcggggagagagcgtcccatctgtcctggaaagcctgggcgggtggattgggaccccgagagaagcaggggagctcggcggggtgcagaagtgcccaggcccctccccgctggggttgggagcttgggcaggccagcttcacccttcctaagtccgcttctggtctccgggcccagcctcggccaccatgtcccgccagaccacctctgtgggctccagctgcctggacctgtggagggaaaagaatgaccggctcgttcgacaggccaaggtggctcagaactccggtctgactctgaggcgacagcagttggctcaggatgcactggaagggctcagagggctcctccatagtctgcaagggctccctgcagctgttcctgttcttcccttggagctgactgtcacctgcaacttcattatcctgagggcaagcttggcccagggtttcacagaggatcaggcccaggatatccagcggagcctagagagagtgctggagacacaggagcagcaggggcccaggttggaacaggggctcagggagctgtgggactctgtccttcgtgcttcctgccttctgccggagctgctgtctgccctgcaccgcctggttggcctgcaggctgccctctggttgagtgctgaccgtcttggggacctggccttgttactagagaccctgaatggcagccagagtggagcctctaaggatctgctgttacttctgaaaacttggagtcccccagctgaggaattagatgctccattgaccctgcaggatgcccagggattgaaggatgtcctcctgacagcatttgcctaccgccaaggtctccaggagctgatcacagggaacccagacaaggcactaagcagccttcatgaagcggcctcaggcctgtgtccacggcctgtgttggtccaggtgtacacagcactggggtcctgtcaccgtaagatgggaaatccacagagagcactgttgtacttggttgcagccctgaaagagggatcagcctggggtcctccacttctggaggcctctaggctctatcagcaactgggggacacaacagcagagctggagagtctggagctgctagttgaggccttgaatgtcccatgcagttccaaagccccgcagtttctcattgaggtagaattactactgccaccacctgacctagcctcaccccttcattgtggcactcagagccagaccaagcacatactagcaagcaggtgcctacagacggggagggcaggagacgctgcagagcattacttggacctgctggccctgttgctggatagctcggagccaaggttctccccacccccctcccctccagggccctgtatgcctgaggtgtttttggaggcagcggtagcactgatccaggcaggcagagcccaagatgccttgactctatgtgaggagttgctcagccgcacatcatctctgctacccaagatgtcccggctgtgggaagatgccagaaaaggaaccaaggaactgccatactgcccactctgggtctctgccacccacctgcttcagggccaggcctgggttcaactgggtgcccaaaaagtggcaattagtgaatttagcaggtgcctcgagctgctcttccgggccacacctgaggaaaaagaacaaggggcagctttcaactgtgagcagggatgtaagtcagatgcggcactgcagcagcttcgggcagccgccctaattagtcgtggactggaatgggtagccagcggccaggataccaaagccttacaggacttcctcctcagtgtgcagatgtgcccaggtaatcgagacacttactttcacctgcttcagactctgatcgtgacgccttccttgaagaatttcggacatctctgccaaagtcttgtgacctgtagctgccacgttttgaagagcttgagctgggtccccagtgggctgtctctctgtggggagggctttctgcttcaccatcattaggaatgtgaccattcctatataattcctggactggtgagattggtggtaggcctgtgaaatttgccctagttactaccattctcgttttggaggaaacaatctctgccaccaccaagtcattgactttgctcgaggcaccttttttcctgtttctccttttctgttgtcgagtaaaatttcatattta

SEQ ID NO: 38727 - DNA, 982 bp, Homo sapiens
taattagagacggggtcttgttttgttgcccaggctggtctcaaactcccgagctcaagtgatcctcctgccttggcctccaaaagtgctgggattacatgcatacctggcctactgagcatttttatcttgaatgagtgttggattttgtcaaatgctttttctgtacctattaatacaatcatgattttttcctctttagtatgttgatatgatgggttacattaattgattttcaaatgttgaatcagtcttgcatacctggaataaatcccacttggtcataatatatcattctttttacacattattgcatttgatttgctaatattttgttaaggatttttgcatctatgtttatgagagactgtagttttccctttcttgtcatgtctttatctgattttagtattagagtaatgctggtctcctagagtcagttagggtgtgttcccttagcttctatttttttggaagctattgtagagaattggtatgatttctttcttagaaaaaaaattttaaggaaatatttctgggtcaaagatttatttcttaaatgtttgatcaatcatcagtgaacccatctaagcctggtgctttctattatagaaggttattagttatgatttagtttaacaggtataggcctattcaaattttctatttctccttgtgtgagttatggaacactattcctttcaaagaactggcccattgcatgggtttgggccataatcccaaaagacacaatcttgaatgttataatcccaaatgatgaaatcctgaaagatcaaaatccctgaagtccaaaatccccaaaattccaatcccaaatgattaaaatcctggaaaatataattcttggacaaaataattttaaaaattctttaaaattctttatttatattttttaaggggatttgagaaacataaaaacacaacagagcacttcatagaccattttagacaataaaacagg

SEQ ID NO: 38728 - DNA, 820 bp, Homo sapiens
tgatcatccaattctagtcatggcatatatgaagtattccaaagcacccttccttccttgtgcttgtgcttcttgggcttttttctttttgtttcttttcttccatctcatatctggtctgagatggcatgattacacacattccaccttttttctacccctatttgtgtctcaaacctttataataagtgacttcttgtagtctgcagcttggctttttcaagttgggaagagctttgcttagcccattgctagactgctgccagctagatcttcaagatcaaattaaatgatatgtacagttggaatagtattctgtgagtacttatgaagaaagcagtcctggttcctcccgttagagatttttaaagtcaccagttatatagtgtaaattggccattttaaacttcagtaaacctgatccagttttattacccatatatccattttgagatgactttcaggtgttaaaagcttctttcaaagaaaggataacagggatatttgtgactttgaatgtaataatgaaccattataaacagtaggaactggaaccatttttaccttaataatctgaagctcaaaattgtactaaaaatgttttggaatgtcttaatttttacttctatatagccatcacatctctgtaattatcttttattgctactaaagtggttaaatctataaattattaatattaagggtttgaaattcttttggagagatttatctggatgttcgcctcagacaacaccatctaaaactaggcagtcaggtagattatttatgggattttactgttaaataattaagttccaga

SEQ ID NO: 38729 - DNA, 744 bp, Homo sapiens
tgatcatccaattctagtcatggcatatatgaagtattccaaagcacccttccttccttgtgcttgtgcttcttgggcttttttctttttgtttcttttcttccatctcatatctggtctgagatggcatgattacacacattccaccttttttctacccctatttgtgtctcaaacctttataataagtgacttcttgtagtctgcagcttggctttttcaagttgggaagagctttgcttagcccattgctagactgctgccagctagatcttcaagatcaaattaaatgatatgtacagttggaatagtattctgtgagtacttatgaagaaagcagtcctggttcctcccgttagagatttttaaagtcaccagttatatagtgtaaattggccattttaaacttcagtaaacctgatccagttttattacccatatatccattttgagatgactttcaggtgttaaaagcttctttcaaagaaaggataacagggatatttgtgactttgaatgtaataatgaaccattataaacagtaggaactggaaccatttttaccttaataatctgaagctcaaaattgtactaaaaatgttttggaatgtcttaatttttacttctatatagccatcacatctctgtaattatcttttattgctactaaagtggttaaatctataaattattaatattaaggtcgacgcggccgcgaatttagtagtagtagtaggcggccga

SEQ ID NO: 38730 - DNA, 446 bp, Homo sapiens
tgtatagggccctgcttgcagttctgtagactagcctgtgttgttagatcagggatggtctttagagagatgttccaagtggttttatgatactgagccgccttgtttggtgaccagggtagatgtgtgtggtagggagggaaagtggattttacaaaatcattacagttcagaaacgtctacctcagccaggagcaggaagccttaactcgttatttattatgccatggcacataggcataaaccagcccttctgtgaataagcaaacagaacctgcccaggtgcaagagaagcttgattcaggcttttttttttaaagccaaaaatttaaaaacagtatcgaattggagaagagtttgtttcaagcaagttactgtaattttcaaaagcccattttgtggaactaatacagtgtattaaaatgaattgaacaagcaaacttaaa

SEQ ID NO: 38731 - DNA, 347 bp, Homo sapiens
gatttgggggagcctgttaaatatgttagcggttcaaagcacttgatattatgaagtacaattacggattactataaactatttattttagccaaagtcatgaccaaaacattctaaaacaaggcaaaaaccttcactcattaagagggaggacttagcttccaaacaatctgtctttaatgttacatgaaaatcctgtgcaagaggagaaagccaaatttcacccttgcgttagtctactattaatgtcaaccccaacttttttaatgaaaccttagagataattctatcaaatcttacccagtttgatcatgaggtgagattcttgtaaaccttttataactctc

SEQ ID NO: 38732 - DNA, 823 bp, Homo sapiens
ctcaggccctcccctgagcgcaggccggtcagccccaggtcagtcccctccctgcattagggagactgcaggcagggccctgtggcctgcgggccactccttcctcagccctgggactggccagcccggtgcatggcgcttctggggagacactggctgggacctcacttgagcacagccgtgggcagcttgctggcctgcctaggaaaagccagccaagacaggcacagtcctttcctggcactggcctggggcacacagatctgtacctccatgacagggaaaagtagcctcaggttctgagtgtgccacggctgggctcctggggctggaaggccagctggagggtgtgggttccccaccagtgagggctgaagtcctgccgcccaccaggcccttgccgtggggggcccggctcccccacctcccgtggccagaccatcaccctctgccatctcatccaggccgcctcgaagcctgtgctggcccagcctctccactcaccctgccctgctcagctctgtctcctcctcagggccccaggtgtctcctcccatcctgggctgcctgggccccatcctgggatccacccacactcagccctggaagatgagggtcctggaaacctggggggcaggtgtggcggcgccaggactttaggccaggggccccgtgccacgtggtcctgtcgccttcacacctgctgtgcctccccctgagaagctgcaagtcctgcctttctgtttctgttgtagtgaaaccttccaccgtttccttctcggaccatgaagggcaaaaacaaaaaaacaaaaaaaatcacaaa

SEQ ID NO: 38733 - DNA, 752 bp, Homo sapiens
cagccgctccacccctccgaccctacagagaagcagcagcccaagcggctacacgtctccaacatccccttccggttcagggaccccgacttgcggcaaatgttcgggcaattcggaaaaattttagacgtggagatcatttttaacgagcggggctccaagggttttgggtttgtaacttttgaaactagctcagatgctgaccgagcccgggagaagctgaatgggacgatcgtagagggacggaaaattgaggtcaataatgccacggcccgagtgatgaccaacaagaagacggggaacccctacaccaacggctggaagctaaatccagtggtcggcgcagtctacgggcctgaattctatgcagtgacggggttcccctaccccaccaccggcacagccgttgcctaccggggcgcacatcttcggggccggggccgggccgtgtataatacatttcgggctgcgccacccccaccccccatcccgacttacggagcggtcgtgtatcaggatggattttatggtgctgagatttatggaggctacgcagcctacagatacgctcagcccgctgcagcggcggcagcctacagcgacagttacggcagagtctacgcagctgccgacccgtaccatcacaccatcgggcccgcggcgacctacagcattggaaccatgtgaaaccttccaccgtttccttctcggaccatgaagggcaaaaacaaaaaaacaaaaaaaatcacaaa

SEQ ID NO: 38734 - DNA, 1378 bp, Homo sapiens
cagccgctccacccctccgaccctacagagaagcagcagcccaagcggctacacgtctccaacatccccttccggttcagggaccccgacttgcggcaaatgttcgggcaattcggaaaaattttagacgtggagatcatttttaacgagcggggctccaagggttttgggtttgtaacttttgaaactagctcagatgctgaccgagcccgggagaagctgaatgggacgatcgtagagggacggaaaattgaggtcaataatgccacggcccgagtgatgaccaacaagaagacggggaacccctacaccaacggctggaagctaaatccagtggtcggcgcagtctacgggcctgaattctatgcagtgacggggttcccctaccccaccaccggcacagccgttgcctaccggggcgcacatcttcggggccggggccgggccgtgtataatacatttcgggctgcgccacccccaccccccatcccgacttacggagcggtcgtgtatcaggatggattttatggtgctgagatttatggaggctacgcagcctacagatacgctcagcccgctgcagcggcggcagcctacagcgacagttacggcagagtctacgcagctgccgacccgtaccatcacaccatcgggcccgcggcgacctacagcattggaaccatggctagcctctgccgaggagggtacagccgcttcaccccctactagcaagagacccagcccctaacagcattcacactgactgcctattacacaccaaacccaacagcccaaaaccaggcacagccaccagaagacagtgcacccctcccggtcagcgacacgcacggctggccccctgcaactctaaaatctatagattatttctctccagccagttggtctccccaccccacctgtgctggtgtgtgtgtctttgaccctggtttttcctgtatgtctgcaaccgtgatttcctattttgactttgttgatgttgtactacccaagccattgcaggtacggtgtgcacaccgtggggtccaggctgggccaggagaccaggcagcccccaacctgggagtagcggtagcgccctatgagggcaagagccacatttcctggcctcccaggctgcacagaacaacagaaacgcctggcagggcctcccccaaagccacccgaccagccccgtgccatggccctagtgtccagcaccctgacgcagggagggaggggctccaggcacccagtgtgggtctccccggcctgagggtgctcccgcaggccttcacccagccaaccacaggagtagccactgcccctcctcgccccattcagctgaaactaatatttttcattaaattttattgacgat

SEQ ID NO: 38735 - DNA, 801 bp, Homo sapiens
cagccgctccacccctccgaccctacagagaagcagcagcccaagcggctacacgtctccaacatccccttccggttcagggaccccgacttgcggcaaatgttcgggcaattcggaaaaattttagacgtggagatcatttttaacgagcggggctccaagggttttgggtttgtaacttttgaaactagctcagatgctgaccgagcccgggagaagctgaatgggacgatcgtagagggacggaaaattgaggtcaataatgccacggcccgagtgatgaccaacaagaagacggggaacccctacaccaacggctggaagctaaatccagtggtcggcgcagtctacgggcctgaattctatgcagtgacggggttcccctaccccaccaccggcacagccgttgcctaccggggcgcacatcttcggggccggggccgggccgtgtataatacatttcgggctgcgccacccccaccccccatcccgacttacggagcggtcgtgtatcaggatggattttatggtgctgagatttatggaggctacgcagcctacagatacgctcagcccgctgcagcggcggcagcctacagcgacagttacggcagagtctacgcagctgccgacccgtaccatcacaccatcgggcccgcggcgacctacagcattggaaccatgtgaaaccttccaccatcggcccgcggcgacctacagcattggaaccatgtgaaaccttccaccgtttccttctcggaccatgaagggcaaaaacaaaaaaacaaaaaaaatcacaaa

SEQ ID NO: 38736 - DNA, 528 bp, Homo sapiens
cacgaggatttttaacgagcggggctccaaggtcaataatgccacggcccgagtgatgaccaacaagaagacggggaacccctacaccaacggctggaagctaaatccagtggtcggcgcagtctacgggcctgaattctatgcagtgacggggttcccctaccccaccaccggcacagccgttgcctaccggggcgcacatcttcggggccggggccgggccgtgtataatacatttcgggctgcgccacccccaccccccatcccgacttacggagcggtcgtgtatcaggatggattttatggtgctgagatttatggaggctacgcagcctacagatacgctcagcccgctgcagcggcggcagcctacagcgacagttacggcagagtctacgcagctgccgacccgtaccatcacaccatcgggcccgcggcgacctacagcattggaaccatgtgaaaccttccaccgtttccttctcggaccatgaagggcaaaaacaaaaaaacaaaaaaaatcacaaa

SEQ ID NO: 38737 - DNA, 356 bp, Homo sapiens
ctgtgtgtgtgctgctggcctgggagacggcacccactgacctcctctggcctctcagtcacacttgggccagattaattcattctgcaaacttttcttgcctgcccatggaatgccaggtactgagctagggttcgcagacacatgctaagcagcagtaaaaagagcttattttgtataatactcagctactactgagctaaaactaggagagcatattagaaatgacagacttaggctgggcgcggtggctcatgcctgtaattccagcattttgggaggccgaggcgggcggatcacctgaggtcaggaattcaagaccagccttaccaacatggagaaaccccgtctccact

SEQ ID NO: 38738 - DNA, 782 bp, Homo sapiens
ggcgcctgaccgcggcagctcccaccatggcggagaccaagctccagctgtttgtcaaggcgagtgaggacggggagagcgtgggtcactgcccctcctgccagcggctcttcatggtcctgctcctcaagggcgtacctttcaccctcaccacggtggacacgcgcaggtccccggacgtgctgaaggacttcgcccccggctcgcagctgcccatcctgctctatgacagcgacgccaagacagacacgctgcagatcgaggactttctggaggagacgctggggccgcccgacttccccagcctggcgcctcgttacagggagtccaacaccgccggcaacgacgttttccacaagttctccgcgttcatcaagaacccggtgcccgcgcaggacgaagccctgtaccagcagctgctgcgcgccctcgccaggctggacagctacctgcgcgcgcccctggagcacgagctggcgggggagccgcagctgcgcgagtcccgccgccgcttcctggacggcgacaggctcacgctggccgactgcagcctcctgcccaagctgcacatcgtcgacacggtgtgcgcgcacttccgccaggcgcccatccccgcggagctgcgcggcgtacgccgctacctggacagcgcgatgcaggagaaagagttcaaatacacgtgtccgcacagcgccgagatcctggcggcctaccggcccgccgtgcacccccgctagcgccccaccccgcgtctgtcgcccaataaaggcatctttgtcggg

SEQ ID NO: 38739 - DNA, 898 bp, Homo sapiens
ggcgcctgaccgcggcagctcccaccatggcggagaccaagctccagctgtttgtcaaggcgagtgaggacggggagagcgtgggtcactgcccctcctgccagcggctcttcatggtcctgctcctcaagggcgtacctttcaccctcaccacggtggacacgcgcaggtccccggacgtgctgaaggacttcgcccccggctcgcagctgcccatcctgctctatgacagcgacgccaagacagacacgctgcagatcgaggactttctggaggagacgctggggccgcccgacttccccagcctggcgcctcgttacagggagtccaacaccgccggcaacgacgttttccacaagttctccgcgttcatcaagaacccggtgcccgcgcaggacgaagccctgtaccagcagctgctgcgcgccctcgccaggctggacagctacctgcgcgcgcccctggagcacgagctggcgggggagccgcagctgcgcgagtcccgccgccgcttcctggacggcgacaggctcacgctggccgactgcagcctcctgcccaagctgcacatcgtcgacacggtgtgcgcgcacttccgccaggcgcccatccccgcggagctgcgcggcgtacgccgctacctggacagcgcgatgcaggagaaagagttcaaatacacgtgtccgcacagcgccgagatcctggcggcctaccggcccgccgtgcacccccgctagcgccccaccccgcgtctgtcgcccaataaaggcatctttgtcggggaaaaacaaaaacataaaaaccaatccacaacaaacaggggggcgccataaaaaccccagagggcacaataagagacaccagttttttaacaaggggcccaagagggggacaaacc

SEQ ID NO: 38740 - DNA, 814 bp, Homo sapiens
ggcgcctgaccgcggcagctcccaccatggcggagaccaagctccagctgtttgtcaaggcgagtgaggacggggagagcgtgggtcactgcccctcctgccagcggctcttcatggtcctgctcctcaagggcgtacctttcaccctcaccacggtggacacgcgcaggtccccggacgtgctgaaggacttcgcccccggctcgcagctgcccatcctgctctatgacagcgacgccaagacagacacgctgcagatcgaggactttctggaggagacgctggggccgcccgacttccccagcctggcgcctcgttacagggagtccaacaccgccggcaacgacgttttccacaagttctccgcgttcatcaagaacccggtgcccgcgcaggacgaagccctgtaccagcagctgctgcgcgccctcgccaggctggacagctacctgcgcgcgcccctggagcacgagctggcgggggagccgcagctgcgcgagtcccgccgccgcttcctggacggcgacaggctcacgctggccgactgcagcctcctgcccaagctgcacatcgtcgacacggtgtgcgcgcacttccgccaggcgcccatccccgcggagctgcgcggcgtacgccgctacctggacagcgcgatgcaggagaaagagttcaaatacacgtgtccgcacagcgccgagatcctggcggcctaccggcccgccgtgcacccccgctagcgccccaccccgcgtctgtcgcccaataaaggcatctttgtcgggagtgagggtgtcctgacatctgaagggccaga

SEQ ID NO: 38741 - DNA, 854 bp, Homo sapiens
gctccagctgtttgtcaaggcgagtgaggacggggagagcgtgggtcactgcccctcctgccagcggctcttcatggtcctgctcctcaagggcgtacctttcaccctcaccacggtggacacgcgcaggtgaggccccatcctgtggacccccgcctggcctcgcacactggtgggccggcctcctcccaccccgctgctgcccgcaggtccccggacgtgctgaaggacttcgcccccggctcgcagctgcccatcctgctctatgacagcgacgccaagacagacacgctgcagatcgaggactttctggaggagacgctggggccgcccgacttccccagcctggcgcctcgttacagggagtccaacaccgccggcaacgacgttttccacaagttctccgcgttcatcaagaacccggtgcccgcgcaggacgaagccctgtaccagcagctgctgcgcgccctcgccaggctggacagctacctgcgcgcgcccctggagcacgagctggcgggggagccgcagctgcgcgagtcccgccgccgcttcctggacggcgacaggctcacgctggccgactgcagcctcctgcccaagctgcacatcgtcgacacggtgtgcgcgcacttccgccaggcgcccatccccgcggagctgcgcggcgtacgccgctacctggacagcgcgatgcaggagaaagagttcaaatacacgtgtccgcacagcgccgagatcctggcggcctaccggcccgccgtgcacccccgctagcgccccaccccgcgtctgtcgcccaataaaggcatctttgtcgggagtgagggtgtcctgacatctgaagggccaga

SEQ ID NO: 38742 - DNA, 963 bp, Homo sapiens
ggcgcctgaccgcggcagctcccaccatggcggagaccaagctccagctgtttgtcaaggtgcagggcggactcagctgcggggagggtgtctgggaggaagcgcttttctgggctttgctttctgtggcaggctgtggggtgggcctcccagtaatgtctgagccccttcctgtgggtggctagggggactcaggcagccctacagaggctgagtaaagtgggacccagcgagtcactgcccctcctgccagcggctcttcatggtcctgctcctcaagggcgtacctttcaccctcaccacggtggacacgcgcaggtccccggacgtgctgaaggacttcgcccccggctcgcagctgcccatcctgctctatgacagcgacgccaagacagacacgctgcagatcgaggactttctggaggagacgctggggccgcccgacttccccagcctggcgcctcgttacagggagtccaacaccgccggcaacgacgttttccacaagttctccgcgttcatcaagaacccggtgcccgcgcaggacgaagccctgtaccagcagctgctgcgcgccctcgccaggctggacagctacctgcgcgcgcccctggagcacgagctggcgggggagccgcagctgcgcgagtcccgccgccgcttcctggacggcgacaggctcacgctggccgactgcagcctcctgcccaagctgcacatcgtcgacacggtgtgcgcgcacttccgccaggcgcccatccccgcggagctgcgcggcgtacgccgctacctggacagcgcgatgcaggagaaagagttcaaatacacgtgtccgcacagcgccgagatcctggcggcctaccggcccgccgtgcacccccgctagcgccccaccccgcgtctgtcgcccaataaaggcatctttgtcgggagtgagggtgtcctgacatctgaagggccaga

SEQ ID NO: 38743 - DNA, 862 bp, Homo sapiens
ggcgcctgaccgcggcagctcccaccatggcggagaccaagctccagctgtttgtcaaggcgagtgaggacggggagagcgtgggtcactgcccctcctgccagcggctcttcatggtcctgctcctcaagggcgtacctttcaccctcaccacggtggacacgcgcaggtccccggacgtgctgaaggacttcgcccccggctcgcagctgcccatcctgctctatgacagcgacgccaagacagacacgctgcagatcgaggactttctggaggagacgctggggccgcccgacttccccagcctggcgcctcgttacagggagtccaacaccgccggcaacgacgttttccacaagttctccgcgttcatcaagaacccggtgcccgcgcaggacgaaggtgaagcggggtcagggggtcgggtgcccaggcgggagggcgccctgggcctggtcctcaccgcgccgcctgccccctagccctgtaccagcagctgctgcgcgccctcgccaggctggacagctacctgcgcgcgcccctggagcacgagctggcgggggagccgcagctgcgcgagtcccgccgccgcttcctggacggcgacaggctcacgctggccgactgcagcctcctgcccaagctgcacatcgtcgacacggtgtgcgcgcacttccgccaggcgcccatccccgcggagctgcgcggcgtacgccgctacctggacagcgcgatgcaggagaaagagttcaaatacacgtgtccgcacagcgccgagatcctggcggcctaccggcccgccgtgcacccccgctagcgccccaccccgcgtctgtcgcccaataaaggcatctttgtcggg

SEQ ID NO: 38744 - DNA, 116 bp, Homo sapiens
ctacgtcactctaaaatgttacaaataggtcatcttcttagtatgcattgccttgtaaaaacattggtcaagtcgggatgtagtcggccaccaactagaaatgtgttaagattttt

SEQ ID NO: 38745 - DNA, 159 bp, Homo sapiens
taccttcaatcatgttctgtggaatttctcatccctaccccttcacattgcattctggtccatgcctctgggctgattttcagttgctagtcatgctgggtacactctcacatcccccgcactcctccctcctgttcaggcaggatatccagcccctct

SEQ ID NO: 38746 - DNA, 313 bp, Homo sapiens
  misc_feature (13)..(13): n is a, c, g, or t
ccatgttggcagnactggtctcaaactcctgacctcaggtgatccgcccacttcggcctcccaaagtgctgggattacaggcataaaccaccaggcccagcctacttgacccattgttaaccagcttgcttaaccaatcttggctagaaagaccttttttcccctgtgaaggcaactttgttagatgattatcagtttcacaatgagaagacccagatgaaggaggagcctcaatactgattgatttcctaaaacatgttcctaaaacagcccaggaccaaagaacccaagtattaactggaaggattccaac

SEQ ID NO: 38747 - DNA, 322 bp, Homo sapiens
taccagtggaggtacaaaataaaaaaaaaaaaaaagaccacagaataaatgaagatgaaggttgtattagaactagacatgaagacttttttttgcatctgaaatcaaagcagtggcttttgagataaattttaaatttatctaaattatgcaggattccttcaagataaatattgtttactaggagttgacaatgttggaaacatagatggatatagtattaaaatcttacaaatgtttgtgttataagacttaaaatatggtaagtatataactgtggctaatgatttagaatactcatagccagcctttaactttattg

SEQ ID NO: 38748 - DNA, 441 bp, Homo sapiens
gtatccatgtctgttctatgattttaactgaaattagtactgtgccacttaaaataataattgtgggtagtttggggtaaatttagtttatgtctttaatttccttttcttactattattagctagtacttcagtattatgttaaataacagtgatgggtccaagcactgtggcgtaggcctatagttccagcactttgggagtctgagattggagaatctcttgaggccagatgtttgagaccagcctaggcaacgtagtgagaacttgtctctacaaaaaacacaaaaatttagcttgtgcagtggcatgtgcctatagtcctgcctacttgggagactgaggtgggagagtcacttgagcccaaaaggttgaggctgcaatgaactgtgctagtgccaccccactccagcctgggtacagagtcagaccctgtttcaa

SEQ ID NO: 38749 - DNA, 515 bp, Homo sapiens
tttgtcaaaaactatgcaagccagaaggcaatggtacaacatagtactaaaagtgccaaaagtagccgggcacagtggtttacaactgtaatcccaacactttaggaggctgagccaccacgcctggccacataaaaattatttttttttaatttaagaaaaattattttgaggaatatcaataaatttgataacatactgcaacactgaaagcataggaaaccagatactctcatacatttccaggatgaatgtaaattagtacaatctttatgacaggcaattttacgttatctgttaaaatttaaatgcctatattctttgacatagtaatgtgttccagtaaacagtcactgtgtcattacactagcaaacaattggaaaactaaaggtattggaatatttcttgaggggagcgctgggaaaataaataaataaatgtatagaaatagtcaacttattaaattatgtcatattaatatattggaacagcatgcaaatgtgaaaaaaattag

SEQ ID NO: 38750 - DNA, 1311 bp, Homo sapiens
gtaagcactcaaggacagataggatccctgtagggagctacttgtaaaagatgctttgttttattagtagaggttgcttttatgggaaaagttgggggaagaggtggatggggaaggccacggttagcaaagcttacccgcgtccccattctttcagttttcttgggaatcttacagcttaggataattttcatatcacagaacaagagaagtagaaccaggtgcagtggctcacgcctgtaatcccagcactttgggaggcggagatgggcagatcacctgaggccaggagttcaggaccaccctggccaacatggcaaaaccctatctccacaaaaaaataaaaaaaattagccgggcgtggtggcaggtgcctgtaatcccagctactcaggaggctgaggcaggaaaatcacttgaacccaggaggcggaggttgcagtgagccaagattgcgccactgcactccagcctgggcgacaaagcgagtctccatctcaaaaaagaaaagacagaacaagagaagtagagggtcagttgcttctgtctcctctttacagtcttttctagaaaagtcagctttatttttgcttcatgaaggaaagaaaccaatcatttaaatttataattttgtagtaaatacctaatttttttctcaagttctggcttaaattgatactaaccaacatgcacattgttcttgagattcatctacaaaagtagcctaaaaaaaacttttgaggccggggcagtggcttgcttgtaatccctgcactgggaggctgaggtgagaggaatgcttgagcctgggagtttgagaccggcctgggcaagatagtgtgagatcctgtcccttccaaaaaaaaaaattagccgggcatggtggggagcacctatagtcccagctactcgataggctgaggcaggaggattgcttgagccaggaggctgagaaatcagacaaccatttcagggtcatagttgcatagtatagaggataaaactaatattttagcttgtagggaacaataattcaataattaattgtagatgaatattaaaaatactactttagaataattttaaagtcactttcccatccttattagtatgtttagttattggtactaattttttcatcataattattcattattaattggctaaaaaaaggaaaagatacaaatgaaaccaatagttctctatttctcaaaaatatggaaaaatatattttatggggattctttgtctaaaatgtatctttcaaaattaggagcaattcattaaaataaaatagaggccaggtgtggt

SEQ ID NO: 38751 - DNA, 356 bp, Homo sapiens
tgtgggggggtatccttatttttaaaatatctaaatgtcattatttataattcaaaataataatttttattagtgatgattttgtttgaaaatagaatgatctgataaatttttttcacttttaacctattcagtcaaaatatataaaaagctagatttgccagcagaatattgtaactactttttaatgagataaaaatgtataacaacatcactattattgtacagagaaaaaagtgaacataaaaaggaatttaaaaagacaatatgacaatatgactatcatatacatacatgaactgacagactaaaatctcctactggagattatgttaggacttgagcaaaagcttcta

SEQ ID NO: 38752 - DNA, 239 bp, Homo sapiens
tggtgtttatagttaatgttttaataagtaggctaatggcaaacataatacgcagtaatatttaagtcggaactacaaagtaagttttgtagcatgtgtccttttaagaaaaatattaatcttttgctttttaatattcatttgtatcccctaagatgtatcaatttatgataacccataaaaaacagaagtaaaccactatgggatttaaatgttttctctaccttgtccatatgaag

SEQ ID NO: 38753 - DNA, 412 bp, Homo sapiens
ttctgcagtagactctgagttcattggtgacaggtgtcatttctcatgtattctctagctccagtctctagcatagggtctgatgagtgcatggcattggaaaaatagctgtgaaaaatattgtgatctgataacagactgcagcaagatggtctagttacagcaagaggcttggggagggcttcggatgagaagggtgaagagggttcaggtgagcttccccagtgtgcatttttctgaactcttttactccaagacagtagttctcaaactttcatcttaaggccctgttacaattgtaataattattgtgaacctcaaataactttcatttaaggaggttatatctattgttttttattgtattagaaattaaggccgggcgtggtggctcacgcaagactccgtctca

SEQ ID NO: 38754 - DNA, 427 bp, Homo sapiens
actcatctaaactaagggagctgggagtaggtggccataccttggccctatgtgagtgactgtgatggaaatatcagtaggtaaccaagcttatgggtctgtgcatcagtgatccacacacaacacacatcttggctgtcggctgcagcagccatgtgtcccctgaatggggaagggcaaaaggagctatggctatgtgcctgggaggtggtcttcccaacgggatgatgatgctgtgtttcctgtctgagccttctagatgctaagtaaatgtgctcttagattaaagcctgttgcatctcaggtgactgccagttcaaacccacttctgctgctcaaccaatgcatgcgccgggcaaacggtggtgctgctgatattggaagcaggcagtggatcccagcttcaaccagggaggccttccagact

SEQ ID NO: 38755 - DNA, 461 bp, Homo sapiens
ttccatatacaataatattattatctatggtgtcaaaatcttcacagaaaaaagaaaattataatgatattcatgtgctgaatacctaccacgtgcctgtcattgggttaatcatctaaccatcacaataaccccccctgcagctagacagagatttctacctccatttaaaattgaacaggctggtcatagtgcctcacgcctgtaatcccagaactttgggaggccaaggcgggtggatcacctgaggtcaggagttcgaaacctgcctggccaacatggcgaaaccccgaatctactaaaaatacaaaaattagccaggcgcggtagtggatgcctgtaatcccagctactccggaggctgaggcaggagaattgcttgaaccgggaggcagaggttgcagtaagccaagatcgtgccactgcacgccaacctaggcgacagagcgagactctatctc

SEQ ID NO: 38756 - DNA, 193 bp, Homo sapiens
gactgatgttctcctagcaccttgttgtttaactatcagtctgggcaacagcaatcaaggtcaggttgtctaagttgttttagcagcagctgctttggttctctcgctgcaccttgaaaaaaatatttatggtatttacctgatcagaatagcctaaacataccctttggctttactgtgaacaacactgaga

SEQ ID NO: 38757 - DNA, 815 bp, Homo sapiens
acaagatctgagacttggcgagtctattgccataattggaaaggagttagggttatctcctctgaggagcattattattttccccaattatttgctggctctctcgatgagagaattctaattccccacccagtgacatctagcttggctgtgtgacttcctttgtctaatgaaatgtaaacaaaagggatggatgtcacctcaaaacagaatccttaagaaacatttttctgccatggctgtcatccctctgccatgaaagctgctgtgctagaagaggggtgcatcttcagcttgactgacagctgacgtgtaacattagcaagaaataaacccttgtagttgtaagtcacagtgatttgggaatttttgttactgcagcataacctaatttaaactgcctgataagtcactaccgtattggtcaaagtttgtgtattcatctctagaatcctgaagaagataagccttcaagctttcttagaaatcactttttctctgcactttaataatgaagatataatgtaaataaatccattactgctatttggcactattccatatatactatatatactatgtgtaccatgatcataatcgctttgtgatgaggtcaatgcatagtcagaaatttcactttgtgctgcctattcttcctcattaatgaggaaaagcagtgttccatcaacagtgttattcagttggcttttatgcttgcatggttaaatctagtagaatcttggatctaagtccgatcatcacactttggacactgtgagacagctgtagcatctgtttgtgattgagtacactct

SEQ ID NO: 38758 - DNA, 396 bp, Homo sapiens
acagccagaagtgggaaaaacacaattggaacctatgcattgcgatcctaatgcccacgcttctaatcatcctgtgagacactctcagggaggctcaaggaggccaaagaactctaccaagtcacagagctgatatttagccacctacattgttgcttccaaaatcttgctcttaaccaccagttaaggtgtgactgtaaagtaaaaatatttgtttttcacaagtggttcatttagcaccatctcgatcattgcatccacacacatgtgctccacagtgtctgtggaaggtacttagcttgatagtgtaggcagacagaaaggaggatcatggggtcatcctcaggagctatgattatttagttttgctatagtggttcctcctctcctttttgt

SEQ ID NO: 38759 - DNA, 162 bp, Homo sapiens
agtcctcaccctctagaagcctacatctgttggatgcaaaccccttcccttctctgggcctcagtttcctcacctgaacaaaaaagtgtttgctctagataaactctagggccctttctgctttttctcttttcgatactcaggatggttagggtccccagg

SEQ ID NO: 38760 - DNA, 782 bp, Homo sapiens
gtcacattatttattttgtaatttgatatctgaatattaaaaacttacactttctaatgttctataataaattctaaagtgcagatataactcccatgaatgttgacacactaagtaacagtaaaatacattaagcaaattagaactgtaagaaaaaggaaagcaacacagaataaaaacaagactcagtaggtgatctttatctagaatcagaacaattaaaataaaataatgactggagaaaaactgaagtaagtactatgtttaatgcctgtaagcaaatatacgtattttgaattgtgacatgattaaaagagaatgtatgattttcaagtgttcatacaacacattgaaaaattaagcataaactccccgaaattcttatacctaaatgtcataaaataagtaccaatcataccaactacttttctgaacataatgcaatgaaatctataaaacaactgatattttgtggctgttttttactgcatcaaaagaagactaataaagcaatgtatttaccctgtgaatgtatatgttcaaataatttatatagactgtacacataatattcttttaattttctttatatttcttcttatatatccattttctaaaatagtgagttatgcttttattcactagattttttctgtttaaatttgtttaggtattatatttgatattttattaatttccgtattgatgtttatcatttacttcttacagttttcaaatattttatgattaaaattatagatcattgttttaaggccatctta

SEQ ID NO: 38761 - DNA, 359 bp, Homo sapiens
ggagctcatccaggaggggcacatgggcaagggcaagaggctctgttggggagacctgactggacactggggctgctccacagcatagggaacacgccaagtgctgcaaaaacaaaaatgaggcaagaaaaacagcctaaacctggacagagggtgccaggacaggcaggggggcaacagtggaccgagtgacgttgctgccccgggttgagggagggcagagtgagcagggggcaggcattgcagttcaggggaccaggaccaagcagccacaggtgcacagggcaggtgggaggcaggaagaacagggggcagctcctggagctcaggggaccacgggagagcatctgaaggtgaac

SEQ ID NO: 38762 - DNA, 329 bp, Homo sapiens
aataaccataagcttgaacatcatgaatacatatagtatcagtcctatagattgtattttcaaggttttatttctttgattcttgctatctctctgatttattttgaggctaacctcatttctttaacttcctactctgtgaacccataccactttgtatttctttttcagcttacagcacttagaaattgttgatggccggtatctcttaagtaagaatagcctagggaaattttggataccagtttaattcttgaacaagacagcttggtaaggacattgtaattcacttgactaaggtgaaatttgtaaatttcaagacataacct

SEQ ID NO: 38763 - DNA, 327 bp, Homo sapiens
agtttctgtgttcaagtttgaatactcttgaagtcttatttttttcattttcagattttaaaattttcaaagaaaaggcgttgctgatgtctgaaatctcagatgcctgaaattcaattgacaattactgaacaacagtctcttatttacataaaggtggggttgtcaatcttgggctctcaggaattttctcttgtagggcactgtgtaggctaaaggttatttaaggtgatttcagaggtaggataggattactcagtggattactaccctgttgccaaaggataatgcggtaggaggtaaccccagtatcagttacgttagatt

SEQ ID NO: 38764 - DNA, 1086 bp, Homo sapiens
gggccggcactgctcacctctcgtccagggacatgacgggcacgccaggcgccgttgccacccgggatggcgaggcccccgagcgctccccgccctgcagtccgagctacgacctcacgggcaaggtgatgcttctgggagacacaggcgtcggcaaaacatgtttcctgatccaattcaaagacggggccttcctgtccggaaccttcatagccaccgtcggcatagacttcaggaacaaggtggtgactgtggatggcgtgagagtgaagctgcagatctgggacaccgctgggcaggaacggttccgaagcgtcacccatgcttattacagagatgctcaggccttgcttctgctgtatgacatcaccaacaaatcttctttcgacaacatcagggcctggctcactgagattcatgagtatgcccagagggacgtggtgatcatgctgctaggcaacaaggcggatatgagcagcgaaagagtgatccgttccgaagacggagagaccttggccagggagtacggtgttcccttcctggagaccagcgccaagactggcatgaatgtggagttagcctttctggccatcgccaaggaactgaaataccgggccgggcatcaggcggatgagcccagcttccagatccgagactatgtagagtcccagaagaagcgctccagctgctgctccttcatgtgaatcccagggggcagagaggaggctctggaggcacacaggatgcagccttccccctcccaggcctggcttattccaagaggcggtctgaattcctgactcagcacctgcggctggctccaaagtacgggaataaggagaaggccaagccaggtaaggtttatcaatcttggaggctgagtccagggcatcatcaacagctacaggtatccaccgggtagagccgaaaggaaacccaacggatagatgagtgcaagcgagaccgccctgacaggagcaagatgcacacgacgtcaaccacagcacagcgcagacaaacaacaggaagacagccgagcggcgaccccagagagcggagaagaacgacaggcagagaacaatcgaa

SEQ ID NO: 38765 - DNA, 749 bp, Homo sapiens
gggccggcactgctcacctctcgtccagggacatgacgggcacgccaggcgccgttgccacccgggatggcgaggcccccgagcgctccccgccctgcagtccgagctacgacctcacgggcaaggtgatgcttctgggagacacaggcgtcggcaaaacatgtttcctgatccaattcaaagacggggccttcctgtccggaaccttcatagccaccgtcggcatagacttcaggaacaaggtggtgactgtggatggcgtgagagtgaagctgcagatctgggacaccgctgggcaggaacggttccgaagcgtcacccatgcttattacagagatgctcaggccttgcttctgctgtatgacatcaccaacaaatcttctttcgacaacatcagggcctggctcactgagattcatgagtatgcccagagggacgtggtgatcatgctgctaggcaacaaggcggatatgagcagcgaaagagtgatccgttccgaagacggagagaccttggccagggagtacggtgttcccttcctggagaccagcgccaagactggcatgaatgtggagttagcctttctggccatcgccaagtgagagctgggcagggaagggaagtgtgcggggcagggcggcacactccaggaatccagtagggcccggcccctggcccagcccctggacacacctgcattctgcaggctgaggtccatttgctctgggagcactgggccactgggaaga

SEQ ID NO: 38766 - DNA, 3032 bp, Homo sapiens
gggccggcactgctcacctctcgtccagggacatgacgggcacgccaggcgccgttgccacccgggatggcgaggcccccgagcgctccccgccctgcagtccgagctacgacctcacgggcaaggtgatgcttctgggagacacaggcgtcggcaaaacatgtttcctgatccaattcaaagacggggccttcctgtccggaaccttcatagccaccgtcggcatagacttcaggaacaaggtggtgactgtggatggcgtgagagtgaagctgcagatctgggacaccgctgggcaggaacggttccgaagcgtcacccatgcttattacagagatgctcaggccttgcttctgctgtatgacatcaccaacaaatcttctttcgacaacatcagggcctggctcactgagattcatgagtatgcccagagggacgtggtgatcatgctgctaggcaacaaggcggatatgagcagcgaaagagtgatccgttccgaagacggagagaccttggccagggagtacggtgttcccttcctggagaccagcgccaagactggcatgaatgtggagttagcctttctggccatcgccaaggaactgaaataccgggccgggcatcaggcggatgagcccagcttccagatccgagactatgtagagtcccagaagaagcgctccagctgctgctccttcatgtgaatcccagggggcagagaggaggctctggaggcacacaggatgcagccttccccctcccaggcctggcttattccaagaggctgagccaatggggagaaagatggaggactcactgcacagccgcttcctagcagggagctatactccaactcctacttgagttcctgcggtctccccgcatccacagggagggtaaaacacttagcttttattttaatagtacataatttaataccaaaaaaggcgcctggatccccaaaaaaccgaggctgggagctagtggcccttttgctttctaggacttggggggccggccctccctcctaagcataacaaaggtggtgttgctccagctcagccccaggggacacagatgcactttgggggtgagggcaggtaatgactccatcgcaccctcagttcagctggacagaggctcaggtgaccccagccttcactgtctcccgctctccaggagcttatcttcgccccatctcccaaataagtgggcccttgtgctgtgaggaagaccaaagcctcagggaagataagagatatggagatgggagggggaggacaaggggcagagagtagggtctagctggctatctctggccttactaacacccccctggaggcatgccccttttctccagcacacaagcacattggggcacctggaaatattggttccaggctcctgttctctggacttcagatcctgggggagcccctcccccccctgaatccctggcttagctaccttcctgcctgtgcacctaaaaacctcaggtcagaactaggaaaagagttttgtttttatttttttgaaatggagtctcgttctgtcgcccaggctgaggtgcagtagtgcaatctccgctcactacaacctccactccctggggctcaagcgatcctcccacctcagccgccgaagtagctgggactataggtgtgtaccatcacacctggctaatttttgtattttttgtagacacagggtttcgccatgttgcccaggctggtcttgaattcctgagctcaagcaacctgccggcctcggcctcccaaagtactgggattacacgcagaaggcaccatgcccaggctagatgtgtcttatcccaatcctttggcaggcatgcagctccacaggcgatttcttcaagcagctgaagtgtttagccctcctgggttaagagccagataaggagaaatccctttcctaggtttggaatgtgttgtgaaaaaaaagagaaatccctggctcctggagctggtgggagacaagattaagcaaacctcccctgacatgtatccctttgaccccaagctctgcctcctccctgaccacccatgccctttcctttaacttctcaaacagataccagggcctaaactgctttacctcccctcctactgagtcaggttaggtggtgggaggtcacccatttccgagttaaaccaatgcaatatgagtaaaacaaagtcatgtgggtatgtctggggtagagagaggggtagcaagttcatgtgtcctccttggtcacatatctcccaaagctctgatccctgccatgggaagtggacaggaaacatgaggtcatgacctgcaggcatctttactgcagctctgccggcctggagggggagagggggaggaagaagtatgcgctgcacatttctgaggctactgcatttgctttcaaggcagaaatcttgctctgagcagtcagcggctccagtttgggcccgataaggaagttctccgtggcctccctcaggcagagcagggaggaggctgacattgccagtctcttctggggcccaaggcaggttgcaggagatccaatcccatagacagctctgggcctcttgcatttgagtttttcagaattaaactgcagtattttggaaagcaaaaaaaaaaaaaaacaaaaaaaaaaaaaaaaaaaaaaaaaacaaaaaaaaaaaaacactagaacacgaagcggcgggacgcgcacagagacatcgtcccgcgggggccccaaaataaacaggcgaaacgaacgtaagtaagaacaaagaggggcccccaccataaagagggcctagcacatcacactgacagcgagcgcggccggccgcgtatcacaccccgcgacgtcgagtggcaaaaacaagacacaaggatcacatgagcagagcacaccaaccaggtggagcaaacaatacggaggcaaccaccgcgagaacttcccgcgagacgaacagtaagctcccgccgatcgacacaacagcaggataccagcgcgaaatgcccgcccaccgaagacatcaacg

SEQ ID NO: 38767 - DNA, 2973 bp, Homo sapiens
gggccggcactgctcacctctcgtccagggacatgacgggcacgccaggcgccgttgccacccgggatggcgaggcccccgagcgctccccgccctgcagtccgagctacgacctcacgggcaaggtgatgcttctgggagacacaggcgtcggcaaaacatgtttcctgatccaattcaaagacggggccttcctgtccggaaccttcatagccaccgtcggcatagacttcaggaacaaggtggtgactgtggatggcgtgagagtgaagctgcagatctgggacaccgctgggcaggaacggttccgaagcgtcacccatgcttattacagagatgctcaggccttgcttctgctgtatgacatcaccaacaaatcttctttcgacaacatcagggcctggctcactgagattcatgagtatgcccagagggacgtggtgatcatgctgctaggcaacaaggcggatatgagcagcgaaagagtgatccgttccgaagacggagagaccttggccagggagtacggtgttcccttcctggagaccagcgccaagactggcatgaatgtggagttagcctttctggccatcgccaaggaactgaaataccgggccgggcatcaggcggatgagcccagcttccagatccgagactatgtagagtcccagaagaagcgctccagctgctgctccttcatgtgaatcccagggggcagagaggaggctctggaggcacacaggatgcagccttccccctcccaggcctggcttattccaagaggctgagccaatggggagaaagatggaggactcactgcacagccgcttcctagcagggagctatactccaactcctacttgagttcctgcggtctccccgcatccacagggagggtaaaacacttagcttttattttaatagtacataatttaataccaaaaaaggcgcctggatccccaaaaaaccgaggctgggagctagtggcccttttgctttctaggacttggggggccggccctccctcctaagcataacaaaggtggtgttgctccagctcagccccaggggacacagatgcactttgggggtgagggcaggtaatgactccatcgcaccctcagttcagctggacagaggctcaggtgaccccagccttcactgtctcccgctctccaggagcttatcttcgccccatctcccaaataagtgggcccttgtgctgtgaggaagaccaaagcctcagggaagataagagatatggagatgggagggggaggacaaggggcagagagtagggtctagctggctatctctggccttactaacacccccctggaggcatgccccttttctccagcacacaagcacattggggcacctggaaatattggttccaggctcctgttctctggacttcagatcctgggggagcccctcccccccctgaatccctggcttagctaccttcctgcctgtgcacctaaaaacctcaggtcagaactaggaaaagagttttgtttttatttttttgaaatggagtctcgttctgtcgcccaggctgaggtgcagtagtgcaatctccgctcactacaacctccactccctggggctcaagcgatcctcccacctcagccgccgaagtagctgggactataggtgtgtaccatcacacctggctaatttttgtattttttgtagacacagggtttcgccatgttgcccaggctggtcttgaattcctgagctcaagcaacctgccggcctcggcctcccaaagtactgggattacacgcagaaggcaccatgcccaggctagatgtgtcttatcccaatcctttggcaggcatgcagctccacaggcgatttcttcaagcagctgaagtgtttagccctcctgggttaagagccagataaggagaaatccctttcctaggtttggaatgtgttctcccctgacatgtatccctttgaccccaagctctgcctcctccctgaccacccatgccctttcctttaacttctcaaacagataccagggcctaaactgctttacctcccctcctactgagtcaggttaggtggtgggaggtcacccatttccgagttaaaccaatgcaatatgagtaaaacaaagtcatgtgggtatgtctggggtagagagaggggtagcaagttcatgtgtcctccttggtcacatatctcccaaagctctgatccctgccatgggaagtggacaggaaacatgaggtcatgacctgcaggcatctttactgcagctctgccggcctggagggggagagggggaggaagaagtatgcgctgcacatttctgaggctactgcatttgctttcaaggcagaaatcttgctctgagcagtcagcggctccagtttgggcccgataaggaagttctccgtggcctccctcaggcagagcagggaggaggctgacattgccagtctcttctggggcccaaggcaggttgcaggagatccaatcccatagacagctctgggcctcttgcatttgagtttttcagaattaaactgcagtattttggaaagcaaaaaaaaaaaaaaacaaaaaaaaaaaaaaaaaaaaaaaaaacaaaaaaaaaaaaacactagaacacgaagcggcgggacgcgcacagagacatcgtcccgcgggggccccaaaataaacaggcgaaacgaacgtaagtaagaacaaagaggggcccccaccataaagagggcctagcacatcacactgacagcgagcgcggccggccgcgtatcacaccccgcgacgtcgagtggcaaaaacaagacacaaggatcacatgagcagagcacaccaaccaggtggagcaaacaatacggaggcaaccaccgcgagaacttcccgcgagacgaacagtaagctcccgccgatcgacacaacagcaggataccagcgcgaaatgcccgcccaccgaagacatcaacg

SEQ ID NO: 38768 - DNA, 2710 bp, Homo sapiens
gggccggcactgctcacctctcgtccagggacatgacgggcacgccaggcgccgttgccacccgggatggcgaggcccccgagcgctccccgccctgcagtccgagctacgacctcacgggcaaggtgatgcttctgggagacacaggcgtcggcaaaacatgtttcctgatccaattcaaagacggggccttcctgtccggaaccttcatagccaccgtcggcatagacttcaggaacaaggtggtgactgtggatggcgtgagagtgaagctgcagatctgggacaccgctgggcaggaacggttccgaagcgtcacccatgcttattacagagatgctcaggccttgcttctgctgtatgacatcaccaacaaatcttctttcgacaacatcagggcctggctcactgagattcatgagtatgcccagagggacgtggtgatcatgctgctaggcaacaaggcggatatgagcagcgaaagagtgatccgttccgaagacggagagaccttggccagggagtacggtgttcccttcctggagaccagcgccaagactggcatgaatgtggagttagcctttctggccatcgccaaggaactgaaataccgggccgggcatcaggcggatgagcccagcttccagatccgagactatgtagagtcccagaagaagcgctccagctgctgctccttcatgtgaatcccagggggcagagaggaggctctggaggcacacaggatgcagccttccccctcccaggcctggcttattccaagaggctgagccaatggggagaaagatggaggactcactgcacagccgcttcctagcagggagctatactccaactcctacttgagttcctgcggtctccccgcatccacagggagggtaaaacacttagcttttattttaatagtacataatttaataccaaaaaaggcgcctggatccccaaaaaaccgaggctgggagctagtggcccttttgctttctaggacttggggggccggccctccctcctaagcataacaaaggtggtgttgctccagctcagccccaggggacacagatgcactttgggggtgagggcaggtaatgactccatcgcaccctcagttcagctggacagaggctcaggtgaccccagccttcactgtctcccgctctccaggagcttatcttcgccccatctcccaaataagtgggcccttgtgctgtgaggaagaccaaagcctcagggaagataagagatatggagatgggagggggaggacaaggggcagagagtagggtctagctggctatctctggccttactaacacccccctggaggcatgccccttttctccagcacacaagcacattggggcacctggaaatattggttccaggctcctgttctctggacttcagatcctgggggagcccctcccccccctgaatccctggcttagctaccttcctgcctgtgcacctaaaaacctcaggtcagaactaggaaaagagttttgtttttatttttttgaaatggagtctcgttctgtcgcccaggctgaggtgcagtagtgcaatctccgctcactacaacctccactccctggggctcaagcgatcctcccacctcagccgccgaagtagctgggactataggtgtgtaccatcacacctggctaatttttgtattttttgtagacacagggtttcgccatgttgcccaggctggtcttgaattcctgagctcaagcaacctgccggcctcggcctcccaaagtactgggattacacgcagaaggcaccatgcccaggctagatgtgtcttatcccaatcctttggcaggcatgcagctccacaggcgatttcttcaagcagctgaagtgtttagccctcctgggttaagagccagataaggagaaatccctttcctaggtttggaatgtgttctcccctgacatgtatccctttgaccccaagctctgcctcctccctgaccacccatgccctttcctttaacttctcaaacagataccaggggggaggaagaagtatgcgctgcacatttctgaggctactgcatttgctttcaaggcagaaatcttgctctgagcagtcagcggctccagtttgggcccgataaggaagttctccgtggcctccctcaggcagagcagggaggaggctgacattgccagtctcttctggggcccaaggcaggttgcaggagatccaatcccatagacagctctgggcctcttgcatttgagtttttcagaattaaactgcagtattttggaaagcaaaaaaaaaaaaaaacaaaaaaaaaaaaaaaaaaaaaaaaaacaaaaaaaaaaaaacactagaacacgaagcggcgggacgcgcacagagacatcgtcccgcgggggccccaaaataaacaggcgaaacgaacgtaagtaagaacaaagaggggcccccaccataaagagggcctagcacatcacactgacagcgagcgcggccggccgcgtatcacaccccgcgacgtcgagtggcaaaaacaagacacaaggatcacatgagcagagcacaccaaccaggtggagcaaacaatacggaggcaaccaccgcgagaacttcccgcgagacgaacagtaagctcccgccgatcgacacaacagcaggataccagcgcgaaatgcccgcccaccgaagacatcaacg

SEQ ID NO: 38769 - DNA, 2003 bp, Homo sapiens
gggccggcactgctcacctctcgtccagggacatgacgggcacgccaggcgccgttgccacccgggatggcgaggcccccgagcgctccccgccctgcagtccgagctacgacctcacgggcaaggtgatgcttctgggagacacaggcgtcggcaaaacatgtttcctgatccaattcaaagacggggccttcctgtccggaaccttcatagccaccgtcggcatagacttcaggaacaaggtggtgactgtggatggcgtgagagtgaagctgcagatctgggacaccgctgggcaggaacggttccgaagcgtcacccatgcttattacagagatgctcaggccttgcttctgctgtatgacatcaccaacaaatcttctttcgacaacatcagggcctggctcactgagattcatgagtatgcccagagggacgtggtgatcatgctgctaggcaacaaggcggatatgagcagcgaaagagtgatccgttccgaagacggagagaccttggccagggagtacggtgttcccttcctggagaccagcgccaagactggcatgaatgtggagttagcctttctggccatcgccaaggaactgaaataccgggccgggcatcaggcggatgagcccagcttccagatccgagactatgtagagtcccagaagaagcgctccagctgctgctccttcatgtgaatcccagggggcagagaggaggctctggaggcacacaggatgcagccttccccctcccaggcctggcttattccaagaggctgagccaatggggagaaagatggaggactcactgcacagccgcttcctagcagggagctatactccaactcctacttgagttcctgcggtctccccgcatccacagggagggtaaaacacttagcttttattttaatagtacataatttaataccaaaaaaggcgcctggatccccaaaaaaccgaggctgggagctagtggcccttttgctttctaggacttggggggccggccctccctcctaagcataacaaaggtggtgttgctccagctcagccccaggggacacagatgcactttgggggtgagggcaggtaatgactccatcgcaccctcagttcagctggacagaggctcaggtgaccccagccttcactgtctcccgctctccaggagcttatcttcgccccatctcccaaataagtgggcccttgtgctgtgaggaagaccaaagcctcagggaagataagagatatggagatgggagggggaggacaaggggcagagagtagggtctagctggctatctctggccttactaacacccccctggaggcatgccccttttctccagcacacaagcacattggggcacctggaaatattggttccaggctcctgttctctggacttcagatcctgggggagcccctcccccccctgaatccctggcttagctaccttcctgcctgtgcacctaaaaacctcaggtcagaactaggaaaagagttttgtttttatttttttgaaatggagtctcgttctgtcgcccaggctgaggtgcagtagtgcaatctccgctcactacaacctccactccctggggctcaagcgatcctcccacctcagccgccgaagtagctgggactataggtgtgtaccatcacacctggctaatttttgtattttttgtagacacagggtttcgccatgttgcccaggctggtcttgaattcctgagctcaagcaacctgccggcctcggcctcccaaagtactgggattacacgcagaaggcaccatgcccaggctagatgtgtcttatcccaatcctttggcagtctcttctggggcccaaggcaggttgcaggagatccaatcccatagacagctctgggcctcttgcatttgagtttttcagaattaaactgcagtattttggaaagcaaaaaaaaaaattacaactagctgagtaagtgcgatcgggggcggttggga

SEQ ID NO: 38770 - DNA, 1050 bp, Homo sapiens
  misc_feature (10)..(10): n is a, c, g, or t
  misc_feature (24)..(24): n is a, c, g, or t
  misc_feature (84)..(84): n is a, c, g, or t
  misc_feature (100)..(100): n is a, c, g, or t
  misc_feature (117)..(117): n is a, c, g, or t
  misc_feature (262)..(262): n is a, c, g, or t
  misc_feature (265)..(265): n is a, c, g, or t
  misc_feature (269)..(269): n is a, c, g, or t
ttaagtgccntaattcataaactnaatcacaggagacatccactggggtctggttttagatatccactgtatcccctgtggatnagggggtaactgctgnatcttttagtagaagcnagagcagccccatgtgggggctaacactggacactggtcagtttcagctcctcatgcaaagtgagggtatccttgtggctccagccctggggccccctgcggtcacctttggctccacagtctggttcttgaacccaagggcagncancctngtgccgaattcggcacgagctctgatccctgccatgggaagtggacaggaaacatgaggtcatgacctgcaggcatctttactgcagctctgccggcctggagggggagagggggaggaagaagtatgcgctgcacatttctgaggctactgcatttgctttcaaggcagaaatcttgctctgagcagtcagcggctccagtttgggcccgataaggaagttctccgtggcctccctcaggcagagcagggaggaggctgacattgccagtctcttctggggcccaaggcaggttgcaggagatccaatcccatagacagctctgggcctcttgcatttgagtttttcagaattaaactgcagtattttggaaagcaaaaaaaaaaaaaaacaaaaaaaaaaaaaaaaaaaaaaaaaacaaaaaaaaaaaaacactagaacacgaagcggcgggacgcgcacagagacatcgtcccgcgggggccccaaaataaacaggcgaaacgaacgtaagtaagaacaaagaggggcccccaccataaagagggcctagcacatcacactgacagcgagcgcggccggccgcgtatcacaccccgcgacgtcgagtggcaaaaacaagacacaaggatcacatgagcagagcacaccaaccaggtggagcaaacaatacggaggcaaccaccgcgagaacttcccgcgagacgaacagtaagctcccgccgatcgacacaacagcaggataccagcgcgaaatgcccgcccaccgaagacatcaacg

SEQ ID NO: 38771 - DNA, 750 bp, Homo sapiens
atcccagggtttcctgccttggtgtacgggaagagcccgctcacagcctgggcttggagaatgagtgcaaggtttattagtagaagtagctctcagcagatgggggaaccagaagggagatggttttctcctggagttgggccgcttggtggccaggctctcctccgtctgccccagccaaactccgcgtcgttgtcgttctgtcgacggcctgccggcgtgcgggtgcctatcgttgtgctcttctgctggcgtgctcctctcgacgaccagccactttcttccgccgatgtgctcctctttacgtctggccgcctgtgtgtctgcctgctagggtctcgggtttttataggcccaggatggggacatggcgggtccgggtggtcttggaaatgcaacatttggacgggaaagcaggagtgcctgtcctcacctaggtctgttggggtggagccctagtcagggacgcacctttctctacccattacttacctccccacttccgtgtcatttaaggagggcacactgttcccttcccagcactataacatgtttaaaatgttttaaaacttttttcattctctccaatatatgaattaataatccatttcagattttgaattaatgaatgtttaatgtaaaagttttgttaaattttcttttataaatttgagaataaaagcaaagaatgctgagccttcaaaaaactgtatgagaagactcattatacagagttttggaagtaggagg

SEQ ID NO: 38772 - DNA, 2419 bp, Homo sapiens
acctggccgccatgcgcctctcctcctccccacctcgtggcccgcagcagctctccagctttggctccgtggactggctctcccagagcagctgctcagggccgacccacacccccaggcctgccgacttctccctggggagcctccctggcccgggccagacatccggcgcccgggagccccctcaggccgtcagcatcaaggaggccgccgggtcctcaaatctgcctgcgccggagaggaccatggccgggttgagtaaggagccaaataccttgcgggccccccgtgtccgcacagccttcaccatggagcaggtccgcaccttggagggcgtcttccagcaccaccagtacctgagccctctggagcggaagaggctggccagggagatgcagctctcagaggtccagataaaaacctggtttcagaatcgccgcatgaaacacaaacggcaaatgcaggacccccagctgcacagccccttctcggggtctctccatgcgcccccagctttctactcaacgtcttctggccttgccaatggcctgcagctgctgtgcccttgggcacccctgtccgggccccaggctctgatgctgccccctggctccttctggggtctctgccaagtggcacaagaggccctggcatctgcgggagcttcctgctgcgggcagcctctggcgtcccacccccctaccccaggccggccttcgctgggaccagccctgtccacggggccccggggcctgtgtgctatgccacagacgggggatgcattttgaggaggcacctctgactcccacactcgcggtcttgctgatcgcacctggctcctacctggaggactcagttgttctgtttacatcctggtggcacctctcaccctgacccacacaaaggttctggagattactggagaatatatataaatatatatatgtacgtatatatgtaaatacacatatacgtatatataaatatatatatacatatatgtgtgtgtgtatatatatatatatatatattttttttttttttttttttgagacggagtgttgctctgtcacccaggctggagtgcaatgacgcaatctcggctcactgcaacctccgcctcctgggttcaagcaattctccagcctcagcctcccaagtagctaggattacagacacccgccaccacgcccggctaattttttctatttttagtagaaatggggtttcaccatgttagccaggctggtctcaaactcctgaccctgtgatccgcccgcctcggcctcccaaagtgctgggattacgggcatgagccactgcacccggccctgagaatatatttattaaagccacctcttcactgaaagttaccgaaagagtcggtttaggaaggaaacgaagggtcagtgaacagagtcaaatgcagaagtgggcttgtcatgggtagggctttcggcgtacgataaaaggatcatttgttttttaaaaggggttggaaaaactgattttccagttggaaacagtaaaggttgtaagctttgtgtgtacaaaagaaaacagggaatgcaggtgtgtttatagcgttgtggttcaagtccctcttaacaagaactccaaagctggaaagcaggagggaacaaaggtgaacatgaaggcgaggatgctggggccctgcagtgcgctctaggctgtgcgtgagccgggactgtacccacagcttgctgagggctgctcttcttgggccagggaaagcagggcagccgggacctgcggctgtgcctggactgaagctgtcccgcaggtccccaccctccaacacgtgctcacctgtccccctcctcgcagcagcctcgggacaaaacaatgactcaaggacagcacttctcgcagaaggtctggaagtgcccagaatgggaggcacggaagcccctcccggggaggactcccgcgttgatggaccgttcttggtgcagactcctgactgcgtgcatgaaacctgagacaagtgcaattccttccatgtcgccccagagtgcccaggaggcaggcagtgcggggtgcccaggcagacgggttcagcctgcagaactggaggcgacctgtgaaacccacccgggcaccccaacaggaacagaagcgtggtcctgcggctgcgtccccagcgagtttcactttccccttgctcgtttctcccttgttgtaagtgtttacaactggcatgtgcttttaaacgtcaggtaagaggggaacagctgctgtacatcgtcctggcgagtgacaatgtgacagaagcctgggcgaggccctcggagggcagcagctggacaggggctactgggtttggcctggacagcactgatttgtggatgtggatgggggcacgttgtccgtgataaaagtacaagtgccctcaccg

SEQ ID NO: 38773 - DNA, 285 bp, Homo sapiens
gatgaagcctttgggaggtgatgagggtttcatgaggtcatgagggcaggctctggtctgttaggattagtgcccttataagaagaaacagcgatcttgcttgctttctccccaccacataaggacacagcaagaaggcggctgtctctaggccgggaaaagcgccctcaccagtcaccaaccatgctggcgtccgaatctcagactgccagccttcaggactgtgagaaaacaaacgtctgtttaagtcacgaagtccacagtattttgttatggcagctcaag

SEQ ID NO: 38774 - DNA, 622 bp, Homo sapiens
gagccaccacacccagccaggatgtattcattttctacctgatgagtccctttccagagcactgtccatcatagtcctttggacatttattttcatggctgccttctcacctgtctcagcctaagaagaaggatgaagaaagctgataatgatctcttaaaggggagaaagataatggtctctttaaaggggagctgatagtggtctctttaaaggggagaaaatctggaataattctactgagtaagacatcatgaatgtatctgctacctctccccgttcttgttcaagccccaggggtgttaaaaaggagtgtgtgtgacagttacacactcctgactttacatttagattttgtcttcctttgatatcaaatgttagcacggtaatagtgcctgtgcctccagtattgagctgccacttctgttctcagcctgtttattcccctttgctcaccacttatttttattgctttgtcccttctttccatttagccctgctccacccaaatgccccactccttcactttccctgccaccttgagctttcctctagcccccaacaccaagttgaatgctcttcactgacatcatctgatgtaaaaacacagtgttgtcacaac

SEQ ID NO: 38775 - DNA, 242 bp, Homo sapiens
gtaattgctttgcttcctctacctgcctttaccaagagatgcctggccagaagagcgaggaattaaagtacctgtggaggctgcccaccgagtgaagctgcaggctgcccatcccatcgcagtagctccttagttgtcacttgcactctatcctgccacccttgtgaagaaggtgcctgcttctcctttaccttgcgccatgattgtaagttacctgtggcctccccagcaatacacaactg

SEQ ID NO: 38776 - DNA, 500 bp, Homo sapiens
agtctggctctgtttagggaaaaactctctcaagctatgtttttcctctgctctcctaataatgcaacaatcgtcaacacagaagaagacttctgtgaccaaatgtgggcagtttttcccacacaccaagcagcggacaccagctgggtgtcctccaattcaattccggcatcatctacctggagatagtgtcagatttcacaggttgggcctcagtccccaagactgctctttgctcttcagacaccagtcacaagtctgggcctccagaatttcttttttatttttatttttattttcgagatggagtctcactctgtcacccaggctggaatgcagtggcgcaatctcggctcactgcaacctccacctccgaggttcaagcaattctcttgcctcagcctcccaagtagctgagattacaggtgcatgccaccacacctggttaattttttgtatttttagtagaggcagggtttcaccatgttggccaggctggt

SEQ ID NO: 38777 - DNA, 389 bp, Homo sapiens
aagtaattcttatacttagtaagtattcaaaattttgttgaatgaataataaatgtatttatattaatttacatgagttagaatagtcaactgcctcaatgtcaggaaaaaaaatccattcattttgctaaataaaaaagatagggagaagtacacgccacctacaaactcaagagtaatgttgctttatctagcctcagggaaagtattttgaagtcaggcagtctggtttcaggccttgattacaccaccactgggctgggacttcttccttagctgaaagtacctttgggctgctagaggcaggaggcagaagtgaagaggagggaggtgtcaagtccctttaccagtctgcttcatacagagcaatctacttttatgtatttaat

SEQ ID NO: 38778 - DNA, 402 bp, Homo sapiens
tgcactccagcctgggagacacagcgagactccgactcaaaaaaaaaaaagaaaagaaaaaagtgacatttaagcaaggacttaggaaagtgaatcatgtggacatgtagggaaagaatgttttaggcagaggaaacagccattgcaaaggcctggaagcaggagctgtctgtctggcatgttgggaggaaaagtaaggaagcccatgtggctggagtagagtgagcaaggggacagtagatgagacaagagtagagaaatcatagaagtcacgattatataggatcttgtgggatgttttaaggacttgggtttcactctgagcaaaataggaaaccattaaaaatttgagaagaggtgtaatgtgatctaacatatttcagaaggtcaaccagggctagg

SEQ ID NO: 38779 - DNA, 410 bp, Homo sapiens
ctaaaagtcttaaagataaagctttacatacttgaagttactcagtcagaaaatcacaacactttatatttctttggaaggaccaattgaattacaagatcataactaaaaacagatgaattttcttacctctatgctgtaaaaatcagggactatttctttaataatggacagaaaggccatgtcttagacaaaggggaaagtgggggataagataagaaatatctcatgttccattttttaacattaggtgtatgtgtgtatgcatacatgttattttttgtgacacagatgttctctgtttacattagatttttccaaactgttagcagtcaggtgcggtgattcacacctgtaatcccagcacattgggaggccaaggccagaggctcatttgagcccataagttc

SEQ ID NO: 38780 - DNA, 104 bp, Homo sapiens
acatgtgcaaagtaactagcttagtgctaggcacatagacggggctcagtcaatttggcatattaagcattatgatctttatttttcatctccaaatatttatt

SEQ ID NO: 38781 - DNA, 725 bp, Homo sapiens
gggaaactggggagtttacccagcttaaggaactcaacattcagggcaactgctgacccttctgctcccagaactaggaaacttatatttaactggtcagaagaaggtatgcaaagtggagaacagcccctgggttaccccaattgctggccagttccagcttgatgtgtcctgtgtgtctgaatgtgtctgttctgagacatatgagtacctctatggcagcacatgcaggcaaatccagaaccaccaaaacataataatcacaaatcagaaaagatgagctgggaaacacctgacagacagtaacaaataagagggtggggcattgggctggggcctctggcctcttctctcaccaacatttctgtcctttcttgctctgtctctcaaataaatgcaatgtgcgtgtgaaaaataaagacatacaataaaaggcaaaatgtattttataactcaacattctatccttaaatacttgggaattactcttttaacaagttcagttactagcataagtgatttaacaaggaatcaagtataattggattctaagtaccttcaggtacaatttgacccaaattgttttattcagtaacagaagaaaacactgcaccttatttgtaacttgactgcattttctaggaagcagataaggtcagatacttcagaagaactatttatctgcaaggagatatccttgtaccacacagagatttagaggaatt

SEQ ID NO: 38782 - DNA, 353 bp, Homo sapiens
gatataagggggaaaaaaagcaaactgcatgctgcatgaaaaatcatagccatccaatagctaatggctatcatgttgaaagtcaagtaaatgcttccactgagccccagtcaaatgtttggggttgattatagtaagatgaaagggttagttgaaattgcaagtagatgtagcacaattgggtattaattttttttaacgtttgttgaaaatggaaaccatcattctcagcaaactgtcacaaggacaaaaaaccaaacactgcatgttctcactcataggtgggaattgaacaatgagaacacttggacacagtaaggggaacatcacacaccggggcctgttgtggggtg

SEQ ID NO: 38783 - DNA, 311 bp, Homo sapiens
acagagcctggccaccgggagacagtgggcttgcccttgtcaaccagctcactgcagctgcagacttggggttcagggacactaagaggaagactgagggaagaagagacgaggcctctgggacctcctctggaaaacgtggtccagggaccaggggcactgtcccatgctccctcccgttggctctgagcctcacatggcatgctgagtgctgggcacagaggcctcagtggcactcgggagaacgagtcaggagacacaattccgtcccacctgcccttgccccacacgtgcacctgagatgcacccca

SEQ ID NO: 38784 - DNA, 478 bp, Homo sapiens
gcatttaacagattactgcttcagtgtcatcagtggtggcactgtgatgtaaattaatagttctgcactcatgggtgttcattaatacttacagaatagttggcaatgcttgctgacagactgctctcaagtctgcctttctaatttctgggaaatagtttgtctaccatgagactctaagtccaaatcaagtatacttttgaagcaatttctaatcacagtgaaaattccccaagcagcatattttattttaaacttgctttatgtagcagcaacatatttacctgtgcctttgaaaaatatagtatcggggagtctttgaaagattattatcaaatgtaggctggacggggtggctcatgcctgtaatcccagcactttgtggaggctgaggtgagcccaagagttcaagagctgcctgggcaacacaggaagaccctgtctctacaaaataatagtaataataacaataaaaaaa

SEQ ID NO: 38785 - DNA, 456 bp, Homo sapiens
atggcaaaaagggactttgcaggtgcgattacggacctggagatggagagaatgtcaggcgttcaggggttatccaggtgggctcaatataatcatgagtccttaagagtaaaagatgaccaaagaaggtaggtcagagagatacaccatgaggagccctccacccgcttgtgctgactttgaagatggaggaaggggccacgagctgaggaatgcagtggcctctagaatctgggatcaacagctcttttacagctaccaagaaaatgagggcctcagtcctgcaatcagaggaactgaattctgtccacactgtgagcgagcaggaaatagaccctctcctaaagcttccaggaaggaacatggcctgctggcaccttggcttcagcctcgtgaaacccatgccagacttctgaccttcaggactgtcagataataaatttgtgctgtttgaag

SEQ ID NO: 38786 - DNA, 300 bp, Homo sapiens
gtcttctccttcactgatcaactgcttattttcatcagtcattgtaatagttccaggatagttcattttcagttcatattggacatgactgaagtttttccactgaagcccttgcttcgtaactcttttatattatattattgtcaacaactttatcttcctggccttttcagtcatgtaacaaagttggcatgatttttattgctttttcttgtagttaatctcaagttgccctttttttataacctctttttagacttctaacttttgattggctagtgtttgctttttaaaaaaaaa

SEQ ID NO: 38787 - DNA, 4110 bp, Homo sapiens
caccgggcagcgccgagggttgccggccggcgcgcggggagtagagggcgcgggccgcagtgccgggttccagagggagctctgcgccgggtccttccctgtggtagccccaggacacccccagcctcaacatcccattctgggactcctgccctgttcccacattcgttctacctcgagtctccaggagcttccagtggcttggtcaccgccaactctcgtccatgcctcttagagcccctttcccggcctcaccgggtgtcgcttaatagtcttgggaccttaaggagcaagtcagcccctgcggaccctcccagtgaagagaaagagctggctgtgcggtggaatttggaagagacgacgtttgggagcctttgctgagtccagggagagaggcgtcccccaccgtgccgctgcagctcgggcagagccgccaagctttggggtgctgaggaacctctaatcatctcccatggatttgtgatcagcgttgcagctctcccagcagccctggacagtggcccccagcagtcagcatgtggctgccgcgcgtctccagcacagcagtgaccgcgctcctcctggcgcagaccttcctcctcctctttctggtttcccggccagggccctcgtccccagcaggcggcgaggcgcgcgtgcatgtgctggtgctgtcctcgtggcgctcgggctcgtccttcgtgggccaactcttcaaccagcaccccgacgtcttctacctaatggagcccgcgtggcacgtgtggaccaccctgtcgcagggcagcgccgcaacgctgcacatggctgtgcgcgacctggtgcgctccgtcttcctgtgcgacatggacgtgtttgatgcctatctgccttggcgccgcaacctgtccgacctcttccagtgggccgtgagccgtgcactgtgctcgccacccgcctgcagtgcctttccccgaggcgccatcagcagcgaggccgtgtgcaagccactgtgcgcgcggcagtccttcaccctggcccgggaggcctgccgctcctacagccacgtggtgctcaaggaggtgcgcttcttcaacctgcaggtgctctacccgctgctcagcgaccccgcgctcaacctacgcatcgtgcacctggtgcgcgacccgcgggccgtgctgcgctcccgggagcagacagccaaggctctggcgcgtgacaacggcatcgtgctgggcaccaacggcacgtgggtggaggccgaccccggcctgcgcgtggtgcgcgaggtgtgccgtagccacgtacgcatcgccgaggccgccacactcaagccgccaccctttctgcgcggccgctaccgcctggtgcgcttcgaggacctggcgcgggagccgctggcagaaatccgtgcgctctacgccttcactgggctcagtctcacgccacagctcgaggcctggatccataacatcacccacggatctggacctggtgcgcgccgcgaagccttcaagacttcgtccaggaatgcgctcaacgtctcccaggcctggcgccatgcgctgccctttgccaagatccgccgcgtgcaggaactgtgcgctggtgcgctgcagctgctgggctaccggcctgtgtactctgaggacgagcagcgcaacctcgcccttgatctggtgctgccacgaggcctgaacggcttcacttgggcatcatccaccgcctcgcacccccgaaattagtggaggccacagttgtagcaggcgctaggcccgggaggagagtgcatggtgcagagggggctggggcgcacggagaagcaggtccctatattgaccaaggagtttgtggtacgacccctccccctccccaagtaggcaaggactgcacgtttctttctctcttgattcttggttttcctttgagtcctctggagctgccttctcatcaggtgcactcttcatggaaagcaactcttgcccctcctcctctgggcacagggtgtgcgttcagatgacttggctcctactcaagggctttcttcccctttaactctctccttctggtgacacatcctgcagcagctgagggggtgccctggcactggctgggagtggagaggcactgtggtgaaatggctccagaggtctgtacatcacatacatatgcacacaggcacacatggcaaaactcggaagtgaaaggacttgtctgaaatcacatggtgagaaggaggatgaagggaggagagagcttttgctctgggtctccagtggataggagaggacctgcctcctgggtgagaagggtcagattttcctattttaattgctttagggaagagcaagcagagtcatgaccagggacacagctgagagatagaggaggctgtgaatgctgagaccagagtttatcatgctggacaagcctggaaggaggcaataagtgggaaaggtaggaggagagaaggctggggagggctgggcagcaagccaggcacagtgagtggcagagcaagagggggaaagcaggatcagtgcctggaaggcaggtgtgcccgtcagcggggagtggaactcatcaggcttgccaagaggttggaagggaaatggctctgggctggaactgtcttcccttggtccttctggtccaggccttggaggaaagcagaggatgatccctgcctgtgagccacacctcctagctctgggggcaaaggggcttagtaaaggaatgctggatgtgtagagggtttagtcccgagctcaggaaatgagagcctataagtgcccagtacatgtttaaaagaagagctcatggaacctctggaaaggacagggaagttgagttagccacataaatgaacccaagtcacattggaacacagagctggtctgggaactgtgttggctgccaacagaacttctgaccctgttacctgtgaaatgaggcagtttccctcacgttgccatcagctaccaggagcgatgctggtggtcactagcttctgatcctcatcctgggtgtggccacagattgggggaacctggattgtggagtcacatcctccctgcaaagcaagcagggcaagggagatctggcattttctgctttacgtggagggagaacaggcacattagccttgaagctgaagctcattttaggttccttccaggtttagaagcttcaaccaaatgaaacttgaatctgtccctcgtgacaattataggaggaaggtatttaaaaccccagatttatgaatgtgtactacatggcttagagaatgtctttgttcttgttcaggtggttataacaaaataccttaagagtgggattacaggcatgagccactgtacctggcgaaaaacagtttgttaacacaggcagccaacatcactcaggataagcctcaatgaaaagtaacaaagtgatggcttggaacactgtcttacacagcatttttaaaaaatacaataaatttgtagagataggatgaccaaggacaacagttttaggcttccaaaggtggtaaactatgggatggtaaatatccgagaggaagctgatgcaacaggatttgtctgcagcagcctctggtaccacctctgagtcaagggttgtgtccagtgatggagagtttatatcgtgcctttaggcagaaaaggggagggaaacctgaacttttcctgcactttctgcttcttaattgccttcagctgaaaatcattttttatgtgaaaaaggcatagtctgagctgacgcctctgctttcctccacctgaagagaacctgcgtgctgctcctttgcttcggacctccgcctctgcccgggagaaagcccaggccagcctgctggacaagcagagaccatgagaaggagagttcaggggtcccaatccaggccatcctagaccagccagctccagctgatccgcacgcagccacttcggctaccttctactggccaaagggagtcccagggctcacccagattcagaggtggggaaactgagtccaccacttgagaagagtagctataaagacatatgagcgagaccagctgagcccagcactgcggccaagtcgaagactttaggagcaataaaagtgcttattgtgtttcagtca

SEQ ID NO: 38788 - DNA, 4471 bp, Homo sapiens
caccgggcagcgccgagggttgccggccggcgcgcggggagtagagggcgcgggccgcagtgccgggttccagagggagctctgcgccgggtccttccctgtggtagccccaggacacccccagcctcaacatcccattctgggactcctgccctgttcccacattcgttctacctcgagtctccaggagcttccagtggcttggtcaccgccaactctcgtccatgcctcttagagcccctttcccggcctcaccgggtgtcgcttaatagtcttgggaccttaaggagcaagtcagcccctgcggaccctcccagtgaagagaaagagctggctgtgcggtggaatttggaagagacgacgtttgggagcctttgctgagtccagggagagaggcgtcccccaccgtgccgctgcagctcgggcagagccgccaagctttggggtgctgaggaacctctaatcatctcccatggatttgtgatcagcgttgcagctctcccagcagccctggacagtggcccccagcagtcagcatgtggctgccgcgcgtctccagcacagcagtgaccgcgctcctcctggcgcagaccttcctcctcctctttctggtttcccggccagggccctcgtccccagcaggcggcgaggcgcgcgtgcatgtgctggtgctgtcctcgtggcgctcgggctcgtccttcgtgggccaactcttcaaccagcaccccgacgtcttctacctaatggagcccgcgtggcacgtgtggaccaccctgtcgcagggcagcgccgcaacgctgcacatggctgtgcgcgacctggtgcgctccgtcttcctgtgcgacatggacgtgtttgatgcctatctgccttggcgccgcaacctgtccgacctcttccagtgggccgtgagccgtgcactgtgctcgccacccgcctgcagtgcctttccccgaggcgccatcagcagcgaggccgtgtgcaagccactgtgcgcgcggcagtccttcaccctggcccgggaggcctgccgctcctacagccacgtggtgctcaaggaggtgcgcttcttcaacctgcaggtgctctacccgctgctcagcgaccccgcgctcaacctacgcatcgtgcacctggtgcgcgacccgcgggccgtgctgcgctcccgggagcagacagccaaggctctggcgcgtgacaacggcatcgtgctgggcaccaacggcacgtgggtggaggccgaccccggcctgcgcgtggtgcgcgaggtgtgccgtagccacgtacgcatcgccgaggccgccacactcaagccgccaccctttctgcgcggccgctaccgcctggtgcgcttcgaggacctggcgcgggagccgctggcagaaatccgtgcgctctacgccttcactgggctcagtctcacgccacagctcgaggcctggatccataacatcacccacggatctggacctggtgcgcgccgcgaagccttcaagacttcgtccaggaatgcgctcaacgtctcccaggcctggcgccatgcgctgccctttgccaagatccgccgcgtgcaggaactgtgcgctggtgcgctgcagctgctgggctaccggcctgtgtactctgaggacgagcagcgcaacctcgcccttgatctggtgctgccacgaggcctgaacggcttcacttgggcatcatccaccgcctcgcacccccgaaattagtggaggccacagttgtagcaggcgctaggcccgggaggagagtgcatggtgcagagggggctggggcgcacggagaagcaggtccctatattgaccaaggagtttgtggtacgacccctccccctccccaagtaggcaaggactgcacgtttctttctctcttgattcttggttttcctttgagtcctctggagctgccttctcatcaggtgcactcttcatggaaagcaactcttgcccctcctcctctgggcacagggtgtgcgttcagatgacttggctcctactcaagggctttcttcccctttaactctctccttctggtgacacatcctgcagcagctgagggggtgccctggcactggctgggagtggagaggcactgtggtgaaatggctccagaggtctgtacatcacatacatatgcacacaggcacacatggcaaaactcggaagtgaaaggacttgtctgaaatcacatggtgagaaggaggatgaagggaggagagagcttttgctctgggtctccagtggataggagaggacctgcctcctgggtgagaagggtcagattttcctattttaattgctttagggaagagcaagcagagtcatgaccagggacacagctgagagatagaggaggctgtgaatgctgagaccagagtttatcatgctggacaagcctggaaggaggcaataagtgggaaaggtaggaggagagaaggctggggagggctgggcagcaagccaggcacagtgagtggcagagcaagagggggaaagcaggatcagtgcctggaaggcaggtgtgcccgtcagcggggagtggaactcatcaggcttgccaagaggttggaagggaaatggctctgggctggaactgtcttcccttggtccttctggtccaggccttggaggaaagcagaggatgatccctgcctgtgagccacacctcctagctctgggggcaaaggggcttagtaaaggaatgctggatgtgtagagggtttagtcccgagctcaggaaatgagagcctataagtgcccagtacatgtttaaaagaagagctcatggaacctctggaaaggacagggaagttgagttagccacataaatgaacccaagtcacattggaacacagagctggtctgggaactgtgttggctgccaacagaacttctgaccctgttacctgtgaaatgaggcagtttccctcacgttgccatcagctaccaggagcgatgctggtggtcactagcttctgatcctcatcctgggtgtggccacagattgggggaacctggattgtggagtcacatcctccctgcaaagcaagcagggcaagggagatctggcattttctgctttacgtggagggagaacaggcacattagccttgaagctgaagctcattttaggttccttccaggtttagaagcttcaaccaaatgaaacttgaatctgtccctcgtgacaattataggaggaaggtatttaaaaccccagatttatgaatgtgtactacatggcttagagaatgtctttgttcttgttcaggtggttataacaaaataccttaagagtgggattacaggcatgagccactgtacctggcgaaaaacagtttgttaacacaggcagccaacatcactcaggataagcctcaatgaaaagtaacaaagtgatggcttggaacactgtcttacacagcatttttaaaaaatacaataaatttgtagagataggatgaccaaggacaacagttttaggcttccaaaggtggtaaactatgggatggtaaatatccgagaggaagctgatgcaacaggatttgtctgcagcagcctctggtaccacctctgagtcaagggttgtgtccagtgatggagagtttatatcgtgcctttaggcagaaaaggggagggaaacctgaacttttcctgcactttctgcttcttaattgccttcagctgaaaatcattttttatgtgaaaaaggcatagtctgagctgacgcctctgctttcctccacctgaagagaacctgcgtgctgctcctttgcttcggacctccgcctctgcccgggagaaagcccaggccagcctgctggacaagcagagaccatgagaaggagagttcaggggtcccaatccaggccatcctagaccagccagctccagctgatccgcacgcagccacttcggctaccttctactggccaaagggagtcccagggctcacccagattcagaggtggggaaactgagtccaccacttgagaagagtagctataaagacatatgagcgagaccagctgagcccagcactgcggccaagtcgaagactttaggagcaataaaagtgcttattgtgtttcagtcaaaaaaaaaaaaaaaaaaaaaaaaaaaaatcttggggggcgcgccgcgggccccccggaaaaacgttctccaaacacacttgggtggaggagccgccgggagcccccaaggatggtgaaggcggcaacaagcgggtcactgagctgcgggttcccacaaggagaacacccggggacacgtagcaacaaggggctaggacgtactctcccacccagtataaacaaaagccgccgcgggggggcaacacaacagcgtgttagaggacccaaacttcacaaagggaggctactacggcgagcacacaaagggagacactaccaacagggggactccacaggaacgtcaacataaaatatacgccg

SEQ ID NO: 38789 - DNA, 2515 bp, Homo sapiens
caccgggcagcgccgagggttgccggccggcgcgcggggagtagagggcgcgggccgcagtgccgggttccagagggagctctgcgccgggtccttccctgtggtagccccaggacacccccagcctcaacatcccattctgggactcctgccctgttcccacattcgttctacctcgagtctccaggagcttccagtggcttggtcaccgccaactctcgtccatgcctcttagagcccctttcccggcctcaccgggtgtcgcttaatagtcttgggaccttaaggagcaagtcagcccctgcggaccctcccagtgaagagaaagagctggctgtgcggtggaatttggaagagacgacgtttgggagcctttgctgagtccagggagagaggcgtcccccaccgtgccgctgcagctcgggcagagccgccaagctttgggttctctagggtgtgtacccaggagtggatctgctgtatcatatggtcactctattcaacctttcgagaaaccaccaaattgtttcttcaggaaatgcaccatctgacatccccattttatgaggatccccacgtctctgtcatctcaccaacacttgtgctgaggaacctctaatcatctcccatggatttgtgatcagcgttgcagctctcccagcagccctggacagtggcccccagcagtcagcatgtggctgccgcgcgtctccagcacagcagtgaccgcgctcctcctggcgcagaccttcctcctcctctttctggtttcccggccagggccctcgtccccagcaggcggcgaggcgcgcgtgcatgtgctggtgctgtcctcgtggcgctcgggctcgtccttcgtgggccaactcttcaaccagcaccccgacgtcttctacctaatggagcccgcgtggcacgtgtggaccaccctgtcgcagggcagcgccgcaacgctgcacatggctgtgcgcgacctggtgcgctccgtcttcctgtgcgacatggacgtgtttgatgcctatctgccttggcgccgcaacctgtccgacctcttccagtgggccgtgagccgtgcactgtgctcgccacccgcctgcagtgcctttccccgaggcgccatcagcagcgaggccgtgtgcaagccactgtgcgcgcggcagtccttcaccctggcccgggaggcctgccgctcctacagccacgtggtgctcaaggaggtgcgcttcttcaacctgcaggtgctctacccgctgctcagcgaccccgcgctcaacctacgcatcgtgcacctggtgcgcgacccgcgggccgtgctgcgctcccgggagcagacagccaaggctctggcgcgtgacaacggcatcgtgctgggcaccaacggcacgtgggtggaggccgaccccggcctgcgcgtggtgcgcgaggtgtgccgtagccacgtacgcatcgccgaggccgccacactcaagccgccaccctttctgcgcggccgctaccgcctggtgcgcttcgaggacctggcgcgggagccgctggcagaaatccgtgcgctctacgccttcactgggctcagtctcacgccacagctcgaggcctggatccataacatcacccacggatctggacctggtgcgcgccgcgaagccttcaagacttcgtccaggaatgcgctcaacgtctcccaggcctggcgccatgcgctgccctttgccaagatccgccgcgtgcaggaactgtgcgctggtgcgctgcagctgctgggctaccggcctgtgtactctgaggacgagcagcgcaacctcgcccttgatctggtgctgccacgaggcctgaacggcttcacttgggcatcatccaccgcctcgcacccccgaaattagtggaggccacagttgtagcaggcgctaggcccgggaggagagtgcatggtgcagagggggctggggcgcacggagaagcaggtccctatattgaccaaggagtttgtggtacgacccctccccctccccaagtaggcaaggactgcacgtttctttctctcttgattcttggttttcctttgagtcctcatttcagggttcacttcaggggctcccaaagcgacaagatcgttagggagagaggcccagggtggggactgggaatttaaggagagctgggaacggatcccttaggttcaggaagcttctgtgcaagctgcgaggatggcttgggccgaagggttgctctgcccgccgcgctagctgtgagctgagcaaagccctgggctcacagcaccccaaaagcctgtggcttcagtcctgcgtctgcaccacccaatcaaaaggatcgttttgttttgtttttaaagaaaggtgagattggcttggttcttcatgagcacatttgatatagctctttttctgtttttccttgctcatttcgttttggggaagaaatctgtactgtattgggattgtaaagaacatctttgcactcagacagtttacagaaataaatgttttttttgtttttc

SEQ ID NO: 38790 - DNA, 3601 bp, Homo sapiens
caccgggcagcgccgagggttgccggccggcgcgcggggagtagagggcgcgggccgcagtgccgggttccagagggagctctgcgccgggtccttccctgtggtagccccaggacacccccagcctcaacatcccattctgggactcctgccctgttcccacattcgttctacctcgagtctccaggagcttccagtggcttggtcaccgccaactctcgtccatgcctcttagagcccctttcccggcctcaccgggtgtcgcttaatagtcttgggaccttaaggagcaagtcagcccctgcggaccctcccagtgaagagaaagagctggctgtgcggtggaatttggaagagacgacgtttgggagcctttgctgagtccagggagagaggcgtcccccaccgtgccgctgcagctcgggcagagccgccaagctttggggtgctgaggaacctctaatcatctcccatggatttgtgatcagcgttgcagctctcccagcagccctggacagtggcccccagcagtcagcatgtggctgccgcgcgtctccagcacagcagtgaccgcgctcctcctggcgcagaccttcctcctcctctttctggtttcccggccagggccctcgtccccagcaggcggcgaggcgcgcgtgcatgtgctggtgctgtcctcgtggcgctcgggctcgtccttcgtgggccaactcttcaaccagcaccccgacgtcttctacctaatggagcccgcgtggcacgtgtggaccaccctgtcgcagggcagcgccgcaacgctgcacatggctgtgcgcgacctggtgcgctccgtcttcctgtgcgacatggacgtgtttgatgcctatctgccttggcgccgcaacctgtccgacctcttccagtgggccgtgagccgtgcactgtgctcgccacccgcctgcagtgcctttccccgaggcgccatcagcagcgaggccgtgtgcaagccactgtgcgcgcggcagtccttcaccctggcccgggaggcctgccgctcctacagccacgtggtgctcaaggaggtgcgcttcttcaacctgcaggtgctctacccgctgctcagcgaccccgcgctcaacctacgcatcgtgcacctggtgcgcgacccgcgggccgtgctgcgctcccgggagcagacagccaaggctctggcgcgtgacaacggcatcgtgctgggcaccaacggcacgtgggtggaggccgaccccggcctgcgcgtggtgcgcgaggtgtgccgtagccacgtacgcatcgccgaggccgccacactcaagccgccaccctttctgcgcggccgctaccgcctggtgcgcttcgaggacctggcgcgggagccgctggcagaaatccgtgcgctctacgccttcactgggctcagtctcacgccacagctcgaggcctggatccataacatcacccacggatctggacctggtgcgcgccgcgaagccttcaagacttcgtccaggaatgcgctcaacgtctcccaggcctggcgccatgcgctgccctttgccaagatccgccgcgtgcaggaactgtgcgctggtgcgctgcagctgctgggctaccggcctgtgtactctgaggacgagcagcgcaacctcgcccttgatctggtgctgccacgaggcctgaacggcttcacttgggcatcatccaccgcctcgcacccccgaaattagtggaggccacagttgtagcaggcgctaggcccgggaggagagtgcatggtgcagagggggctggggcgcacggagaagcaggtccctatattgaccaaggagtttgtggtacgacccctccccctccccaagtaggcaaggactgcacgtttctttctctcttgattcttggttttcctttgagtcctctggagctgccttctcatcaggtgcactcttcatggaaagcaactcttgcccctcctcctctgggcacagggtgtgcgttcagatgacttggctcctactcaagggctttcttcccctttaactctctccttctggtgacacatcctgcagcagctgagggggtgccctggcactggctgggagtggagaggcactgtggtgaaatggctccagaggtctgtacatcacatacatatgcacacaggcacacatggcaaaactcggaagtgaaaggacttgtctgaaatcacatggtgagaaggaggatgaagggaggagagagcttttgctctgggtctccagtggataggagaggacctgcctcctgggtgagaagggtcagattttcctattttaattgctttagggaagagcaagcagagtcatgaccagggacacagctgagagatagaggaggctgtgaatgctgagaccagagtttatcatgctggacaagcctggaaggaggcaataagtgggaaaggtaggaggagagaaggctggggagggctgggcagcaagccaggcacagtgagtggcagagcaagagggggaaagcaggatcagtgcctggaaggcaggtgtgcccgtcagcggggagtggaactcatcaggcttgccaagaggttggaagggaaatggctctgggctggaactgtcttcccttggtccttctggtccaggccttggaggaaagcagaggatgatccctgcctgtgagccacacctcctagctctgggggcaaaggggcttagtaaaggaatgctggatgtgtagagggtttagtcccgagctcaggaaatgagagcctataagtgcccagtacatgtttaaaagaagagctcatggaacctctggaaaggacagggaagttgagttagccacataaatgaacccaagtcacattggaacacagagctggtctgggaactgtgttggctgccaacagaacttctgaccctgttacctgtgaaatgaggcagtttccctcacgttgccatcagctaccaggagcgatgctggtggtcactagcttctgatcctcatcctgggtgtggccacagattgggggaacctggattgtggagtcacatcctccctgcaaagcaagcagggcaagggagatctggcattttctgctttacgtggagggagaacaggcacattagccttgaagctgaagctcattttaggttccttccaggtttagaagcttcaaccaaatgaaacttgaatctgtccctcgtgacaattataggaggaaggtatttaaaaccccagatttatgaatgtgtactacatggcttagagaatgtctttgttcttgttcaggtggttataacaaaataccttaagagtgggtaacttggctggatgcagtggctcatgcctgtaatcccagcactgtgggaggccgagggggatgaatcacctgaggtcaggcattcaagaacagcctggccaacatggcgaagcccctcctctactaaaaatacaaaattagcgaggcatggtcgcacatacctgtaatcccagctcctcgggaggctgaggcaggagaatcgcttgaacccaggaggcggaggttgcagtgagccaagatcacgccattgcactccagcctgggtgacagagcaagactccatct

SEQ ID NO: 38791 - DNA, 381 bp, Homo sapiens
gtggagattagatcttaaatgagtgaatttgaatcccactaatttgtacctttgtaaaatgggttgggaatgagctgtttccttgtgaaggaaagattagttaagcaaatttctgtgtagggaagctttttctgtaatgagaataaactcttccagtgctctcaggtaagccagagccttcctttgtaggtcagttgtgcctgcttctctcactttactgtagtgtgactttagtctaaaacatgtctttagtaacaggtttctgcctttcttgagataatttggggagcttttgtttaaatgctatcaagtttgaataattttgggggaagtatttttgcttctccctggtttgcttactgatttcgctgttgaaggaga

SEQ ID NO: 38792 - DNA, 319 bp, Homo sapiens
tttccgtgggacgcagaggcggcagagaggaacgtcgatgatcctgaccctgtgcgggcctaggctcatgtctgtgtcgttgtcttcattgttatcaaaaaatgttttaagattttgaaatattaaatataaagaataggcaaaaagtttatagaatatataaacaatattttatacagctatacaatgtgttttaagccaagtactatttgacaaaagagtgaaaaagttgaaaaatgttaaagtttataaagtaaaaaagttacaataagttaaggttaacttattacgagaaaatacatttcagtacattatgtta

SEQ ID NO: 38793 - DNA, 414 bp, Homo sapiens
caggaggaggaggggcctggaaaagtgtagtgggtgccactgaaagatcctaagcaggagaggaaggtgatgtgatttaagaggacagtggctgttgtgtggaggacagatcggagagaagcaaaaggaaacgggaagacttaatggacagaggctactgtagtcctgaactgagacaagactgccttggccagtggagatggagaaaaacagtaaaagatacctgggagtagtagaaacagttaagttccagatcacgcatgcccgttgcgcggcaccctggccaaagagggacagctccccaagcgcagggactcagcttcctgtgcactgtcatgacgcactgcctgacccaggggtgcagtaagtccctgctgactggatgtctgaatgcagcacttgcagaactttgtc

SEQ ID NO: 38794 - DNA, 1412 bp, Homo sapiens
aacctccacttggctcagatctaccccctctcacccccaacactggcagtggcatctcaggaggcccctgccactgttctcaaaacgaaattttcttctgtgattcctttgtgttccgcatgcgtcattcatgagacaggcaagagccccggtttgcagagaaagaagtgaagtggtgtacccactgtcatacagaacgctgacgctctccaggtttcttcaggccagacctcatattctttttggtgaccctgccaggtcctggttcaggtagggctggggtcttacctgagggtggctgtcagtacggggcagcacagagatgtcataggcagccgtgaaggggttccgcccctcctggatcttcccataacgctcgcgcttccgccacttggctctgcggttctggaaccagacctgggggcaggttgtgggggtttgagggggtgatagggcagccctgaggaaaggagcctgctagggagagctgatggttgtgtcctcttgtgggatggggagcaggctccaggatggaggatctcaactgttaatccacactgttctccaggccagggaagcctgggaggaagcctgggagaggcccaagcccacagtgggtaattggccccatgggcctccagctgtcactccccaggttgaatcactgtggtcctccagcctggctgtgtctagtaagggtgttgtgggggcatctgtgggcctcaggggccctaggtacttcctgggtatactgtgtacatgtgttgggtttctagtctccctgcctcatctccttttccaggctacccacctcatagcatccgaggaatcttagacatttctgttcaggtcatggtcctgtttaaaccctcagtgactccctggagaccttggtccagagcatagcttcttaacaaggcccctgcctctctgcacagcctcatatcctgccaggcaaacacatttattcttctggttgcctcccaagctcccgcccagctcttctgaaacactgctatcttgctccttccatcttttgcttaggttttctcttcctgggctactcatcccctcaacacatacatccacactgggcatcctccacaggacttccaaaataccctggacctctctttgtactcaccccattccattaccatgatctgttttggaatctgtttctcccatttatttgtgagcccttggcagataggggtggcacatctgtgtgttgtgcacatctgtgtacatatctgtgatgaattcgttgtttggtatatgtgctgtgactgttacatttaactgtattggtatatatgttttgtatttctatcatttaatcaacatttatgtgtcagcctctaagctaaatttaacaatgtcaaaataaaaccaaccaaacaaaacaaaaa

SEQ ID NO: 38795 - DNA, 379 bp, Homo sapiens
acagttttgatttctcttattcagtagctcactaaatcccatcagcaattctttctcagaatacttcaataacatcagatcatcagagtaggtttttctcattaagattggaaatatatgatgtaagcaacctaaaattatcatccttctgtgaaaaacactcgataggaatttattttgtaagctggttcttgctatcccactgttacttttcagttcacatagctcagggtgcatgaaagttctgtgggaggctttttggtataatgaattttacttcatgaattttacttcatgtatacctgtaatcaaaatgagctgcttattgagatcgcaccattgctctctaccctgggcaacaacagcgaaactccatctc

SEQ ID NO: 38796 - DNA, 1080 bp, Homo sapiens
aaagtaagcacttttacacaagataaactttctgccctcaagaataaacaatcaagtgaaggaagaaatacaagtttgtggattatagcaatataattcaattttatagtgccaaataatgctatttctccctaatagtattctgcgataagagatccttggagatgttaagaggtgacaagaaaaagttaaataattttacacaatggaaagcatattctcttctcagagacattcacattgttatataaaaggctctggaaggtttgtcagaagaaacgtatattaaagtttttctaacccaacattttacaagtaatttgagcagagaacgattctctcacaacaagatcaagatgtggtggctcattaaatcagaaataaatgtattaaataatttaatttccactgaaagatgagaatacgcataaagagagaaattcgaattttaagtggacattataaaatggggaatattttgccgtagaggaatgtggatggaaaccaccaaaggtataagaaataccaagattagaaaatgctggtcaggctgggcactgtggttcattcctgtaatcccaacactgggaggccaaggagggatgatcacttgggcccggaagttcaggatcatcctggaaaatatgtcaagacttcacctctaccagaaatttacaaattagctgggcatggtagaatgtacctgtagacctagctacttaggtggaagaatcacttgagcccagcagttcaaggtgacagtgaactacgatcaggccacttgattccagtcttggcaacagggtaagaccttgtctttaaaaaaataaaaagcaaaaaataaaatgctagttatattaggaaaaagcctgactgaggtccaaatgcatgcggaagactgtttcagcaaaggtaacatccctctatgccacagcttgattgaattttaaataaagatgatgataaaatgtacatttattaaggagataattgatgtaatgtgctcagtacaagttttggcatattacaagcattcaataaaccctacatcttattatcattaaaatattaatacatatt

SEQ ID NO: 38797 - DNA, 441 bp, Homo sapiens
ggtcagaagtataattcaggatctaggttctttagcctggttatcctattggccttcaagtattagaaagctttaataaccagtttttattttccctttggttgtcttaaaactcaaccaagaaaaagcaaataaactcacttcaggaattaaagaaaaaaggaaaacaaacttcaacccacatctacacttaactctagttccttcatctctgaaaatctgttaaagatcctttttttttcctagataggtttctgttataattaatgataaaattttgttaaactgaatatcctatcctgggtcttgttgtgttgtgaattccattttttttggtggtggtggttgtgaagagccacttttaaaatccaaaaaaaggaaaaaaacacagtagtttcttttctttttcattgaataaagaaaatttacagattttcaaat

SEQ ID NO: 38798 - DNA, 427 bp, Homo sapiens
ggccgctgtctcagagatatcaggtggaagaagtttctggtccctgtgcctcaccctgcaccctgcctctgatgggctgtgtgaccttaagcaactttctcaggctctttgtgtctcagtttcttctaagaaaatgggaggtgggctgggcgcggtgctcacgcctgtaatcccagcactttgggaagccgaggtgggcggatcacctgaggtcaggagttcaagactggcctggccaacatggtgaaacccggtctctacaaaaatacgaaaattagccgggcatgatggcgggtccctgtagtcccagctacttgggaggctgaggcgggagaatcatttgaacccaggaggcagaggttgcagtgagccgaaattgggccattgcaccccagcctgggtgacagagtgagactccatctcaaaa

SEQ ID NO: 38799 - DNA, 1131 bp, Homo sapiens
gaggaaaatagagcaggtaaaagtgattgggaaacctaggcatcattgagaaggtgacatttgggcaaaatgtcacttgaagagtgagaaggagtgagccacgtatttatatctaggggaagagcatttggggcagagagaaaaccagtacaaagactctgaagcagaagcatcagacctagtatgttcaaggatcttaagaagaccagtgtagcgggagtggagtgaccagtggagagaagagtagtagataaggtcagccaggaaattgaggaggatatttaaaaggaaaaggttatttctggttattgtgttgagcatatgccatcagtagaaaccagaagaacagttaaaaagctatggcagtaagaaaggtgagaggtggtggtggcttagacaaggatgggagcagtggaggtggtttaaaaaaaaaaaaagtgatgggattctagatatatatttgaaggtgcagccagtaggactttataagtcttagtgcctgaccatttaaaaattgtgatgtttgtggccctttttcttaatacataatttaagatgacagtaggtcatcgtacttatcacgtcttttccattctcatgtttctgtacacaaggagctggcatcttctgaagaatcttatctaaactttttgggctttttttttttttagagaaaatcattagtcccattcttcttttgaatgctacttttccttctctaaaaactgaccatgaattatattctcattcatcaatttcttatttctttgtcagaaaagcagttagcattttttattattatgcaagtattcaacattcattgtaaaaaaaaaaaaaaaaccaaacaggcagaacttaaaaaaaaaaagtatacagactttttcatctatatcaggattgtctcttgcttttattttagtttctttggcaacagatgaggcaatagaacatgctaagagcttggactgaaattgacaagtttttgaatctctctaaatctcagttttctcccttgaaaacgggcatgtttaatagaacctacttcataggtttagtatgaagatttaatgagatcatgcagagaaagtacgtagcacttactagcacattgattggcacctgagaaggccc

SEQ ID NO: 38800 - DNA, 387 bp, Homo sapiens
tcagaaagcttatactcacagcagaagatgaacggtagccagcatatcacatgctgagagtgtgagcaagagagagagaaggaggtgccaggctcttttaaacatccagctctccttgtgaattaacagagtgagaactcactcattatcaaggggatggtgctaagccattcatgagggatctgccccatggacacacatctcccagtaggccacacctccaacattggggaatcacatttcaacataaaatttggaaaggacacacatgtaaaccatatcattcttcctctggatgcccaaatttcatgtccctctgacattgcaacatcatcccttctcaatagtcccccaaagtcttaattcgtttcagcattaactcaaaac

SEQ ID NO: 38801 - DNA, 455 bp, Homo sapiens
aaaaattgttcacattttcaatgcataggcaaaggcatgtcgaaatattcattatgtgtgtacagaattccctgagttagtagggctctacagagccagttagtaagtgaatgcattatgctatcaatattaggacttttttcctaaaggatgatgaaactatcatgtatgatactcaagtgatggatacacaacagcatgcatttgtcaagacccatacaatttatagcacaaaaactgactttaatatacgcaaatttaaaaaattatttgaaaggttgggagttctcagaatgaaatgcatactgtgacaaaagaatctaactgcataacatgtacaaaacaatctcactaaaaaaataaggagaaaaggttctggcttaagaaagtttgaaaatgagtggagtctgtaagactaacagcaaataaacttcatgtaagtattgaactttagt

SEQ ID NO: 38802 - DNA, 430 bp, Homo sapiens
gttcatcaaatcatttaaacattataattatatttgtaatgaaaattattaaatttacataaaaaatatcgagaaaaattctcttgcgtgttccaaagttagaaaattagcttgtggcaggcttagtttagtttcgtttacccaaacaattgtactgtttgaattcagatttttctcattactactcttagagtaagtgacttggaaaaaaagaaggaaaccagcctgggcaacatagggagaccctgtctctacaaataataaaaaaattagctgagtgtggtggcacgtacctgtagtcacagctagtttggaggctgaggtgagaagatcacttgagctaaggtgtttgagattagagtgagctatgagcatgccactgaactccggcctaggtgacagaatgagaccttgtctccccaaaaaaaaa

SEQ ID NO: 38803 - DNA, 552 bp, Homo sapiens
tcttcactttctccccagaagagtgtctttcccatctcagcaaatggtatcatcatttacctagttcctaagctagaatctcagagtcattcttgactcctgtctccctcaaaggcccacacttctactgtcaggtcctataaattctgtcttcaaaatatacctcaaattcttccactttccatctccactgccagcatccaggtgttaggctctgtcattgttcaactagactacaacatagttttcatatctattccactattaacaccctctcattcattttcaacacagttgtcagaataatcttttaaaaaaatctatgtgaagtcctccaagaacttcctactgtacttagattgaaacaaaatccacactcatgaataaagcctttaaggccctgtgtaacttttcctatcctaccttcagcttcactccaattcctctccccgcaacttttggtgttctggccaccctggccatctagttccttcaccacaccaagttcttttgctcccgcaaggcctccatatattccttctgctgggaatg

SEQ ID NO: 38804 - DNA, 424 bp, Homo sapiens
gatttatatgctggcgttgatgtaggacagcaatcaggcaatgttttctgcctttgacagttggtgtgatagtttgcttccagtgaagtttgactcactgtatctggaagctgtcagaagtgggagcatgaaaaggtcatgacggatggctgtggataagtggttaggggagggagctggtaagggagacaaactgcctcccttgtttccaagagaaggggctgaccctggctgctcccggccagcccccgtgctcttttcttccccacctgcctgagctggaaagaagcctgccgggctccagttttgagaggggcaccaggttgggtgtagtgtagctcatgagcccttcccagcagcgcaacccctggcataccactagaactgctagaagttctgttaaagaaattctgctaaaaaaaaa

SEQ ID NO: 38805 - DNA, 1677 bp, Homo sapiens
  misc_feature (1068)..(1068): n is a, c, g, or t
  misc_feature (1147)..(1147): n is a, c, g, or t
  misc_feature (1149)..(1149): n is a, c, g, or t
  misc_feature (1151)..(1151): n is a, c, g, or t
  misc_feature (1153)..(1153): n is a, c, g, or t
  misc_feature (1155)..(1155): n is a, c, g, or t
ataatatagcttaacatagatataacccccaaaggactagtcaaataagtggatgaagaggactgaaaggggctggtctagatgggtttagaatccctagaagactaacgggctgttggtccttcggtcagttttccatcaatagtgttctcagtggagggtttgatgtgaatctaggaaccaggaggtctaggttattgtcccttagaagggtagctattgggcagaccatccggccaagagacaagtaagaatgacttcagagaaagcaaaacaggttgatgaagtcgtcttcctttgccagtggttggctgggcatatacctgtgaatggggccaacagtttcctccaaacacaacctggagttgtctctacccacaggagtaattatgccccaaattctaacccccataaagccaggctgcaaaagttttcatttagaatatttaaaggtgaagctgggcatggtggctcatgcttgtaatcccagcactttgggaggctggggtgggcagatcacatgaggccaaaagttggagaccagcctggccaacatgttaaaaccctgtctctgctaaaaatacaaaaattagctgggcgtggtggtgcatgtctgtagtccactgtagtcccagctaattgagaggccgaggctcacttgaacccgggaggtggaggttgcagtgagcccaggttgtgccactgcactccagcttgggtgacagagtaagagtctgtctcaaaaaataaacaataaaaacaatatttaaagctggtttaatgacatgccgacctctgacactgagcaagtggcctctcatatatttaagatacattaagattaactgctggtcgtggtggctcatgcctgtaatcccagcattttgggaggttgaggcaggtggatcatctgaagtcaggagttcgagactagcttggccaacatggcaaaatcttgtctctactaaaaatacaaaaaattagctaggcatggtgcctttagtctcagctactcgagaagctgaggcaggaacctgggaggtggcggttgcagtgagccaagatcangccattgcactgtagcctgggcaacagagtgagactccatctctctctctctctctctctctctctctctctctctctntntntntntatatatatatatatatatatataactgtttgttttttttttttcatggctgggtcagggttggaagtgggcccaggcagctgccaactttaagatatgttgattgtaaaatgtacttcttgttaaattaatgaggtgacccagtccatcagtattttaactatgagccagtagattggttcacaagcatattaaaggccaaacctaaaaatggcttcagtctcattgcctctaggttcttgtgttcattctcgctggacacatttccatcagtgcaccctaaattaatacaacagaggatcaggttctcccacgtttgggtgcttagggactaggaaagcaagaccatggttggtttagtagcaaactgtgtggaatcatatagactacaaagagtcaaccaatattgccttgtcttcacagccagaaaacagtcgccggaaacgtagtgagtactggctaacagtactataaaaaatagtataaatactatattatattaaaatatcctatatagtatta

SEQ ID NO: 38806 - DNA, 848 bp, Homo sapiens
tgtcgcctccttctcctggtgtccatttctggaactgctatttgtatattgcatgatattttatcaggaaaaaatataaaacagatctaatttcatgaaaatgctgttgccataatgctcaggagaacagggggaagagagagattcaagtcttcctaatgtctaccttatatgcagagccttggaaagatgggcaaatgctctgtgacaagccaccagggtagactggtactgaaaagaccctactacacacaggggctctgtccctggctggaaagttacaagtcagcctacctctctgtgatctggtttccacacctactactctttatcccatgaggagcttctggaaactaaaatagcagctgcccaggtagaagagtgttgaccaaaggacacatcaccagcacagactgttaatcatgtgactagagaaaactctcatggtggcattcaaatttccatatccttcttctatggaaatttctgagagacccagaaaagaagcgtaacgacgagggaaagtgattcctgcagacctgaacattccagacttaccaggtgatccagctgtctgtcagcgggaagaggctgaggcgcccccttctggtgcatctgaatagtaagaaaccctgtgtagaaagaaaccctgtagcaattgggcaccttctccgtgatctgtctgcttccaataccaaaaattgttgctttttaaatgacatccatcctaagcttaaaaaagacgcatattatttgtataaaatgttgaagacgcagaacaaaaaatgtaaatcacatgtaatcatcccttccagaaataatcgttattaaaatttctgtgtatgtgt

SEQ ID NO: 38807 - DNA, 811 bp, Homo sapiens
tgtcgcctccttctcctggtgtccatttctggaactgctatttgtatattgcatgatattttatcaggaaaaaatataaaacagatctaatttcatgaaaatgctgttgccataatgctcaggagaacagggggaagagagagattcaagtcttcctaatgtctaccttatatgcagagccttggaaagatgggcaaatgctctgtgacaagccaccagggtagactggtactgaaaagaccctactacacacaggggctctgtccctggctggaaagttacaagtcagcctacctctctgtgatctggtttccacacctactactctttatcccatgaggagcttctggaaactaaaataggtacttcgaatttcattgttgcatcgagccagctgatttgggagttgagttcctggataggcatactatccacagtgttttaccagagtgaaatcacaggataggctcagctgtaacaaactatatcaaatctcagaagcttcaaaagactaaggtttatttctcactcatgccacccgtctactgagggtcatgcggagttctgctgagtgatgttctccatccaggatcccagccaggatcccagctggtagagcagcctccacctggaacattgcctaagatattggaagggtacaccaaggcaatggtgaagctcaaagtggctcctaatggctggccagaatcagcctttgtatctccttggccaaagcaagtctcatgaccacagctaattcccagcaggtgaagatgtgatttcttccatccagaaagacagaaagccagaa

SEQ ID NO: 38808 - DNA, 549 bp, Homo sapiens
tgtcgcctccttctcctggtgtccatttctggaactgctatttgtatattgcatgatattttatcaggaaaaaatataaaacagatctaatttcatgaaaatgctgttgccataatgctcaggagaacagggggaagagagagattcaagtcttcctaatgtctaccttatatgcaggtacattttacaagttctattgtattctgacttattaagcagtgcatatttctttcttttacattagctttcattgcagaagggtgtggggagatgagactgctggaaactgacgtgggattgatgtttatcagggctgtaggcttcagaaatatattaagcctcggaatgtcctaggtatgaaaaagataataaataacaggtcaatttattatattccctttatctctatattacctgagagagattgctatactgcagtgacactttcaagatgccccaatcctccaatctccatgcataacaatttgaaaaagggaaggttgactaaggctgggatgttcaggatcaatttctaatcagtttcaggtt

SEQ ID NO: 38809 - DNA, 241 bp, Homo sapiens
ggacactctataatctactgttcatttccttatattataaagttaactggcatctgtgtgaggaccttaagccatttacaagtacgtactgtgggaatataaggctttttttttttaagggtaagaaaactcatgtacactattttaatggtatgatttaaatgtgttcaaaaaccttgtgtttttcaaatcccttttcaaagtagccccaataagctggggagtatgtgtgtagtggcgt

SEQ ID NO: 38810 - DNA, 386 bp, Homo sapiens
tgatgtgagatgccccagtccctgtgtgtgggataagtgaggggaatggtgtaggcattgtgacatagggctaggctgctcctgagcttcctgtgatatgtcgggagggtcacgcagccatgacagtgtcggtggttgtgtgtcaggagcagatgatgtggccgactgacgggcgagccacgtttgcagccggggtacacaggacaaaggggtggcacacatccctggggggatggtgcaggatgtcatcgtgctatcagattggcatgcaatttaaaacttagggaatgcttttttctggaatgtcccatttaacgttttctgactgcagctgatttcagttaactgaaactgcagaaagtgaaaccatgggtaagtagggacag

SEQ ID NO: 38811 - DNA, 367 bp, Homo sapiens
agggctttccctttcccagtgataatcagagctctggagaggtgaggttgctggcttgtccctaccctcagatggctcttaaggcaccccttcaaactccagggacccccaggaacccagctgcacaaccactgctcaggaccacttggtccctttattcaaagggcaaaaagggtccaccaggacaggtccccaggggctgcagtaacgaagtcacagataaggctgctttgcaggcagctgggggcatgcgggtgcagaagcatgctgctgacgtgtctatgggtgcattctctcatttgccctgttcactgtattagcagtgtgcttagtagaccaagttttcatccatggagcagaagtcaac

SEQ ID NO: 38812 - DNA, 491 bp, Homo sapiens
aatgaggtcctgtctgtcctgtccgagcaaagcgtggaccagcgtatgtaggactgtgatgacaaccctggggatcttttctagcccataggattcttgatggggaaacattcctagacatacagtcctcccactgaactccacccccatccagaatctctatcaggagctaggagccggctcagtgggctgggaagggcctttcagtgccctttggacggggccctggggccttgccaagctgaacgtgtcctctgggtggcctgcctcacctctggcctgctgcccatcagcattgaatcatgcccctcagaggacagcatgtaactgtgcttcccgatatagcccccggccccccaaggtgacaggaagagtcattgtcacgggagtactccatctttctgacaccacaaggccggcgtggctttcttccctactgctcagccctgcacagcctagaattctgctttgggagcatacatagagttcac

SEQ ID NO: 38813 - DNA, 99 bp, Homo sapiens
taatgtcctgaaggagatcaggcagaggagagaagagtcagtgtgaactaggctggtggctctgtccggtagggagatggaaagggtgccgcccatcat

SEQ ID NO: 38814 - DNA, 363 bp, Homo sapiens
ttttatccagcgtagtgctggaagttctagccaaagcaatcagacaacagaaagaaataaagggcatctaaattagtaaagaggacgtcaaactgttgctgttcaccgatgatataattgtatgcctagaaaagcctaaagactcacccaaaaagctcatagatctgataaatgaattcaataaagttttaggatacaaaatcaatgtacacaaatcagtagcactgctgtacaccaacaacaagactgagaaacaaatcaagaactcaatcccttttacaacagctgcaaaaaataaaataaaatactttggaatatactgaaccaaggaggcgaaatatctctacaagaaaaactgcaaga

SEQ ID NO: 38815 - DNA, 346 bp, Homo sapiens
gaggttgtagtgagccaagatcatgccattgcactccaacctgggcaacaaaagcgaaactctgtctcagaaaaaaaaaaaaaagttttatcacttgtatacatccctttctaatattattaattcatatgctagttaattttttttttgctagttatataactagcaaaaaagtaaggatgattttgaatcttcccatactgagaggtcataaaaattcaggtccatgactgaggaacaaaattatcaagatggaacagtgatttatgggaatttgtaacacctttataccatagacatcatcaaaagagataagtctcaggctccttactatcatgccatatta

SEQ ID NO: 38816 - DNA, 375 bp, Homo sapiens
ccaggggcctccatagccgccttcaggagtgagtgcactgcggtctgagcacctggatgtagccctccacccttaccctgtgcctccctaaagcctcgtgtgtcaaatgaagtcatcattatccctacctcgtgagatgtcacaagaataaataatttaatatatgcaaggtgcttggcaccgagtgttataaaacttgatgatgatgatagtttgctatcatcatcatcatcatcaccatcatcactaccaccattcagtacatagtttcccacctttgcacttttaaaaaaggaaaacccactgccatatgtaatatgatttctttaccactttgttgaaaccaactttaaataaactcacttttaaaacgta

SEQ ID NO: 38817 - DNA, 293 bp, Homo sapiens
  misc_feature (138)..(138): n is a, c, g, or t
  misc_feature (144)..(144): n is a, c, g, or t
aacaaaacctggatttcaaaactgttttcagaaatttggtaagcttaaatcccatgccacaattgttgtttcaattaataattttgccacctattagctacgtaaaagagagattggcgctccagcaccaaagcaaangagggncatcatcatcaccatcatcactaccaccattcagtacatagtttcccacctttgcacttttaaaaaaggaaaacccactgccatatgtaatatgatttctttaccactttgttgaaaccaactttaaataaactcacttttaaaacgta

SEQ ID NO: 38818 - DNA, 573 bp, Homo sapiens
cctttttccccaacaagggggtaattgggtttctacgggagaacaatcctcttagggggttttcccttttgtgaaatgagggagtggtttgatccccacttccacaacacaaccaggaaaggggtggcatgcctaaaaatgtcattgtaaagaagatgcgatgcagtgctactgctagaagactatttgcagaaattttctaccagctaactgaaattaagcattgggccagctctagccattcatccctctggatgtgtactgttgaattagtttcccagcgtaacatagactgcagtggtctgggccagctctcaacagagtaacaaggaggcaaggtctttgggcctgccctgtccttcctgtaccccatctctcattgtcctgaatgctcagtttcaagaaccaaactatgctcactgtggatagtttgcttctgtgcatctttgaaactcattgatcagggatctccgagaggatagggactgtatctgtctattcaccctgtgcccctgccttcccccattgcaccttcctcttcagaaaaaaaaaaaattcatccaactgtttata

SEQ ID NO: 38819 - DNA, 648 bp, Homo sapiens
gtagaaagaggacctggatcctcaattgggacagattattctccacttcggtccaaagtttccccattaataaagtaagggacttaggttaaataaatgtctcatcaaatagagggtagtgggcagattttccaaagaagagataattatttgatgaagttgtaagaaccctctggatctaaagagttggctagcgatcatctactaagggaacttgattctccccaattagaatcttacagttaaagaactgacacaaagacatcaaaccccagacagttcttaaactctcttccacgacggcgttctctgatatagcaacttctgctctttcattttagacatctacaaacaacaataaacccaataaatcacattaataccctttaaaggacaatgatttctgaaatatgttgcatggagattttccactaccttcatgtctattagattatttaattagattaaataatctaatacttaactgtctattagattatttaactctctatatgatgtaggcttaaaaaaatgcaaactaattatgtttaatggtaacaatgtcttataaactttaaatcctgaagattattcaccaaattgtactcttcaaatgtttttacatgctattcctaaagacattatgcc

SEQ ID NO: 38820 - DNA, 377 bp, Homo sapiens
atggaattaggcttgaaagattcatgatgggggagggtcctgggaaaggggcctgtgctgaggttatcagggaaatcagctgtattataggaatgggaaagaggccaggaaacaggataatgagggagtgggatagcctggaggtagaatgatttataaaaaaagattagatccaaattctggctgtctttgttagagtatggaggcaggaattaattggttatgtggattgtaggtaaccattttgtggcaagatgacttaaaaggtaaggtgactcatcctaattattttttttttgctcactaattttctatgtactgtatagtcacttgcacccacagaaaaacaaggggaaagtttactcaggaaaaaaaaa

SEQ ID NO: 38821 - DNA, 1112 bp, Homo sapiens
ccattagatgacagtagcacttcttcctgcttccagttctgacaactaaaaaatatcccagacattgtaaaaacatcccctggggagcaatgctgcccctggatcctaccattctagttgaagaagttggagttaaaactccctttccagactcccttgcaactttgtttatagacacaaatccatcccaccaattgcttaggcactgccatgggacacttgggacagcaaatgtgagggaagggccatatccagcttctttggggcttctcctcttagcaagggagtgtgtgaaggaagttttttgtcttccggttctggggtcccttctccagcttccttgtggtggagatggggccacagcaacggaggtggttttggcttatccatctgcttagctccagttgtagcttcagtggaagggccttcctggagggtcacttctgtattattcaggaagccgttctgaaggtcaacctcaaaactactcttttagctcttctaacaatttttaagtaccaaattgcctttattaaatctctcccttttaaaaacatgaagaggttcgcataccctatgtggaggcccgatgaagagaacctgccagggagttatcaagtgaacaccacgtgtctcatcaggaagactcagacacgctctgaaggtgcccatgtctgagctgctgtacctgctattccctctgttcagaatgcactttcttccttttattccccatcactcaacttccagggtggtctacctacaaacacccatgtagattccaaagcccatctgatgcctgctcttctcaggggtaaagcttcctccttcttatcctcaccccctgctgtcactccttcacctgttccccgcagataacaactcctgtctctcacctacctctcttggtaactttgtcacgccccttgccacactaaatgttctaattgtttgttcctgcttgttcttactcaactgttcccagggcctagcccagagtaagaatataatgaatgatgagtggatatacaaaggaaagaatggaatcttggaatgtcattcctggttaccttacgacatttatcttgtggtccttgccctcaaagtactta

SEQ ID NO: 38822 - DNA, 1096 bp, Homo sapiens
cacatgcctcacactctcctgggggttaatacactgaatctgacaattaacaggccaagtatatacaatcaagcaacaagtcattattacccccagctcctctgagcgaaagtcaacgttaaggggctcaggtgaaccatgatgatgaccttctgttgactttgaaatattggctcttgtgggtgacaaaagccagacaagctgtggctgtggtccgattttaagacgaggttctcaaagatccaaaggagggaaagggtattggaaacactgtgtatcatctgagacacacgtgtcctcatgatcttaaatgcctactttaaagccacctaatactgcccttcattgtggtcagaagagatttctacaaaagcactcagaattctggaggcagttgtgattttgccatgtggcagttggtttgtggagttgggcaggtgtgaaagggtaaaactccacttctgaatgctgcttctgccccctgggacccagcacattgttagaccatcttcttgactggaaattctctcctgatgctgagccctgcaccaccaccttccttttcctaactatgaattgatggcaaagtccactcaaaacaaccagttaagtgctcacgagagagtagtcaagcacctccagaaagaaaccgggtttttgttcacatagcaggaagtgactccctgggtggtaatttatcttggaaacacaggtagattggcagaaaaacgggaacatgtaggtaccgcgatgttggtgcatgtccattactttgggataggctttctcagtctttcctcaaatgatagttgagccagttttccagtggcaattctgagtgacttgcgcttgtcttatggtgtggtcaagggacgttcagaactacggaaaacttttactgaaacagcgaagcagagtataccggcatgagagggaagatgaacactcacctatgtaccactctttgacaataaatatagtatttctcaaatcagtctcaagactgatcctgtctcagaacagaccattgttctctcatttctctaatacgctgagaggaacactctgaataaaggctaagtggtgaggattggaa

SEQ ID NO: 38823 - DNA, 353 bp, Homo sapiens
tttttttttttggagacagagtctcgctctgtcgcccaggctggagtgcagtggcgtgatcttggctcactgcaagctccacctcccgggttcacgccattctcctgcctcagtctcccgagcagccgggactacaggagcccaccaccacgcctggctaattttttatatttttagtagagatggggtttcaccgtgttagctgggatggtctcgatctcctgacctcgtcatccacccgcctcagcctcccaaagtgctgggattacaggcatgagccaccgcgcctggcccattgatgagtttctaaagaggagtgtgatgggatctgatttcttaaaagatccatatgg

SEQ ID NO: 38824 - DNA, 407 bp, Homo sapiens
ccctacatacctaaccttcccttacattctctcctcttctccatgaaaccactttcaggcgatttcttggaaacaacccaggcctgattctcttcaagacaatatatgagtgtgtgtgtgtatgtgtgcgtgtgtatgcgtgcatacatacatgtgtgtacatacatgtgcttctttgtcacttaaaatttgtagaaaggtgtttaaaatcaatcaataatatgccatttatctgaacgctacttcctgttcatttgatgcccataggaatttagttaaaaagataactattggctgggcgcggtggctcacacctgtaatcccagcacttcgggagaccaaggtgggcagatcatgaggtcaggagatcgagaccatcccagccaacacagtgaggagcaatcata

SEQ ID NO: 38825 - DNA, 387 bp, Homo sapiens
cggcacgaggctcactgacttcaagaatgaagccgtggaccctcacggaattcaaggtctccttgggagtctcatgtccttgccaagccttcgccaggctctcgccactgccgttcctctaccagcccaagtctacattctgaggctctaggaacacgagagagaactccagtgctcacatcccatattgaccctctttatgttcttcaattaccacctacctgaaaaagcctcaaagtctcaggggaacattctggagtccctgctgctgaagagggttttttgagttttggtcgtcttccaaagtttactgtatgaagtcttagtgcttcactggagtttgtcatatgtctggataataaataagtttcaaaaatgtaactaaca

SEQ ID NO: 38826 - DNA, 348 bp, Homo sapiens
caagcctgatttagcgctccatttctttcccttataaatcctatctttaacctcagaccattcattgtttaggaattcaaggtctccttgggagtctcatgtccttgccaagccttcgccaggctctcgccactgccgttcctctaccagcccaagtctacattctgaggctctaggaacacgagagagaactccagtgctcacatcccatattgaccctctttatgttcttcaattaccacctacctgaaaaagcctcaaagtctcaggggaacattctggagtccctgctgctgaagagggttttttgagttttggtcgtcttccaaagtttactgtatgaagtct

SEQ ID NO: 38827 - DNA, 476 bp, Homo sapiens
actcgacagatgcctcaaaatctcttactagatgagcatttaatcacttcgtatactcaatactcaaattttcaatgggtgtataataatttagctcaatagttttggggtttatttatttattattattacttttttttttttgcagagtttctgagttcagtcagggtagatcggtaactttaagaggaaaatcaggtttgatatttttatttagtgctgaataaatttattgaaccagaggtcttcctgtagtacggagaagtccacaaaataatttcgaactggttcctaccaaccttagggctggaccatgggaaggcggctggcattcaggcagttgtgaccatgctccggtgtgtggggaggaggagactgccacacaccacgtgacgcagaaaggaagtctgattatttgtctctcatatgcctgcacgcactcattcatgtctggtctttagccagtatggggtcac

SEQ ID NO: 38828 - DNA, 537 bp, Homo sapiens
gcggccgcctactactactactgctcgaattcaagcttctaacgatgtacggggacatggtgggatctctggcccctcagggacttgagattatttaagtactagttcctaacacgttctggaaaataaaaataactctgggttaaggtttaaagctgctgctgctccttctccagcctccgactggtgggctgcatatctttccttcagcaaagcaggactaattgtgtgtcccggagtcacctccctcaggttgcgggcctcaacccctccgaacctggcttccttgtcagtgacatgggttgtgtaattatcaggttagactgtgacgtgcctgatggagcctgacacataggtgctcaagaaatggtagcagcctttcccgttaagaaagttggaagggggccaggcgcggtgtctctcgcctgtaatcccagcactctgggagaccgaggcgggcggatcacttgaggtcaggagttcaagaccagcctggccagcatgcgaggccccgtctctactaaaaatacaaaaaaa

SEQ ID NO: 38829 - DNA, 1112 bp, Homo sapiens
cggccgcagtcgtcggccccatccgcgcgatgggctctgaggcggcgcagctgctggaggctgccgacttcgcggctcgcaagcaccggcagcagcggcggaaggaccccgaggggaccccctacatcaaccaccccatcggtgggcgcgtcggccgcggagcgccggctgcggcacctgggtggtggggactgggaaggaaacgtggggggcgtgcacctcattgagcacctgttttgtcccaagcttagtgcgatataccgtttaagcctcataacaattggaacggtaggcatgatcgttccctttgtcggttggctcccagagggtgtggcacggatcctgacccacgaggcgggaatcactgacattgtggtgttacaggcggccctgctccatgacacggtggaggacacagacaccaccctggatgaggtggagctacactttggggcacaagtgcggcgcctggtggaggaggtaacagatgacaagactctgcccaagctggagagaaagaggctgcaggtggagcaagcgccccacagtagccccggggccaaactggtgaagctggcagacaagctgtacaatctgagggacctgaatcgctgcaccccagagggatggtcagaacatcgagtccaggaatacttcgagtgggcagcgcaggtggtgaaggggcttcagggaacaaaccggcaactggaagaggctctaaagcatctgttcaagcagcgggggctgacaatctgatcagtgcttgaagctatccagaggcacaactccagcctcgttcaggccggacaggattcatacgccatcttttctgtgtctcctgagctccctccatccttcccagatattagaggccaaaaaaagacttgcattttttctcagtctgaaggtctcctgctaactaagctgagccccgcgtggtgggaatcagatgtacccatccatttctgatgcactcaccgcctctccccaagtcttgggtctgtttgctattttgcatggtgggatctctggcccctcagggacttgagattatttaagtactagttcctaacacgttctggaaaataaaaataactctgggttaaggttta

SEQ ID NO: 38830 - DNA, 1223 bp, Homo sapiens
cggccgcagtcgtcggccccatccgcgcgatgggctctgaggcggcgcagctgctggaggctgccgacttcgcggctcgcaagcaccggcagcagcggcggaaggaccccgaggggaccccctacatcaaccaccccatcggtgtggcacggatcctgacccacgaggcgggaatcactgacattgtggtgttacaggcggccctgctccatgacacggtggaggacacagacaccaccctggatgaggtggagctacactttggggcacaagtgcggcgcctggtggaggaggtaacagatgacaagactctgcccaagctggagagaaagaggctgcaggtggagcaagcgccccacagtagccccggggccaaactggtgaagctggcagacaagctgtacaatctgagggacctgaatcgctgcaccccagagggtacgctttcgtatgggctgtaagggaaaagggagggggatgccgccttctgaagacacatgttggtcagttcccctgaaaaaccctgggcattcttaattcccaaattaatcctactggaccactctttgatcttctttcatacagtaaaaatacaatagctgggccaaggggaagttttcaggacagctcattccatcaggaactcatggccttgaaccaagcttgccaggaagtggggaaaaggcagtgctttccttgacatcacgctagcaagtttctgtcgactcttatgcaggatggtcagaacatcgagtccaggaatacttcgagtgggcagcgcaggtggtgaaggggcttcagggaacaaaccggcaactggaagaggctctaaagcatctgttcaagcagcgggggctgacaatctgatcagtgcttgaagctatccagaggcacaactccagcctcgttcaggccggacaggattcatacgccatcttttctgtgtctcctgagctccctccatccttcccagatattagaggccaaaaaaagacttgcattttttctcagtctgaaggtctcctgctaactaagctgagccccgcgtggtgggaatcagatgtacccatccatttctgatgcactcaccgcctctccccaagtcttgggtctgtttgctattttgcatggtgggatctctggcccctcagggacttgagattatttaagtactagttcctaacacgttctggaaaataaaaataactctgggttaaggttta

SEQ ID NO: 38831 - DNA, 1608 bp, Homo sapiens
cggccgcagtcgtcggccccatccgcgcgatgggctctgaggcggcgcagctgctggaggctgccgacttcgcggctcgcaagcaccggcagcagcggcggaaggaccccgaggggaccccctacatcaaccaccccatcggtgtggcacggatcctgacccacgaggcgggaatcactgacattgtggtgttacaggcggccctgctccatgacacggtggaggacacagacaccaccctggatgaggtggagctacactttggggcacaagtgcggcgcctggtggaggaggtaacagatgacaagactctgcccaagctggagagaaagaggctgcaggtggagcaagcgccccacagtagccccggggccaaactggtgaagctggcagacaagctgtacaatctgagggacctgaatcgctgcaccccagagggtacgctttcgtatgggctgtaagggaaaagggagggggatgccgccttctgaagacacatgttggtcagttcccctgaaaaaccctgggcattcttaattcccaaattaatcctactggaccactctttgatcttctttcatacagtaaaaatacaatagctgggccaaggggaagttttcaggacagctcattccatcaggaactcatggccttgaaccaagcttgccaggaagtggggaaaaggcagtgctttccttgacatcacgctagcaagtttctgtcgactcttatgcaggatggtcagaacatcgagtccaggaatacttcgagtgggcagcgcaggtggtgaaggggcttcagggaacaaaccggcaactggaagaggctctaaagcatctgttcaagcagcgggggctgacaatctgatcagtgcttgaagctatccagaggcacaactccagcctcgttcaggccggacaggattcatacgccatcttttctgtgtctcctgagctccctccatccttcccagatattagaggccaaaaaaagacttgcattttttctcagtctgaaggtctcctgctaactaagctgagccccgcgtggtgggaatcagatgtacccatccatttctgatgcactcaccgcctctccccaagtcttgggtctgtttgctattttgcatggtgggatctctggcccctcagggacttgagattatttaagtactagttcctaacacgttctggaaaataaaaataactctgggttaaggtttaaagctgctgctgctccttctccagcctccgactggtgggctgcatatctttccttcagcaaagcaggactaattgtgtgtcccggagtcacctccctcaggttgcgggcctcaacccctccgaacctggcttccttgtcagtgacatgggttgtgtaattatcaggttagactgtgacgtgcctgatggagcctgacacataggtgctcaagaaatggtagcagcctttcccgttaagaaagttggaagggggccaggcgcggtgtctctcgcctgtaatcccagcactctgggagaccgaggcgggcggatcacttgaggtcaggagttcaagaccagcctggccagcatgcgaggccccgtctctactaaaaatacaaaaaaa

SEQ ID NO: 38832 - DNA, 860 bp, Homo sapiens
cggccgcagtcgtcggccccatccgcgcgatgggctctgaggcggcgcagctgctggaggctgccgacttcgcggctcgcaagcaccggcagcagcggcggaaggaccccgaggggaccccctacatcaaccaccccatcggtgtggcacggatcctgacccacgaggcgggaatcactgacattgtggtgttacaggcggccctgctccatgacacggtggaggacacagacaccaccctggatgaggtggagctacactttggggcacaagtgcggcgcctggtggaggaggtaacagatgacaagactctgcccaagctggagagaaagaggctgcaggtggagcaagcgccccacagtagccccggggccaaactggtgaagctggcagacaagctgtacaatctgagggacctgaatcgctgcaccccagaggatggtcagaacatcgagtccaggaataattcgagtggcatcgataaacaccatcgatgccacgaagagaaaagagaatcaggaggaacaaacatccattcaaagtctgtttaatcagagattttttttttctgaaaatgcacagtggcatttcaatcaaaaaacccttcatctgcagacctgcggaagggaggtggcctgggtcccttccctcggaatatcattagtttatttacctccttcattggccatttgcaggctcattctccttgaaaaatgaatctttacgcattctaccaattataaaatacagtgactgttagctaccaaaggctgcactaggatttcttctgtgtccaacacgaccaagagcgtaatgacgttcggttactcacggtggcatcgataaacaccggtaccgac

SEQ ID NO: 38833 - DNA, 925 bp, Homo sapiens
cggccgcagtcgtcggccccatccgcgcgatgggctctgaggcggcgcagctgctggaggctgccgacttcgcggctcgcaagcaccggcagcagcggcggaaggaccccgaggggaccccctacatcaaccaccccatcggtgtggcacggatcctgacccacgaggcgggaatcactgacattgtggtgttacaggcggccctgctccatgacacggtggaggacacagacaccaccctggatgaggtggagctacactttggggcacaagtgcggcgcctggtggaggaggtaacagatgacaagactctgcccaagctggagagaaagaggctgcaggtggagcaagcgccccacagtagccccggggccaaactggtgaagctggcagacaagctgtacaatctgagggacctgaatcgctgcaccccagagggatggtcagaacatcgagtccaggaatacttcgagtgggcagcgcaggtggtgaaggggcttcagggaacaaaccggcaactggaagaggctctaaagcatctgttcaagcagcgggggctgacaatctgatcagtgcttgaagctatccagaggcacaactccagcctcgttcaggccggacaggattcatacgccatcttttctgtgtctcctgagctccctccatccttcccagatattagaggccaaaaaaagacttgcattttttctcagtctgaaggtctcctgctaactaagctgagccccgcgtggtgggaatcagatgtacccatccatttctgatgcactcaccgcctctccccaagtcttgggtctgtttgctattttgcatggtgggatctctggcccctcagggacttgagattatttaagtactagttcctaacacgttctggaaaataaaaataactctgggttaaggttta

SEQ ID NO: 38834 - DNA, 1310 bp, Homo sapiens
cggccgcagtcgtcggccccatccgcgcgatgggctctgaggcggcgcagctgctggaggctgccgacttcgcggctcgcaagcaccggcagcagcggcggaaggaccccgaggggaccccctacatcaaccaccccatcggtgtggcacggatcctgacccacgaggcgggaatcactgacattgtggtgttacaggcggccctgctccatgacacggtggaggacacagacaccaccctggatgaggtggagctacactttggggcacaagtgcggcgcctggtggaggaggtaacagatgacaagactctgcccaagctggagagaaagaggctgcaggtggagcaagcgccccacagtagccccggggccaaactggtgaagctggcagacaagctgtacaatctgagggacctgaatcgctgcaccccagagggatggtcagaacatcgagtccaggaatacttcgagtgggcagcgcaggtggtgaaggggcttcagggaacaaaccggcaactggaagaggctctaaagcatctgttcaagcagcgggggctgacaatctgatcagtgcttgaagctatccagaggcacaactccagcctcgttcaggccggacaggattcatacgccatcttttctgtgtctcctgagctccctccatccttcccagatattagaggccaaaaaaagacttgcattttttctcagtctgaaggtctcctgctaactaagctgagccccgcgtggtgggaatcagatgtacccatccatttctgatgcactcaccgcctctccccaagtcttgggtctgtttgctattttgcatggtgggatctctggcccctcagggacttgagattatttaagtactagttcctaacacgttctggaaaataaaaataactctgggttaaggtttaaagctgctgctgctccttctccagcctccgactggtgggctgcatatctttccttcagcaaagcaggactaattgtgtgtcccggagtcacctccctcaggttgcgggcctcaacccctccgaacctggcttccttgtcagtgacatgggttgtgtaattatcaggttagactgtgacgtgcctgatggagcctgacacataggtgctcaagaaatggtagcagcctttcccgttaagaaagttggaagggggccaggcgcggtgtctctcgcctgtaatcccagcactctgggagaccgaggcgggcggatcacttgaggtcaggagttcaagaccagcctggccagcatgcgaggccccgtctctactaaaaatacaaaaaaa

SEQ ID NO: 38835 - DNA, 1076 bp, Homo sapiens
cggccgcagtcgtcggccccatccgcgcgatgggctctgaggcggcgcagctgctggaggctgccgacttcgcggctcgcaagcaccggcagcagcggcggaaggaccccgaggggaccccctacatcaaccaccccatcggtgtggcacggatcctgacccacgaggcgggaatcactgacattgtggtgttacaggcggccctgctccatgacacggtggaggacacagacaccaccctggatgaggtggagctacactttggggcacaagtgcggcgcctggtggaggaggtaacagatgacaagactctgcccaagctggagagaaagaggctgcaggtggagcaagcgccccacagtagccccggggccaaactggtgaagctggcagacaagctgtacaatctgagggacctgaatcgctgcaccccagaggtaaaaatacaatagctgggccaaggggaagttttcaggacagctcattccatcaggaactcatggccttgaaccaagcttgccaggaagtggggaaaaggcagtgctttccttgacatcacgctagcaagtttctgtcgactcttatgcaggatggtcagaacatcgagtccaggaatacttcgagtgggcagcgcaggtggtgaaggggcttcagggaacaaaccggcaactggaagaggctctaaagcatctgttcaagcagcgggggctgacaatctgatcagtgcttgaagctatccagaggcacaactccagcctcgttcaggccggacaggattcatacgccatcttttctgtgtctcctgagctccctccatccttcccagatattagaggccaaaaaaagacttgcattttttctcagtctgaaggtctcctgctaactaagctgagccccgcgtggtgggaatcagatgtacccatccatttctgatgcactcaccgcctctccccaagtcttgggtctgtttgctattttgcatggtgggatctctggcccctcagggacttgagattatttaagtactagttcctaacacgttctggaaaataaaaataactctgggttaaggttta

SEQ ID NO: 38836 - DNA, 516 bp, Homo sapiens
gcggccgcagtcgtcggccccatccgcgcgatgggctctgaggcggcgcagctgctggaggctgccgacttcgcggctcgcaagcaccggcagcagcggcggaaggaccccgaggggaccccctacatcaaccaccccatcggtgggcgcgtcggccgcggagcgccggctgcggcacctgggtggtggggactgggaaggaaacgtggggggcgtgcacctcattgagcacctgttttgtcccaagcttagtgcgatataccgtttaagcctcataacaattggaacggtaggcatgatcgttccctttgtcggttggctcccagagggtaaggtacttgaccaaggtcacccagctagtcagagtccacaaggggccacatctggctctccaaaacccacaacacaccgccttgggactacctccgacctgacttcctgctttgcccctccccgtcaggtgtggcacggatcctgacccacgaggcgggaatcactgacattgtggtgttacag

SEQ ID NO: 38837 - DNA, 530 bp, Homo sapiens
ttggctcggctgcggatcgtccctccctccggaagtgcggacattgtcagctgcgtttccgcggtcgcggttgaggagctcaagcttgggaaaatggtgtgcattccttgtatcgtcattccagttctgctctggatctacaaaaaattcctggagccatatatataccctctggtttcccccttcgttagtcgtatatggcctaagaaagcaatacaagaatccaatgatacaaacaaaggcaaagtaaactttaagggtgcagacatgaatggattaccaacaaaaggaccaacagaaatctgtgataaaaagaaagactaaagaaattttcctaaaggaccccatcatttaaaaaatggacctgataatatgaagcatcttccaggatggtgttactgcagttgaaagggcaatctgaagttactttcttaatgtgacctagcaataggcatagctacgtggcactatattctggccagactcgatgtgtactctaacttaagaaataaatcagtaaggcagaacaa

SEQ ID NO: 38838 - DNA, 446 bp, Homo sapiens
ccgctccaacatcagaatggtaacgaaacagtgtgtaccattccgacgttacaatggtggagttggcaggtgtgcgcaggccaagcaatggggctggacacaaggtcggtggcccaaaaagagtgctgaatttttgctgcacatgcttaaaaacgcagagagtaatgctgaacttaagggtttagatgtagattctctggtcattgagcatatccaagtgaacaaagcacctaagatgcgccgccggacctacagagctcatggtcggattaacccatacatgagctctccctgccacattgagatgatccttacggaaaaggaacagattgttcctaaaccagaagaggaggttgcccagaagaaaaagatatcccagaagaaactgaagaaacaaaaacttatggcacgggagtaaattcagcattaaaataaatgtaattaaa

SEQ ID NO: 38839 - DNA, 791 bp, Homo sapiens
agaacaaacaaagaaatagctagagccgctttatcggcacgagggctggctgcgatgatggcatttcttaggacacctttggattaataatgaaaacaactactctctgagcagctgttcgaatcatctgatatttatactgaatgagttactgtaagtacgtattgacagaattacactgtactttcctctagggtgatctgtgaaaatggttcgctattcacttgacccggagaaccccacgaaatcatgcaaatcaagaggttccaatcttcgtgttcactttaagaacactcgtgaaactgctcaggccatcaagggtatgcatatacgaaaagccacgaagtatctgaaagatgtcactttacagaaacagtgtgtaccattccgacgttacaatggtggagttggcaggtgtgcgcaggccaagcaatggggctggacacaaggtcggtggcccaaaaagagtgctgaatttttgctgcacatgcttaaaaacgcagagagtaatgctgaacttaagggtttagatgtagattctctggtcattgagcatatccaagtgaacaaagcacctaagatgcgccgccggacctacagagctcatggtcggattaacccatacatgagctctccctgccacattgagatgatccttacggaaaaggaacagattgttcctaaaccagaagaggaggttgcccagaagaaaaagatatcccagaagaaactgaagaaacaaaaacttatggcacgggagtaaattcagcattaaaataaatgtaattaaa

SEQ ID NO: 38840 - DNA, 1005 bp, Homo sapiens
ttggctcggctgcggatcgtccctccctccggaagtgcggacattgtcagctgcgtttccgcggtcgcggttgaggagctcaagcttgggaaaatggtgtgcattccttgtatcgtcattccagttctgctctggatctacaaaaaattcctggagccatatatataccctctggtttcccccttcgttagtcgtatatggcctaagaaagcaatacaagaatccaatgatacaaacaaaggcaaagtaaactttaagggtgcagacatgaatggattaccaacaaaaggaccaacagaaatctgtgataaaaagaaagactaaagaaattttcctaaaggaccccatcatttaaaaaatggacctgataatatgaagcatcttccttgtaattgtctctgacctttttatctgagaccggaattcaggataggagtctagatatttacctgatactaatcaggaaatatatgatatccgtatttaaaatgtagttagttatatttaatgacctcattcctaagttcctttttcgttaatgtagctttcatttctgttattgctgtttgaataatatgattaaatagaaggtttgtgccagtagacattatgttactaaatcagcactttaaaatctttggttctctaattcatatgaatttgctgtttgctctaatttctttgggctcttctaatttgagtggagtacaattttgttgtgaaacagtccagtgaaactgtgcagggaaatgaaggtagaattttgggaggtaataatgatgtgaaacataaagatttaataattactgtccaacacagtggagcagcttgtccacaaatatagtaattactatttattgctctaaggaagattaaaaaaagatagggaaaagggggaaacttctttgaaaaatgaaacatctgttacattaatgtctaattataaaattttaatccttactgcatttcttctgttcctacaaatgtattaaacattcagtttaa

SEQ ID NO: 38841 - DNA, 884 bp, Homo sapiens
  misc_feature (37)..(37): n is a, c, g, or t
  misc_feature (43)..(43): n is a, c, g, or t
ctctggatccccgatcactcagaacccggagaacccnacgaantcatgcaaatcaagaggttccaatcttcgtgttcactttaagaacactcgtgaaactgctcaggccatcaagggtatgcatatacgaaaagccacgaagtatctgaaagatgtcactttacagaaacagtgtgtaccattccgacgttacaatggtggagttggcaggtgtgcgcaggccaagcaatggggctggacacaaggtcggtggcccaaaaagagtgctgaatttttgctgcacatgcttaaaaacgcagagagtaatgctgaacttaagggtttagatgtagattctctggtcattgagcatatccaagtgaacaaagcacctaagatgcgccgccggacctacagagctcatggtcggattaacccatacatgagctctccctgccacattgagatgatccttacggaaaaggaacagattgttcctaaaccagaagaggaggttgcccagaagaaaaagatatcccagaagaaactgaagaaacaaaaacttatggcacgggagtaaattcagcattaaaataaatgtaattaaacaacagaccaaaaccagaccacacacaaaagaaaaacaccagggaaaatataatgcgaagtatgcgagaaaaagagcagtctagtaatagagacatgtgataagaatggtatcgagaaaccccacgtaaacttgttgcacaaagtgataaaacaagcgaggataacgcaaaagacgacgatatcaaatcaaacaaagcagattcaacataggaatataatgggaaaagcagaaagaagaagagatgaaactgaaaacgagcgatcatcaaataacttaggaacaaaaggaaaataac

SEQ ID NO: 38842 - DNA, 903 bp, Homo sapiens
gtggctgatctagaggatcccagaggctgaagcggctctttccctaagcagcctgagggttgactggattggtgaggcccgtgtggctacttctgtggaagcagtgctgtagttactggaagataaaagggaaagcaagcccttggtgggggaaagtatggctgcgatgatggcatttcttaggacacctttggattaataatgaaaacaactactctctgagcagctgttcgaatcatctgatatttatactgaatgagttactgtaagtacgtattgacagaattacactgtactttcctctagggtgatctgtgaaaatggttcgctattcacttgacccggagaaccccacgaaatcatgcaaatcaagaggttccaatcttcgtgttcactttaagaacactcgtgaaactgctcaggccatcaagggtatgcatatacgaaaagccacgaagtatctgaaagatgtcactttacagaaacagtgtgtaccattccgacgttacaatggtggagttggcaggtgtgcgcaggccaagcaatggggctggacacaaggtcggtggcccaaaaagagtgctgaatttttgctgcacatgcttaaaaacgcagagagtaatgctgaacttaagggtttagatgtagattctctggtcattgagcatatccaagtgaacaaagcacctaagatgcgccgccggacctacagagctcatggtcggattaacccatacatgagctctccctgccacattgagatgatccttacggaaaaggaacagattgttcctaaaccagaagaggaggttgcccagaagaaaaagatatcccagaagaaactgaagaaacaaaaacttatggcacgggagtaaattcagcattaaaataaatgtaattaaa

SEQ ID NO: 38843 - DNA, 971 bp, Homo sapiens
  misc_feature (827)..(827): n is a, c, g, or t
  misc_feature (840)..(840): n is a, c, g, or t
  misc_feature (842)..(842): n is a, c, g, or t
  misc_feature (851)..(851): n is a, c, g, or t
  misc_feature (859)..(859): n is a, c, g, or t
  misc_feature (861)..(861): n is a, c, g, or t
  misc_feature (865)..(865): n is a, c, g, or t
  misc_feature (870)..(870): n is a, c, g, or t
  misc_feature (877)..(877): n is a, c, g, or t
  misc_feature (889)..(890): n is a, c, g, or t
  misc_feature (893)..(893): n is a, c, g, or t
  misc_feature (903)..(903): n is a, c, g, or t
aaaaacattaagctagtacgaggcgcgggtgaatcggcgaggtgaggttgactggattggtgaggcccgtgtggctacttctgtggaagcagtgctgtagttactggaagataaaagggaaagcaagcccttggtgggggaaagtatggctgcgatgatggcatttcttaggacacctttggattaataatgaaaacaactactctctgagcagctgttcgaatcatctgatatttatactgaatgagttactgtaagtacgtattgacagaattacactgtactttcctctagggtgatctgtgaaaatggttcgctattcacttgacccggagaaccccacgaaatcatgcaaatcaagaggttccaatcttcgtgttcactttaagaacactcgtgaaactgctcaggccatcaagggtatgcatatacgaaaagccacgaagtatctgaaagatgtcactttacagaaacagtgtgtaccattccgacgttacaatggtggagttggcaggtgtgcgcaggccaagcaatggggctggacacaaggtcggtggcccaaaaagagtgctgaatttttgctgcacatgcttaaaaacgcagagagtaatgctgaacttaagggtttagatgtagattctctggtcattgagcatatccaagtgaacaaagcacctaagatgcgccgccggacctacagagctcatggtcggattaacccatacatgagctctccctgccacattgagatgatccttacggaaaaggaacagattgttcctaaaccagaagaggaggttgcccagaagaaaaagattccagagaantgaagaacaaaantntggccggantaatcgcntnaatnatgtnttacaanaaaaaaaccggnnctntcgggggggnaaaggttctaagggctgccacgttcgacctttgtaaaggggaatggcggccaagaggaaatgaacgcg

SEQ ID NO: 38844 - DNA, 511 bp, Homo sapiens
actgacatttaaaaccctgaatttttatttctgtatacaaaaaagagaactttgagacagtccctaagtaggcaattcgttttcacacgttcttaaaacatattccacactcccttcgctttccgccttcctgcctcctcagatctcgtttcttcggctacgaatctcgcgagaagtcaagttctcatgagttctcccaaaatccaccgctcttcctctttccctaagcagcctgagtgtttctcctgcgttgctccgagggcccaatcctcctgccatcgccgccatcctggcttcgggggcgccggcctccaggcccccgggaggagaactcctagggctactaaatcctcgctggaggcggtggcttcttatgcgggaggacgtggcggagggcctgactttgggagccgggcggcctctgaggtccgcagagggacgtgatgggcgggaatggggactaccgggctcctccactggtgggggcgccggcccgccgtggggtgcgggc

SEQ ID NO: 38845 - DNA, 833 bp, Homo sapiens
actgacatttaaaaccctgaatttttatttctgtatacaaaaaagagaactttgagacagtccctaagtaggcaattcgttttcacacgttcttaaaacatattccacactcccttcgctttccgccttcctgcctcctcagatctcgtttcttcggctacgaatctcgcgagaagtcaagttctcatgagttctcccaaaatccaccgctcttcctctttccctaagcagcctgaggtgatctgtgaaaatggttcgctattcacttgacccggagaaccccacgaaatcatgcaaatcaagaggttccaatcttcgtgttcactttaagaacactcgtgaaactgctcaggccatcaagggtatgcatatacgaaaagccacgaagtatctgaaagatgtcactttacagaaacagtgtgtaccattccgacgttacaatggtggagttggcaggtgtgcgcaggccaagcaatggggctggacacaaggtcggtggcccaaaaagagtgctgaatttttgctgcacatgcttaaaaacgcagagagtaatgctgaacttaagggtttagatgtagattctctggtcattgagcatatccaagtgaacaaagcacctaagatgcgccgccggacctacagagctcatggtcggattaacccatacatgagctctccctgccacattgagatgatccttacggaaaaggaacagattgttcctaaaccagaagaggaggttgcccagaagaaaaagatatcccagaagaaactgaagaaacaaaaacttatggcacgggagtaaattcagcattaaaataaatgtaattaaa

SEQ ID NO: 38846 - DNA, 819 bp, Homo sapiens
  misc_feature (2)..(3): n is a, c, g, or t
tnngctagtagagccggtggttgaatcggccgagggcagcctgagtgtttctcctgcgttgctccgagggcccaatcctcctgccatcgccgccatcctggcttcgggggcgccggcctccaggcccccgggaggagaactcctagggctactaaatcctcgctggaggcggtggcttcttatgcgggaggacgtggcggagggcctgactttgggagccggggtgatctgtgaaaatggttcgctattcacttgacccggagaaccccacgaaatcatgcaaatcaagaggttccaatcttcgtgttcactttaagaacactcgtgaaactgctcaggccatcaagggtatgcatatacgaaaagccacgaagtatctgaaagatgtcactttacagaaacagtgtgtaccattccgacgttacaatggtggagttggcaggtgtgcgcaggccaagcaatggggctggacacaaggtcggtggcccaaaaagagtgctgaatttttgctgcacatgcttaaaaacgcagagagtaatgctgaacttaagggtttagatgtagattctctggtcattgagcatatccaagtgaacaaagcacctaagatgcgccgccggacctacagagctcatggtcggattaacccatacatgagctctccctgccacattgagatgatccttacggaaaaggaacagattgttcctaaaccagaagaggaggttgcccagaagaaaaagatatcccagaagaaactgaagaaacaaaaacttatggcacgggagtaaattcagcattaaaataaatgtaattaaa

SEQ ID NO: 38847 - DNA, 614 bp, Homo sapiens
tttagtcacaagtttttttaattgccttgcccccaaagaatagaaataactcgacattttgaaaagctgaaaattgaaaatttaacgtttactttaaaaattaaagctttgatctagttaaccaacactttattcttcatacttagaacactcgtgaaactgctcaggccatcaagggtatgcatatacgaaaagccacgaagtatctgaaagatgtcactttacagaaacagtgtgtaccattccgacgttacaatggtggagttggcaggtgtgcgcaggccaagcaatggggctggacacaaggtcggtggcccaaaaagagtgctgaatttttgctgcacatgcttaaaaacgcagagagtaatgctgaacttaaggttacccaaaccactaacatcctgtgcaacttgggtggttgtttaattaatgttggctgttcagatttatgtccttgattttcttgttttcagtaattaactcatttaggattttttaaatttctacctgcagtttccacagaatgaaactatttccttttattttttttgagtccctttatggcaaaattctgtgaagatccagaagcgtgctctgtggtctctttaagccta

SEQ ID NO: 38848 - DNA, 988 bp, Homo sapiens
actgacatttaaaaccctgaatttttatttctgtatacaaaaaagagaactttgagacagtccctaagtaggcaattcgttttcacacgttcttaaaacatattccacactcccttcgctttccgccttcctgcctcctcagatctcgtttcttcggctacgaatctcgcgagaagtcaagttctcatgagttctcccaaaatccaccgctcttcctctttccctaagcagcctgaggtgatctgtgaaaatggttcgctattcacttgacccggagaaccccacgaaatcatgcaaatcaagaggttccaatcttcgtgttcactttaagaacactcgtgaaactgctcaggccatcaagggtatgcatatacgaaaagccacgaagtatctgaaagatgtcactttacagaaacagtgtgtaccattccgacgttacaatggtggagttggcaggtgtgcgcaggccaagcaatggggctggacacaaggtcggtggcccaaaaagagtgctgaatttttgctgcacatgcttaaaaacgcagagagtaatgctgaacttaagggtttagatgtagattctctggtcattgagcatatccaagtgaacaaagcacctaagatgcgccgccggacctacagagctcatggtcggattaacccatacatgagctctccctgccacattgagatgatccttacggaaaaggaacagattgttcctaaaccagaagaggaggttgcccagaagaaaaagatatcccagaagaaactgaagaaacaaaaacttatggcacgggagtaaattcagcattaaaataaatgtaattaaaaaaaacacgagaagaaacccgggcggatcaatgcggggggccggcaaaagcggtcccgaaagggccactggccatgctgtttccgggcccagttttctgtcccagggggaactctccggcccctaatgggggcccataatccgaaagccgttacg

SEQ ID NO: 38849 - DNA, 601 bp, Homo sapiens
tagcttgagttctttccgtatggtagcttggctctttccctaagcagcctgaggtgatctgtgaaaatggttcgctattcacttgacccggagaaccccacgaaatcatgcaaatcaagaggttccaatcttcgtgttcactttaagaacactcgtgaaactgctcaggccatcaagggtatgcatatacgaaaagccacgaagtatctgaaagatgtcactttacagaaacagtgtgtaccattccgacgttacaatggtggagttggcaggtgtgcgcaggccaagcaatggggctggacacaaggtcggtggcccaaaaagagtgctgaatttttgctgcacatgcttaaaaacgcagagagtaatgctgaacttaagggtttagatgtagattctctggtcattgagcatatccaagtgaacaaagcacctaagatgcgccgccggacctacagagctcatggtcggattaacccatacatgagctctccctgccacattgagatgatccttacggaaaaggaacagattgttcctaaaccagaagaggaggttgcccagaagaaaaagatattaacgcagagggtgaagaaacaaa

SEQ ID NO: 38850 - DNA, 658 bp, Homo sapiens
gcggccgccgactactactactactactactactaaattcgcggccgcgtcgacagcctgaggtgatctgtgaaaatggttcgctattcacttgacccggagaaccccacgaaatcatgcaaatcaagaggttccaatcttcgtgttcactttaagaacactcgtgaaactgctcaggccatcaagggtatgcatatacgaaaagccacgaagtatctgaaagatgtcactttacagaaacagtgtgtaccattccgacgttacaatggtggagttggcaggtgtgcgcaggccaagcaatggggctggacacaaggtcggtggcccaaaaagagtgctgaatttttgctgcacatgcttaaaaacgcagagagtaatgctgaacttaagggtttagatgtagattctctggtcattgagcatatccaagtgaacaaagcacctaagatgcgccgccggacctacagagctcatggtcggattaacccatacatgagctctccctgccacattgagatgatccttacggaaaaggaacagattgttcctaaaccagaagaggaggttgcccagaagaaaaagatatcccagaagaaactgaagaaacaaaaacttatggcacgggagtaaattcagcattaaaataaatgtaattaaa

SEQ ID NO: 38851 - DNA, 653 bp, Homo sapiens
gtggctgatctagaggatcccagaggctgaagcggctctttccctaagcagcctgaggtgatctgtgaaaatggttcgctattcacttgacccggagaaccccacgaaatcatgcaaatcaagaggttccaatcttcgtgttcactttaagaacactcgtgaaactgctcaggccatcaagggtatgcatatacgaaaagccacgaagtatctgaaagatgtcactttacagaaacagtgtgtaccattccgacgttacaatggtggagttggcaggtgtgcgcaggccaagcaatggggctggacacaaggtcggtggcccaaaaagagtgctgaatttttgctgcacatgcttaaaaacgcagagagtaatgctgaacttaagggtttagatgtagattctctggtcattgagcatatccaagtgaacaaagcacctaagatgcgccgccggacctacagagctcatggtcggattaacccatacatgagctctccctgccacattgagatgatccttacggaaaaggaacagattgttcctaaaccagaagaggaggttgcccagaagaaaaagatatcccagaagaaactgaagaaacaaaaacttatggcacgggagtaaattcagcattaaaataaatgtaattaaa

SEQ ID NO: 38852 - DNA, 1080 bp, Homo sapiens
gcacgcgcgatcgggaagagtggctggaagacgcgcgcgcgtcacccaaggcggagtaagggcatgcgctggaaaggactgcggccgagacgcccaggacagttacgcgaaaagagagctccggatacggcggagggcagcccgccccatcccccagagtccgagaagaaatcctggcgcctcgactttccgggcccccgctatttacacaccgaggtcaccactcccgccctggctctcgcctcgtttccgcctccaaacggggacgggctttcttgaggccagcccttcccggctgtatacacggccccagcgccccgccggctcgcttttccctgcttccctgaaagcagccgggagccgcacggcttactcaccatagtggctagggattaggaggcgaaggcgacaggagcagacaccgggtcccggttaccgtccccgacaagctaagagtcgaggtgatctgtgaaaatggttcgctattcacttgacccggagaaccccacgaaatcatgcaaatcaagaggttccaatcttcgtgttcactttaagaacactcgtgaaactgctcaggccatcaagggtatgcatatacgaaaagccacgaagtatctgaaagatgtcactttacagaaacagtgtgtaccattccgacgttacaatggtggagttggcaggtgtgcgcaggccaagcaatggggctggacacaaggtcggtggcccaaaaagagtgctgaatttttgctgcacatgcttaaaaacgcagagagtaatgctgaacttaagggtttagatgtagattctctggtcattgagcatatccaagtgaacaaagcacctaagatgcgccgccggacctacagagctcatggtcggattaacccatacatgagctctccctgccacattgagatgatccttacggaaaaggaacagattgttcctaaaccagaagaggaggttgcccagaagaaaaagatatcccagaagaaactgaagaaacaaaaacttatggcacgggagtaaattcagcattaaaataaatgtaattaaataaaaggaaaaaaaaaatggatg

SEQ ID NO: 38853 - DNA, 1750 bp, Homo sapiens
  misc_feature (2)..(3): n is a, c, g, or t
tnngctagtagagccggtggttgaatcggccgagggcagcctgagggttgactggattggtgaggcccgtgtggctacttctgtggaagcagtgctgtagttactggaagataaaagggaaagcaagcccttggtgggggaaagtatggctgcgatgatggcatttcttaggacacctttggattaataatgaaaacaactactctctgagcagctgttcgaatcatctgatatttatactgaatgagttactgtaagtacgtattgacagaattacactgtactttcctctagggtgatctgtgaaaatggttcgctattcacttgacccggagaaccccacgaaatcatgcaaatcaagaggttccaatcttcgtgttcactttaagaacactcgtgaaactgctcaggccatcaagggtatgcatatacgaaaagccacgaagtatctgaaagatgtcactttacagaaacagtgtgtaccattccgacgttacaatggtggagttggcaggtgtgcgcaggccaagcaatggggctggacacaaggtcggtggcccaaaaagagtgctgaatttttgctgcacatgcttaaaaacgcagagagtaatgctgaacttaagggtttagatgtagattctctggtcattgagcatatccaagtgaacaaagcacctaagatgcgccgccggacctacagagctcatggtcggattaacccatacatgagctctccctgccacattgagatgatccttacggaaaaggaacagattgttcctaaaccagaagaggaggttgcccagaagaaaaagttgaggagctcaagcttgggaaaatggtgtgcattccttgtatcgtcattccagttctgctctggatctacaaaaaattcctggagccatatatataccctctggtttcccccttcgttagtcgtatatggcctaagaaagcaatacaagaatccaatgatacaaacaaaggcaaagtaaactttaagggtgcagacatgaatggattaccaacaaaaggaccaacagaaatctgtgataaaaagaaagactaaagaaattttcctaaaggaccccatcatttaaaaaatggacctgataatatgaagcatcttccttgtaattgtctctgacctttttatctgagaccggaattcaggataggagtctagatatttacctgatactaatcaggaaatatatgatatccgtatttaaaatgtagttagttatatttaatgacctcattcctaagttcctttttcgttaatgtagctttcatttctgttattgctgtttgaataatatgattaaatagaaggtttgtgccagtagacattatgttactaaatcagcactttaaaatctttggttctctaattcatatgaatttgctgtttgctctaatttctttgggctcttctaatttgagtggagtacaattttgttgtgaaacagtccagtgaaactgtgcagggaaatgaaggtagaattttgggaggtaataatgatgtgaaacataaagatttaataattactgtccaacacagtggagcagcttgtccacaaatatagtaattactatttattgctctaaggaagattaaaaaaagatagggaaaagggggaaacttctttgaaaaatgaaacatctgttacattaatgtctaattataaaattttaatccttactgcatttcttctgttcctacaaatgtattaaacattcagtttaa

SEQ ID NO: 38854 - DNA, 891 bp, Homo sapiens
  misc_feature (2)..(3): n is a, c, g, or t
tnngctagtagagccggtggttgaatcggccgagggcagcctgagggttgactggattggtgaggcccgtgtggctacttctgtggaagcagtgctgtagttactggaagataaaagggaaagcaagcccttggtgggggaaagtatggctgcgatgatggcatttcttaggacacctttggattaataatgaaaacaactactctctgagcagctgttcgaatcatctgatatttatactgaatgagttactgtaagtacgtattgacagaattacactgtactttcctctagggtgatctgtgaaaatggttcgctattcacttgacccggagaaccccacgaaatcatgcaaatcaagaggttccaatcttcgtgttcactttaagaacactcgtgaaactgctcaggccatcaagggtatgcatatacgaaaagccacgaagtatctgaaagatgtcactttacagaaacagtgtgtaccattccgacgttacaatggtggagttggcaggtgtgcgcaggccaagcaatggggctggacacaaggtcggtggcccaaaaagagtgctgaatttttgctgcacatgcttaaaaacgcagagagtaatgctgaacttaagggtttagatgtagattctctggtcattgagcatatccaagtgaacaaagcacctaagatgcgccgccggacctacagagctcatggtcggattaacccatacatgagctctccctgccacattgagatgatccttacggaaaaggaacagattgttcctaaaccagaagaggaggttgcccagaagaaaaagatatcccagaagaaactgaagaaacaaaaacttatggcacgggagtaaattcagcattaaaataaatgtaattaaa

SEQ ID NO: 38855 - DNA, 1696 bp, Homo sapiens
  misc_feature (2)..(3): n is a, c, g, or t
tnngctagtagagccggtggttgaatcggccgagggcagcctgagggttgactggattggtgaggcccgtgtggctacttctgtggaagcagtgctgtagttactggaagataaaagggaaagcaagcccttggtgggggaaagtatggctgcgatgatggcatttcttaggacacctttggattaataatgaaaacaactactctctgagcagctgttcgaatcatctgatatttatactgaatgagttactgtaagtacgtattgacagaattacactgtactttcctctagggtgatctgtgaaaatggttcgctattcacttgacccggagaaccccacgaaatcatgcaaatcaagaggttccaatcttcgtgttcactttaagaacactcgtgaaactgctcaggccatcaagggtatgcatatacgaaaagccacgaagtatctgaaagatgtcactttacagaaacagtgtgtaccattccgacgttacaatggtggagttggcaggtgtgcgcaggccaagcaatggggctggacacaaggtcggtggcccaaaaagagtgctgaatttttgctgcacatgcttaaaaacgcagagagtaatgctgaacttaagggtttagatgtagattctctggtcattgagcatatccaagtgaacaaagcacctaagatgcgccgccggacctacagagctcatggtcggattaacccatacatgagctctccctgccacattgagatgatccttacggaaaaggaacagattgttcctaaaccagaagaggaggttgcccagaagaaaaagttgaggagctcaagcttgggaaaatggtgtgcattccttgtatcgtcattccagttctgctctggatctacaaaaaattcctggagccatatatataccctctggtttcccccttcgttagtcgtatatggcctaagaaagcaatacaagaatccaatgatacaaacaaaggcaaagtaaactttaagggtgcagacatgaatggattaccaacaaaaggaccaacagaaatctgtgataaaaagaaagactaaagaaattttcctaaaggaccccatcatttaaatctgagaccggaattcaggataggagtctagatatttacctgatactaatcaggaaatatatgatatccgtatttaaaatgtagttagttatatttaatgacctcattcctaagttcctttttcgttaatgtagctttcatttctgttattgctgtttgaataatatgattaaatagaaggtttgtgccagtagacattatgttactaaatcagcactttaaaatctttggttctctaattcatatgaatttgctgtttgctctaatttctttgggctcttctaatttgagtggagtacaattttgttgtgaaacagtccagtgaaactgtgcagggaaatgaaggtagaattttgggaggtaataatgatgtgaaacataaagatttaataattactgtccaacacagtggagcagcttgtccacaaatatagtaattactatttattgctctaaggaagattaaaaaaagatagggaaaagggggaaacttctttgaaaaatgaaacatctgttacattaatgtctaattataaaattttaatccttactgcatttcttctgttcctacaaatgtattaaacattcagtttaa

SEQ ID NO: 38856 - DNA, 1975 bp, Homo sapiens
  misc_feature (2)..(3): n is a, c, g, or t
  misc_feature (1707)..(1707): n is a, c, g, or t
tnngctagtagagccggtggttgaatcggccgagggcagcctgagggttgactggattggtgaggcccgtgtggctacttctgtggaagcagtgctgtagttactggaagataaaagggaaagcaagcccttggtgggggaaagtatggctgcgatgatggcatttcttaggacacctttggattaataatgaaaacaactactctctgagcagctgttcgaatcatctgatatttatactgaatgagttactgtaagtacgtattgacagaattacactgtactttcctctagggtgatctgtgaaaatggttcgctattcacttgacccggagaaccccacgaaatcatgcaaatcaagaggttccaatcttcgtgttcactttaagaacactcgtgaaactgctcaggccatcaagggtatgcatatacgaaaagccacgaagtatctgaaagatgtcactttacagaaacagtgtgtaccattccgacgttacaatggtggagttggcaggtgtgcgcaggccaagcaatggggctggacacaaggtcggtggcccaaaaagagtgctgaatttttgctgcacatgcttaaaaacgcagagagtaatgctgaacttaagggtttagatgtagattctctggtcattgagcatatccaagtgaacaaagcacctaagatgcgccgccggacctacagagctcatggtcggattaacccatacatgagctctccctgccacattgagatgatccttacggaaaaggaacagattgttcctaaaccagaagaggaggttgcccagaagaaaaagttgaggagctcaagcttgggaaaatggtgtgcattccttgtatcgtcattccagttctgctctggatctacaaaaaattcctggagccatatatataccctctggtttcccccttcgttagtcgtatatggcctaagaaagcaatacaagaatccaatgatacaaacaaaggcaaagtaaactttaagggtgcagacatgaatggattaccaacaaaaggaccaacagaaatctgtgataaaaagaaagactaaagaaattttcctaaaggaccccatcatttaaaaaatggacctgataatatgaagcatcttccttgtaattgtctctgacctttttatctgagaccggaattcaggataggagtctagatatttacctgatactaatcaggaaatatatgatatccgtatttaaaatgtagttagttatatttaatgacctcattcctaagttcctttttcgttaatgtagctttcatttctgttattgctgtttgaataatatgattaaatagaaggtttgtgccagtagacattatgttactaaatcagcactttaaaatctttggttctctaattcatatgaatttgctgtttgctctaatttctttgggctcttctaatttgagtggagtacaattttgttgtgaaacagtccagtgaaactgtgcagggaaatgaaggtagaattttgggaggtaataatgatgtgaaacataaagatttaataattactgtccaacacagtggagcagcttgtccacaaatatagtaattactatttattgctctaaggaagattaaaaaaagatagggaaaagggggaaacttctttgaaaaatgaaacatctgttacattaatgtctaattataaaattttaatcctaaanaaaagaaaaaaaaaaaaaaaaaaaaaaaaagaagcaccaggaaaacaacagaagcgcaaaaaacaaaccataaagcaaaaagcaaaaagacaaaaaaaaacaacagaacacaacacaacaaaaacgaacaaaccaaacaacagagagcacacacaacacggggaagacaaccgcacaaacaagacaacaccaaaaggggaaacacacagcgccgccccgcgcgaataacaaccaagcaaaaaaccgacgaaagaacgcagaaacatac

SEQ ID NO: 38857 - DNA, 1652 bp, Homo sapiens
  misc_feature (2)..(3): n is a, c, g, or t
tnngctagtagagccggtggttgaatcggccgagggcagcctgagggttgactggattggtgaggcccgtgtggctacttctgtggaagcagtgctgtagttactggaagataaaagggaaagcaagcccttggtgggggaaagtatggctgcgatgatggcatttcttaggacacctttggattaataatgaaaacaactactctctgagcagctgttcgaatcatctgatatttatactgaatgagttactgtaagtacgtattgacagaattacactgtactttcctctagggtgatctgtgaaaatggttcgctattcacttgacccggagaaccccacgaaatcatgcaaatcaagaggttccaatcttcgtgttcactttaagaacactcgtgaaactgctcaggccatcaagggtatgcatatacgaaaagccacgaagtatctgaaagatgtcactttacagaaacagtgtgtaccattccgacgttacaatggtggagttggcaggtgtgcgcaggccaagcaatggggctggacacaaggtcggtggcccaaaaagagtgctgaatttttgctgcacatgcttaaaaacgcagagagtaatgctgaacttaagggtttagatgtagattctctggtcattgagcatatccaagtgaacaaagcacctaagatgcgccgccggacctacagagctcatggtcggattaacccatacatgagctctccctgccacattgagatgatccttacggaaaaggaacagattgttcctaaaccagaagaggaggttgcccagaagaaaaagttgaggagctcaagcttgggaaaatggtgtgcattccttgtatcgtcattccagttctgctctggatctacaaaaaattcctggagccatatatataccctctggtttcccccttcgttagtcgtatatggcctaagaaagcaatacaagaatccaatgatacaaacaaaggcaaagtaaactttaagggtgcagacatgaatggattaccaacaaaaggaccaacagaaatctgtgataaaaagaaagactaaagaaattttcctaaaggaccccatcatttaaaaaatggacctgataatatgaagcatcttccttgtaattgtctctgacctttttatctgagaccggaattcaggataggagtctagatatttacctgatactaatcaggaaatatatgatatccgtatttaaaatgtagttagttatatttaatgacctcattcctaagttcctttttcgttaatgtagctttcatttctgttattgctgtttgaataatatgattaaatagaaggtttgtgccagtagacattatgttactaaatcagcactttaaaatctttggttctctaattcatatgaatttgctgtttgctctaatttctttgggctcttctaatttgagtggagtacaattttgttgtgaaacagtccagtgaaactgtgcagggaaatgaaggtagaattttgggaggtaataatgatgtgaaacataaagatttaataattactgtccaacacagtggagcagaaggtcgacgcagagcagaaggtcgacgcagagcagaaggtcgacgcagagcagaaggtcgacgcgagcagaagacgacg

SEQ ID NO: 38858 - DNA, 914 bp, Homo sapiens
  misc_feature (2)..(3): n is a, c, g, or t
tnngctagtagagccggtggttgaatcggccgagggcagcctgagggttgactggattggtgaggcccgtgtggctacttctgtggaagcagtgctgtagttactggaagataaaagggaaagcaagcccttggtgggggaaagtatggctgcgatgatggcatttcttaggacacctttggattaataatgaaaacaactactctctgagcagctgttcgaatcatctgatatttatactgaatgagttactgtaagtacgtattgacagaattacactgtactttcctctagggtgatctgtgaaaatggttcgctattcacttgacccggagaaccccacgaaatcatgcaaatcaagaggttccaatcttcgtgttcactttaagaacactcgtgaaactgctcaggccatcaagggtatgcatatacgaaaagccacgaagtatctgaaagatgtcactttacagaaacagtgtgtaccattccgacgttacaatggtggagttggcaggtgtgcgcaggccaagcaatggggctggacacaaggtcggtggcccaaaaagagtgctgaatttttgctgcacatgcttaaaaacgcagagagtaatgctgaacttaagggtttagatgtagattctctggtcattgagcatatccaagtgaacaaagcacctaagatgcgccgccggacctacagagctcatggtcggattaacccatacatgagctctccctgccacattgagatgatccttacggaaaaggaacagattgttcctaaaccagaagaggaggttgcccagaagaaaaagatatcccagaagaaactgaagaaacaaaaacttatggcacgggagtaaattcagcattaaaataaatgtaattaaataaaaggaaaaaaaaaatggatg

SEQ ID NO: 38859 - DNA, 1069 bp, Homo sapiens
  misc_feature (2)..(3): n is a, c, g, or t
tnngctagtagagccggtggttgaatcggccgagggcagcctgagggttgactggattggtgaggcccgtgtggctacttctgtggaagcagtgctgtagttactggaagataaaagggaaagcaagcccttggtgggggaaagtatggctgcgatgatggcatttcttaggacacctttggattaataatgaaaacaactactctctgagcagctgttcgaatcatctgatatttatactgaatgagttactgtaagtacgtattgacagaattacactgtactttcctctagggtgatctgtgaaaatggttcgctattcacttgacccggagaaccccacgaaatcatgcaaatcaagaggttccaatcttcgtgttcactttaagaacactcgtgaaactgctcaggccatcaagggtatgcatatacgaaaagccacgaagtatctgaaagatgtcactttacagaaacagtgtgtaccattccgacgttacaatggtggagttggcaggtgtgcgcaggccaagcaatggggctggacacaaggtcggtggcccaaaaagagtgctgaatttttgctgcacatgcttaaaaacgcagagagtaatgctgaacttaagggtttagatgtagattctctggtcattgagcatatccaagtgaacaaagcacctaagatgcgccgccggacctacagagctcatggtcggattaacccatacatgagctctccctgccacattgagatgatccttacggaaaaggaacagattgttcctaaaccagaagaggaggttgcccagaagaaaaagatatcccagaagaaactgaagaaacaaaaacttatggcacgggagtaaattcagcattaaaataaatgtaattaaagcctatcatatagtaaaacccagccatgaccctaacagggccctctcagacctcctaatgactccggctagcatgtgatttcacttccatccataagctctcaaattaggctaataacaaagataacattacatgatggcgatgtaccgaaaagatccaggcccacccgtcaaggtcg

SEQ ID NO: 38860 - DNA, 1015 bp, Homo sapiens
  misc_feature (2)..(3): n is a, c, g, or t
tnngctagtagagccggtggttgaatcggccgagggcagcctgagggttgactggattggtgaggcccgtgtggctacttctgtggaagcagtgctgtagttactggaagataaaagggaaagcaagcccttggtgggggaaagtatggctgcgatgatggcatttcttaggacacctttggattaataatgaaaacaactactctctgagcagctgttcgaatcatctgatatttatactgaatgagttactgtaagtacgtattgacagaattacactgtactttcctctagggtgatctgtgaaaatggttcgctattcacttgacccggagaaccccacgaaatcatgcaaatcaagaggttccaatcttcgtgttcactttaagaacactcgtgaaactgctcaggccatcaagggtatgcatatacgaaaagccacgaagtatctgaaagatgtcactttacagaaacagtgtgtaccattccgacgttacaatggtggagttggcaggtgtgcgcaggccaagcaatggggctggacacaaggtcggtggcccaaaaagagtgctgaatttttgctgcacatgcttaaaaacgcagagagtaatgctgaacttaagggtttagatgtagattctctggtcattgagcatatccaagtgaacaaagcacctaagatgcgccgccggacctacagagctcatggtcggattaacccatacatgagctctccctgccacattgagatgatccttacggaaaaggaacagattgttcctaaaccagaagaggaggttgcccagaagaaaaagatatcccagaagaaactgaagaaacaaaaacttatggcacgggagtaaattcagcattaaaataaatgtaattaaaccaggacacacaacaaaaaaaaaaatcgggggacctttcggggggacacacgagttaggccgggctagttccggcccccttttgtgcacagggaatgcggcccaaagggggtattgaacgcggc

SEQ ID NO: 38861 - DNA, 1686 bp, Homo sapiens
  misc_feature (2)..(3): n is a, c, g, or t
tnngctagtagagccggtggttgaatcggccgagggcagcctgagggttgactggattggtgaggcccgtgtggctacttctgtggaagcagtgctgtagttactggaagataaaagggaaagcaagcccttggtgggggaaagtatggctgcgatgatggcatttcttaggacacctttggattaataatgaaaacaactactctctgagcagctgttcgaatcatctgatatttatactgaatgagttactgtaagtacgtattgacagaattacactgtactttcctctagggtgatctgtgaaaatggttcgctattcacttgacccggagaaccccacgaaatcatgcaaatcaagaggttccaatcttcgtgttcactttaagaacactcgtgaaactgctcaggccatcaagggtatgcatatacgaaaagccacgaagtatctgaaagatgtcactttacagaaacagtgtgtaccattccgacgttacaatggtggagttggcaggtgtgcgcaggccaagcaatggggctggacacaaggtcggtggcccaaaaagagtgctgaatttttgctgcacatgcttaaaaacgcagagagtaatgctgaacttaagggtttagatgtagattctctggtcattgagcatatccaagtgaacaaagcacctaagatgcgccgccggacctacagagctcatggtcggattaacccatacatgagctctccctgccacattgagatgatccttacggaaaaggaacagattgttcctaaaccagaagaggaggttgcccagaagaaaaagggtaaataagtagttgctcggttttgtttgtgatagtagaaagatttgtggttgctgtgatgactatcttaggacacctttggaataactatgaaagaaaactattctgagcaacccttttcacctgtcttattttggcttttgtaagtttgtttcttgactaataataaatggtaagttttctgtaatcccagcactttgggaggctgaggtgggtggatcacaaggtcaggagatcgagaccatcctggctaacacagtgaaaccccgtctctactaaaaatgcaaaaaaaaattagctgggcgtggtggcgggtatctgtagtcccagctactcaggaggctgaggcaggagaatggcatgaacccgggaggaggaactaggagtgagccgagatcgcgccactgcactccagcctgggtgacagagcgagacgctgtctcaaaaaaaaaaaaaactggtagttttatattcagtacctcaggcccgtatgattatctgctgatggccccacttagatgtacatagccacttcaaaatgggccctctccccaaatctaagaagcttgttttcagtaattgatcacatttagttcttttaagtcaagaacctgagtgattctgtacacttctttttacatctaatgaacttaagttctgttgatttctaccatttaagtatttttcccccttagtccttaacgactaggtttcctgcctccagaataagctgaagtcctccaagatgtactgtggttttctctaagaaacttaacacatttttctttccccagatatcccagaagaaactgaagaaacaaaaacttatggcacgggagtaaattcagcattaaaataaatgtaattaaa

SEQ ID NO: 38862 - DNA, 1632 bp, Homo sapiens
  misc_feature (2)..(3): n is a, c, g, or t
tnngctagtagagccggtggttgaatcggccgagggcagcctgagggttgactggattggtgaggcccgtgtggctacttctgtggaagcagtgctgtagttactggaagataaaagggaaagcaagcccttggtgggggaaagtatggctgcgatgatggcatttcttaggacacctttggattaataatgaaaacaactactctctgagcagctgttcgaatcatctgatatttatactgaatgagttactgtaagtacgtattgacagaattacactgtactttcctctagggtgatctgtgaaaatggttcgctattcacttgacccggagaaccccacgaaatcatgcaaatcaagaggttccaatcttcgtgttcactttaagaacactcgtgaaactgctcaggccatcaagggtatgcatatacgaaaagccacgaagtatctgaaagatgtcactttacagaaacagtgtgtaccattccgacgttacaatggtggagttggcaggtgtgcgcaggccaagcaatggggctggacacaaggtcggtggcccaaaaagagtgctgaatttttgctgcacatgcttaaaaacgcagagagtaatgctgaacttaagggtttagatgtagattctctggtcattgagcatatccaagtgaacaaagcacctaagatgcgccgccggacctacagagctcatggtcggattaacccatacatgagctctccctgccacattgagatgatccttacggaaaaggaacagattgttcctaaaccagaagaggaggttgcccagaagaaaaagggtaaataagtagttgctcggttttgtttgtgatagtagaaagatttgtggttgctgtgatgactatcttaggacacctttggaataactatgaaagaaaactattctgagcaacccttttcacctgtcttattttggcttttgtaagtttgtttcttgactaataataaatggtaagttttctgtaatcccagcactttgggaggctgaggtgggtggatcacaaggtcaggagatcgagaccatcctggctaacacagtgaaaccccgtctctactaaaaatgcaaaaaaaaattagctgggcgtggtggcgggtatctgtagtcccagctactcaggaggctgaggcaggagaatggcatgaacccgggaggaggaactaggagtgagccgagatcgcgccactgcactccagcctgggtgacagagcgagacgctgtctcaaaaaaaaaagccccacttagatgtacatagccacttcaaaatgggccctctccccaaatctaagaagcttgttttcagtaattgatcacatttagttcttttaagtcaagaacctgagtgattctgtacacttctttttacatctaatgaacttaagttctgttgatttctaccatttaagtatttttcccccttagtccttaacgactaggtttcctgcctccagaataagctgaagtcctccaagatgtactgtggttttctctaagaaacttaacacatttttctttccccagatatcccagaagaaactgaagaaacaaaaacttatggcacgggagtaaattcagcattaaaataaatgtaattaaa

SEQ ID NO: 38863 - DNA, 1275 bp, Homo sapiens
  misc_feature (2)..(3): n is a, c, g, or t
tnngctagtagagccggtggttgaatcggccgagggcagcctgagggttgactggattggtgaggcccgtgtggctacttctgtggaagcagtgctgtagttactggaagataaaagggaaagcaagcccttggtgggggaaagtatggctgcgatgatggcatttcttaggacacctttggattaataatgaaaacaactactctctgagcagctgttcgaatcatctgatatttatactgaatgagttactgtaagtacgtattgacagaattacactgtactttcctctagggtgatctgtgaaaatggttcgctattcacttgacccggagaaccccacgaaatcatgcaaatcaagaggttccaatcttcgtgttcactttaagaacactcgtgaaactgctcaggccatcaagggtatgcatatacgaaaagccacgaagtatctgaaagatgtcactttacagaaacagtgtgtaccattccgacgttacaatggtggagttggcaggtgtgcgcaggccaagcaatggggctggacacaaggtcggtggcccaaaaagagtgctgaatttttgctgcacatgcttaaaaacgcagagagtaatgctgaacttaagggtttagatgtagattctctggtcattgagcatatccaagtgaacaaagcacctaagatgcgccgccggacctacagagctcatggtcggattaacccatacatgagctctccctgccacattgagatgatccttacggaaaaggaacagattgttcctaaaccagaagaggaggttgcccagaagaaaaagttgaggagctcaagcttgggaaaatggtgtgcattccttgtatcgtcattccagttctgctctggatctacaaaaaattcctggagccatatatataccctctggtttcccccttcgttagtcgtatatggcctaagaaagcaatacaagaatccaatgatacaaacaaaggcaaagtaaactttaagggtgcagacatgaatggattaccaacaaaaggaccaacagaaatctgtgataaaaagaaagactaaagaaattttcctaaaggaccccatcatttaaaaaatggacctgataatatgaagcatcttccaggatggtgttactgcagttgaaagggcaatctgaagttactttcttaatgtgacctagcaataggcatagctacgtggcactatattctggccagactcgatgtgtactctaacttaagaaataaatcagtaaggcagaacaa

SEQ ID NO: 38864 - DNA, 1990 bp, Homo sapiens
  misc_feature (2)..(3): n is a, c, g, or t
tnngctagtagagccggtggttgaatcggccgagggcagcctgagggttgactggattggtgaggcccgtgtggctacttctgtggaagcagtgctgtagttactggaagataaaagggaaagcaagcccttggtgggggaaagtatggctgcgatgatggcatttcttaggacacctttggattaataatgaaaacaactactctctgagcagctgttcgaatcatctgatatttatactgaatgagttactgtaagtacgtattgacagaattacactgtactttcctctagggtgatctgtgaaaatggttcgctattcacttgacccggagaaccccacgaaatcatgcaaatcaagaggttccaatcttcgtgttcactttaagaacactcgtgaaactgctcaggccatcaagggtatgcatatacgaaaagccacgaagtatctgaaagatgtcactttacagaaacagtgtgtaccattccgacgttacaatggtggagttggcaggtgtgcgcaggtgagaattcttagttgccatttgaaaagacagattttaatggaaaagtgatgggataggataagaatggctaagatctgtgctgatgaacctatttctggttgctgtaatgacaggacaccttggattgatggtgaaataaaccatatcctaagaaaccgtgatatcagataaattcatcttggctgtaatgttaatttaaatcaaggaaaatgactcatcatctccattttctttcaggccaagcaatggggctggacacaaggtcggtggcccaaaaagagtgctgaatttttgctgcacatgcttaaaaacgcagagagtaatgctgaacttaagggtttagatgtagattctctggtcattgagcatatccaagtgaacaaagcacctaagatgcgccgccggacctacagagctcatggtcggattaacccatacatgagctctccctgccacattgagatgatccttacggaaaaggaacagattgttcctaaaccagaagaggaggttgcccagaagaaaaagttgaggagctcaagcttgggaaaatggtgtgcattccttgtatcgtcattccagttctgctctggatctacaaaaaattcctggagccatatatataccctctggtttcccccttcgttagtcgtatatggcctaagaaagcaatacaagaatccaatgatacaaacaaaggcaaagtaaactttaagggtgcagacatgaatggattaccaacaaaaggaccaacagaaatctgtgataaaaagaaagactaaagaaattttcctaaaggaccccatcatttaaaaaatggacctgataatatgaagcatcttccttgtaattgtctctgacctttttatctgagaccggaattcaggataggagtctagatatttacctgatactaatcaggaaatatatgatatccgtatttaaaatgtagttagttatatttaatgacctcattcctaagttcctttttcgttaatgtagctttcatttctgttattgctgtttgaataatatgattaaatagaaggtttgtgccagtagacattatgttactaaatcagcactttaaaatctttggttctctaattcatatgaatttgctgtttgctctaatttctttgggctcttctaatttgagtggagtacaattttgttgtgaaacagtccagtgaaactgtgcagggaaatgaaggtagaattttgggaggtaataatgatgtgaaacataaagatttaataattactgtccaacacagtggagcagcttgtccacaaatatagtaattactatttattgctctaaggaagattaaaaaaagatagggaaaagggggaaacttctttgaaaaatgaaacatctgttacattaatgtctaattataaaattttaatccttactgcatttcttctgttcctacaaatgtattaaacattcagtttaa

SEQ ID NO: 38865 - DNA, 848 bp, Homo sapiens
  misc_feature (2)..(3): n is a, c, g, or t
tnngctagtagagccggtggttgaatcggccgagggcagcctgagggttgactggattggtgaggcccgtgtggctacttctgtggaagcagtgctgtagttactggaagataaaagggaaagcaagcccttggtgggggaaagtatggctgcgatgatggcatttcttaggacacctttggattaataatgaaaacaactactctctgagcagctgttcgaatcatctgatatttatactgaatgagttactgtaagtacgtattgacagaattacactgtactttcctctagggtgatctgtgaaaatggttcgctattcacttgacccggagaaccccacgaaatcatgcaaatcaagaggttccaatcttcgtgttcactttaagaacactcgtgaaactgctcaggccatcaagggtatgcatatacgaaaagccacgaagtatctgaaagatgtcactttacagaaacagtgtgtaccattccgacgttacaatggtggagttggcaggtgtgcgcaggccaagcaatggggctggacacaaggtcggtggcccaaaaagagtgctgaatttttgctgcacatgcttaaaaacgcagagagtaatgctgaacttaagggtttagatgtagattctctggtcattgagcatatccaagtgaacaaagcacctaagatgcgccgccggacctacagagctcatggtcggattaacccatacatgagctctccctgccacattgagatgatccttacggaaaaggaacagattgttcctaaaccagaagaggaggttgcccagaagaaaaagatatcccagataccaccgggaaacaaacgcttt

SEQ ID NO: 38866 - DNA, 1572 bp, Homo sapiens
  misc_feature (2)..(3): n is a, c, g, or t
tnngctagtagagccggtggttgaatcggccgagggcagcctgagggttgactggattggtgaggcccgtgtggctacttctgtggaagcagtgctgtagttactggaagataaaaggtgatctgtgaaaatggttcgctattcacttgacccggagaaccccacgaaatcatgcaaatcaagaggttccaatcttcgtgttcactttaagaacactcgtgaaactgctcaggccatcaagggtatgcatatacgaaaagccacgaagtatctgaaagatgtcactttacagaaacagtgtgtaccattccgacgttacaatggtggagttggcaggtgtgcgcaggccaagcaatggggctggacacaaggtcggtggcccaaaaagagtgctgaatttttgctgcacatgcttaaaaacgcagagagtaatgctgaacttaagggtttagatgtagattctctggtcattgagcatatccaagtgaacaaagcacctaagatgcgccgccggacctacagagctcatggtcggattaacccatacatgagctctccctgccacattgagatgatccttacggaaaaggaacagattgttcctaaaccagaagaggaggttgcccagaagaaaaagttgaggagctcaagcttgggaaaatggtgtgcattccttgtatcgtcattccagttctgctctggatctacaaaaaattcctggagccatatatataccctctggtttcccccttcgttagtcgtatatggcctaagaaagcaatacaagaatccaatgatacaaacaaaggcaaagtaaactttaagggtgcagacatgaatggattaccaacaaaaggaccaacagaaatctgtgataaaaagaaagactaaagaaattttcctaaaggaccccatcatttaaaaaatggacctgataatatgaagcatcttccttgtaattgtctctgacctttttatctgagaccggaattcaggataggagtctagatatttacctgatactaatcaggaaatatatgatatccgtatttaaaatgtagttagttatatttaatgacctcattcctaagttcctttttcgttaatgtagctttcatttctgttattgctgtttgaataatatgattaaatagaaggtttgtgccagtagacattatgttactaaatcagcactttaaaatctttggttctctaattcatatgaatttgctgtttgctctaatttctttgggctcttctaatttgagtggagtacaattttgttgtgaaacagtccagtgaaactgtgcagggaaatgaaggtagaattttgggaggtaataatgatgtgaaacataaagatttaataattactgtccaacacagtggagcagcttgtccacaaatatagtaattactatttattgctctaaggaagattaaaaaaagatagggaaaagggggaaacttctttgaaaaatgaaacatctgttacattaatgtctaattataaaattttaatccttactgcatttcttctgttcctacaaatgtattaaacattcagtttaa

SEQ ID NO: 38867 - DNA, 1918 bp, Homo sapiens
  misc_feature (2)..(3): n is a, c, g, or t
tnngctagtagagccggtggttgaatcggccgagggcagcctgagtgtttctcctgcgttgctccgagggcccaatcctcctgccatcgccgccatcctggcttcgggggcgccggcctccaggcccccgggaggagaactcctagggctactaaatcctcgctggaggcggtggcttcttatgcgggaggacgtggcggagggcctgactttgggagccggggtgatctgtgaaaatggttcgctattcacttgacccggagaaccccacgaaatcatgcaaatcaagaggttccaatcttcgtgttcactttaagaacactcgtgaaactgctcaggccatcaagggtatgcatatacgaaaagccacgaagtatctgaaagatgtcactttacagaaacagtgtgtaccattccgacgttacaatggtggagttggcaggtgtgcgcaggtgagaattcttagttgccatttgaaaagacagattttaatggaaaagtgatgggataggataagaatggctaagatctgtgctgatgaacctatttctggttgctgtaatgacaggacaccttggattgatggtgaaataaaccatatcctaagaaaccgtgatatcagataaattcatcttggctgtaatgttaatttaaatcaaggaaaatgactcatcatctccattttctttcaggccaagcaatggggctggacacaaggtcggtggcccaaaaagagtgctgaatttttgctgcacatgcttaaaaacgcagagagtaatgctgaacttaagggtttagatgtagattctctggtcattgagcatatccaagtgaacaaagcacctaagatgcgccgccggacctacagagctcatggtcggattaacccatacatgagctctccctgccacattgagatgatccttacggaaaaggaacagattgttcctaaaccagaagaggaggttgcccagaagaaaaagttgaggagctcaagcttgggaaaatggtgtgcattccttgtatcgtcattccagttctgctctggatctacaaaaaattcctggagccatatatataccctctggtttcccccttcgttagtcgtatatggcctaagaaagcaatacaagaatccaatgatacaaacaaaggcaaagtaaactttaagggtgcagacatgaatggattaccaacaaaaggaccaacagaaatctgtgataaaaagaaagactaaagaaattttcctaaaggaccccatcatttaaaaaatggacctgataatatgaagcatcttccttgtaattgtctctgacctttttatctgagaccggaattcaggataggagtctagatatttacctgatactaatcaggaaatatatgatatccgtatttaaaatgtagttagttatatttaatgacctcattcctaagttcctttttcgttaatgtagctttcatttctgttattgctgtttgaataatatgattaaatagaaggtttgtgccagtagacattatgttactaaatcagcactttaaaatctttggttctctaattcatatgaatttgctgtttgctctaatttctttgggctcttctaatttgagtggagtacaattttgttgtgaaacagtccagtgaaactgtgcagggaaatgaaggtagaattttgggaggtaataatgatgtgaaacataaagatttaataattactgtccaacacagtggagcagcttgtccacaaatatagtaattactatttattgctctaaggaagattaaaaaaagatagggaaaagggggaaacttctttgaaaaatgaaacatctgttacattaatgtctaattataaaattttaatccttactgcatttcttctgttcctacaaatgtattaaacattcagtttaa

SEQ ID NO: 38868 - DNA, 1803 bp, Homo sapiens
  misc_feature (2)..(3): n is a, c, g, or t
tnngctagtagagccggtggttgaatcggccgagggcagcctgagggttgactggattggtgaggcccgtgtggctacttctgtggaagcagtgctgtagttactggaagataaaagggaaagcaagcccttggtgggggaaagtatggctgcgatgatggcatttcttaggacacctttggattaataatgaaaacaactactctctgagcagctgttcgaatcatctgatatttatactgaatgagttactgtaagtacgtattgacagaattacactgtactttcctctagggtgatctgtgaaaatggttcgctattcacttgacccggagaaccccacgaaatcatgcaaatcaagaggttccaatcttcgtgttcactttaaggtatgcgattcatagttgtgatccaacagttcctcatgttccactcaaaaaagaacactcgtgaaactgctcaggccatcaagggtatgcatatacgaaaagccacgaagtatctgaaagatgtcactttacagaaacagtgtgtaccattccgacgttacaatggtggagttggcaggtgtgcgcaggccaagcaatggggctggacacaaggtcggtggcccaaaaagagtgctgaatttttgctgcacatgcttaaaaacgcagagagtaatgctgaacttaagggtttagatgtagattctctggtcattgagcatatccaagtgaacaaagcacctaagatgcgccgccggacctacagagctcatggtcggattaacccatacatgagctctccctgccacattgagatgatccttacggaaaaggaacagattgttcctaaaccagaagaggaggttgcccagaagaaaaagttgaggagctcaagcttgggaaaatggtgtgcattccttgtatcgtcattccagttctgctctggatctacaaaaaattcctggagccatatatataccctctggtttcccccttcgttagtcgtatatggcctaagaaagcaatacaagaatccaatgatacaaacaaaggcaaagtaaactttaagggtgcagacatgaatggattaccaacaaaaggaccaacagaaatctgtgataaaaagaaagactaaagaaattttcctaaaggaccccatcatttaaaaaatggacctgataatatgaagcatcttccttgtaattgtctctgacctttttatctgagaccggaattcaggataggagtctagatatttacctgatactaatcaggaaatatatgatatccgtatttaaaatgtagttagttatatttaatgacctcattcctaagttcctttttcgttaatgtagctttcatttctgttattgctgtttgaataatatgattaaatagaaggtttgtgccagtagacattatgttactaaatcagcactttaaaatctttggttctctaattcatatgaatttgctgtttgctctaatttctttgggctcttctaatttgagtggagtacaattttgttgtgaaacagtccagtgaaactgtgcagggaaatgaaggtagaattttgggaggtaataatgatgtgaaacataaagatttaataattactgtccaacacagtggagcagcttgtccacaaatatagtaattactatttattgctctaaggaagattaaaaaaagatagggaaaagggggaaacttctttgaaaaatgaaacatctgttacattaatgtctaattataaaattttaatccttactgcatttcttctgttcctacaaatgtattaaacattcagtttaa

SEQ ID NO: 38869 - DNA, 742 bp, Homo sapiens
  misc_feature (2)..(3): n is a, c, g, or t
tnngctagtagagccggtggttgaatcggccgagggcagcctgagggttgactggattggtgaggcccgtgtggctacttctgtggaagcagtgctgtagttactggaagataaaagggaaagcaagcccttggtgggggaaagtagtgatctgtgaaaatggttcgctattcacttgacccggagaaccccacgaaatcatgcaaatcaagaggttccaatcttcgtgttcactttaagaacactcgtgaaactgctcaggccatcaagggtatgcatatacgaaaagccacgaagtatctgaaagatgtcactttacagaaacagtgtgtaccattccgacgttacaatggtggagttggcaggtgtgcgcaggccaagcaatggggctggacacaaggtcggtggcccaaaaagagtgctgaatttttgctgcacatgcttaaaaacgcagagagtaatgctgaacttaagggtttagatgtagattctctggtcattgagcatatccaagtgaacaaagcacctaagatgcgccgccggacctacagagctcatggtcggattaacccatacatgagctctccctgccacattgagatgatccttacggaaaaggaacagattgttcctaaaccagaagaggaggttgcccagaagaaaaagatatcccagaagaaactgaagaaacaaaaacttatggcacgggagtaaattcagcattaaaataaatgtaattaaa

SEQ ID NO: 38870 - DNA, 1637 bp, Homo sapiens
  misc_feature (2)..(3): n is a, c, g, or t
tnngctagtagagccggtggttgaatcggccgagggcagcctgagtgtttctcctgcgttgctccgagggcccaatcctcctgccatcgccgccatcctggcttcgggggcgccggcctccaggcccccgggaggagaactcctagggctactaaatcctcgctggaggcggtggcttcttatgcgggaggacgtggcggagggcctgactttgggagccggggtgatctgtgaaaatggttcgctattcacttgacccggagaaccccacgaaatcatgcaaatcaagaggttccaatcttcgtgttcactttaagaacactcgtgaaactgctcaggccatcaagggtatgcatatacgaaaagccacgaagtatctgaaagatgtcactttacagaaacagtgtgtaccattccgacgttacaatggtggagttggcaggtgtgcgcaggccaagcaatggggctggacacaaggtcggtggcccaaaaagagtgctgaatttttgctgcacatgcttaaaaacgcagagagtaatgctgaacttaagggtttagatgtagattctctggtcattgagcatatccaagtgaacaaagcacctaagatgcgccgccggacctacagagctcatggtcggattaacccatacatgagctctccctgccacattgagatgatccttacggaaaaggaacagattgttcctaaaccagaagaggaggttgcccagaagaaaaagggtaaataagtagttgctcggttttgtttgtgatagtagaaagatttgtggttgctgtgatgactatcttaggacacctttggaataactatgaaagaaaactattctgagcaacccttttcacctgtcttattttggcttttgtaagtttgtttcttgactaataataaatggtaagttttctgtaatcccagcactttgggaggctgaggtgggtggatcacaaggtcaggagatcgagaccatcctggctaacacagtgaaaccccgtctctactaaaaatgcaaaaaaaaattagctgggcgtggtggcgggtatctgtagtcccagctactcaggaggctgaggcaggagaatggcatgaacccgggaggaggaactaggagtgagccgagatcgcgccactgcactccagcctgggtgacagagcgagacgctgtctcaaaaaaaaaaaaaactggtagttttatattcagtacctcaggcccgtatgattatctgctgatggccccacttagatgtacatagccacttcaaaatgggccctctccccaaatctaagaagcttgttttcagtaattgatcacatttagttcttttaagtcaagaacctgagtgattctgtacacttctttttacatctaatgaacttaagttctgttgatttctaccatttaagtatttttcccccttagtccttaacgactaggtttcctgcctccagaataagctgaagtcctccaagatgtactgtggttttctctaagaaacttaacacatttttctttccccagatatcccagaagaaactgaagaaacaaaaacttatggcacgggagtaaattcagcattaaaataaatgtaattaaataaaaggaaaaaaaaaatggatg

SEQ ID NO: 38871 - DNA, 669 bp, Homo sapiens
  misc_feature (2)..(3): n is a, c, g, or t
  misc_feature (608)..(608): n is a, c, g, or t
  misc_feature (615)..(615): n is a, c, g, or t
tnngctagtagagccggtggttgaatcggccgagggcagcctgagggttgactggattggtgaggcccgtgtggctacttctgtggaagcagtgctgtagttactggaagataaaagggaaagcaagcccttggtgggggaaagtatggctgcgatgatggcatttcttaggacacctttggattaataatgaaaacaactactctctgagcagctgttcgaatcatctgatatttatactgaatgagttactgtaagtacgtattgacagaattacactgtactttcctctagggtgatctgtgaaaatggttcgctattcacttgacccggagaaccccacgaaatcatgcaaatcaagaggttccaatcttcgtgttcactttaagaacactcgtgaaactgctcaggccatcaagggtatgcatatacgaaaagccacgaagtatctgaaagatgtcactttacagaaacagtgtgtaccattccgacgttacaatggtggagttggcaggtgtgcgcaggccaagcaatggggctggacacaaggtcggtggcccaaaaagagtgctgaatttttgctgcacatgcttaaaccgagaggtatnctgactnaggttgagtgagtcctcggcatagcatcccagtaccaagccctagtcgccccga

SEQ ID NO: 38872 - DNA, 866 bp, Homo sapiens
  misc_feature (2)..(3): n is a, c, g, or t
tnngctagtagagccggtggttgaatcggccgagggcagcctgagggttgactggattggtgaggcccgtgtggctacttctgtggaagcagtgctgtagttactggaagataaaagggaaagcaagcccttggtgggggaaagtagtgatctgtgaaaatggttcgctattcacttgacccggagaaccccacgaaatcatgcaaatcaagaggttccaatcttcgtgttcactttaagaacactcgtgaaactgctcaggccatcaagggtatgcatatacgaaaagccacgaagtatctgaaagatgtcactttacagaaacagtgtgtaccattccgacgttacaatggtggagttggcaggtgtgcgcaggccaagcaatggggctggacacaaggtcggtggcccaaaaagagtgctgaatttttgctgcacatgcttaaaaacgcagagagtaatgctgaacttaagggtttagatgtagattctctggtcattgagcatatccaagtgaacaaagcacctaagatgcgccgccggacctacagagctcatggtcggattaacccatacatgagctctccctgccacattgagatgatccttacggaaaaggaacagattgttcctaaaccagaagaggaggttgcccagaagaaaaagatatcccagaagaaactgaagaaacaaaaacttatggcacgggagtaaattcagcattaaaataaatgtaattaaaccaggacacacaacaaaaaaaaaaatcgggggacctttcggggggacacacgagttaggccgggctagttccggcccccttttgtgcacagggaatgcggcccaaagggggtattgaacgcggc
